United States Patent Application Publication US 2006/0048240 A1 - sequence listing, part 8

SEQ ID NO: 28497 - protein, 526 aa, Arabidopsis thaliana
  misc_feature (1)..(526): Ceres Seq. ID no. 2997410
MLGMSITSFGWGMNLIVFLIEEFHIKNIAAAQISNVVNGVVNMLPVVAAILADSFFGNIPVISTSTFISLAGTSLLTLITSLNYLMPRPCETGSILCQSPSKLQLGILYVALALVIIGSAGTRFTLAAAGANQYKKPKEQGRFFNWFFLALYIGAITGTTAIVYTQDNASWKLGFGLCAVANLISFIVFIAGVRFYKHDKPLGSPYTSLIRVLVAATMKRKAVISSKDEDYHQYGLGKEAKTYTTMPSKSFRFLNRAALKNKEDLNTSGDSSNNMWRLCSVQEVEDFKAILRLVPLWAAVMFLSTPVAVQMSMTVLQALVMDRKLSPHFEVSAGSLQVIVLVFGCVFIMLNNWIIYPMYQKLIGKPLTPLQQVGIGHVFTILSMAISAVVEAKRLKTVENGGHPMSVLWLVPALVMVGIGEAFHFPANVAVFYGEFPESLKNTATSLTSVVIGISFYLSTAVIDVIQRTTSWLPNDINHGRVDNVYWVVVIGGVLNLGYFLVCSWFYKYRNLKDDDHEQDPKDVKT

SEQ ID NO: 28498 - protein, 523 aa, Arabidopsis thaliana
  misc_feature (1)..(523): Ceres Seq. ID no. 2997411
MSITSFGWGMNLIVFLIEEFHIKNIAAAQISNVVNGVVNMLPVVAAILADSFFGNIPVISTSTFISLAGTSLLTLITSLNYLMPRPCETGSILCQSPSKLQLGILYVALALVIIGSAGTRFTLAAAGANQYKKPKEQGRFFNWFFLALYIGAITGTTAIVYTQDNASWKLGFGLCAVANLISFIVFIAGVRFYKHDKPLGSPYTSLIRVLVAATMKRKAVISSKDEDYHQYGLGKEAKTYTTMPSKSFRFLNRAALKNKEDLNTSGDSSNNMWRLCSVQEVEDFKAILRLVPLWAAVMFLSTPVAVQMSMTVLQALVMDRKLSPHFEVSAGSLQVIVLVFGCVFIMLNNWIIYPMYQKLIGKPLTPLQQVGIGHVFTILSMAISAVVEAKRLKTVENGGHPMSVLWLVPALVMVGIGEAFHFPANVAVFYGEFPESLKNTATSLTSVVIGISFYLSTAVIDVIQRTTSWLPNDINHGRVDNVYWVVVIGGVLNLGYFLVCSWFYKYRNLKDDDHEQDPKDVKT

SEQ ID NO: 28499 - DNA, 759 bp, Arabidopsis thaliana
  misc_feature (1)..(759): Ceres Seq. ID no. 2997535
atggcttcctcatctctcaaatgtttttcttttatcgttgttcttacaactttctttgcaatctcattgaagccatgttattgccacaataaaacccactggaacaccgccggcatcacgtggtatggcgaccgagaaggtcctggcaccacaggaggagcttgtggatatggtgatgcagtggcaaaacacccgtacagatgtatggtttcagccggaggaccttcattgttcaaagacggaaagggttgtggggcttgttacaggcttaaatgcgaccatccgttgtgcacgaaaaagccgatcaaggtgatgatatcggatgagtgtcccggctgcacgaaggagtctgtccattttgatcttagcggtaaggcctttggtgcattggccaaacgtggcaagggagatcaactacgcaaccttggagaactaaaaactatgatcgctatccatgtcgacgccggagcaaatccttactacatgtcattcgcggttaagtttgcaaacggtgatgggaacttcgcctgcattgaggtccaaccggccggaggacagtatatgaaaatggaggaaatgagatccgctgtttggagactaagccctggtgttcctttgaaaggtccgttcaacatcaggcttacctccgccgtgtccggtaagaagatcattgcgaaaggcgttatcccggaaaagtggagtcctggtgctatttaccattctaaggttaacttccccgttcaaaggaagcagaaatga

SEQ ID NO: 28500 - protein, 252 aa, Arabidopsis thaliana
  misc_feature (1)..(252): Ceres Seq. ID no. 2997536
MASSSLKCFSFIVVLTTFFAISLKPCYCHNKTHWNTAGITWYGDREGPGTTGGACGYGDAVAKHPYRCMVSAGGPSLFKDGKGCGACYRLKCDHPLCTKKPIKVMISDECPGCTKESVHFDLSGKAFGALAKRGKGDQLRNLGELKTMIAIHVDAGANPYYMSFAVKFANGDGNFACIEVQPAGGQYMKMEEMRSAVWRLSPGVPLKGPFNIRLTSAVSGKKIIAKGVIPEKWSPGAIYHSKVNFPVQRKQK

SEQ ID NO: 28501 - protein, 184 aa, Arabidopsis thaliana
  misc_feature (1)..(184): Ceres Seq. ID no. 2997537
MVSAGGPSLFKDGKGCGACYRLKCDHPLCTKKPIKVMISDECPGCTKESVHFDLSGKAFGALAKRGKGDQLRNLGELKTMIAIHVDAGANPYYMSFAVKFANGDGNFACIEVQPAGGQYMKMEEMRSAVWRLSPGVPLKGPFNIRLTSAVSGKKIIAKGVIPEKWSPGAIYHSKVNFPVQRKQK

SEQ ID NO: 28502 - protein, 148 aa, Arabidopsis thaliana
  misc_feature (1)..(148): Ceres Seq. ID no. 2997538
MISDECPGCTKESVHFDLSGKAFGALAKRGKGDQLRNLGELKTMIAIHVDAGANPYYMSFAVKFANGDGNFACIEVQPAGGQYMKMEEMRSAVWRLSPGVPLKGPFNIRLTSAVSGKKIIAKGVIPEKWSPGAIYHSKVNFPVQRKQK

SEQ ID NO: 28503 - DNA, 2826 bp, Arabidopsis thaliana
  misc_feature (1)..(2826): Ceres Seq. ID no. 2997821
atggagtcacgaatggatcagtacgagcttatggaacagatcgggagaggagcgtttggtgctgctattttagttcatcataaagctgagagaaagaagtatgttttgaagaagatcagattagctagacaaacggaacgttgccggagatctgctcatcaagagatgtctttgattgcaagagttcaacatccttatattgtggagtttaaagaagcttgggttgagaaaggttgctatgtttgtattgtcactggatactgtgaaggaggagacatggctgagttgatgaaaaagtcaaatggtgtttattttcctgaggagaaactttgcaagtggtttactcaattattattagctgttgagtatctgcattctaactatgttctacatcgggatctaaagtgttccaacattttccttacaaaagatcaagatgttcgccttggggactttggtcttgccaaaactttgaaggcggatgacctaacttcctcggttgttggaactccaaactacatgtgcccggaactgcttgctgatatcccttatggttttaagtcagatatctggtccttaggctgttgtatatatgagatggctgcgtatcgacctgctttcaaagcttttgatatggcagggcttataagcaagaaaagcactcatcaagggaatgttaaggaagaaccccgagtatcggccaaacgtatggcctccgagattttgaagcatccttatctgcagccatatgttgagcagtaccgtccaacgctttctgcggcgtctataactccagaaaagcctctcaattctcgcgagggtcggaggagtatggctgaaagtcagaatagcaatagttcaagtgaaaaagataacttctacgtgagtgacaaaaatatccgatatgtggttccaagtaatggtaataaagtcactgagaccgattcaggttttgtcgatgatgaagacatcttagaccatgtgcaacaatcagctgaaaatggtaatctccagagtgtttcagcaacaaaaccagatggccatgggattttaaagcccgtacacagtgaccagcgaccagacgttattcaaccaaggcacccaaaaactatcagaaacatcatgatggttttgaaagaagagaaagctcgagaaaatggttcacccatgagatctaatcgaagtagaccttctagtgttccgacacagaagaataatgttgaaactccatcaaagattcccaaacttggtgacattgctcatagctccaagactaacgcaagtacgcctattccaccatcaaagctggcctctgattccgcaaggactccaggatcatttccaccaaagcatcatatgccagtgattgactcttctccaaaacttaagcctagaaacgacagaatttcaccttctcctgctgctaaacatgaggctgaagaggcgatgtcagttaagcgtaggcaaagaacacctcctactttgccaagaagaacgtctttgatagcgcaccagtcgagacaactaggagcagatatttcaaatatggcagcaaaggaaaccgcgaagctacatccatctgtgccatcagagtctgaaactaattctcatcaatctcgtgttcatgcttctcctgtgagtacgacgccagagccaaagagaacctctgttggatctgccaaaggaatgcagagtgaaagcagcaactctatctcgtcgtcgttgtccatgcaggcatttgagctctgtgatgatgcttccaccccatatattgacatgacagaacatacaactcctgatgaccacagaagatcctgtcacagtgaatactcatattcatttccagatatctcctcagagatgatgatccgtagagatgaacatagcaccagtatgcggctgactgaaattcccgactctgtttccggtgtacaaaacaccattgcccatcatcagccagaaagagagcaaggaagctgtcccactgtgctcaaagatgatagtcctgcaacattacagagctacgagcctaacacatcacaacatcaacacggtgatgacaaattcacagtcaaagaattcgtctcctctgttcccggacccgcaccattgcctttgcatgttgaaccatcacaccaagtgaattcccactcggataacaaaacaagcgtaatgtctcagaactcagctcttgagaagaacaacagtcattcccatcctcatcccgtggttgatgatgtcatacatgttattcgccacagcagtttccgagtagggagcgaccagccggtcatggaaagtgttgaagtcggtgtccaaaacgtcgatatggggaaactcataaacgttgtgagagatgaaatggaagtgagaaaaggagccactccctcagaatcacccaccacaagatcgatcatctcagagcctgactcaagaaccgagcctcgtcctaaagaaccagaccccatcaccaattactcagaaacaaagagctttaactcctgctcggattcttcaccagctgagaccagaactaactcattcgtgcctgaagaggaaacaactccgactccacctgttaaagagacgttggacatcaagtcgttcagacagagagcagaagcgcttgaaggtctattggaactatctgcggatttgctggaacagagcaggctcgaagagctagccattgtgttgcagccgtttgggaagaacaaagtttcgcctcgagaaaccgctatttggttggccaagagtttgaaaggaatgatgatcgaagacatcaataataataatagcagtggcagctccaggaattgttcatga

SEQ ID NO: 28504 - protein, 941 aa, Arabidopsis thaliana
  misc_feature (1)..(941): Ceres Seq. ID no. 2997822
MESRMDQYELMEQIGRGAFGAAILVHHKAERKKYVLKKIRLARQTERCRRSAHQEMSLIARVQHPYIVEFKEAWVEKGCYVCIVTGYCEGGDMAELMKKSNGVYFPEEKLCKWFTQLLLAVEYLHSNYVLHRDLKCSNIFLTKDQDVRLGDFGLAKTLKADDLTSSVVGTPNYMCPELLADIPYGFKSDIWSLGCCIYEMAAYRPAFKAFDMAGLISKKSTHQGNVKEEPRVSAKRMASEILKHPYLQPYVEQYRPTLSAASITPEKPLNSREGRRSMAESQNSNSSSEKDNFYVSDKNIRYVVPSNGNKVTETDSGFVDDEDILDHVQQSAENGNLQSVSATKPDGHGILKPVHSDQRPDVIQPRHPKTIRNIMMVLKEEKARENGSPMRSNRSRPSSVPTQKNNVETPSKIPKLGDIAHSSKTNASTPIPPSKLASDSARTPGSFPPKHHMPVIDSSPKLKPRNDRISPSPAAKHEAEEAMSVKRRQRTPPTLPRRTSLIAHQSRQLGADISNMAAKETAKLHPSVPSESETNSHQSRVHASPVSTTPEPKRTSVGSAKGMQSESSNSISSSLSMQAFELCDDASTPYIDMTEHTTPDDHRRSCHSEYSYSFPDISSEMMIRRDEHSTSMRLTEIPDSVSGVQNTIAHHQPEREQGSCPTVLKDDSPATLQSYEPNTSQHQHGDDKFTVKEFVSSVPGPAPLPLHVEPSHQVNSHSDNKTSVMSQNSALEKNNSHSHPHPVVDDVIHVIRHSSFRVGSDQPVMESVEVGVQNVDMGKLINVVRDEMEVRKGATPSESPTTRSIISEPDSRTEPRPKEPDPITNYSETKSFNSCSDSSPAETRTNSFVPEEETTPTPPVKETLDIKSFRQRAEALEGLLELSADLLEQSRLEELAIVLQPFGKNKVSPRETAIWLAKSLKGMMIEDINNNNSSGSSRNCS

SEQ ID NO: 28505 - protein, 937 aa, Arabidopsis thaliana
  misc_feature (1)..(937): Ceres Seq. ID no. 2997823
MDQYELMEQIGRGAFGAAILVHHKAERKKYVLKKIRLARQTERCRRSAHQEMSLIARVQHPYIVEFKEAWVEKGCYVCIVTGYCEGGDMAELMKKSNGVYFPEEKLCKWFTQLLLAVEYLHSNYVLHRDLKCSNIFLTKDQDVRLGDFGLAKTLKADDLTSSVVGTPNYMCPELLADIPYGFKSDIWSLGCCIYEMAAYRPAFKAFDMAGLISKKSTHQGNVKEEPRVSAKRMASEILKHPYLQPYVEQYRPTLSAASITPEKPLNSREGRRSMAESQNSNSSSEKDNFYVSDKNIRYVVPSNGNKVTETDSGFVDDEDILDHVQQSAENGNLQSVSATKPDGHGILKPVHSDQRPDVIQPRHPKTIRNIMMVLKEEKARENGSPMRSNRSRPSSVPTQKNNVETPSKIPKLGDIAHSSKTNASTPIPPSKLASDSARTPGSFPPKHHMPVIDSSPKLKPRNDRISPSPAAKHEAEEAMSVKRRQRTPPTLPRRTSLIAHQSRQLGADISNMAAKETAKLHPSVPSESETNSHQSRVHASPVSTTPEPKRTSVGSAKGMQSESSNSISSSLSMQAFELCDDASTPYIDMTEHTTPDDHRRSCHSEYSYSFPDISSEMMIRRDEHSTSMRLTEIPDSVSGVQNTIAHHQPEREQGSCPTVLKDDSPATLQSYEPNTSQHQHGDDKFTVKEFVSSVPGPAPLPLHVEPSHQVNSHSDNKTSVMSQNSALEKNNSHSHPHPVVDDVIHVIRHSSFRVGSDQPVMESVEVGVQNVDMGKLINVVRDEMEVRKGATPSESPTTRSIISEPDSRTEPRPKEPDPITNYSETKSFNSCSDSSPAETRTNSFVPEEETTPTPPVKETLDIKSFRQRAEALEGLLELSADLLEQSRLEELAIVLQPFGKNKVSPRETAIWLAKSLKGMMIEDINNNNSSGSSRNCS

SEQ ID NO: 28506 - protein, 931 aa, Arabidopsis thaliana
  misc_feature (1)..(931): Ceres Seq. ID no. 2997824
MEQIGRGAFGAAILVHHKAERKKYVLKKIRLARQTERCRRSAHQEMSLIARVQHPYIVEFKEAWVEKGCYVCIVTGYCEGGDMAELMKKSNGVYFPEEKLCKWFTQLLLAVEYLHSNYVLHRDLKCSNIFLTKDQDVRLGDFGLAKTLKADDLTSSVVGTPNYMCPELLADIPYGFKSDIWSLGCCIYEMAAYRPAFKAFDMAGLISKKSTHQGNVKEEPRVSAKRMASEILKHPYLQPYVEQYRPTLSAASITPEKPLNSREGRRSMAESQNSNSSSEKDNFYVSDKNIRYVVPSNGNKVTETDSGFVDDEDILDHVQQSAENGNLQSVSATKPDGHGILKPVHSDQRPDVIQPRHPKTIRNIMMVLKEEKARENGSPMRSNRSRPSSVPTQKNNVETPSKIPKLGDIAHSSKTNASTPIPPSKLASDSARTPGSFPPKHHMPVIDSSPKLKPRNDRISPSPAAKHEAEEAMSVKRRQRTPPTLPRRTSLIAHQSRQLGADISNMAAKETAKLHPSVPSESETNSHQSRVHASPVSTTPEPKRTSVGSAKGMQSESSNSISSSLSMQAFELCDDASTPYIDMTEHTTPDDHRRSCHSEYSYSFPDISSEMMIRRDEHSTSMRLTEIPDSVSGVQNTIAHHQPEREQGSCPTVLKDDSPATLQSYEPNTSQHQHGDDKFTVKEFVSSVPGPAPLPLHVEPSHQVNSHSDNKTSVMSQNSALEKNNSHSHPHPVVDDVIHVIRHSSFRVGSDQPVMESVEVGVQNVDMGKLINVVRDEMEVRKGATPSESPTTRSIISEPDSRTEPRPKEPDPITNYSETKSFNSCSDSSPAETRTNSFVPEEETTPTPPVKETLDIKSFRQRAEALEGLLELSADLLEQSRLEELAIVLQPFGKNKVSPRETAIWLAKSLKGMMIEDINNNNSSGSSRNCS

SEQ ID NO: 28507 - DNA, 1677 bp, Arabidopsis thaliana
  misc_feature (1)..(1677): Ceres Seq. ID no. 2997899
atgagcaagggggcggcaataatagcttatgcaaatcccatctttcatattcgacatctaaagcttgaatctttcttgtggaacatcatcattcgtgccattgttcacaatgtttcgtcgcctcaacgacattctccgatctcagtctacctccgtatgcgcaaccatcgcgtctctcccgattttcatacctttccgtttcttctcccttctttccacaatccgcttcatcttcctcttgggcaacgaactcatgctcagattcttctttttggacttgacaaagacccatttgtccgaacttcactgctcaacatgtattcttcctgtggcgacttgagatcagctcagcgagttttcgatgactcgggctcgaaggatttaccggcctggaactctgtggtcaatgcttatgccaaagctgggttgatcgatgatgcgcggaaactgttcgacgaaatgcctgaaagaaacgtgatttcctggagctgcttgattaacggctacgttatgtgtgggaaatacaaagaagcgcttgatttgttccgggagatgcaattacctaaaccaaacgaagcattcgtcagacccaacgagtttacaatgtcgactgtactctcggcttgtgggcgattgggtgcgctcgagcaagggaaatgggttcacgcttacatcgataagtaccacgttgagattgacattgtcttaggcacagctctcattgatatgtacgccaaatgtgggagcctcgagagggcgaaaagggttttcaatgccttgggatccaagaaagatgtcaaagcttacagtgctatgatatgttgcttagcaatgtacggtctcacagatgagtgcttccaactgttctctgagatgaccacgagtgacaacataaacccaaactctgtgacatttgtgggcattctcggtgcttgtgtacatcgaggtctaataaacgaaggaaaatcttactttaaaatgatgattgaggaatttggtatcacgccatcaatccagcattatggttgtatggttgatctctacggaagatctggtttgatcaaagaagcagagagctttatagcatctatgcctatggagcctgatgtacttatttgggggtctctcttaagcggatcaagaatgcttggggatatcaagacttgtgaaggtgccctcaagcgactcatcgagctagatcctatgaacagtggagcatatgtgcttctctctaacgtctatgccaaaacagggaggtggatggaaggcattaataaagttccgggatgtagctatgttgaagtagagggagtggttcacgagtttgttgtaggagacgaatctcaacaagagagcgaaaggatctatgctatgctcgatgagataatgcagaggctgagagaagctggatatgttacagacactaaggaggttttacttgatcttaacgagaaagataaagagatagctttgtcttaccacagtgagaaactggctattgcgttctgtttgatgaagacaaggcctggaactccagtgagaatcatcaagaacctcagaatctgtggagattgtcatcttacgggtcttgctcttgcagagatttttggtgataacaattgcagcaatgtttgtgttggattgaataaacacattactgaattttggaggttttga

SEQ ID NO: 28508 - protein, 558 aa, Arabidopsis thaliana
  misc_feature (1)..(558): Ceres Seq. ID no. 2997900
MSKGAAIIAYANPIFHIRHLKLESFLWNIIIRAIVHNVSSPQRHSPISVYLRMRNHRVSPDFHTFPFLLPSFHNPLHLPLGQRTHAQILLFGLDKDPFVRTSLLNMYSSCGDLRSAQRVFDDSGSKDLPAWNSVVNAYAKAGLIDDARKLFDEMPERNVISWSCLINGYVMCGKYKEALDLFREMQLPKPNEAFVRPNEFTMSTVLSACGRLGALEQGKWVHAYIDKYHVEIDIVLGTALIDMYAKCGSLERAKRVFNALGSKKDVKAYSAMICCLAMYGLTDECFQLFSEMTTSDNINPNSVTFVGILGACVHRGLINEGKSYFKMMIEEFGITPSIQHYGCMVDLYGRSGLIKEAESFIASMPMEPDVLIWGSLLSGSRMLGDIKTCEGALKRLIELDPMNSGAYVLLSNVYAKTGRWMEGINKVPGCSYVEVEGVVHEFVVGDESQQESERIYAMLDEIMQRLREAGYVTDTKEVLLDLNEKDKEIALSYHSEKLAIAFCLMKTRPGTPVRIIKNLRICGDCHLTGLALAEIFGDNNCSNVCVGLNKHITEFWRF

SEQ ID NO: 28509 - protein, 506 aa, Arabidopsis thaliana
  misc_feature (1)..(506): Ceres Seq. ID no. 2997901
MRNHRVSPDFHTFPFLLPSFHNPLHLPLGQRTHAQILLFGLDKDPFVRTSLLNMYSSCGDLRSAQRVFDDSGSKDLPAWNSVVNAYAKAGLIDDARKLFDEMPERNVISWSCLINGYVMCGKYKEALDLFREMQLPKPNEAFVRPNEFTMSTVLSACGRLGALEQGKWVHAYIDKYHVEIDIVLGTALIDMYAKCGSLERAKRVFNALGSKKDVKAYSAMICCLAMYGLTDECFQLFSEMTTSDNINPNSVTFVGILGACVHRGLINEGKSYFKMMIEEFGITPSIQHYGCMVDLYGRSGLIKEAESFIASMPMEPDVLIWGSLLSGSRMLGDIKTCEGALKRLIELDPMNSGAYVLLSNVYAKTGRWMEGINKVPGCSYVEVEGVVHEFVVGDESQQESERIYAMLDEIMQRLREAGYVTDTKEVLLDLNEKDKEIALSYHSEKLAIAFCLMKTRPGTPVRIIKNLRICGDCHLTGLALAEIFGDNNCSNVCVGLNKHITEFWRF

SEQ ID NO: 28510 - protein, 453 aa, Arabidopsis thaliana
  misc_feature (1)..(453): Ceres Seq. ID no. 2997902
MYSSCGDLRSAQRVFDDSGSKDLPAWNSVVNAYAKAGLIDDARKLFDEMPERNVISWSCLINGYVMCGKYKEALDLFREMQLPKPNEAFVRPNEFTMSTVLSACGRLGALEQGKWVHAYIDKYHVEIDIVLGTALIDMYAKCGSLERAKRVFNALGSKKDVKAYSAMICCLAMYGLTDECFQLFSEMTTSDNINPNSVTFVGILGACVHRGLINEGKSYFKMMIEEFGITPSIQHYGCMVDLYGRSGLIKEAESFIASMPMEPDVLIWGSLLSGSRMLGDIKTCEGALKRLIELDPMNSGAYVLLSNVYAKTGRWMEGINKVPGCSYVEVEGVVHEFVVGDESQQESERIYAMLDEIMQRLREAGYVTDTKEVLLDLNEKDKEIALSYHSEKLAIAFCLMKTRPGTPVRIIKNLRICGDCHLTGLALAEIFGDNNCSNVCVGLNKHITEFWRF

SEQ ID NO: 28511 - DNA, 4206 bp, Arabidopsis thaliana
  misc_feature (1)..(4206): Ceres Seq. ID no. 2997903
atggaggagtctgaacttgaagaaggagaggcttgctcttacaatattactaacgaatacgctggaagcatagaccctgataacgatctctcttacattgtgagcacctccttctcagctgctctacgagatgagaagcttcaacacatccttggacacttccagaaagactttgagggcggtgtttcagctgagaatcttggggcgaaatatggtggctatggctctttcttgccaacttatcaacgttctcctgtttggtctcacccgaagacaccagcaaaacctcagagttctacagggactagatctccaaacaacttactaggggagagtggcaatgcagcttcgtctagtgttcctaaaaaggcaaaatctggtcttgcttcctctggaaaccccaaaaaatcagtgaaatctaagaaacctagttccagtgccagaatggaatctgcaactaagaaaccttgtgtcttcagtaagcagaattctctgaagcttcggataaagatggtaccagatggtttatctaccgaaaagaatgctgctgcaatatacagtggccttggacttgatgtgtcaccttctttgtccttagataacaatagtctttcaggtagtgaagggatgaatgaggagcctcagggttattctccaacggagtctcccaccagtattcttaatgtaatgacttcacttcctgtggatcattgtcagttcctatctcctctctctgaggatctgattcgattcattgaaagggaaaaatccgaaaagggatataagtatacatctccatccaggcttttcactgcgagttcttctgctatggcatacggtttggaacctcagaagtctggagagaaaccatcagtagagaagaaaaaaaagatggtggagaggagcagcttttctgctgagacaaatgtccgcagtaagaagggcctgtttgattcaactgatgccattaccaaggagtcaatggaaacaaacacattatatcctacatttgcggagaaagaaacagccagtagtaaattatttgatgcatccaaggaaaactacaatggcactgttaggggcgaaatggtgggtgatgtcgacagaaggttgtggggtctaactcgtcataaagatcttggggcgcatcatgagaatccaaagactatttctgctggaagtgttcgtgaagataaaaaggctaaacttggtgataatgaggcttcaggatacccaaggaaagttggcaaatacaaaggcagcaaagcttctgattcagtcaaaaaggaatcgagtgcatcaaaggcgaaaagtggtcataaagtggagctagaacatcctcttagaaagcagaagtatgaccagatagaacaggagccaccgtcttcatcaaagttcaaggaacagcaaacctctgttgtttttgagactaagctgaatggtcaagctgagaagaaggaagtggtagccgtgaaaccacaaagtgatagcaaaaaagccgaggacacttacaaagacttttttggagacataggggactctgaagaagaagaggaacaagacgtaaaagatttgcggatttcagaaaagggacttccgcccttagaagatatgcctgaaaaatcgagcttgccgctagtagaacctcagaacgttggtcctgaacccatgttgagaaaacttggttctgatgcttctcttccgaaagcaaatcccgtgatcatacaagaacattgggttgcttgtgacaaatgtggaaagtggcggcttcttccttttggcgtcttcccagaagaccttcctgagaaatggatgtgcacaatgcttaattggctgcctggagtgaactattgcaatgttcctgaagatgaaacaacgaaagcactgtatgcaatgtatcagatccctgtccctgagaaccaggcttcgatgcagagtaatcccagtggccctaagcctcagtttacccagggagatgacaacacaaagaagaagaaaaagggtttcaaaaagatagacaatggaatggataaagaaggtgctcgaactgcagaaactaacaagaccatccaaacatcgtcaagaaatggtattcaaaattcgcagggacttggcgacttggccgaggatgagaggcaaatacataaacagaaagagaaaggaaaagcagtggatcacctctctgatgagtcgaagagcttgaaggcgaataacaaaagaaaaacagatctagagagttctatgctggccaaaaaaatgaagatcgaaagttttctgtttcctgatgaatctgaatatggaaatggacgtcctacctcgagtagtggtgtccctatcacgtcagcagatataaagccaaagccccgagtctcctccaaaatgccaaaagaggaaggaggagcttcagacactggaaatagcaatagcactggggggattaaaaagaggaaactgagagaaagccatggttctaggatttacagtgagaacgaaaatcatgaacgaaagaaagctcgagttcgtaaagaagagaaggagcctagttattcacaaggcaatgggaagttggaaaagaaaaatagaagtcattcgaaaatagagtatgcaaatgttcagaactcaatcgcggcaacctcaagttcttctaagatttctgattctcataaacccagaaacagctcccgcgaagctaaatgttctcctgttgagtcggtgtcttcctcacctatgaggctttccaacccggagaaacgtatatctgtgagtaaaaagaaagaagaatcttatgatgctaacgtctttgcagcaggtagtttgaaaaaattctcagatggtgaaggtgaagatgatggtgggagtgatagatcgcagagtcagatgaaggataaacatggatcccatgagtcttctgtgcttgatatttgggataataaaggatctttgaaagcgaaagagcgcgctgatccttctctcgatgccaattttgaaaatggtggccacaagactttaccgcggaaactggatcatattctcggtgaaggaaaacagtctagcgatcatcatcgacgtagcaatgattccctggcaaagaagtcaggaaaaggttcatcttctcggtccaaagaaaagagccaaagcattaggtctgattcacgggatggtccgagacatattgaaaagaagatatatgatggtagtcctgacagtagagcggatatgatcgtgagaccaaacattccaaaaccgcacgactccgaaagaataccagagaggagtaatatagcagatttagcttctccatcacggccaccatctagaggtgtccaaggggattcctctatgctttctgtccgtaagaaagtcgataaatgcagcacatcagctggaaataataatatccaagctgatgatgtgacaaaggcaacagcccaaataagaaggaaaagcgagccttctccaagccccttgcgaaaggaaataacatctgcgcaggccgcccataatactttaaaagaagctaaagacttgaaacatacagctgaccgtctcaagaattctgtatcaaaccttgagcacattgagctctacttccaagcttgccttaagtttcttcacggtgcttttcttttggagatgagtagcaacgagagtgctagacaaggagaaacaatggtccaatctatgaagatttatagtagcactgcgaatctttgcggcactgaaacctttttccgtgatagattttgtgcccatgagtatgagaagtctaaagatatgggagctgctgccctggcttacaaatgcatggaggtcgcgtatatgagagtggttaattcctcctacaccagtgctaatagatatcgaaatgaattgcagacttctctacaaatggttccgccaggtgaatctccttcttcatctgcctcggatgttgataacgtgaaccatccagcagcagtagacagagttggtacctcaaggggcatcagttctcctttagttgctgggaaccacgacgtaaatctgtcaatggatgcctcgaggaaatcacgtgtggcattaacagcttgtattgaaaactcaggggaggcccaacaacaaggagagggtataatatctattaaaagcgcccttgattataacttccaagacatggagggattgctacgtttagtgaagcttgctatgaaggccaacaaccggtga

SEQ ID NO: 28512 - protein, 1401 aa, Arabidopsis thaliana
  misc_feature (1)..(1401): Ceres Seq. ID no. 2997904
MEESELEEGEACSYNITNEYAGSIDPDNDLSYIVSTSFSAALRDEKLQHILGHFQKDFEGGVSAENLGAKYGGYGSFLPTYQRSPVWSHPKTPAKPQSSTGTRSPNNLLGESGNAASSSVPKKAKSGLASSGNPKKSVKSKKPSSSARMESATKKPCVFSKQNSLKLRIKMVPDGLSTEKNAAAIYSGLGLDVSPSLSLDNNSLSGSEGMNEEPQGYSPTESPTSILNVMTSLPVDHCQFLSPLSEDLIRFIEREKSEKGYKYTSPSRLFTASSSAMAYGLEPQKSGEKPSVEKKKKMVERSSFSAETNVRSKKGLFDSTDAITKESMETNTLYPTFAEKETASSKLFDASKENYNGTVRGEMVGDVDRRLWGLTRHKDLGAHHENPKTISAGSVREDKKAKLGDNEASGYPRKVGKYKGSKASDSVKKESSASKAKSGHKVELEHPLRKQKYDQIEQEPPSSSKFKEQQTSVVFETKLNGQAEKKEVVAVKPQSDSKKAEDTYKDFFGDIGDSEEEEEQDVKDLRISEKGLPPLEDMPEKSSLPLVEPQNVGPEPMLRKLGSDASLPKANPVIIQEHWVACDKCGKWRLLPFGVFPEDLPEKWMCTMLNWLPGVNYCNVPEDETTKALYAMYQIPVPENQASMQSNPSGPKPQFTQGDDNTKKKKKGFKKIDNGMDKEGARTAETNKTIQTSSRNGIQNSQGLGDLAEDERQIHKQKEKGKAVDHLSDESKSLKANNKRKTDLESSMLAKKMKIESFLFPDESEYGNGRPTSSSGVPITSADIKPKPRVSSKMPKEEGGASDTGNSNSTGGIKKRKLRESHGSRIYSENENHERKKARVRKEEKEPSYSQGNGKLEKKNRSHSKIEYANVQNSIAATSSSSKISDSHKPRNSSREAKCSPVESVSSSPMRLSNPEKRISVSKKKEESYDANVFAAGSLKKFSDGEGEDDGGSDRSQSQMKDKHGSHESSVLDIWDNKGSLKAKERADPSLDANFENGGHKTLPRKLDHILGEGKQSSDHHRRSNDSLAKKSGKGSSSRSKEKSQSIRSDSRDGPRHIEKKIYDGSPDSRADMIVRPNIPKPHDSERIPERSNIADLASPSRPPSRGVQGDSSMLSVRKKVDKCSTSAGNNNIQADDVTKATAQIRRKSEPSPSPLRKEITSAQAAHNTLKEAKDLKHTADRLKNSVSNLEHIELYFQACLKFLHGAFLLEMSSNESARQGETMVQSMKIYSSTANLCGTETFFRDRFCAHEYEKSKDMGAAALAYKCMEVAYMRVVNSSYTSANRYRNELQTSLQMVPPGESPSSSASDVDNVNHPAAVDRVGTSRGISSPLVAGNHDVNLSMDASRKSRVALTACIENSGEAQQQGEGIISIKSALDYNFQDMEGLLRLVKLAMKANNR

SEQ ID NO: 28513 - protein, 1253 aa, Arabidopsis thaliana
  misc_feature (1)..(1253): Ceres Seq. ID no. 2997905
MESATKKPCVFSKQNSLKLRIKMVPDGLSTEKNAAAIYSGLGLDVSPSLSLDNNSLSGSEGMNEEPQGYSPTESPTSILNVMTSLPVDHCQFLSPLSEDLIRFIEREKSEKGYKYTSPSRLFTASSSAMAYGLEPQKSGEKPSVEKKKKMVERSSFSAETNVRSKKGLFDSTDAITKESMETNTLYPTFAEKETASSKLFDASKENYNGTVRGEMVGDVDRRLWGLTRHKDLGAHHENPKTISAGSVREDKKAKLGDNEASGYPRKVGKYKGSKASDSVKKESSASKAKSGHKVELEHPLRKQKYDQIEQEPPSSSKFKEQQTSVVFETKLNGQAEKKEVVAVKPQSDSKKAEDTYKDFFGDIGDSEEEEEQDVKDLRISEKGLPPLEDMPEKSSLPLVEPQNVGPEPMLRKLGSDASLPKANPVIIQEHWVACDKCGKWRLLPFGVFPEDLPEKWMCTMLNWLPGVNYCNVPEDETTKALYAMYQIPVPENQASMQSNPSGPKPQFTQGDDNTKKKKKGFKKIDNGMDKEGARTAETNKTIQTSSRNGIQNSQGLGDLAEDERQIHKQKEKGKAVDHLSDESKSLKANNKRKTDLESSMLAKKMKIESFLFPDESEYGNGRPTSSSGVPITSADIKPKPRVSSKMPKEEGGASDTGNSNSTGGIKKRKLRESHGSRIYSENENHERKKARVRKEEKEPSYSQGNGKLEKKNRSHSKIEYANVQNSIAATSSSSKISDSHKPRNSSREAKCSPVESVSSSPMRLSNPEKRISVSKKKEESYDANVFAAGSLKKFSDGEGEDDGGSDRSQSQMKDKHGSHESSVLDIWDNKGSLKAKERADPSLDANFENGGHKTLPRKLDHILGEGKQSSDHHRRSNDSLAKKSGKGSSSRSKEKSQSIRSDSRDGPRHIEKKIYDGSPDSRADMIVRPNIPKPHDSERIPERSNIADLASPSRPPSRGVQGDSSMLSVRKKVDKCSTSAGNNNIQADDVTKATAQIRRKSEPSPSPLRKEITSAQAAHNTLKEAKDLKHTADRLKNSVSNLEHIELYFQACLKFLHGAFLLEMSSNESARQGETMVQSMKIYSSTANLCGTETFFRDRFCAHEYEKSKDMGAAALAYKCMEVAYMRVVNSSYTSANRYRNELQTSLQMVPPGESPSSSASDVDNVNHPAAVDRVGTSRGISSPLVAGNHDVNLSMDASRKSRVALTACIENSGEAQQQGEGIISIKSALDYNFQDMEGLLRLVKLAMKANNR

SEQ ID NO: 28514 - protein, 1231 aa, Arabidopsis thaliana
  misc_feature (1)..(1231): Ceres Seq. ID no. 2997906
MVPDGLSTEKNAAAIYSGLGLDVSPSLSLDNNSLSGSEGMNEEPQGYSPTESPTSILNVMTSLPVDHCQFLSPLSEDLIRFIEREKSEKGYKYTSPSRLFTASSSAMAYGLEPQKSGEKPSVEKKKKMVERSSFSAETNVRSKKGLFDSTDAITKESMETNTLYPTFAEKETASSKLFDASKENYNGTVRGEMVGDVDRRLWGLTRHKDLGAHHENPKTISAGSVREDKKAKLGDNEASGYPRKVGKYKGSKASDSVKKESSASKAKSGHKVELEHPLRKQKYDQIEQEPPSSSKFKEQQTSVVFETKLNGQAEKKEVVAVKPQSDSKKAEDTYKDFFGDIGDSEEEEEQDVKDLRISEKGLPPLEDMPEKSSLPLVEPQNVGPEPMLRKLGSDASLPKANPVIIQEHWVACDKCGKWRLLPFGVFPEDLPEKWMCTMLNWLPGVNYCNVPEDETTKALYAMYQIPVPENQASMQSNPSGPKPQFTQGDDNTKKKKKGFKKIDNGMDKEGARTAETNKTIQTSSRNGIQNSQGLGDLAEDERQIHKQKEKGKAVDHLSDESKSLKANNKRKTDLESSMLAKKMKIESFLFPDESEYGNGRPTSSSGVPITSADIKPKPRVSSKMPKEEGGASDTGNSNSTGGIKKRKLRESHGSRIYSENENHERKKARVRKEEKEPSYSQGNGKLEKKNRSHSKIEYANVQNSIAATSSSSKISDSHKPRNSSREAKCSPVESVSSSPMRLSNPEKRISVSKKKEESYDANVFAAGSLKKFSDGEGEDDGGSDRSQSQMKDKHGSHESSVLDIWDNKGSLKAKERADPSLDANFENGGHKTLPRKLDHILGEGKQSSDHHRRSNDSLAKKSGKGSSSRSKEKSQSIRSDSRDGPRHIEKKIYDGSPDSRADMIVRPNIPKPHDSERIPERSNIADLASPSRPPSRGVQGDSSMLSVRKKVDKCSTSAGNNNIQADDVTKATAQIRRKSEPSPSPLRKEITSAQAAHNTLKEAKDLKHTADRLKNSVSNLEHIELYFQACLKFLHGAFLLEMSSNESARQGETMVQSMKIYSSTANLCGTETFFRDRFCAHEYEKSKDMGAAALAYKCMEVAYMRVVNSSYTSANRYRNELQTSLQMVPPGESPSSSASDVDNVNHPAAVDRVGTSRGISSPLVAGNHDVNLSMDASRKSRVALTACIENSGEAQQQGEGIISIKSALDYNFQDMEGLLRLVKLAMKANNR

SEQ ID NO: 28515 - DNA, 1482 bp, Arabidopsis thaliana
  misc_feature (1)..(1482): Ceres Seq. ID no. 2997917
atgagacggcatcatcaacaaccttcaccaatgccgcaagtatacggcggcgctgaacaaagtaaatatgataaagcagatgatgctacgatatcttctggtagctatagaggcggaggagatatcgctgacatgaagatggtagttaggcatagggatttgaaagaaatcatcgatgccattaaggaaaatttcgataaggctgctgcctcaggggagcaagtctctcagatgctcgagcttggcagagctgagctcgatcgtagtttcagccaattgaagaaaacggtgattcattcgagtagtttattaagcaacttgagctcgacatggacctcgaagccgccattggcagtcaagtataggatagacacgactgcgctggatcaaccgaacagttcgaagagcctttgttccactcttgaccgtctcttggcatgggagaagaagctttatgaagaaattaaggctagagaaggtttcaagattgagcatgagaagaagttatcacagcttcaaagccaagaatataaaggggaggatgaagctaagttagacaagacaaaggcctctataacgaggttacagtcactgatcattgttacttctcaagctgttactaccacatctactgccatcatccgtcttcgtgatactgaccttgttccacaactcgttgagctctgtcatggctttatgtacatgtggaaatctatgcatcaataccatgagactcagaacagcatcgtggagcaagtccgggggctcattaacagatcgggcaaaggcgaatcaacatctgagctacaccgacaagctacacgtgacttggaatcagctgtctcttcttggcactccagtttcagtagtttgattaaattccaacgtgacttcatacactcagttcacgcctggttcaagctgacccttcttccggtttgccaagaagacgccgccaatcatcacaaagagccgctcgatgcttacgccttctgcgatgagtggaaactcgctctagatcgtattcccgatacagttgcatctgaggcaatcaagagcttcatcaacgttgtacacgtgatatccgcaaaacaagccgatgaacacaagataaagaaaagaacagaatcagcatcaaaagagcttgagaagaaggcttcgtcggttagaaacctagagagaaaatactaccagtcatactcaatggttggtgtcggtttaccagagtcaggacccgataaccaacacatgttagacgctcgagacccgttaagcgataaaaagtcagagcttgcggtttgccaaaggagagttgaggaagagatggtgaaatactcaaaggcaatagaagtgacaagagccatgactttgaataatctgcagacagggttgcctggtgtgttccaatctttaacaagtttctctgctttgttcatggagtctcttcaaacggtatgcactcgctcatactctatcaaatag

SEQ ID NO: 28516 - protein, 493 aa, Arabidopsis thaliana
  misc_feature (1)..(493): Ceres Seq. ID no. 2997918
MRRHHQQPSPMPQVYGGAEQSKYDKADDATISSGSYRGGGDIADMKMVVRHRDLKEIIDAIKENFDKAAASGEQVSQMLELGRAELDRSFSQLKKTVIHSSSLLSNLSSTWTSKPPLAVKYRIDTTALDQPNSSKSLCSTLDRLLAWEKKLYEEIKAREGFKIEHEKKLSQLQSQEYKGEDEAKLDKTKASITRLQSLIIVTSQAVTTTSTAIIRLRDTDLVPQLVELCHGFMYMWKSMHQYHETQNSIVEQVRGLINRSGKGESTSELHRQATRDLESAVSSWHSSFSSLIKFQRDFIHSVHAWFKLTLLPVCQEDAANHHKEPLDAYAFCDEWKLALDRIPDTVASEAIKSFINVVHVISAKQADEHKIKKRTESASKELEKKASSVRNLERKYYQSYSMVGVGLPESGPDNQHMLDARDPLSDKKSELAVCQRRVEEEMVKYSKAIEVTRAMTLNNLQTGLPGVFQSLTSFSALFMESLQTVCTRSYSIK

SEQ ID NO: 28517 - protein, 483 aa, Arabidopsis thaliana
  misc_feature (1)..(483): Ceres Seq. ID no. 2997919
MPQVYGGAEQSKYDKADDATISSGSYRGGGDIADMKMVVRHRDLKEIIDAIKENFDKAAASGEQVSQMLELGRAELDRSFSQLKKTVIHSSSLLSNLSSTWTSKPPLAVKYRIDTTALDQPNSSKSLCSTLDRLLAWEKKLYEEIKAREGFKIEHEKKLSQLQSQEYKGEDEAKLDKTKASITRLQSLIIVTSQAVTTTSTAIIRLRDTDLVPQLVELCHGFMYMWKSMHQYHETQNSIVEQVRGLINRSGKGESTSELHRQATRDLESAVSSWHSSFSSLIKFQRDFIHSVHAWFKLTLLPVCQEDAANHHKEPLDAYAFCDEWKLALDRIPDTVASEAIKSFINVVHVISAKQADEHKIKKRTESASKELEKKASSVRNLERKYYQSYSMVGVGLPESGPDNQHMLDARDPLSDKKSELAVCQRRVEEEMVKYSKAIEVTRAMTLNNLQTGLPGVFQSLTSFSALFMESLQTVCTRSYSIK

SEQ ID NO: 28518 - protein, 449 aa, Arabidopsis thaliana
  misc_feature (1)..(449): Ceres Seq. ID no. 2997920
MKMVVRHRDLKEIIDAIKENFDKAAASGEQVSQMLELGRAELDRSFSQLKKTVIHSSSLLSNLSSTWTSKPPLAVKYRIDTTALDQPNSSKSLCSTLDRLLAWEKKLYEEIKAREGFKIEHEKKLSQLQSQEYKGEDEAKLDKTKASITRLQSLIIVTSQAVTTTSTAIIRLRDTDLVPQLVELCHGFMYMWKSMHQYHETQNSIVEQVRGLINRSGKGESTSELHRQATRDLESAVSSWHSSFSSLIKFQRDFIHSVHAWFKLTLLPVCQEDAANHHKEPLDAYAFCDEWKLALDRIPDTVASEAIKSFINVVHVISAKQADEHKIKKRTESASKELEKKASSVRNLERKYYQSYSMVGVGLPESGPDNQHMLDARDPLSDKKSELAVCQRRVEEEMVKYSKAIEVTRAMTLNNLQTGLPGVFQSLTSFSALFMESLQTVCTRSYSIK

SEQ ID NO: 28519 - DNA, 3411 bp, Arabidopsis thaliana
  misc_feature (1)..(3411): Ceres Seq. ID no. 2998076
atgtcgacgtggcatttattttccgattccagcggcgatggtttccggtgggaagtcgctggccggattcttcagtccgtctcggattctacgccaaccaaggcgctcgaatcgacagctcctctaccttccatggccgatctcttgctccaaggatgctcgaagcttatagaacgggaagaatcgatgcctggggaaatcccaatgttcaggactgggctggggaagtctgtagttcttaaagagtcttcgattgctaaagccaaatccattttagcagagaatgttgcttattcagatttgcagaacacaaattgctcaattccccaaacgagacaagtggatacagctgaaactatgccaatgttcaggacggccttggggaaaactgtccctttgaaagagtcttcaattgccaaacctttgtctattctaggaagtgatatgataattgactcagacaacgttcttcccagggagagtgggtttggtgttcccaacagtctttttcagacagcttccaacaaaaaggttaatgtatcttctgccggtttagcaagagccaaggcattgttaggactagaagaagatgatttgaatggatttaaccatgtgaaccagtcgtcttcttccctccagcaacatgggtggtccggtttaaaaactcatgaggagtttgatgctacagtggttaagcatcattcaggaactccaggacaatatgagaattatgtatctgggaagagatctgaaatcttaaatccatcgttaaaggtgcctccaacaaagtttcagactgctggtggaaaatcattgtcagtgtcagctgaggcgttgaaacgtgccagaaaccttcttggtgaccctgagttagggtctttctttgatgatgtagctggaggtgatcaattttttacaccacagaaagatgaaaggctaagtgatattgctataaacaatggaagtgtcaacacaggttatattgctcatgaagaaaagacaagcaacaaacatacgtcaaatagttttgtatctcctcttcattcatcttcaaagcaatttagatcagttaacttggagaacctagcttcagggggtaatttgatcaagaaatttgatacggctgttgatgagaccaattgtgctctgaatatcagtaaacctgctacacatggactatcaaataacaggcctttagcatcagatatggcagtgaataattccaagggaaacggtttcattccaagagctaggcaacttggaaggcctgctgatcagccacttgttgatataacaaatcgcagagatacagcttatgcaaacaataaacaagacagtacccaaaagaaaaggctgggaaagacagtctccgtttctcctttcaaaaggccaaggatttcatcctttaaaactcctttaaagaaaaatgctcagcaagcttcaagtggtttgtctgttgtatcgtgtgatacacttacttccaaaaaggtactttctacaagatatccagaaaagtctccaagagtatatatcaaggagttttttggaatgcatccgacagctacgaccaggatggattatgtgccagaccatgtcagaagaatcaaatcaagtaatgcagataaatatgtattctgtgatgagtcttcttcaaacaaggttggagctgaaacttttcttcaaatgttggctgagtcggaaaaagtgtgtgactgttcgtttgaagcttgcatgtggatagtctggaaacttgcatgctacgacatatactacccagccaaatgcagaggaaactttctaacaatcaccaatgttcttgaggaactaaaatacagatatgagagagaggtcaatcatggtcattgctctgcaatcaagaggattctgagtggtgatgctccagcttcttcaatgatggtcctctgcatatcagctattaatccaaggaccgataatggttctcaggaagcacattgttctgataattgcagcaatgtgaaagtcgaactcactgatgggtggtactcgatgaatgctgctctggatgtcgtgctaaccaagcagctgaatgctggcaaattgtttgtggggcagaagcttcgacatgcttacgttcttatctcttatctgaagatcctcggggcaggactttctggctgggctaccccaacatcaccacttgaggcagtgatttcaagtacaatctgtttgttgttgaatattaatgggacatacagagctcactgggcggaccgactaggcttctgtaaagaaattggtgtccctctggctttcaactgtatcaagtgcaatgggggtccagtgcctaaaacgctagctggcatcacacgaatataccccatcctatacaaggaaaggcgctcagctcttgttgagggtattatgtgtgagtaccagagaggaattaatggtgttcacagccaaaacgatactgacagcgaagaaggagccaaggtctttaagctgttagagacggctgctgaacctgaacttcttatggctgaaatgagcctagagcagttgacatctttcactacatataaagcaaaatttgaggcagccaagcaaatgcagatggaaaaatcagtggcaaaagctctggaagacgctggtttaggtgaaaggaacgtcaccccattcatgaggattaggcttgttggcctgacgagcttaagtaatgaaggagagcacaatccaaaagaaggcattgtaacaatctgggatcccacggagagacagagaaccgagctgacggaggggaaaatatacataatgaaagggctagtaccaatgaactcagattcagaaacactttacttacatgccagagggtcaagctcaagatggcagcctttgtctccaaaagattctgaaaattttcagccttttttcaaccctcgtaaaccaatctctttgtcaaatcttggtgaaattcctctgtcaagtgaatttgatatcgctgcgtacgttgtatatgttggagatgcatacacagatgttctacaaaagaagcagtgggtgtttgtgacagatggatccacacaacattcaggggaaatctcaaacagtcttcttgctataagcttcagcaccccattcatggatgatagctctgtttcccacatcagccataatttggttggatccgtggtcggattttgcaatctaattaaaagagcaaaggatgcgacaaacgaaatgtgggttgctgagacaacagagaactcagtctacttcataaacgcagaagctgcctactcttctcaccttaaaacccgcagtgcccatatccaaacatgggctaagctctattcttccaaatccgtcatccatgaacttcggcaaagagtcctatttataatcggtgcttgtaaatcaccttcatgctga

SEQ ID NO: 28520 - protein, 1136 aa, Arabidopsis thaliana
  misc_feature (1)..(1136): Ceres Seq. ID no. 2998077
MSTWHLFSDSSGDGFRWEVAGRILQSVSDSTPTKALESTAPLPSMADLLLQGCSKLIEREESMPGEIPMFRTGLGKSVVLKESSIAKAKSILAENVAYSDLQNTNCSIPQTRQVDTAETMPMFRTALGKTVPLKESSIAKPLSILGSDMIIDSDNVLPRESGFGVPNSLFQTASNKKVNVSSAGLARAKALLGLEEDDLNGFNHVNQSSSSLQQHGWSGLKTHEEFDATVVKHHSGTPGQYENYVSGKRSEILNPSLKVPPTKFQTAGGKSLSVSAEALKRARNLLGDPELGSFFDDVAGGDQFFTPQKDERLSDIAINNGSVNTGYIAHEEKTSNKHTSNSFVSPLHSSSKQFRSVNLENLASGGNLIKKFDTAVDETNCALNISKPATHGLSNNRPLASDMAVNNSKGNGFIPRARQLGRPADQPLVDITNRRDTAYANNKQDSTQKKRLGKTVSVSPFKRPRISSFKTPLKKNAQQASSGLSVVSCDTLTSKKVLSTRYPEKSPRVYIKEFFGMHPTATTRMDYVPDHVRRIKSSNADKYVFCDESSSNKVGAETFLQMLAESEKVCDCSFEACMWIVWKLACYDIYYPAKCRGNFLTITNVLEELKYRYEREVNHGHCSAIKRILSGDAPASSMMVLCISAINPRTDNGSQEAHCSDNCSNVKVELTDGWYSMNAALDVVLTKQLNAGKLFVGQKLRHAYVLISYLKILGAGLSGWATPTSPLEAVISSTICLLLNINGTYRAHWADRLGFCKEIGVPLAFNCIKCNGGPVPKTLAGITRIYPILYKERRSALVEGIMCEYQRGINGVHSQNDTDSEEGAKVFKLLETAAEPELLMAEMSLEQLTSFTTYKAKFEAAKQMQMEKSVAKALEDAGLGERNVTPFMRIRLVGLTSLSNEGEHNPKEGIVTIWDPTERQRTELTEGKIYIMKGLVPMNSDSETLYLHARGSSSRWQPLSPKDSENFQPFFNPRKPISLSNLGEIPLSSEFDIAAYVVYVGDAYTDVLQKKQWVFVTDGSTQHSGEISNSLLAISFSTPFMDDSSVSHISHNLVGSVVGFCNLIKRAKDATNEMWVAETTENSVYFINAEAAYSSHLKTRSAHIQTWAKLYSSKSVIHELRQRVLFIIGACKSPSC

SEQ ID NO: 28521 - protein, 1092 aa, Arabidopsis thaliana
  misc_feature (1)..(1092): Ceres Seq. ID no. 2998078
MADLLLQGCSKLIEREESMPGEIPMFRTGLGKSVVLKESSIAKAKSILAENVAYSDLQNTNCSIPQTRQVDTAETMPMFRTALGKTVPLKESSIAKPLSILGSDMIIDSDNVLPRESGFGVPNSLFQTASNKKVNVSSAGLARAKALLGLEEDDLNGFNHVNQSSSSLQQHGWSGLKTHEEFDATVVKHHSGTPGQYENYVSGKRSEILNPSLKVPPTKFQTAGGKSLSVSAEALKRARNLLGDPELGSFFDDVAGGDQFFTPQKDERLSDIAINNGSVNTGYIAHEEKTSNKHTSNSFVSPLHSSSKQFRSVNLENLASGGNLIKKFDTAVDETNCALNISKPATHGLSNNRPLASDMAVNNSKGNGFIPRARQLGRPADQPLVDITNRRDTAYANNKQDSTQKKRLGKTVSVSPFKRPRISSFKTPLKKNAQQASSGLSVVSCDTLTSKKVLSTRYPEKSPRVYIKEFFGMHPTATTRMDYVPDHVRRIKSSNADKYVFCDESSSNKVGAETFLQMLAESEKVCDCSFEACMWIVWKLACYDIYYPAKCRGNFLTITNVLEELKYRYEREVNHGHCSAIKRILSGDAPASSMMVLCISAINPRTDNGSQEAHCSDNCSNVKVELTDGWYSMNAALDVVLTKQLNAGKLFVGQKLRHAYVLISYLKILGAGLSGWATPTSPLEAVISSTICLLLNINGTYRAHWADRLGFCKEIGVPLAFNCIKCNGGPVPKTLAGITRIYPILYKERRSALVEGIMCEYQRGINGVHSQNDTDSEEGAKVFKLLETAAEPELLMAEMSLEQLTSFTTYKAKFEAAKQMQMEKSVAKALEDAGLGERNVTPFMRIRLVGLTSLSNEGEHNPKEGIVTIWDPTERQRTELTEGKIYIMKGLVPMNSDSETLYLHARGSSSRWQPLSPKDSENFQPFFNPRKPISLSNLGEIPLSSEFDIAAYVVYVGDAYTDVLQKKQWVFVTDGSTQHSGEISNSLLAISFSTPFMDDSSVSHISHNLVGSVVGFCNLIKRAKDATNEMWVAETTENSVYFINAEAAYSSHLKTRSAHIQTWAKLYSSKSVIHELRQRVLFIIGACKSPSC

SEQ ID NO: 28522 - protein, 1074 aa, Arabidopsis thaliana
  misc_feature (1)..(1074): Ceres Seq. ID no. 2998079
MPGEIPMFRTGLGKSVVLKESSIAKAKSILAENVAYSDLQNTNCSIPQTRQVDTAETMPMFRTALGKTVPLKESSIAKPLSILGSDMIIDSDNVLPRESGFGVPNSLFQTASNKKVNVSSAGLARAKALLGLEEDDLNGFNHVNQSSSSLQQHGWSGLKTHEEFDATVVKHHSGTPGQYENYVSGKRSEILNPSLKVPPTKFQTAGGKSLSVSAEALKRARNLLGDPELGSFFDDVAGGDQFFTPQKDERLSDIAINNGSVNTGYIAHEEKTSNKHTSNSFVSPLHSSSKQFRSVNLENLASGGNLIKKFDTAVDETNCALNISKPATHGLSNNRPLASDMAVNNSKGNGFIPRARQLGRPADQPLVDITNRRDTAYANNKQDSTQKKRLGKTVSVSPFKRPRISSFKTPLKKNAQQASSGLSVVSCDTLTSKKVLSTRYPEKSPRVYIKEFFGMHPTATTRMDYVPDHVRRIKSSNADKYVFCDESSSNKVGAETFLQMLAESEKVCDCSFEACMWIVWKLACYDIYYPAKCRGNFLTITNVLEELKYRYEREVNHGHCSAIKRILSGDAPASSMMVLCISAINPRTDNGSQEAHCSDNCSNVKVELTDGWYSMNAALDVVLTKQLNAGKLFVGQKLRHAYVLISYLKILGAGLSGWATPTSPLEAVISSTICLLLNINGTYRAHWADRLGFCKEIGVPLAFNCIKCNGGPVPKTLAGITRIYPILYKERRSALVEGIMCEYQRGINGVHSQNDTDSEEGAKVFKLLETAAEPELLMAEMSLEQLTSFTTYKAKFEAAKQMQMEKSVAKALEDAGLGERNVTPFMRIRLVGLTSLSNEGEHNPKEGIVTIWDPTERQRTELTEGKIYIMKGLVPMNSDSETLYLHARGSSSRWQPLSPKDSENFQPFFNPRKPISLSNLGEIPLSSEFDIAAYVVYVGDAYTDVLQKKQWVFVTDGSTQHSGEISNSLLAISFSTPFMDDSSVSHISHNLVGSVVGFCNLIKRAKDATNEMWVAETTENSVYFINAEAAYSSHLKTRSAHIQTWAKLYSSKSVIHELRQRVLFIIGACKSPSC

SEQ ID NO: 28523 - DNA, 1086 bp, Arabidopsis thaliana
  misc_feature (1)..(1086): Ceres Seq. ID no. 2998206
atggttaaaccctgttggagaataggtgccggtatggagagaagtaagatcaatcccacaaaggttgatggtttgacatggtacaaagatcttggtcttcacacctttggagagttttccatggcaatgatccaagccaacagtgtgatggaggatcagtgccagatcgaatcagggccgcttacattcaacaatccgacagttcaaggcacatttgttggagtttacgatggccatggaggtccagaggcttccagattcattgcagacaacatcttccccaaggagatttcagagcaggtgatcagcaaagcatttgccgagacagacaaagattttctcaagacagtgacgaagcaatggcctacgaacccacagatggcatcagtggggtcatgttgcttggcaggagtgatatgcaacggattggtgtatattgcaaacacgggagattccagagctgtgttgggcagatctgagagaggtggagtgagagctgttcagttatctgtagagcacaatgccaatcttgagtctgcgaggcaagagctatggtcattgcatcctaatgaccccaccattcttgtgatgaagcaccgcttgtggcgtgtgaaaggcgttatccaggtcacaagatccataggtgatgcatacctcaaaagagcagagttcaacagagaacctttgctgcccaaattcagactaccagaacatttcactaagccaatccttagtgcggatccatcagtcaccattacgcggcttagcccacaagatgagtttataattcttgcttcagatgggctttgggagcatcttagcaaccaggaagctgttgatattgtgcataattcccctcgacaaggaatagcaaggagactacttaaagctgcattgaaggaagcagcaaagaaaagagagatgagatactcagacctaacagagatccatcctggtgtaagaaggcatttccacgacgatataaccgttattgtggtctatctcaacccccacccggtcaaaaccaattcttgggcttcacctctgtcaattagagggggatacccgatgcattcaacatcatga

SEQ ID NO: 28524 - protein, 361 aa, Arabidopsis thaliana
  misc_feature (1)..(361): Ceres Seq. ID no. 2998207
MVKPCWRIGAGMERSKINPTKVDGLTWYKDLGLHTFGEFSMAMIQANSVMEDQCQIESGPLTFNNPTVQGTFVGVYDGHGGPEASRFIADNIFPKEISEQVISKAFAETDKDFLKTVTKQWPTNPQMASVGSCCLAGVICNGLVYIANTGDSRAVLGRSERGGVRAVQLSVEHNANLESARQELWSLHPNDPTILVMKHRLWRVKGVIQVTRSIGDAYLKRAEFNREPLLPKFRLPEHFTKPILSADPSVTITRLSPQDEFIILASDGLWEHLSNQEAVDIVHNSPRQGIARRLLKAALKEAAKKREMRYSDLTEIHPGVRRHFHDDITVIVVYLNPHPVKTNSWASPLSIRGGYPMHSTS

SEQ ID NO: 28525 - protein, 350 aa, Arabidopsis thaliana
  misc_feature (1)..(350): Ceres Seq. ID no. 2998208
MERSKINPTKVDGLTWYKDLGLHTFGEFSMAMIQANSVMEDQCQIESGPLTFNNPTVQGTFVGVYDGHGGPEASRFIADNIFPKEISEQVISKAFAETDKDFLKTVTKQWPTNPQMASVGSCCLAGVICNGLVYIANTGDSRAVLGRSERGGVRAVQLSVEHNANLESARQELWSLHPNDPTILVMKHRLWRVKGVIQVTRSIGDAYLKRAEFNREPLLPKFRLPEHFTKPILSADPSVTITRLSPQDEFIILASDGLWEHLSNQEAVDIVHNSPRQGIARRLLKAALKEAAKKREMRYSDLTEIHPGVRRHFHDDITVIVVYLNPHPVKTNSWASPLSIRGGYPMHSTS

SEQ ID NO: 28526 - protein, 321 aa, Arabidopsis thaliana
  misc_feature (1)..(321): Ceres Seq. ID no. 2998209
MAMIQANSVMEDQCQIESGPLTFNNPTVQGTFVGVYDGHGGPEASRFIADNIFPKEISEQVISKAFAETDKDFLKTVTKQWPTNPQMASVGSCCLAGVICNGLVYIANTGDSRAVLGRSERGGVRAVQLSVEHNANLESARQELWSLHPNDPTILVMKHRLWRVKGVIQVTRSIGDAYLKRAEFNREPLLPKFRLPEHFTKPILSADPSVTITRLSPQDEFIILASDGLWEHLSNQEAVDIVHNSPRQGIARRLLKAALKEAAKKREMRYSDLTEIHPGVRRHFHDDITVIVVYLNPHPVKTNSWASPLSIRGGYPMHSTS

SEQ ID NO: 28527 - DNA, 2739 bp, Arabidopsis thaliana
  misc_feature (1)..(2739): Ceres Seq. ID no. 2998305
atggatgatttcaatcttcgtagcgaaaaccctaattcatcatccaccacttcctcatcctcttcctctttccaccgtcacaagagcgaaaccggaaacacaaaacggtcaaggtcaacgtccacgttatcgacggaccctcagagcgtggcggctcgcgacagacggcaccgaattagcgaccgtttcaagattttacaaagcatggtccctggtggtgcgaagatggacactgtatctatgcttgacgaagccattagctacgtcaagttcttgaaggctcagatctggtatcaccaaaacatgcttctcttcataaacgaccacgaaactacatcatcttgtacttactctcccggcgctggagaatttggaccgaaactctttggttatgatgacgattatgcccctataatggacacatattcacaaggcgtgccacttacggttgcggactcgaagtatacgccgtggtttggttcggttgatgatgagcaagaacacgtcacgtatttcaaatacaggcgtgccacacgacacgcattacgagggcactgcaattgtataatcggagaaacagaggaattcgccgatcaacgagagaagatggaagtgcaaattgaagaatctggtaaaaatcaaacctctccggaatcaattgaagcagacaaagcgaagcagatagtggtgcttctgattggtccaccaggaagcggcaaatcgacgttttgtgacaccgcaatgcgttcctctcaccgcccttggtctcgtatctgccaggacattgttaacaatggcaaagctggaacaaaggctcagtgtttaaagatggctacagattctcttagggaaggcaagagcgtctttatagacagatgcaatcttgacagggagcaacgttcagagtttattaagcttggtggtcctgagttcgaagttcatgcagtggttctggagcttcctgctcaggtttgtatatctagatcagttaaaagaactggtcatgaaggaaatctacaaggtggaagagctgcagctgttgtgaataagatgcttcagagtaaggaacttcccaaagtgaatgaagggttttctcggattatgttttgttacagtgacgctgatgttgataatgctgttaacatgtataacaagcttggtccaatggatacccttccttctggctgttttggcgaaaaaaaattagatactaaaagccaacccggtataatgaagttctttaagaaagtcagtgctctgcctgcttcatcttctaatgaagctactaacacaactcggaaagctgatgaaatgacagcaaatgtccgagtttcgccagtcaagcttggttctgctgatattgtacctacactggcattcccatcaatttcgactgcggattttcagtttgatcttgaaaaggcttctgatatcattgtggagaaagcagaggagttcttgtctaaacttgggactgcgcgtctcgtcttggtggacttgagccgcgggtcaaagattctatctctggtcaaggctaaggcttctcagaagaacattgattcagcgaaattcttcacatttgttggggacataactaagcttcgttctgaaggtggtctacactgtaatgtcatagctaatgctactaactggcggcttaaacctggaggtggaggtgtgaatgcagcaatattcaaagctgctggtccagatcttgagactgcgacaagagtacgagcaaacactcttcttcctggaaaagccgtggtagttcctcttccttctacttgtccattacacaatgcagaaggaattacacatgtcatacatgttctaggaccaaacatgaacccaaaccgaccagacaaccttaacaacgactacaccaaggggtgcaaaactctccgggaagcttacacatctctatttgaaggttttctatcagtagtacaggatcaatcgaagttgcccaaacgaagcagtcaaacagctgtgtcagattctggtgaggatattaaggaagactctgagagaaacaaaaagtacaaaggatcacaagataaggccgtaactaataatttggaatcagagtctctggaggacacaagaggcagtggaaagaagatgagtaaaggatggaacacatgggcattggctctccacagcatcgcgatgcacccagagagacacgagaatgtcgtgcttgaatatttagacaacatcgttgtcataaacgaccagtacccaaaggcgcggaaacacgtgctagtactggcgagacaggagagtctagatgggctagaagatgttcgcaaagagaatcttcaacttctgcaggaaatgcacaatgttggtctgaaatgggttgatagattccagaacgaggatgcatctcttatcttccgccttggatatcactcggttccctcgatgcgacaactacacttacacgttataagccaagactttaattcagatagtttgaagaacaagaaacactggaactctttcacgacctcgttcttccgtgactcagttgatgtacttgaagaggtcaacagccaaggcaaggccaatgtggcgagcgaagatctgttgaaaggtgagctgcgttgcaatcggtgtagaagcgcacacccaaatattccaaaacttaaatcacatgtcagaagctgccattctcaatttccagaccatttactccaaaacaatcgccttgtggctagagcagagacgtag

SEQ ID NO: 28528 - protein, 912 aa, Arabidopsis thaliana
  misc_feature (1)..(912): Ceres Seq. ID no. 2998306
MDDFNLRSENPNSSSTTSSSSSSFHRHKSETGNTKRSRSTSTLSTDPQSVAARDRRHRISDRFKILQSMVPGGAKMDTVSMLDEAISYVKFLKAQIWYHQNMLLFINDHETTSSCTYSPGAGEFGPKLFGYDDDYAPIMDTYSQGVPLTVADSKYTPWFGSVDDEQEHVTYFKYRRATRHALRGHCNCIIGETEEFADQREKMEVQIEESGKNQTSPESIEADKAKQIVVLLIGPPGSGKSTFCDTAMRSSHRPWSRICQDIVNNGKAGTKAQCLKMATDSLREGKSVFIDRCNLDREQRSEFIKLGGPEFEVHAVVLELPAQVCISRSVKRTGHEGNLQGGRAAAVVNKMLQSKELPKVNEGFSRIMFCYSDADVDNAVNMYNKLGPMDTLPSGCFGEKKLDTKSQPGIMKFFKKVSALPASSSNEATNTTRKADEMTANVRVSPVKLGSADIVPTLAFPSISTADFQFDLEKASDIIVEKAEEFLSKLGTARLVLVDLSRGSKILSLVKAKASQKNIDSAKFFTFVGDITKLRSEGGLHCNVIANATNWRLKPGGGGVNAAIFKAAGPDLETATRVRANTLLPGKAVVVPLPSTCPLHNAEGITHVIHVLGPNMNPNRPDNLNNDYTKGCKTLREAYTSLFEGFLSVVQDQSKLPKRSSQTAVSDSGEDIKEDSERNKKYKGSQDKAVTNNLESESLEDTRGSGKKMSKGWNTWALALHSIAMHPERHENVVLEYLDNIVVINDQYPKARKHVLVLARQESLDGLEDVRKENLQLLQEMHNVGLKWVDRFQNEDASLIFRLGYHSVPSMRQLHLHVISQDFNSDSLKNKKHWNSFTTSFFRDSVDVLEEVNSQGKANVASEDLLKGELRCNRCRSAHPNIPKLKSHVRSCHSQFPDHLLQNNRLVARAET

SEQ ID NO: 28529 - protein, 844 aa, Arabidopsis thaliana
  misc_feature (1)..(844): Ceres Seq. ID no. 2998307
MVPGGAKMDTVSMLDEAISYVKFLKAQIWYHQNMLLFINDHETTSSCTYSPGAGEFGPKLFGYDDDYAPIMDTYSQGVPLTVADSKYTPWFGSVDDEQEHVTYFKYRRATRHALRGHCNCIIGETEEFADQREKMEVQIEESGKNQTSPESIEADKAKQIVVLLIGPPGSGKSTFCDTAMRSSHRPWSRICQDIVNNGKAGTKAQCLKMATDSLREGKSVFIDRCNLDREQRSEFIKLGGPEFEVHAVVLELPAQVCISRSVKRTGHEGNLQGGRAAAVVNKMLQSKELPKVNEGFSRIMFCYSDADVDNAVNMYNKLGPMDTLPSGCFGEKKLDTKSQPGIMKFFKKVSALPASSSNEATNTTRKADEMTANVRVSPVKLGSADIVPTLAFPSISTADFQFDLEKASDIIVEKAEEFLSKLGTARLVLVDLSRGSKILSLVKAKASQKNIDSAKFFTFVGDITKLRSEGGLHCNVIANATNWRLKPGGGGVNAAIFKAAGPDLETATRVRANTLLPGKAVVVPLPSTCPLHNAEGITHVIHVLGPNMNPNRPDNLNNDYTKGCKTLREAYTSLFEGFLSVVQDQSKLPKRSSQTAVSDSGEDIKEDSERNKKYKGSQDKAVTNNLESESLEDTRGSGKKMSKGWNTWALALHSIAMHPERHENVVLEYLDNIVVINDQYPKARKHVLVLARQESLDGLEDVRKENLQLLQEMHNVGLKWVDRFQNEDASLIFRLGYHSVPSMRQLHLHVISQDFNSDSLKNKKHWNSFTTSFFRDSVDVLEEVNSQGKANVASEDLLKGELRCNRCRSAHPNIPKLKSHVRSCHSQFPDHLLQNNRLVARAET

SEQ ID NO: 28530 - protein, 837 aa, Arabidopsis thaliana
  misc_feature (1)..(837): Ceres Seq. ID no. 2998308
MDTVSMLDEAISYVKFLKAQIWYHQNMLLFINDHETTSSCTYSPGAGEFGPKLFGYDDDYAPIMDTYSQGVPLTVADSKYTPWFGSVDDEQEHVTYFKYRRATRHALRGHCNCIIGETEEFADQREKMEVQIEESGKNQTSPESIEADKAKQIVVLLIGPPGSGKSTFCDTAMRSSHRPWSRICQDIVNNGKAGTKAQCLKMATDSLREGKSVFIDRCNLDREQRSEFIKLGGPEFEVHAVVLELPAQVCISRSVKRTGHEGNLQGGRAAAVVNKMLQSKELPKVNEGFSRIMFCYSDADVDNAVNMYNKLGPMDTLPSGCFGEKKLDTKSQPGIMKFFKKVSALPASSSNEATNTTRKADEMTANVRVSPVKLGSADIVPTLAFPSISTADFQFDLEKASDIIVEKAEEFLSKLGTARLVLVDLSRGSKILSLVKAKASQKNIDSAKFFTFVGDITKLRSEGGLHCNVIANATNWRLKPGGGGVNAAIFKAAGPDLETATRVRANTLLPGKAVVVPLPSTCPLHNAEGITHVIHVLGPNMNPNRPDNLNNDYTKGCKTLREAYTSLFEGFLSVVQDQSKLPKRSSQTAVSDSGEDIKEDSERNKKYKGSQDKAVTNNLESESLEDTRGSGKKMSKGWNTWALALHSIAMHPERHENVVLEYLDNIVVINDQYPKARKHVLVLARQESLDGLEDVRKENLQLLQEMHNVGLKWVDRFQNEDASLIFRLGYHSVPSMRQLHLHVISQDFNSDSLKNKKHWNSFTTSFFRDSVDVLEEVNSQGKANVASEDLLKGELRCNRCRSAHPNIPKLKSHVRSCHSQFPDHLLQNNRLVARAET

SEQ ID NO: 28531 - DNA, 2118 bp, Arabidopsis thaliana
  misc_feature (1)..(2118): Ceres Seq. ID no. 2998609
atggcaattagttctaattacttacacgcaactttgatggcaacacttcggaggagtcctttcaaattcgctaatacaaaggttcctcatgctgacctaggcgacagtgtctctcctacaaaaaagaatcctgaagaagaagttccaagtgatcccgtcaatatccagcttcgcggaaagaatacgaacgtatattatgagtatatacaattaagtcaaggaataagccaaggtcgtgtagaagtcgtgaaggacttcttgaacgatcatccggacgcagtggacgaatggataaacctttacgagacgccattgttaaaggcttgtgcttgtgggaaacccgagattgttaaagagcttctgtggcgtatgacacctgaacaaatgcttcccaagatgagccaaaacgtttcgtaccacacggctcttactgtcgtagcggttagtggaaatatggagattgctgaagccttagtcgccaagaaccctaagctgctagagattcctggaatcaatggacagattccggttgtggttgcggttgagaacacgcagatggaaatggctcgctatctttacaccagaactccggttcaggtcttacttgctgaagacggatatcatggtactttgctctttctgaatgccatcttctatagaatgctcggtaagggatttcttggaattcaagcaacccatatctttggcggttttgatctttatctgtttttctttatacaattagacatcgcattggatctgttcaacatgagcagacgcttagccgtcacaaaacacttgcaaatcgagtcgattcccatcattgtcttggcttcaaagccagatctttttcctgggatacaagtaaagctgccaactctcccaaaaccttcacatgcaaacaaagatcataagagtaagttcttccgtatacataaagtttataaaaagtctatatatattcctctgaagaaagtgagaaaaagtttcgatttgttcccagatactctgatgaggaaactgctcaaaggtctctccaaatggaccggaatagatgaagtgtaccgacttaaggtcatgcatctacaagccaagaagcttctactgggaatatcagaagaaacattgaccttgggcttgaaggaacgttccgagacagtggatgaagctttactctttgcagtgagatatgggaatgtggatttcttggtggaaatgatcagaaacaactccgagcttctatggtccacgagaacaagctcgagcagtactctgtttctcttggccgtcgagttcagacaagagaaggtgtttaatctcctctacggtctggacgacaggaagtacttgttgctcgcagacaaggacagcgacggcaatggtgtgcttcatctcgccggatttccttctcctccttccaagctcgctagtgtcatttgcgcacctttgcggatgcaacgcgagttacaatggttcaaggaagtggagagaattgcaccagagatcgagaaggagagagtaaacacagaagagcaaacaccgatcgagatatttgcaaaggagcaccaaggactgcgacaagaagccgagaaatggatgaaagacacagccatgtcatgcagcttagtcgcggctctcatcgtcatggtcactttcgcggctctcatcatcacggtcattttcgcggcggtctttaccgtatctggtggctccgacgacaattcagaaggtaacccctttcacttatatgaacagaggttcatcatattcatcgtctccgatttgatttcttgcttcgccgcttgcaccgccgtacccatattcctcgggatactcaccgcgagatactcctttgacgattttttggtcgcgctgccgacaaagatgatcacgggactttcgatactattcgtttccatcgcggcgatgcttattgcattctcattggtgcttataacaatgatgaataaagggaaatggattgttgctccgacgatcctttgcgcttgtttaccggcgctgttgttcgttctgcttcagtatcctctcctcaaggaaatgatcttctccacttacggcaaaggaatcttcgacagaaatatgacatgttgggcttaa

SEQ ID NO: 28532 - protein, 705 aa, Arabidopsis thaliana
  misc_feature (1)..(705): Ceres Seq. ID no. 2998610
MAISSNYLHATLMATLRRSPFKFANTKVPHADLGDSVSPTKKNPEEEVPSDPVNIQLRGKNTNVYYEYIQLSQGISQGRVEVVKDFLNDHPDAVDEWINLYETPLLKACACGKPEIVKELLWRMTPEQMLPKMSQNVSYHTALTVVAVSGNMEIAEALVAKNPKLLEIPGINGQIPVVVAVENTQMEMARYLYTRTPVQVLLAEDGYHGTLLFLNAIFYRMLGKGFLGIQATHIFGGFDLYLFFFIQLDIALDLFNMSRRLAVTKHLQIESIPIIVLASKPDLFPGIQVKLPTLPKPSHANKDHKSKFFRIHKVYKKSIYIPLKKVRKSFDLFPDTLMRKLLKGLSKWTGIDEVYRLKVMHLQAKKLLLGISEETLTLGLKERSETVDEALLFAVRYGNVDFLVEMIRNNSELLWSTRTSSSSTLFLLAVEFRQEKVFNLLYGLDDRKYLLLADKDSDGNGVLHLAGFPSPPSKLASVICAPLRMQRELQWFKEVERIAPEIEKERVNTEEQTPIEIFAKEHQGLRQEAEKWMKDTAMSCSLVAALIVMVTFAALIITVIFAAVFTVSGGSDDNSEGNPFHLYEQRFIIFIVSDLISCFAACTAVPIFLGILTARYSFDDFLVALPTKMITGLSILFVSIAAMLIAFSLVLITMMNKGKWIVAPTILCACLPALLFVLLQYPLLKEMIFSTYGKGIFDRNMTCWA

SEQ ID NO: 28533 - protein, 693 aa, Arabidopsis thaliana
  misc_feature (1)..(693): Ceres Seq. ID no. 2998611
MATLRRSPFKFANTKVPHADLGDSVSPTKKNPEEEVPSDPVNIQLRGKNTNVYYEYIQLSQGISQGRVEVVKDFLNDHPDAVDEWINLYETPLLKACACGKPEIVKELLWRMTPEQMLPKMSQNVSYHTALTVVAVSGNMEIAEALVAKNPKLLEIPGINGQIPVVVAVENTQMEMARYLYTRTPVQVLLAEDGYHGTLLFLNAIFYRMLGKGFLGIQATHIFGGFDLYLFFFIQLDIALDLFNMSRRLAVTKHLQIESIPIIVLASKPDLFPGIQVKLPTLPKPSHANKDHKSKFFRIHKVYKKSIYIPLKKVRKSFDLFPDTLMRKLLKGLSKWTGIDEVYRLKVMHLQAKKLLLGISEETLTLGLKERSETVDEALLFAVRYGNVDFLVEMIRNNSELLWSTRTSSSSTLFLLAVEFRQEKVFNLLYGLDDRKYLLLADKDSDGNGVLHLAGFPSPPSKLASVICAPLRMQRELQWFKEVERIAPEIEKERVNTEEQTPIEIFAKEHQGLRQEAEKWMKDTAMSCSLVAALIVMVTFAALIITVIFAAVFTVSGGSDDNSEGNPFHLYEQRFIIFIVSDLISCFAACTAVPIFLGILTARYSFDDFLVALPTKMITGLSILFVSIAAMLIAFSLVLITMMNKGKWIVAPTILCACLPALLFVLLQYPLLKEMIFSTYGKGIFDRNMTCWA

SEQ ID NO: 28534 - protein, 582 aa, Arabidopsis thaliana
  misc_feature (1)..(582): Ceres Seq. ID no. 2998612
MTPEQMLPKMSQNVSYHTALTVVAVSGNMEIAEALVAKNPKLLEIPGINGQIPVVVAVENTQMEMARYLYTRTPVQVLLAEDGYHGTLLFLNAIFYRMLGKGFLGIQATHIFGGFDLYLFFFIQLDIALDLFNMSRRLAVTKHLQIESIPIIVLASKPDLFPGIQVKLPTLPKPSHANKDHKSKFFRIHKVYKKSIYIPLKKVRKSFDLFPDTLMRKLLKGLSKWTGIDEVYRLKVMHLQAKKLLLGISEETLTLGLKERSETVDEALLFAVRYGNVDFLVEMIRNNSELLWSTRTSSSSTLFLLAVEFRQEKVFNLLYGLDDRKYLLLADKDSDGNGVLHLAGFPSPPSKLASVICAPLRMQRELQWFKEVERIAPEIEKERVNTEEQTPIEIFAKEHQGLRQEAEKWMKDTAMSCSLVAALIVMVTFAALIITVIFAAVFTVSGGSDDNSEGNPFHLYEQRFIIFIVSDLISCFAACTAVPIFLGILTARYSFDDFLVALPTKMITGLSILFVSIAAMLIAFSLVLITMMNKGKWIVAPTILCACLPALLFVLLQYPLLKEMIFSTYGKGIFDRNMTCWA

SEQ ID NO: 28535 - DNA, 546 bp, Arabidopsis thaliana
  misc_feature (1)..(546): Ceres Seq. ID no. 2998752
atgaaccaatcaaaaacaaatccagccattgatcgtaaaacctttccaccaccgcacaccccctcgccgggggtagtgcgtcgcatacacgcgccaccgttaccttctacttctctcttgaagcaacactcgtggtctcctgatctaatccgcgaggaagcttggtcaaaacgtcaagatatctcccgccaccgtcatctccgccgtggtaagagcttgaccgacgaagatctcgacgagcttaaagcaagtttcgaactcggattcggtttcggatctcccgaaaacgctgatccaagactttccaacacgcttcccgcgttagaactttacttcgccgttcaaaaaagctacaacgacgccgtttctaacaaatcaacaacgtcgtcgtcttcactctccgacggcgataccagtcctcaccacaccgtataccaaaccaacgaagctgaagcaatgggcgagagtggtggcgtgcaccgtgaaccaatcgccgccgagatgataattttaacgactgttaaacgttgtggggataaaggttaa

SEQ ID NO: 28536 - protein, 181 aa, Arabidopsis thaliana
  misc_feature (1)..(181): Ceres Seq. ID no. 2998753
MNQSKTNPAIDRKTFPPPHTPSPGVVRRIHAPPLPSTSLLKQHSWSPDLIREEAWSKRQDISRHRHLRRGKSLTDEDLDELKASFELGFGFGSPENADPRLSNTLPALELYFAVQKSYNDAVSNKSTTSSSSLSDGDTSPHHTVYQTNEAEAMGESGGVHREPIAAEMIILTTVKRCGDKG

SEQ ID NO: 28537 - DNA, 2868 bp, Arabidopsis thaliana
  misc_feature (1)..(2868): Ceres Seq. ID no. 2998980
atgagaatcattgttgtattgcgtaggcaccaaaggtacattgggaaagtgaagcatgcagtattccacactcaaaagactggaagaaagcgtgttatcgtctcaaccgaggagaatgttgttgcttcacttgatctcagacatggggagatattttggcgacatgttctcgggacaaaggacgctatcgatggggttggtattgccttgggaaaatatgttatcactctttcatcagaaggaagtactttaagagcctggaaccttcctgatggtcaaatggtgtgggaaacatctctgcataccgcacaacattcaaagtcactgttatcagtaccggttgacaaggactaccctattactgttttcggtggtgggtaccttcatgctgtttctgctatagatggtgaggtcctctggaaaaaggatttcacagcggaagggtttgaagtgcagcgtgttcttcaagctcctggaagtagtataatttatgttctgggattccttcattcatctgaggctgttgtttatcagattgattccaaaagtggagaggtagtggcacaaaaaagtacggtgttccctggtggattctctggcgagatttcatcagtttcaagtgataaagttgttgttcttgattcaacgaggtcaattttggttactattggcttcatagatggagatattagcttccagaagacccctatttcagatcttgttgaggattctggaacggctgagattttatcacctcttcttagcaatatgcttgctgtaaaagtcaataaacgcactatatttgtgaacgtcggtgacaaaggaaagttggaagtggtagactcattatctgatgaaacagccatgagtgattcacttccagttgcagatgatcaggaggcctttgcttcagttcatcatgaagggagcaggattcacctcatggtgaaacttgttaatgacttgaataatgtattgcttagagagaccattcagatggaccaaaataggggacgtgtccataaagtttttatgaacaactatatcaggacagacaggagtaatggatttagggcgcttattgtgatggaagatcactcactcttgttactccaacaaggagcgattgtttggagcagggaagaaggtctggcttcagtgactgatgttacgacggcagaactccctctggaaaaagatggcgtatcagtggcaaaagtggagcacactctctttgagtggcttaaggggcatgtgctgaagcttaagggatccttgttgctagcaagcccagaggacgtggtagcaattcaagatttgagggtgaagagttctgggaagaacaaattgacccgtgaccataatggctttcggaaattaatcttagcacttactcgagctggaaaactttttgctctgcacactggagatgggaggattgtctggtccatgctgctaaactctccgagccaatcacaatcctgtgaacgtccaaacggtgttagcttgtaccaatggcaggtccctcatcatcacgccatggacgaaaatccctcggtgcttgtagttggcaagtgcggatcagattcaagtgcacccggtgtactttcatttgtagatgtgtacacgggaaaggagatcagctcatcagatattggtcactctgttgtgcaagttatgcctcttccaattaccgactcaaaggaacaacgtttacatctaatagctgatacagttggccacgtccacttgtatccgaaaacttcagaggctctcagcatctttcaacgcgagtttcaaaatgtatattggtacactgttgaggcagatgatggtattatcagaggacacgtaatgaagggcagttgctctggtgagactgcagatgagtactgctttacaacccgagaactttggactgttgtgtttccttcggaatcagagaaaatcatttcaacactaacacgaaaacctaatgaggttgttcatacacaagccaaagtcaacacagaccaagacctattgtataaatatgtatcaagaaacttactgtttgtggccaccgtttcaccaaaaggtgctggtgagattggctcagttacgccagaggagtcatcactcgtagtatacctcattgacaccatcacaggacggatactgcaccgtttgtcacatcaaggctgtcaagggccggttcatgcggtgtttagtgaaaattgggttgtttaccactatttcaatcttcgagctcacaagtacgaggttacggtcgttgagatctatgatcagtcgagggcggagaacaaaaatgtgtggaaactcattctgggaaagcacaatctaacagcacccatcacttcgtactctaggccagaggtgtttacaaagtcacagtcatacttctttgctcagtctgtgaaaaccattgcggtgacatccacagcaaagggtataacttcaaagcagcttctcattggtaccatcggggatcagatattggcacttgataaacgatttgtggatccacgccggacacttaacccgtctcaagctgaaaaagaagaaggaatcatccctctcactgatacattacccatcattcctcaggcgtatgttacacactcccacaaagtagaaggtctaagaggcatagtaacagctccgtccaagctagagtcaacaacacacgtctttgcctatggagtggatctcttctacacaaggcttgctccttcaaagacctacgactcactaaccgacgatttcagctacgctcttctcctgatcacgattgtagcacttgttgcagccatctacatcacatgggtcctttcagagaagaaagaactaagcgaaaaatggaggtga

SEQ ID NO: 28538 - protein, 955 aa, Arabidopsis thaliana
  misc_feature (1)..(955): Ceres Seq. ID no. 2998981
MRIIVVLRRHQRYIGKVKHAVFHTQKTGRKRVIVSTEENVVASLDLRHGEIFWRHVLGTKDAIDGVGIALGKYVITLSSEGSTLRAWNLPDGQMVWETSLHTAQHSKSLLSVPVDKDYPITVFGGGYLHAVSAIDGEVLWKKDFTAEGFEVQRVLQAPGSSIIYVLGFLHSSEAVVYQIDSKSGEVVAQKSTVFPGGFSGEISSVSSDKVVVLDSTRSILVTIGFIDGDISFQKTPISDLVEDSGTAEILSPLLSNMLAVKVNKRTIFVNVGDKGKLEVVDSLSDETAMSDSLPVADDQEAFASVHHEGSRIHLMVKLVNDLNNVLLRETIQMDQNRGRVHKVFMNNYIRTDRSNGFRALIVMEDHSLLLLQQGAIVWSREEGLASVTDVTTAELPLEKDGVSVAKVEHTLFEWLKGHVLKLKGSLLLASPEDVVAIQDLRVKSSGKNKLTRDHNGFRKLILALTRAGKLFALHTGDGRIVWSMLLNSPSQSQSCERPNGVSLYQWQVPHHHAMDENPSVLVVGKCGSDSSAPGVLSFVDVYTGKEISSSDIGHSVVQVMPLPITDSKEQRLHLIADTVGHVHLYPKTSEALSIFQREFQNVYWYTVEADDGIIRGHVMKGSCSGETADEYCFTTRELWTVVFPSESEKIISTLTRKPNEVVHTQAKVNTDQDLLYKYVSRNLLFVATVSPKGAGEIGSVTPEESSLVVYLIDTITGRILHRLSHQGCQGPVHAVFSENWVVYHYFNLRAHKYEVTVVEIYDQSRAENKNVWKLILGKHNLTAPITSYSRPEVFTKSQSYFFAQSVKTIAVTSTAKGITSKQLLIGTIGDQILALDKRFVDPRRTLNPSQAEKEEGIIPLTDTLPIIPQAYVTHSHKVEGLRGIVTAPSKLESTTHVFAYGVDLFYTRLAPSKTYDSLTDDFSYALLLITIVALVAAIYITWVLSEKKELSEKWR

SEQ ID NO: 28539 - protein, 862 aa, Arabidopsis thaliana
  misc_feature (1)..(862): Ceres Seq. ID no. 2998982
MVWETSLHTAQHSKSLLSVPVDKDYPITVFGGGYLHAVSAIDGEVLWKKDFTAEGFEVQRVLQAPGSSIIYVLGFLHSSEAVVYQIDSKSGEVVAQKSTVFPGGFSGEISSVSSDKVVVLDSTRSILVTIGFIDGDISFQKTPISDLVEDSGTAEILSPLLSNMLAVKVNKRTIFVNVGDKGKLEVVDSLSDETAMSDSLPVADDQEAFASVHHEGSRIHLMVKLVNDLNNVLLRETIQMDQNRGRVHKVFMNNYIRTDRSNGFRALIVMEDHSLLLLQQGAIVWSREEGLASVTDVTTAELPLEKDGVSVAKVEHTLFEWLKGHVLKLKGSLLLASPEDVVAIQDLRVKSSGKNKLTRDHNGFRKLILALTRAGKLFALHTGDGRIVWSMLLNSPSQSQSCERPNGVSLYQWQVPHHHAMDENPSVLVVGKCGSDSSAPGVLSFVDVYTGKEISSSDIGHSVVQVMPLPITDSKEQRLHLIADTVGHVHLYPKTSEALSIFQREFQNVYWYTVEADDGIIRGHVMKGSCSGETADEYCFTTRELWTVVFPSESEKIISTLTRKPNEVVHTQAKVNTDQDLLYKYVSRNLLFVATVSPKGAGEIGSVTPEESSLVVYLIDTITGRILHRLSHQGCQGPVHAVFSENWVVYHYFNLRAHKYEVTVVEIYDQSRAENKNVWKLILGKHNLTAPITSYSRPEVFTKSQSYFFAQSVKTIAVTSTAKGITSKQLLIGTIGDQILALDKRFVDPRRTLNPSQAEKEEGIIPLTDTLPIIPQAYVTHSHKVEGLRGIVTAPSKLESTTHVFAYGVDLFYTRLAPSKTYDSLTDDFSYALLLITIVALVAAIYITWVLSEKKELSEKWR

SEQ ID NO: 28540 - protein, 699 aa, Arabidopsis thaliana
  misc_feature (1)..(699): Ceres Seq. ID no. 2998983
MLAVKVNKRTIFVNVGDKGKLEVVDSLSDETAMSDSLPVADDQEAFASVHHEGSRIHLMVKLVNDLNNVLLRETIQMDQNRGRVHKVFMNNYIRTDRSNGFRALIVMEDHSLLLLQQGAIVWSREEGLASVTDVTTAELPLEKDGVSVAKVEHTLFEWLKGHVLKLKGSLLLASPEDVVAIQDLRVKSSGKNKLTRDHNGFRKLILALTRAGKLFALHTGDGRIVWSMLLNSPSQSQSCERPNGVSLYQWQVPHHHAMDENPSVLVVGKCGSDSSAPGVLSFVDVYTGKEISSSDIGHSVVQVMPLPITDSKEQRLHLIADTVGHVHLYPKTSEALSIFQREFQNVYWYTVEADDGIIRGHVMKGSCSGETADEYCFTTRELWTVVFPSESEKIISTLTRKPNEVVHTQAKVNTDQDLLYKYVSRNLLFVATVSPKGAGEIGSVTPEESSLVVYLIDTITGRILHRLSHQGCQGPVHAVFSENWVVYHYFNLRAHKYEVTVVEIYDQSRAENKNVWKLILGKHNLTAPITSYSRPEVFTKSQSYFFAQSVKTIAVTSTAKGITSKQLLIGTIGDQILALDKRFVDPRRTLNPSQAEKEEGIIPLTDTLPIIPQAYVTHSHKVEGLRGIVTAPSKLESTTHVFAYGVDLFYTRLAPSKTYDSLTDDFSYALLLITIVALVAAIYITWVLSEKKELSEKWR

SEQ ID NO: 28541 - DNA, 1068 bp, Arabidopsis thaliana
  misc_feature (1)..(1068): Ceres Seq. ID no. 2999006
atggagagtacggtggaaagagaggcgtggaaagctcacgtggcgatgatcggtgtgcaattgttcaacggaggatatcatgtcattaccaaagtggctctcaacgttggtgtaaaccaacttgtcttctgtgtctttcgtgatctcattgctctctccattcttgctcctcttgcttatatccgtgataagagaacaagacctcctttgaatcgacagtttctcttagctttcttcttccttggtttaacagggatatttggtaatcagcttttgttcctcattggtctgaattacaccaatccaacttatgctgcagccattcagccgtcgatcccggtttttactttcatcttggctctcattatgggaacagagagactgaatttattcaagctagaaggtcaagctaaggtaggaggcacactgatttgtgtcgctggggcggtgctgatggttttgtttcgtggactggctttgtttggggaaacagaggctgagtccttgggtcatggtgaatcaagacacactgaaacatctggacacttcatgcatgctccggtcttaaagaagtatccggcgaatctttcagtcacagcatactcgtatttctttgggaccatgtttatggtgacatctgcttttttcatgactaatgagtcgacgaactggagtctcacaagatccgagttctttgcagttgtctacgcaggagtaatcgcgtctgctctcaactatggtctcttgacatggtcaaataagatcttgggtccttccttggttgctctctataatcctcttcaacccgcagcctcagctttcttgtccagaatcttccttggaagccctatctacttggggagcattttaggcggatgtgcaatcatagcaggtctttatagtgtcacctgggcatcttacaaagaaaagaaagcggcagcagcaatggctgtgatcccgatcacctcaaaggaagctgaacccttgatctacaaggaccataaaaacaaaccaataggacatctattcacaaaatctcccatctcttcaccaaaatccgatgattga

SEQ ID NO: 28542 - protein, 355 aa, Arabidopsis thaliana
  misc_feature (1)..(355): Ceres Seq. ID no. 2999007
MESTVEREAWKAHVAMIGVQLFNGGYHVITKVALNVGVNQLVFCVFRDLIALSILAPLAYIRDKRTRPPLNRQFLLAFFFLGLTGIFGNQLLFLIGLNYTNPTYAAAIQPSIPVFTFILALIMGTERLNLFKLEGQAKVGGTLICVAGAVLMVLFRGLALFGETEAESLGHGESRHTETSGHFMHAPVLKKYPANLSVTAYSYFFGTMFMVTSAFFMTNESTNWSLTRSEFFAVVYAGVIASALNYGLLTWSNKILGPSLVALYNPLQPAASAFLSRIFLGSPIYLGSILGGCAIIAGLYSVTWASYKEKKAAAAMAVIPITSKEAEPLIYKDHKNKPIGHLFTKSPISSPKSDD

SEQ ID NO: 28543 - protein, 340 aa, Arabidopsis thaliana
  misc_feature (1)..(340): Ceres Seq. ID no. 2999008
MIGVQLFNGGYHVITKVALNVGVNQLVFCVFRDLIALSILAPLAYIRDKRTRPPLNRQFLLAFFFLGLTGIFGNQLLFLIGLNYTNPTYAAAIQPSIPVFTFILALIMGTERLNLFKLEGQAKVGGTLICVAGAVLMVLFRGLALFGETEAESLGHGESRHTETSGHFMHAPVLKKYPANLSVTAYSYFFGTMFMVTSAFFMTNESTNWSLTRSEFFAVVYAGVIASALNYGLLTWSNKILGPSLVALYNPLQPAASAFLSRIFLGSPIYLGSILGGCAIIAGLYSVTWASYKEKKAAAAMAVIPITSKEAEPLIYKDHKNKPIGHLFTKSPISSPKSDD

SEQ ID NO: 28544 - protein, 233 aa, Arabidopsis thaliana
  misc_feature (1)..(233): Ceres Seq. ID no. 2999009
MGTERLNLFKLEGQAKVGGTLICVAGAVLMVLFRGLALFGETEAESLGHGESRHTETSGHFMHAPVLKKYPANLSVTAYSYFFGTMFMVTSAFFMTNESTNWSLTRSEFFAVVYAGVIASALNYGLLTWSNKILGPSLVALYNPLQPAASAFLSRIFLGSPIYLGSILGGCAIIAGLYSVTWASYKEKKAAAAMAVIPITSKEAEPLIYKDHKNKPIGHLFTKSPISSPKSDD

SEQ ID NO: 28545 - DNA, 849 bp, Arabidopsis thaliana
  misc_feature (1)..(849): Ceres Seq. ID no. 2999210
atggattgctcaatctgcaccacaatgccatctatattaagaccaccaagaaacacaatatgtggatcatgctacgaaggggctagaacaacaattgcgctgctcaagaaacttgagggctcgaaagaagatcgtcatgacaaatcgaaccataattccaccatcaataatggctcctctatttcttcgtctcctttgttttcttgtgagccgcaaccattagagaaggtgatcaaatggatgaaaaacatgaaagaaaccgaagaagaacagaagaaaagaatagtcttcttaagcagctttgtgtcgggtttcaaagaacagcttcatgctgatattcttctaaaaccgggcgatgatggccctccaattcctgcacatagagctttgctggcttcaaaatctgagatctttaagaacattctagactcagatggatgcaaaaccgctccagaatacgccataacgctccaagaactaaattccgagcaacttcaagctctcttggagtttctatacaccggtacattggcttcagataagttggagaaaaatgtctacgcgttgtttattgcagcagataagtacatgattcattacttgcaagagttgtgcgagcaatatatgttaagttccttggacatctctagtgttcttaacgttcttgatgtctcggatcttggttcgagcaagacgctgaaggaggcttgtgtagggttcgtggtgcggaacatggacgacgtcgttttctcggataagtacgaacctttctctcagaaaaaccaacatctatgtgtggagatcacaagggcgttcttgatggaaacgagaagcaagagacgtgactaa

SEQ ID NO: 28546 - protein, 282 aa, Arabidopsis thaliana
  misc_feature (1)..(282): Ceres Seq. ID no. 2999211
MDCSICTTMPSILRPPRNTICGSCYEGARTTIALLKKLEGSKEDRHDKSNHNSTINNGSSISSSPLFSCEPQPLEKVIKWMKNMKETEEEQKKRIVFLSSFVSGFKEQLHADILLKPGDDGPPIPAHRALLASKSEIFKNILDSDGCKTAPEYAITLQELNSEQLQALLEFLYTGTLASDKLEKNVYALFIAADKYMIHYLQELCEQYMLSSLDISSVLNVLDVSDLGSSKTLKEACVGFVVRNMDDVVFSDKYEPFSQKNQHLCVEITRAFLMETRSKRRD

SEQ ID NO: 28547 - protein, 274 aa, Arabidopsis thaliana
  misc_feature (1)..(274): Ceres Seq. ID no. 2999212
MPSILRPPRNTICGSCYEGARTTIALLKKLEGSKEDRHDKSNHNSTINNGSSISSSPLFSCEPQPLEKVIKWMKNMKETEEEQKKRIVFLSSFVSGFKEQLHADILLKPGDDGPPIPAHRALLASKSEIFKNILDSDGCKTAPEYAITLQELNSEQLQALLEFLYTGTLASDKLEKNVYALFIAADKYMIHYLQELCEQYMLSSLDISSVLNVLDVSDLGSSKTLKEACVGFVVRNMDDVVFSDKYEPFSQKNQHLCVEITRAFLMETRSKRRD

SEQ ID NO: 28548 - protein, 202 aa, Arabidopsis thaliana
  misc_feature (1)..(202): Ceres Seq. ID no. 2999213
MKNMKETEEEQKKRIVFLSSFVSGFKEQLHADILLKPGDDGPPIPAHRALLASKSEIFKNILDSDGCKTAPEYAITLQELNSEQLQALLEFLYTGTLASDKLEKNVYALFIAADKYMIHYLQELCEQYMLSSLDISSVLNVLDVSDLGSSKTLKEACVGFVVRNMDDVVFSDKYEPFSQKNQHLCVEITRAFLMETRSKRRD

SEQ ID NO: 28549 - DNA, 4125 bp, Arabidopsis thaliana
  misc_feature (1)..(4125): Ceres Seq. ID no. 2999571
atgagaaattgtcttccaatggaattgaatctgcgcaagggcgacaaggtttgggtcgaagataaggatttggcttggattgctgctgatgtcctcgattcttttgataacaaactccatgttgaaacttctactgggaagaagctatttcggagggatcctgacgatgaagagcataatggagtggatgatatgaccaaactgacatacttgcacgaagctggtgttctttataatctacagaggagatatgctctgaatgatatctatacatacactggaagcattctgatcgctgttaatccattcaaaaagcttccacatctctacaatgggcacatgatggaacagtacatgggagcaccattcggtgagctcagtcctcatgtttttgcagtttctgatgttgcatacagagcaatgattgacgacagtcgaagtcagtcaatacttgttagcggtgaaagtggagctggaaaaactgagacaaccaaactaatcatgcagtatcttacatttgttgggggacgtgctactgacgatgatagaagtgttgagcagcaagtccttgaatcaaatcctctcttggaagcatttggcaatgcaaaaacagttagaaatgataattccagccgttttggaaagtttgtcgaaatccagtttgacacaaatggtagaatatctggtgccgcaatcagaacctatcttctggagagatcacgtgttgtccggataacagaccccgagaggaattatcattgtttttatcaattgtgcgcttcggggaatgacgctgagaaatataaactaagcaaccctcgtcaatttcattatctaaatcaaagcaagacctatgaattagaaggagtcagcagcgcagaagagtataagaatacaaggagggcaatggatattgtgggcataagtcaggatgagcaggaagggatatttcgcacacttgctgcgattctacatcttggaaatgttgagttttcctcagggagagagcacgactcttcagtggtaaaggatccggaatctagacatcatctgcagatggctgctgatcttttcaagtgtgatgcaaatcttttgctggcttcgctctgcacacgttcaattctgacccgtgaaggtatcattatcaaagcacttgaccctaatgctgctgttactagccgggataccctcgcgaagactgtttacgcccatctatttgactggctggttgataagatcaataagtctgttgggcaagatccagaatctcgttttcaaataggagtcctggacatttatggctttgaatgttttaagaataacagttttgaacaattttgcatcaactttgcaaatgaaaagctgcagcaacatttcaacgagcatgtattcaagatggagcaggatgagtacagaaaagaagaaattaattggagttatatcgagtttattgacaaccaagatgtcttggaccttattgagaagaagcctattggggtgattgcactcttagatgaagcttgcatgtttcctagatcaactcatgagtcattttcaatgaagctgtttcagaactttagatttcatccgagattggagaagccaaaattttcagagacggattttactctctctcattatgctggcaaggcaacctttttggataaaaaccgtgattatactatagtggagcattgcaatctgctgtcttcctccaaatgcccttttgttgctggaattttcccctcagccccggaggagtctaccagatcttcttacaaattttcttctgtatcttccagatttaagcaacaacttcaagccctcatggaaactctcagcaaaacagagcctcactatgttcggtgtgtgaagccaaactcactcaacagacctcaaaagtttgagagtcttagtgttttacatcaacttcgttgtgggggtgtactggaagctgttcggattagtctagcagggtatcccactcgaaggaattattcagacttcgtggatcgttttggtctgctagctccagaattcatggatgagagcaatgatgagcaggcactgactgagaaaatcttgagtaaattaggtcttgggaattatcagctaggaaggacaaaagtgttcctaagagctggtcaaattggcattttggactctaggcgggctgaagtccttgatgcttctgcaagacttattcagcgaagactgagaacatttgtaacgcatcagaacttcatctctgcacgggcttctgcaatttcaattcaggcatactgtagaggatgcctgtctcgaaatgcttatgccaccagaaggaatgcggcggcagctgtcttggtccaaaagcatgtgcgcaggtggctgtcaagatgtgcatttgtaaaacttgtatcagctgccattgtattacagtcttgcatccgtgctgactcaactcgcttaaagttttcacatcagaaagagcatcgagctgcttctctaattcaggctcattggagaatccataagtttcgctcagcattcaggcaccgtcagtcatctattattgctattcagtgtcgttggcgacagaagcttgcgaagagagagtttagaaaacttaaacaggttgctaatgaagcaggtgctttgcgattagctaaaacgaaacttgaaaaacggttagaagatcttgaatggcggttgcagcttgagaaacgattgagaacaagtggtgaagaggccaagtcaagtgaaatatccaagcttcagaaaacattggaatccttcagcctcaaactagacgcagctaggctggctaccattaatgagtgcaataaaaatgcggtacttgaaaagcaactagacatatccatgaaggagaagtctgctgttgaaagagagcttaatggaatggttgaactaaaaaaagataacgccttgctgaagaattcgatgaactccttggaaaagaagaatcgggttcttgagaaggagcttctcaatgctaaaaccaattgcaataatacactacagaagttgaaggaagctgaaaaaaggtgttctgaactccagacgagtgttcaaagtcttgaggagaaactctctcatctggaaaacgagaaccaggtcttgatgcaaaagacgctaattacatccccagagagaataggacagatacttggtgaaaaacactctagtgctgttgtaccagcccaaaatgacaggagatctgtatttgagaactacgaattgctctccaggtgtataaaggaaaatttgggattcaatgatgataagccactggctgcctgtgtaatatacaaatgtcttctgcactggcgtgcctttgaatctgagagcacagccatatttaacatcattattgagggaatcaatgaagccctgaagagaaatctgcggtcaaatagttttctaaatgcaagtgctcagcgttctgggagggctgcatatggagtaaagtctccttttaaacttcatggacctgatgatggtgcttcgcatatagaagcaagatatccagcattattatttaaacagcagctgacagcatgtgtggagaagatttatggtttaattcgtgataatttgaaaaaagaattatcaccgcttctgggatcatgcattcaggtaccctcgttcttcattcgcaaacttgtgactcaggttttctcattcatcaacctatcacttttcaacagtcttcttcttcgtcgtgaatgttgcacattttcaaatggggaatatgtgaaatctgggatttcagaattggagaagtggatagctaatgcgaaggaggaggtattgactataaggcaaatatatcgaataagtacgatgtactgggatgataaatatggaactcaaagtgtctcaagtgaggtggtttctcaaatgagggtacttgtggacaaggataaccaaaaacaaacatcaaattcgttcttgctggacgatgatatgagcattcctttctctgcagaagatatagacaaggctattccagtattagacccatcagaaatagaacctccaaaattcgtatcagaatatacttgtgcacagtcccttgtgaagaaaccctccatagcttcaacctcaaagcagatcatttga

SEQ ID NO: 28550 - protein, 1374 aa, Arabidopsis thaliana
  misc_feature (1)..(1374): Ceres Seq. ID no. 2999572
MRNCLPMELNLRKGDKVWVEDKDLAWIAADVLDSFDNKLHVETSTGKKLFRRDPDDEEHNGVDDMTKLTYLHEAGVLYNLQRRYALNDIYTYTGSILIAVNPFKKLPHLYNGHMMEQYMGAPFGELSPHVFAVSDVAYRAMIDDSRSQSILVSGESGAGKTETTKLIMQYLTFVGGRATDDDRSVEQQVLESNPLLEAFGNAKTVRNDNSSRFGKFVEIQFDTNGRISGAAIRTYLLERSRVVRITDPERNYHCFYQLCASGNDAEKYKLSNPRQFHYLNQSKTYELEGVSSAEEYKNTRRAMDIVGISQDEQEGIFRTLAAILHLGNVEFSSGREHDSSVVKDPESRHHLQMAADLFKCDANLLLASLCTRSILTREGIIIKALDPNAAVTSRDTLAKTVYAHLFDWLVDKINKSVGQDPESRFQIGVLDIYGFECFKNNSFEQFCINFANEKLQQHFNEHVFKMEQDEYRKEEINWSYIEFIDNQDVLDLIEKKPIGVIALLDEACMFPRSTHESFSMKLFQNFRFHPRLEKPKFSETDFTLSHYAGKATFLDKNRDYTIVEHCNLLSSSKCPFVAGIFPSAPEESTRSSYKFSSVSSRFKQQLQALMETLSKTEPHYVRCVKPNSLNRPQKFESLSVLHQLRCGGVLEAVRISLAGYPTRRNYSDFVDRFGLLAPEFMDESNDEQALTEKILSKLGLGNYQLGRTKVFLRAGQIGILDSRRAEVLDASARLIQRRLRTFVTHQNFISARASAISIQAYCRGCLSRNAYATRRNAAAAVLVQKHVRRWLSRCAFVKLVSAAIVLQSCIRADSTRLKFSHQKEHRAASLIQAHWRIHKFRSAFRHRQSSIIAIQCRWRQKLAKREFRKLKQVANEAGALRLAKTKLEKRLEDLEWRLQLEKRLRTSGEEAKSSEISKLQKTLESFSLKLDAARLATINECNKNAVLEKQLDISMKEKSAVERELNGMVELKKDNALLKNSMNSLEKKNRVLEKELLNAKTNCNNTLQKLKEAEKRCSELQTSVQSLEEKLSHLENENQVLMQKTLITSPERIGQILGEKHSSAVVPAQNDRRSVFENYELLSRCIKENLGFNDDKPLAACVIYKCLLHWRAFESESTAIFNIIIEGINEALKRNLRSNSFLNASAQRSGRAAYGVKSPFKLHGPDDGASHIEARYPALLFKQQLTACVEKIYGLIRDNLKKELSPLLGSCIQVPSFFIRKLVTQVFSFINLSLFNSLLLRRECCTFSNGEYVKSGISELEKWIANAKEEVLTIRQIYRISTMYWDDKYGTQSVSSEVVSQMRVLVDKDNQKQTSNSFLLDDDMSIPFSAEDIDKAIPVLDPSEIEPPKFVSEYTCAQSLVKKPSIASTSKQII

SEQ ID NO: 28551 - protein, 1368 aa, Arabidopsis thaliana
  misc_feature (1)..(1368): Ceres Seq. ID no. 2999573
MELNLRKGDKVWVEDKDLAWIAADVLDSFDNKLHVETSTGKKLFRRDPDDEEHNGVDDMTKLTYLHEAGVLYNLQRRYALNDIYTYTGSILIAVNPFKKLPHLYNGHMMEQYMGAPFGELSPHVFAVSDVAYRAMIDDSRSQSILVSGESGAGKTETTKLIMQYLTFVGGRATDDDRSVEQQVLESNPLLEAFGNAKTVRNDNSSRFGKFVEIQFDTNGRISGAAIRTYLLERSRVVRITDPERNYHCFYQLCASGNDAEKYKLSNPRQFHYLNQSKTYELEGVSSAEEYKNTRRAMDIVGISQDEQEGIFRTLAAILHLGNVEFSSGREHDSSVVKDPESRHHLQMAADLFKCDANLLLASLCTRSILTREGIIIKALDPNAAVTSRDTLAKTVYAHLFDWLVDKINKSVGQDPESRFQIGVLDIYGFECFKNNSFEQFCINFANEKLQQHFNEHVFKMEQDEYRKEEINWSYIEFIDNQDVLDLIEKKPIGVIALLDEACMFPRSTHESFSMKLFQNFRFHPRLEKPKFSETDFTLSHYAGKATFLDKNRDYTIVEHCNLLSSSKCPFVAGIFPSAPEESTRSSYKFSSVSSRFKQQLQALMETLSKTEPHYVRCVKPNSLNRPQKFESLSVLHQLRCGGVLEAVRISLAGYPTRRNYSDFVDRFGLLAPEFMDESNDEQALTEKILSKLGLGNYQLGRTKVFLRAGQIGILDSRRAEVLDASARLIQRRLRTFVTHQNFISARASAISIQAYCRGCLSRNAYATRRNAAAAVLVQKHVRRWLSRCAFVKLVSAAIVLQSCIRADSTRLKFSHQKEHRAASLIQAHWRIHKFRSAFRHRQSSIIAIQCRWRQKLAKREFRKLKQVANEAGALRLAKTKLEKRLEDLEWRLQLEKRLRTSGEEAKSSEISKLQKTLESFSLKLDAARLATINECNKNAVLEKQLDISMKEKSAVERELNGMVELKKDNALLKNSMNSLEKKNRVLEKELLNAKTNCNNTLQKLKEAEKRCSELQTSVQSLEEKLSHLENENQVLMQKTLITSPERIGQILGEKHSSAVVPAQNDRRSVFENYELLSRCIKENLGFNDDKPLAACVIYKCLLHWRAFESESTAIFNIIIEGINEALKRNLRSNSFLNASAQRSGRAAYGVKSPFKLHGPDDGASHIEARYPALLFKQQLTACVEKIYGLIRDNLKKELSPLLGSCIQVPSFFIRKLVTQVFSFINLSLFNSLLLRRECCTFSNGEYVKSGISELEKWIANAKEEVLTIRQIYRISTMYWDDKYGTQSVSSEVVSQMRVLVDKDNQKQTSNSFLLDDDMSIPFSAEDIDKAIPVLDPSEIEPPKFVSEYTCAQSLVKKPSIASTSKQII

SEQ ID NO: 28552 - protein, 1310 aa, Arabidopsis thaliana
  misc_feature (1)..(1310): Ceres Seq. ID no. 2999574
MTKLTYLHEAGVLYNLQRRYALNDIYTYTGSILIAVNPFKKLPHLYNGHMMEQYMGAPFGELSPHVFAVSDVAYRAMIDDSRSQSILVSGESGAGKTETTKLIMQYLTFVGGRATDDDRSVEQQVLESNPLLEAFGNAKTVRNDNSSRFGKFVEIQFDTNGRISGAAIRTYLLERSRVVRITDPERNYHCFYQLCASGNDAEKYKLSNPRQFHYLNQSKTYELEGVSSAEEYKNTRRAMDIVGISQDEQEGIFRTLAAILHLGNVEFSSGREHDSSVVKDPESRHHLQMAADLFKCDANLLLASLCTRSILTREGIIIKALDPNAAVTSRDTLAKTVYAHLFDWLVDKINKSVGQDPESRFQIGVLDIYGFECFKNNSFEQFCINFANEKLQQHFNEHVFKMEQDEYRKEEINWSYIEFIDNQDVLDLIEKKPIGVIALLDEACMFPRSTHESFSMKLFQNFRFHPRLEKPKFSETDFTLSHYAGKATFLDKNRDYTIVEHCNLLSSSKCPFVAGIFPSAPEESTRSSYKFSSVSSRFKQQLQALMETLSKTEPHYVRCVKPNSLNRPQKFESLSVLHQLRCGGVLEAVRISLAGYPTRRNYSDFVDRFGLLAPEFMDESNDEQALTEKILSKLGLGNYQLGRTKVFLRAGQIGILDSRRAEVLDASARLIQRRLRTFVTHQNFISARASAISIQAYCRGCLSRNAYATRRNAAAAVLVQKHVRRWLSRCAFVKLVSAAIVLQSCIRADSTRLKFSHQKEHRAASLIQAHWRIHKFRSAFRHRQSSIIAIQCRWRQKLAKREFRKLKQVANEAGALRLAKTKLEKRLEDLEWRLQLEKRLRTSGEEAKSSEISKLQKTLESFSLKLDAARLATINECNKNAVLEKQLDISMKEKSAVERELNGMVELKKDNALLKNSMNSLEKKNRVLEKELLNAKTNCNNTLQKLKEAEKRCSELQTSVQSLEEKLSHLENENQVLMQKTLITSPERIGQILGEKHSSAVVPAQNDRRSVFENYELLSRCIKENLGFNDDKPLAACVIYKCLLHWRAFESESTAIFNIIIEGINEALKRNLRSNSFLNASAQRSGRAAYGVKSPFKLHGPDDGASHIEARYPALLFKQQLTACVEKIYGLIRDNLKKELSPLLGSCIQVPSFFIRKLVTQVFSFINLSLFNSLLLRRECCTFSNGEYVKSGISELEKWIANAKEEVLTIRQIYRISTMYWDDKYGTQSVSSEVVSQMRVLVDKDNQKQTSNSFLLDDDMSIPFSAEDIDKAIPVLDPSEIEPPKFVSEYTCAQSLVKKPSIASTSKQII

SEQ ID NO: 28553 - DNA, 759 bp, Arabidopsis thaliana
  misc_feature (1)..(759): Ceres Seq. ID no. 3000081
atggcccaagttataacccgaataaaggatccgatcgagaaggagagagacaacagtcacagacacagagagatggcgagagagaagaagacgtgtgtagagtgtgggcacaaggttaaatctttgttcatacaatactctcctggaaattttcgtctcatgaaatgcgagaattgcgaagaagtagcagacgaatatgtcgagtgtgagctattgattattttcatcgacttgattcttcacaaaacaaaggcttatagacacttactctacaatgttgttaatcaagaatctgcaaatgttcagcatctattatggaaattggtcttggcttatcttcttctagatacttatagaagcttgctactgagaagaaccaatgacggatcaaatgtgtctatgagctttctttttgaatctctagaggttctggtcaatgtactatctgcgaatttcgcatttgttttctcatttgcatttgctgctaagttgatgctggttatgccaagagggaaagagattcttttaacgatcttaatctcgagttacgtcaagatctttctatttgctatgccggtctgggaattcccagtttctgtgatcttcatcgtagatatgctcgttttaacctcaaacgcagttgctcttaaagtgatgactgaatcagcaacgagcagatgcttagcagtgtgtttcattgcacactcaattagattcttggtggatcagatctctggacacttaggatctgtcatgtaa

SEQ ID NO: 28554 - protein, 252 aa, Arabidopsis thaliana
  misc_feature (1)..(252): Ceres Seq. ID no. 3000082
MAQVITRIKDPIEKERDNSHRHREMAREKKTCVECGHKVKSLFIQYSPGNFRLMKCENCEEVADEYVECELLIIFIDLILHKTKAYRHLLYNVVNQESANVQHLLWKLVLAYLLLDTYRSLLLRRTNDGSNVSMSFLFESLEVLVNVLSANFAFVFSFAFAAKLMLVMPRGKEILLTILISSYVKIFLFAMPVWEFPVSVIFIVDMLVLTSNAVALKVMTESATSRCLAVCFIAHSIRFLVDQISGHLGSVM

SEQ ID NO: 28555 - protein, 228 aa, Arabidopsis thaliana
  misc_feature (1)..(228): Ceres Seq. ID no. 3000083
MAREKKTCVECGHKVKSLFIQYSPGNFRLMKCENCEEVADEYVECELLIIFIDLILHKTKAYRHLLYNVVNQESANVQHLLWKLVLAYLLLDTYRSLLLRRTNDGSNVSMSFLFESLEVLVNVLSANFAFVFSFAFAAKLMLVMPRGKEILLTILISSYVKIFLFAMPVWEFPVSVIFIVDMLVLTSNAVALKVMTESATSRCLAVCFIAHSIRFLVDQISGHLGSVM

SEQ ID NO: 28556 - protein, 199 aa, Arabidopsis thaliana
  misc_feature (1)..(199): Ceres Seq. ID no. 3000084
MKCENCEEVADEYVECELLIIFIDLILHKTKAYRHLLYNVVNQESANVQHLLWKLVLAYLLLDTYRSLLLRRTNDGSNVSMSFLFESLEVLVNVLSANFAFVFSFAFAAKLMLVMPRGKEILLTILISSYVKIFLFAMPVWEFPVSVIFIVDMLVLTSNAVALKVMTESATSRCLAVCFIAHSIRFLVDQISGHLGSVM

SEQ ID NO: 28557 - DNA, 1098 bp, Arabidopsis thaliana
  misc_feature (1)..(1098): Ceres Seq. ID no. 3017043
atggattacactgtttcctctctacaatgcttcttcttagttttatgtctctctcttttggtttgctctaactctgaaactagttacaagtcaaacaagaaacctatattgataaacttcggcgactctaactccgacaccggaggagttcttgctggagttggacttcctatcggactccctcatggcattaccttcttccatagaggcactggtcgtctcggtgacggtcgactcatcgttgacttctactgtgaacatttaaagatgacatatttgagtccatatttggattcactttcaccaaatttcaaaagaggagtcaatttcgcagtctcgggcgccaccgctcttccgatcttttccttccctcttgccattcaaattcgtcaattcgtccatttcaaaaaccgttctcaagaacttatctcttccggtagaagagaccttattgatgataatggatttagaaacgcgttgtacatgatcgatattggacaaaacgatcttttacttgctctatatgattcgaatttaacctatgcacccgttgtcgaaaaaattccttccatgcttcttgagataaagaaagccatacagactgtatatttatacggagggagaaagttttgggtacacaacacaggcccattgggctgtgcaccaaaagaattggcgattcacctgcataacgattcggatcttgacccgattggttgtttccgggttcacaatgaagtcgccaaagccttcaacaaaggactccttagtctctgcaacgaactgagatcccaattcaaagacgccactctcgtctacgttgatatttactccatcaaatataaactctccgccgatttcaaactatacggatttgtggacccgttgatggcttgttgcggttatggaggaagacctaacaactatgatcgaaaagcaacgtgtggtcaacccggttcaactatttgtcgtgatgtaaccaaagcaattgtatgggatggggttcactatactgaagctgctaaccggtttgtcgttgatgctgttttgacgaatcggtactcttacccaaaaaattcccttgaccggttttggtag

SEQ ID NO: 28558 - protein, 365 aa, Arabidopsis thaliana
  misc_feature (1)..(365): Ceres Seq. ID no. 3017044
MDYTVSSLQCFFLVLCLSLLVCSNSETSYKSNKKPILINFGDSNSDTGGVLAGVGLPIGLPHGITFFHRGTGRLGDGRLIVDFYCEHLKMTYLSPYLDSLSPNFKRGVNFAVSGATALPIFSFPLAIQIRQFVHFKNRSQELISSGRRDLIDDNGFRNALYMIDIGQNDLLLALYDSNLTYAPVVEKIPSMLLEIKKAIQTVYLYGGRKFWVHNTGPLGCAPKELAIHLHNDSDLDPIGCFRVHNEVAKAFNKGLLSLCNELRSQFKDATLVYVDIYSIKYKLSADFKLYGFVDPLMACCGYGGRPNNYDRKATCGQPGSTICRDVTKAIVWDGVHYTEAANRFVVDAVLTNRYSYPKNSLDRFW

SEQ ID NO: 28559 - protein, 276 aa, Arabidopsis thaliana
  misc_feature (1)..(276): Ceres Seq. ID no. 3017045
MTYLSPYLDSLSPNFKRGVNFAVSGATALPIFSFPLAIQIRQFVHFKNRSQELISSGRRDLIDDNGFRNALYMIDIGQNDLLLALYDSNLTYAPVVEKIPSMLLEIKKAIQTVYLYGGRKFWVHNTGPLGCAPKELAIHLHNDSDLDPIGCFRVHNEVAKAFNKGLLSLCNELRSQFKDATLVYVDIYSIKYKLSADFKLYGFVDPLMACCGYGGRPNNYDRKATCGQPGSTICRDVTKAIVWDGVHYTEAANRFVVDAVLTNRYSYPKNSLDRFW

SEQ ID NO: 28560 - protein, 204 aa, Arabidopsis thaliana
  misc_feature (1)..(204): Ceres Seq. ID no. 3017046
MIDIGQNDLLLALYDSNLTYAPVVEKIPSMLLEIKKAIQTVYLYGGRKFWVHNTGPLGCAPKELAIHLHNDSDLDPIGCFRVHNEVAKAFNKGLLSLCNELRSQFKDATLVYVDIYSIKYKLSADFKLYGFVDPLMACCGYGGRPNNYDRKATCGQPGSTICRDVTKAIVWDGVHYTEAANRFVVDAVLTNRYSYPKNSLDRFW

SEQ ID NO: 28561 - DNA, 606 bp, Arabidopsis thaliana
  misc_feature (1)..(606): Ceres Seq. ID no. 3017321
atgtgtgagtgtgacataaaaaaggttatggcaaacagaaaaccttggtaccagagagctatggcggttgccagattcgcaacgaattggagaacaatccctaaatcatcatcacaacaacaaccagagaattttcgtccgtctcgaaaccctagcgtcaacagcaagtcatccaatcataaccaaatttatcaccagctgagaaaatgctcgtctctcaaggtagctgcgaattctttcactagggtttgcctctgcgctccgattggtccatacgacgacgtttttcggattcacgtcccgccgagaagaagttcaagctatcctccgtcgaagcctcttcctatggagacggcagtggcggtggcgacggcgaggatgagtgtggattcagggaggaggatatttagagggaagtcgttgagggaaaacgcgttgatgaggagattcgtggtggcggaagaagaagcgataatggagaatagaaagagagatcaaatggagattgtgaggaagagaaatcagatgaggaggaagaagaagcttggacctagtcctcttagtcgtatggttatcgctgaagatcaagaagtttgtcttctttga

SEQ ID NO: 28562 - protein, 201 aa, Arabidopsis thaliana
  misc_feature (1)..(201): Ceres Seq. ID no. 3017322
MCECDIKKVMANRKPWYQRAMAVARFATNWRTIPKSSSQQQPENFRPSRNPSVNSKSSNHNQIYHQLRKCSSLKVAANSFTRVCLCAPIGPYDDVFRIHVPPRRSSSYPPSKPLPMETAVAVATARMSVDSGRRIFRGKSLRENALMRRFVVAEEEAIMENRKRDQMEIVRKRNQMRRKKKLGPSPLSRMVIAEDQEVCLL

SEQ ID NO: 28563 - protein, 192 aa, Arabidopsis thaliana
  misc_feature (1)..(192): Ceres Seq. ID no. 3017323
MANRKPWYQRAMAVARFATNWRTIPKSSSQQQPENFRPSRNPSVNSKSSNHNQIYHQLRKCSSLKVAANSFTRVCLCAPIGPYDDVFRIHVPPRRSSSYPPSKPLPMETAVAVATARMSVDSGRRIFRGKSLRENALMRRFVVAEEEAIMENRKRDQMEIVRKRNQMRRKKKLGPSPLSRMVIAEDQEVCLL

SEQ ID NO: 28564 - protein, 181 aa, Arabidopsis thaliana
  misc_feature (1)..(181): Ceres Seq. ID no. 3017324
MAVARFATNWRTIPKSSSQQQPENFRPSRNPSVNSKSSNHNQIYHQLRKCSSLKVAANSFTRVCLCAPIGPYDDVFRIHVPPRRSSSYPPSKPLPMETAVAVATARMSVDSGRRIFRGKSLRENALMRRFVVAEEEAIMENRKRDQMEIVRKRNQMRRKKKLGPSPLSRMVIAEDQEVCLL

SEQ ID NO: 28565 - DNA, 1623 bp, Arabidopsis thaliana
  misc_feature (1)..(1623): Ceres Seq. ID no. 3017447
atgacgcaaaggaagaatatgtactcgaagaaaaactcgttcggccgatcagatttcccagagggtttccttttcggtacagcttcatcggcttaccaatatgaaggagccagaaacgaagctcctcgaggagagagtgtttgggacacatttgttcgcaaatatccagagagaaattgctactctaatgcggaccaagcaatcgagttctataaccattacaaggacgatatccagagaatgaaggatattaacatggatgctttcagattctctatctcttggcctaggatttttcctcttggaaagaaaagcaaaggagtgaacaaagaaggaatacaattctataacgatctcatcgatgaactcctcgctaacggaataacacctctcgccactttatttcactgggatactcctcaagcacttgaagatgaatacagtggatttttaagcgaagaagctgttgatgacttcaaggattttgcggccttatgttttgaggagtttggcgaccgtgtaaaattgtgggtcacactaaacgaaccatgggtgtacagtattggtggctatgacacgggaagaaaagcccccggacgtgcctccaaatacatgaacgaagcagccgtggcaggagaatctggtctcgaggtttacactgttagtcacaatctacttctggctcacgccgaagctgttgaggtcttcaggaacaatcccaaatgtaaagatggcaagatcggtatcgctcattgtcccgtatggttcgagccttatgactcgaactgccctaaagacatagaagcatgcgaacgagctatggagtttatgtttggatggcacatggatcctacggtgtatggagattaccctgcagtcatgaaaaaatcgatcggaaaaagattaccatcatttaccgcagcacaatccaagaagcttagaggatcttttgatttcgttggggtgaattattacagtgctttctacgtcaaaaatattgatgaagtgaatcatgacaagcccaattggagatcagacgcacgcatcgaatggagaaaagaaaacaacgcagggcaaacattaggtgtaagaggtggttcggaatgggactttctatatccacaaggccttagaaagtttctaaattatgccaagaataaatatgaaagcccgaaatttatgattaccgaaaacggacactgtgatatagattatgagaaaaagcctaaactttctaacttgatggatctccaaaggacagagtaccacaagaaacatctccaaagcatccaacaagccatccaggaggatggggttgtagttgaaggatactttgcgtggtcattactagacaattgtgaatggaacgccggttatggagttcgatatggactattctacgtcgattataacaatggactaaaacgtttcccgaaaatgtcggcgatgtggttcaaagaattcttgaagagagaagaagaaattgaagattcagaagaagaagagtacgtgttgaagtcaacaatgaacaagaagagattcttattagcaactggttcatcagcttcatgctttattcctaagatgtctgaatcttctaaagccctcgaactattattctag

SEQ ID NO: 28566 - protein, 540 aa, Arabidopsis thaliana
  misc_feature (1)..(540): Ceres Seq. ID no. 3017448
MTQRKNMYSKKNSFGRSDFPEGFLFGTASSAYQYEGARNEAPRGESVWDTFVRKYPERNCYSNADQAIEFYNHYKDDIQRMKDINMDAFRFSISWPRIFPLGKKSKGVNKEGIQFYNDLIDELLANGITPLATLFHWDTPQALEDEYSGFLSEEAVDDFKDFAALCFEEFGDRVKLWVTLNEPWVYSIGGYDTGRKAPGRASKYMNEAAVAGESGLEVYTVSHNLLLAHAEAVEVFRNNPKCKDGKIGIAHCPVWFEPYDSNCPKDIEACERAMEFMFGWHMDPTVYGDYPAVMKKSIGKRLPSFTAAQSKKLRGSFDFVGVNYYSAFYVKNIDEVNHDKPNWRSDARIEWRKENNAGQTLGVRGGSEWDFLYPQGLRKFLNYAKNKYESPKFMITENGHCDIDYEKKPKLSNLMDLQRTEYHKKHLQSIQQAIQEDGVVVEGYFAWSLLDNCEWNAGYGVRYGLFYVDYNNGLKRFPKMSAMWFKEFLKREEEIEDSEEEEYVLKSTMNKKRFLLATGSSASCFIPKMSESSKALELLF

SEQ ID NO: 28567 - protein, 534 aa, Arabidopsis thaliana
  misc_feature (1)..(534): Ceres Seq. ID no. 3017449
MYSKKNSFGRSDFPEGFLFGTASSAYQYEGARNEAPRGESVWDTFVRKYPERNCYSNADQAIEFYNHYKDDIQRMKDINMDAFRFSISWPRIFPLGKKSKGVNKEGIQFYNDLIDELLANGITPLATLFHWDTPQALEDEYSGFLSEEAVDDFKDFAALCFEEFGDRVKLWVTLNEPWVYSIGGYDTGRKAPGRASKYMNEAAVAGESGLEVYTVSHNLLLAHAEAVEVFRNNPKCKDGKIGIAHCPVWFEPYDSNCPKDIEACERAMEFMFGWHMDPTVYGDYPAVMKKSIGKRLPSFTAAQSKKLRGSFDFVGVNYYSAFYVKNIDEVNHDKPNWRSDARIEWRKENNAGQTLGVRGGSEWDFLYPQGLRKFLNYAKNKYESPKFMITENGHCDIDYEKKPKLSNLMDLQRTEYHKKHLQSIQQAIQEDGVVVEGYFAWSLLDNCEWNAGYGVRYGLFYVDYNNGLKRFPKMSAMWFKEFLKREEEIEDSEEEEYVLKSTMNKKRFLLATGSSASCFIPKMSESSKALELLF

SEQ ID NO: 28568 - protein, 460 aa, Arabidopsis thaliana
  misc_feature (1)..(460): Ceres Seq. ID no. 3017450
MKDINMDAFRFSISWPRIFPLGKKSKGVNKEGIQFYNDLIDELLANGITPLATLFHWDTPQALEDEYSGFLSEEAVDDFKDFAALCFEEFGDRVKLWVTLNEPWVYSIGGYDTGRKAPGRASKYMNEAAVAGESGLEVYTVSHNLLLAHAEAVEVFRNNPKCKDGKIGIAHCPVWFEPYDSNCPKDIEACERAMEFMFGWHMDPTVYGDYPAVMKKSIGKRLPSFTAAQSKKLRGSFDFVGVNYYSAFYVKNIDEVNHDKPNWRSDARIEWRKENNAGQTLGVRGGSEWDFLYPQGLRKFLNYAKNKYESPKFMITENGHCDIDYEKKPKLSNLMDLQRTEYHKKHLQSIQQAIQEDGVVVEGYFAWSLLDNCEWNAGYGVRYGLFYVDYNNGLKRFPKMSAMWFKEFLKREEEIEDSEEEEYVLKSTMNKKRFLLATGSSASCFIPKMSESSKALELLF

SEQ ID NO: 28569 - DNA, 348 bp, Arabidopsis thaliana
  misc_feature (1)..(348): Ceres Seq. ID no. 3017472
atggcttctctcaactccgacgttatcatgggtgaatcctcctccatctccgtaccttcatcttcgtccaagaactcgaaacgatttgaattaaagaagtggagtgctgtcgctctctgggcttgggatatcgttgttgataactgcgcaatttgtaggaatcacatcatggatctctgtattgaatgtctagctaatcaagctagtgccactagtgaggaatgcactgttgcttggggggtttgcaaccacgcctttcacttccactgtatcagcagatggctcaaaactcgtcaagtgtgtccactagatgtctgcgagtgggaattccagaaatatggtcactaa

SEQ ID NO: 28570 - protein, 115 aa, Arabidopsis thaliana
  misc_feature (1)..(115): Ceres Seq. ID no. 3017473
MASLNSDVIMGESSSISVPSSSSKNSKRFELKKWSAVALWAWDIVVDNCAICRNHIMDLCIECLANQASATSEECTVAWGVCNHAFHFHCISRWLKTRQVCPLDVCEWEFQKYGH

SEQ ID NO: 28571 - protein, 106 aa, Arabidopsis thaliana
  misc_feature (1)..(106): Ceres Seq. ID no. 3017474
MGESSSISVPSSSSKNSKRFELKKWSAVALWAWDIVVDNCAICRNHIMDLCIECLANQASATSEECTVAWGVCNHAFHFHCISRWLKTRQVCPLDVCEWEFQKYGH

SEQ ID NO: 28572 - protein, 59 aa, Arabidopsis thaliana
  misc_feature (1)..(59): Ceres Seq. ID no. 3017475
MDLCIECLANQASATSEECTVAWGVCNHAFHFHCISRWLKTRQVCPLDVCEWEFQKYGH

SEQ ID NO: 28573 - DNA, 1737 bp, Arabidopsis thaliana
  misc_feature (1)..(1737): Ceres Seq. ID no. 3018727
atgacgtctctattctctaaacctagagctctcacttctcatatcaccaactttaaaacttaccgtccggttatcggaaaactccacgtggcaactttaacgcttcttctcttcctaatcgccgccggtattgccgtcacttcctctctatggcttaacaagacgacaaaagcatttgatcgaccgacattagtagcaacaaaaccagaaccggagctagagccaccgcatgaaaccggagtattggtaaattgcacaagtttcttgaatcaaaaccggtccggttcttgctcaagaacacctctacttaacaagaaaaaaccatctcatcgaccgacaataacaacaataaaaccggtcccggtacgtgtatcagagaagaaatcaccggaggaaaccggaagctcggtagattgctcaagtttcttgaatcaaaaccggtctggttcttgctcaagaacactgcaatcgggttataatcaaaaccaaaccgaatctaaccggtcttgtcctgattacttcaagtggattcacgaggatctaaaaccatggagagaaacagggataacaaaagaaatggtggaaagaggcaaaactacagcacatttcaggttagttattttaaacggcaaggtgttcgtcgaaaactacaagaagtctatacaaactagagatgcgttcacactatgggggattcttcagctgctgagaaagtatccagggaagttacctgacgtggatctcatgtttgactgtgatgatcgaccagtcattagatcggacggttataatatattgaatcgtacggttgagaatgcgccacctccgttgtttagatattgcggtgataggtggacggtggatatcgtctttcctgattggtcattctggggatggcaggagataaacataagggagtggagcaaagtgttgaaagaaatggaagaaggaaagaagaagaagaaatttatggaaagagacgcctatgcatattggaaagggaacccttttgttgcatctccttcaagagaagatctcctcacttgcaatttatcctcactacatgattggaatgctagaattttcattcaggattggatatcagaaggacaaagaggatttgagaattcgaatgtagcaaatcaatgcacttacaggtacaagatctatatagaagggtatgcgtggtcagtgagtgagaaatacatattagcatgtgactcagtcacattgatggtgaaaccttattactatgatttcttctcaagaactcttcaacctctccaacactattggcccattagggataaagataaatgtagatccatcaaatttgctgttgattggcttaataatcacactcaaaaggctcaagagataggaagagaagcaagtgagttcatgcaaagagatctatcaatggaaaatgtttatgattacatgttccatctgttgaatgaatactccaagcttcttaagtacaagcctcaagttccaaagaatagtgttgagctatgcacagaagccttggtgtgcccttctgaaggggaagatgttaatggggttgataagaaatttatgataggctctttagttagtaggcctcatgcttctggcccatgttcacttcctcctccttttgattccaatggtcttgagaagttccataggaagaaattgaatctcatccggcaagtggagaaatgggaagactcttactggcaaaaggttctgtaa

SEQ ID NO: 28574 - protein, 578 aa, Arabidopsis thaliana
  misc_feature (1)..(578): Ceres Seq. ID no. 3018728
MTSLFSKPRALTSHITNFKTYRPVIGKLHVATLTLLLFLIAAGIAVTSSLWLNKTTKAFDRPTLVATKPEPELEPPHETGVLVNCTSFLNQNRSGSCSRTPLLNKKKPSHRPTITTIKPVPVRVSEKKSPEETGSSVDCSSFLNQNRSGSCSRTLQSGYNQNQTESNRSCPDYFKWIHEDLKPWRETGITKEMVERGKTTAHFRLVILNGKVFVENYKKSIQTRDAFTLWGILQLLRKYPGKLPDVDLMFDCDDRPVIRSDGYNILNRTVENAPPPLFRYCGDRWTVDIVFPDWSFWGWQEINIREWSKVLKEMEEGKKKKKFMERDAYAYWKGNPFVASPSREDLLTCNLSSLHDWNARIFIQDWISEGQRGFENSNVANQCTYRYKIYIEGYAWSVSEKYILACDSVTLMVKPYYYDFFSRTLQPLQHYWPIRDKDKCRSIKFAVDWLNNHTQKAQEIGREASEFMQRDLSMENVYDYMFHLLNEYSKLLKYKPQVPKNSVELCTEALVCPSEGEDVNGVDKKFMIGSLVSRPHASGPCSLPPPFDSNGLEKFHRKKLNLIRQVEKWEDSYWQKVL

SEQ ID NO: 28575 - protein, 386 aa, Arabidopsis thaliana
  misc_feature (1)..(386): Ceres Seq. ID no. 3018729
MVERGKTTAHFRLVILNGKVFVENYKKSIQTRDAFTLWGILQLLRKYPGKLPDVDLMFDCDDRPVIRSDGYNILNRTVENAPPPLFRYCGDRWTVDIVFPDWSFWGWQEINIREWSKVLKEMEEGKKKKKFMERDAYAYWKGNPFVASPSREDLLTCNLSSLHDWNARIFIQDWISEGQRGFENSNVANQCTYRYKIYIEGYAWSVSEKYILACDSVTLMVKPYYYDFFSRTLQPLQHYWPIRDKDKCRSIKFAVDWLNNHTQKAQEIGREASEFMQRDLSMENVYDYMFHLLNEYSKLLKYKPQVPKNSVELCTEALVCPSEGEDVNGVDKKFMIGSLVSRPHASGPCSLPPPFDSNGLEKFHRKKLNLIRQVEKWEDSYWQKVL

SEQ ID NO: 28576 - protein, 330 aa, Arabidopsis thaliana
  misc_feature (1)..(330): Ceres Seq. ID no. 3018730
MFDCDDRPVIRSDGYNILNRTVENAPPPLFRYCGDRWTVDIVFPDWSFWGWQEINIREWSKVLKEMEEGKKKKKFMERDAYAYWKGNPFVASPSREDLLTCNLSSLHDWNARIFIQDWISEGQRGFENSNVANQCTYRYKIYIEGYAWSVSEKYILACDSVTLMVKPYYYDFFSRTLQPLQHYWPIRDKDKCRSIKFAVDWLNNHTQKAQEIGREASEFMQRDLSMENVYDYMFHLLNEYSKLLKYKPQVPKNSVELCTEALVCPSEGEDVNGVDKKFMIGSLVSRPHASGPCSLPPPFDSNGLEKFHRKKLNLIRQVEKWEDSYWQKVL

SEQ ID NO: 28577 - DNA, 606 bp, Arabidopsis thaliana
  misc_feature (1)..(606): Ceres Seq. ID no. 3021062
atggaagaatctgttcatcaatcgatacgattcggctcagttgcagatttaatcatgtggaagaatcgacgcggagggtttcttctacttggatcaacgacattgttatggttcctctttgagaaatgtggatacagtttcttcccctttgttgttaatactcagcttctctccgtcgttatactcttcctctgggccaaatctgctattctcttcaataggcctatgcctcaactacctaatcttgaaatcactgaggaatttgtgtttatggtggctgatgctatacgagtctggattaataccgtgctcgctgttgctcgtgagatttacgtgggaagaaatgcaaagcaactctttcgggtgagtgttgtgttgtggacagtatcatttgttggaaatttcttaaacttcctcacaatactctatcttggtgttgttctgagtctgttgattccctttttgtacgagagataccaggatcttattgacgagaagctatctttaactcatcgagtcattcagacacagtacaggaagatcgatgaaagattactacagaagattattgctaagcccacaaataagataaagaagatgcaatag

SEQ ID NO: 28578 - protein, 201 aa, Arabidopsis thaliana
  misc_feature (1)..(201): Ceres Seq. ID no. 3021063
MEESVHQSIRFGSVADLIMWKNRRGGFLLLGSTTLLWFLFEKCGYSFFPFVVNTQLLSVVILFLWAKSAILFNRPMPQLPNLEITEEFVFMVADAIRVWINTVLAVAREIYVGRNAKQLFRVSVVLWTVSFVGNFLNFLTILYLGVVLSLLIPFLYERYQDLIDEKLSLTHRVIQTQYRKIDERLLQKIIAKPTNKIKKMQ

SEQ ID NO: 28579 - protein, 183 aa, Arabidopsis thaliana
  misc_feature (1)..(183): Ceres Seq. ID no. 3021064
MWKNRRGGFLLLGSTTLLWFLFEKCGYSFFPFVVNTQLLSVVILFLWAKSAILFNRPMPQLPNLEITEEFVFMVADAIRVWINTVLAVAREIYVGRNAKQLFRVSVVLWTVSFVGNFLNFLTILYLGVVLSLLIPFLYERYQDLIDEKLSLTHRVIQTQYRKIDERLLQKIIAKPTNKIKKMQ

SEQ ID NO: 28580 - protein, 126 aa, Arabidopsis thaliana
  misc_feature (1)..(126): Ceres Seq. ID no. 3021065
MPQLPNLEITEEFVFMVADAIRVWINTVLAVAREIYVGRNAKQLFRVSVVLWTVSFVGNFLNFLTILYLGVVLSLLIPFLYERYQDLIDEKLSLTHRVIQTQYRKIDERLLQKIIAKPTNKIKKMQ

SEQ ID NO: 28581 - DNA, 771 bp, Arabidopsis thaliana
  misc_feature (1)..(771): Ceres Seq. ID no. 3021265
atgggaattcagaaaccggcatggttggatgcgctatacgcagagaagttcttcgtgggatgtccataccatgagacggcgaagaagaacgagaggaacgtgtgttgtcttgattgttgcaccagtctctgccctcactgtgtaccctctcatagattccatagactccttcaagttcgccgttatgtgtatcacgacgttgttcggcttgaagatcttcagaaactcatcgactgctctaacgttcaagcttatacaataaatagtgcaaaagtggtgttcatcaagaagagaccacaaaatagacaattcaaaggagctggcaactattgcacttcttgtgaccgaagtcttcaagaaccttatatccattgctccttgggttgtaaggtggactttgtgatgaaacgttacagggacataaccccattcctcaagccatgccacactctaaccctaggtcctgactacatcatcccacaagacttactgacagatgatgaagtggcggcctacgagactcctcgatcaactgtggtagacggcgatgagtccatgagctggtcctcagcttcctcggataacaacaatgcgggtgcggcggctgcttatgccgcaaccaccacccatgtcgtgaggaaaaaaaggactggtttttgcctttgcgctaaatcggctaatagttataaagaagtttcggaggatcctgacgatatttctgcttgcatcaatcggcgaaaaggcgttcctcaacgatctcctctctgttaa

SEQ ID NO: 28582 - protein, 256 aa, Arabidopsis thaliana
  misc_feature (1)..(256): Ceres Seq. ID no. 3021266
MGIQKPAWLDALYAEKFFVGCPYHETAKKNERNVCCLDCCTSLCPHCVPSHRFHRLLQVRRYVYHDVVRLEDLQKLIDCSNVQAYTINSAKVVFIKKRPQNRQFKGAGNYCTSCDRSLQEPYIHCSLGCKVDFVMKRYRDITPFLKPCHTLTLGPDYIIPQDLLTDDEVAAYETPRSTVVDGDESMSWSSASSDNNNAGAAAAYAATTTHVVRKKRTGFCLCAKSANSYKEVSEDPDDISACINRRKGVPQRSPLC

SEQ ID NO: 28583 - DNA, 1230 bp, Arabidopsis thaliana
  misc_feature (1)..(1230): Ceres Seq. ID no. 3023647
atgatgcttaatcagacagtgatcttcttccttctttgggtgatcatagcacttgtagtcgaaattactttggccggaaagatcacagtttctgatatccatgagcagaaaatcgaacaacggttgaaccaactcaacaaacccgccgttaaatctatccatagtccagatggagatataatcgattgtgtatggatctatcaccaaccagcttttgatcatcctttactcaaaaaccacaccattcagatgaggccgaaaagtgactcgacaagggacaaaactggaggtaacaagacagacattatccatcaattgtggcgcacgaaaggtgaatgtcctaagaacactattcccatcagaagaagaacaagagatgatcttctaagatcagattccatcaaaactcatggaagaaagaacccaccaaccatttctccaactacttatcacctccccgatgatcagacagaagttcatgagcatgcgagtgtgtacctggactatggtgaataccatggcagcaagagccgtataagtatatggagaccagacgttaatatgaccgagtttagtttggctcaaacatgggtcgtcggtggagattgggacactgttttgaacactgtggagtctggttggcagatcctacattctatgtacggtgacaataatacaagacttttcgccttttggacgagcgattcatatggagacaacagctgctacaatcttgactgtccaggctttgttcaagtgaataaagatattgcccttggtgcagccctcaacactatctcgacctacaatggtaaccaatatgatttccttctaactattgagaaggaacaagataccggactttggtggcttaagtttgatactcatctagtcggatactggccaagctttctagtcccgaagctagcagactcagcacggatgatcgcttggggaggtgaaattgtgtatgatgctagtggccaaaatgaacatacgcttacgcaaatggggagtggccatttcgcggaagaagggtttaagaaggcggcttatatcaataacatagagtacatcgataaatctaatcatccgatcaaaccctttcctcaaaatcttgaagcttctgttactcggcctgaatgctataacctcaaggttggctctagccgaagatggggaacttacattttctatggtggacctggacgtaaccctcaatgcctatga

SEQ ID NO: 28584 - protein, 409 aa, Arabidopsis thaliana
  misc_feature (1)..(409): Ceres Seq. ID no. 3023648
MMLNQTVIFFLLWVIIALVVEITLAGKITVSDIHEQKIEQRLNQLNKPAVKSIHSPDGDIIDCVWIYHQPAFDHPLLKNHTIQMRPKSDSTRDKTGGNKTDIIHQLWRTKGECPKNTIPIRRRTRDDLLRSDSIKTHGRKNPPTISPTTYHLPDDQTEVHEHASVYLDYGEYHGSKSRISIWRPDVNMTEFSLAQTWVVGGDWDTVLNTVESGWQILHSMYGDNNTRLFAFWTSDSYGDNSCYNLDCPGFVQVNKDIALGAALNTISTYNGNQYDFLLTIEKEQDTGLWWLKFDTHLVGYWPSFLVPKLADSARMIAWGGEIVYDASGQNEHTLTQMGSGHFAEEGFKKAAYINNIEYIDKSNHPIKPFPQNLEASVTRPECYNLKVGSSRRWGTYIFYGGPGRNPQCL

SEQ ID NO: 28585 - protein, 408 aa, Arabidopsis thaliana
  misc_feature (1)..(408): Ceres Seq. ID no. 3023649
MLNQTVIFFLLWVIIALVVEITLAGKITVSDIHEQKIEQRLNQLNKPAVKSIHSPDGDIIDCVWIYHQPAFDHPLLKNHTIQMRPKSDSTRDKTGGNKTDIIHQLWRTKGECPKNTIPIRRRTRDDLLRSDSIKTHGRKNPPTISPTTYHLPDDQTEVHEHASVYLDYGEYHGSKSRISIWRPDVNMTEFSLAQTWVVGGDWDTVLNTVESGWQILHSMYGDNNTRLFAFWTSDSYGDNSCYNLDCPGFVQVNKDIALGAALNTISTYNGNQYDFLLTIEKEQDTGLWWLKFDTHLVGYWPSFLVPKLADSARMIAWGGEIVYDASGQNEHTLTQMGSGHFAEEGFKKAAYINNIEYIDKSNHPIKPFPQNLEASVTRPECYNLKVGSSRRWGTYIFYGGPGRNPQCL

SEQ ID NO: 28586 - protein, 326 aa, Arabidopsis thaliana; identical to SEQ ID NO: 28226
  misc_feature (1)..(326): Ceres Seq. ID no. 3023650

SEQ ID NO: 28587 - DNA, 2274 bp, Arabidopsis thaliana
  misc_feature (1)..(2274): Ceres Seq. ID no. 3024092
atggcggattcaagcttttctcttcctcctctttgtgaaaggatctcatacacgaactattttctaagagctgtatatctcacggttctaggccttttcttttctcttctcttgcaccgaatccgacatacgagcgaatacgacaacgtttggctcgtggctttcttttgtgaatcttgtttcttcttggtatgtctgcttattacttgcctaaaatggagtcctgctgatactaaaccctttcctgatagacttgatgaaagggttcatgaccttccttcggtggatatgttcgtgcccacagcagatccggttcgagagccaccgattatggttgtggacaccgtgctttcgctgttagctgtaaattatccggcaaataaactagcttgttatgtgtcggacgatggatgctcacctctcacttatttctctctcaaggaagcttctaagttcgccaagatttgggtaccgttctgcaaaaagtacaacactagagttagagctccttctagatattttctgaaacctataagcgtcgcaacagaggattatgaattcaatagagactgggaaaagacgaagagggagtacgagaagttgaggcggaaagtggaagatgccaccggagattctcatatgttggatgtagaagatgattttgaagcattctcaaacacaaaaccaaatgatcattcaactctagttaaggtggtatgggagaacaagggaggtgtaggagacgagaaagagatccctcatatcatatacatatcaagagagaaaagaccaaattatgttcataatcaaaaatgtggagccatgaactttctggcaagagtgtcagggttgatgacaaacgcaccatacatcttgaacgtggattgcgacatgtatgccaatgatgcagatgtagtccgacaagcaatgtgtatacttctgcaagaatcattaaatatgaaacattgtgcttttgttcaattccgtcaagaattctatgattcaagcaccgagctaatagtcgtcctacaatcacatttgggacgaggaatcgcgggaatccaaggaccgatatatataggatcaggatgcgtccacacgagaagagttatgtatggtttatctccagacgatttcgaagttgatggaagtctttcttcagttgctacaagggagtttttggttaaggatagtttagcgagaagatttggtaattctaaagagatgatgaaatcagtggttgatgcaatacaaagaaatccaaatccacaaaatatacttacaaactccatagaagcggctcgagaagtgggacattgtcagtacgagtaccaaaccagctggggaaacaccatcggctggttatatgattcagtggcggaagatttaaacacgagtatcggaatacattcgagaggttggactagctcatacatttctccggatacacctgcatttcttggatctatgccggcaggagtacccgaggcgttactccagcagcgtcgatgggcgacaggatggatcgaaatccttttcaacaagcaaagtccgttgcgaggattgtttagcaagaaaataagattccgacaacgattagcttatctttgcattatcacctgtctaaggtcaatccctgagcttatttattgtctccttcctgcttattgcctactccacaactctaccttattccccaagggactttatttaggcataactgtcacacttgttgggatacattgtctctatactctatgggaatttatgagccttggttattccgtacaatcgtggctagtctcccaatcagtttggagaatagtagccactagtagttggttatttagcatctttgatatcacactcaagcttcttggcatctcggaaacggtgttcataatcactaaaaagactgtggctgggaccaagtcagcattagggtctggaccctctcaaggagaagacgttggtccaaactcagacttgtttaaatttgaatttgatggctcactttgtttcttgcctggcacatttattgtgttggtgaatatagccgctctagctgttttttctgtgggtctacaacggtcgagttacagccatgaaggaggtggttcgggtctggcagaggcttgcggatgtgttttggtaatgatgttgttccttccatttctaatgggtttgtttaagaaaggaaaatatggaaccccattgtctactctctctatagctggctttttagcagttttatttgttgttttctctgtttga

SEQ ID NO: 28588 - protein, 757 aa, Arabidopsis thaliana
  misc_feature (1)..(757): Ceres Seq. ID no. 3024093
MADSSFSLPPLCERISYTNYFLRAVYLTVLGLFFSLLLHRIRHTSEYDNVWLVAFFCESCFFLVCLLITCLKWSPADTKPFPDRLDERVHDLPSVDMFVPTADPVREPPIMVVDTVLSLLAVNYPANKLACYVSDDGCSPLTYFSLKEASKFAKIWVPFCKKYNTRVRAPSRYFLKPISVATEDYEFNRDWEKTKREYEKLRRKVEDATGDSHMLDVEDDFEAFSNTKPNDHSTLVKVVWENKGGVGDEKEIPHIIYISREKRPNYVHNQKCGAMNFLARVSGLMTNAPYILNVDCDMYANDADVVRQAMCILLQESLNMKHCAFVQFRQEFYDSSTELIVVLQSHLGRGIAGIQGPIYIGSGCVHTRRVMYGLSPDDFEVDGSLSSVATREFLVKDSLARRFGNSKEMMKSVVDAIQRNPNPQNILTNSIEAAREVGHCQYEYQTSWGNTIGWLYDSVAEDLNTSIGIHSRGWTSSYISPDTPAFLGSMPAGVPEALLQQRRWATGWIEILFNKQSPLRGLFSKKIRFRQRLAYLCIITCLRSIPELIYCLLPAYCLLHNSTLFPKGLYLGITVTLVGIHCLYTLWEFMSLGYSVQSWLVSQSVWRIVATSSWLFSIFDITLKLLGISETVFIITKKTVAGTKSALGSGPSQGEDVGPNSDLFKFEFDGSLCFLPGTFIVLVNIAALAVFSVGLQRSSYSHEGGGSGLAEACGCVLVMMLFLPFLMGLFKKGKYGTPLSTLSIAGFLAVLFVVFSV

SEQ ID NO: 28589 - protein, 661 aa, Arabidopsis thaliana
  misc_feature (1)..(661): Ceres Seq. ID no. 3024094
MFVPTADPVREPPIMVVDTVLSLLAVNYPANKLACYVSDDGCSPLTYFSLKEASKFAKIWVPFCKKYNTRVRAPSRYFLKPISVATEDYEFNRDWEKTKREYEKLRRKVEDATGDSHMLDVEDDFEAFSNTKPNDHSTLVKVVWENKGGVGDEKEIPHIIYISREKRPNYVHNQKCGAMNFLARVSGLMTNAPYILNVDCDMYANDADVVRQAMCILLQESLNMKHCAFVQFRQEFYDSSTELIVVLQSHLGRGIAGIQGPIYIGSGCVHTRRVMYGLSPDDFEVDGSLSSVATREFLVKDSLARRFGNSKEMMKSVVDAIQRNPNPQNILTNSIEAAREVGHCQYEYQTSWGNTIGWLYDSVAEDLNTSIGIHSRGWTSSYISPDTPAFLGSMPAGVPEALLQQRRWATGWIEILFNKQSPLRGLFSKKIRFRQRLAYLCIITCLRSIPELIYCLLPAYCLLHNSTLFPKGLYLGITVTLVGIHCLYTLWEFMSLGYSVQSWLVSQSVWRIVATSSWLFSIFDITLKLLGISETVFIITKKTVAGTKSALGSGPSQGEDVGPNSDLFKFEFDGSLCFLPGTFIVLVNIAALAVFSVGLQRSSYSHEGGGSGLAEACGCVLVMMLFLPFLMGLFKKGKYGTPLSTLSIAGFLAVLFVVFSV

SEQ ID NO: 28590 - protein, 647 aa, Arabidopsis thaliana
  misc_feature (1)..(647): Ceres Seq. ID no. 3024095
MVVDTVLSLLAVNYPANKLACYVSDDGCSPLTYFSLKEASKFAKIWVPFCKKYNTRVRAPSRYFLKPISVATEDYEFNRDWEKTKREYEKLRRKVEDATGDSHMLDVEDDFEAFSNTKPNDHSTLVKVVWENKGGVGDEKEIPHIIYISREKRPNYVHNQKCGAMNFLARVSGLMTNAPYILNVDCDMYANDADVVRQAMCILLQESLNMKHCAFVQFRQEFYDSSTELIVVLQSHLGRGIAGIQGPIYIGSGCVHTRRVMYGLSPDDFEVDGSLSSVATREFLVKDSLARRFGNSKEMMKSVVDAIQRNPNPQNILTNSIEAAREVGHCQYEYQTSWGNTIGWLYDSVAEDLNTSIGIHSRGWTSSYISPDTPAFLGSMPAGVPEALLQQRRWATGWIEILFNKQSPLRGLFSKKIRFRQRLAYLCIITCLRSIPELIYCLLPAYCLLHNSTLFPKGLYLGITVTLVGIHCLYTLWEFMSLGYSVQSWLVSQSVWRIVATSSWLFSIFDITLKLLGISETVFIITKKTVAGTKSALGSGPSQGEDVGPNSDLFKFEFDGSLCFLPGTFIVLVNIAALAVFSVGLQRSSYSHEGGGSGLAEACGCVLVMMLFLPFLMGLFKKGKYGTPLSTLSIAGFLAVLFVVFSV

SEQ ID NO: 28591 - DNA, 948 bp, Arabidopsis thaliana
  misc_feature (1)..(948): Ceres Seq. ID no. 3024189
atggcaaatgcgatcacatttttcaagctcaacaccggcgctaagttcccttcggtgggtcttggaacatggcaagcttctcctggcctcgtcggtgatgcagtcgccgcggctgttaagattggctatcgtcacattgattgtgctcagatctatggcaacgaaaaagagattggggcagttctgaaaaaattgtttgaagacagagtagtgaaacgcgaggatttgttcatcacctccaaactctggtgtactgatcatgaccctcaagatgtcccggaggcattgaacagaactctcaaggatctgcagcttgaatacgtcgatctttatctgatacactggcctgcacggataaagaaaggttctgttggaataaagccagagaaccttttgcctgtagatattcctagtacatggaaagcgatggaagcactatacgattcgggcaaggcacgagccataggtgtaagcaatttctctaccaagaaactagctgatctcttggagttagctcgtgttcctcctgctgttaatcaggtcgaatgtcatccttcttggcgacaaactaagctacaagaattctgcaaatccaaaggggttcacctaagtgcatactcgccattaggttctccagggacaacatggctgaagagcgatgttttgaagaacccgatactgaatatggttgcggaaaaactcggaaagagtcctgcgcaagtcgcccttcgttggggactccaaatgggtcacagtgtgcttcccaagagtacaaatgaaggaaggatcaaagagaactttaatgttttcgactggtcaatacccgattacatgttcgctaagtttgctgagattgaacaggctaggttagtcactggttccttccttgttcatgagacactaagcccttacaagtctattgaagaattatgggatggcgagatatga

SEQ ID NO: 28592 - protein, 315 aa, Arabidopsis thaliana
  misc_feature (1)..(315): Ceres Seq. ID no. 3024190
MANAITFFKLNTGAKFPSVGLGTWQASPGLVGDAVAAAVKIGYRHIDCAQIYGNEKEIGAVLKKLFEDRVVKREDLFITSKLWCTDHDPQDVPEALNRTLKDLQLEYVDLYLIHWPARIKKGSVGIKPENLLPVDIPSTWKAMEALYDSGKARAIGVSNFSTKKLADLLELARVPPAVNQVECHPSWRQTKLQEFCKSKGVHLSAYSPLGSPGTTWLKSDVLKNPILNMVAEKLGKSPAQVALRWGLQMGHSVLPKSTNEGRIKENFNVFDWSIPDYMFAKFAEIEQARLVTGSFLVHETLSPYKSIEELWDGEI

SEQ ID NO: 28593 - protein, 173 aa, Arabidopsis thaliana
  misc_feature (1)..(173): Ceres Seq. ID no. 3024191
MEALYDSGKARAIGVSNFSTKKLADLLELARVPPAVNQVECHPSWRQTKLQEFCKSKGVHLSAYSPLGSPGTTWLKSDVLKNPILNMVAEKLGKSPAQVALRWGLQMGHSVLPKSTNEGRIKENFNVFDWSIPDYMFAKFAEIEQARLVTGSFLVHETLSPYKSIEELWDGEI

SEQ ID NO: 28594 - DNA, 1116 bp, Arabidopsis thaliana
  misc_feature (1)..(1116): Ceres Seq. ID no. 3024373
atgccactattctcccaccgcttcaccaccgcatcttcttcttccccggcgtctccttcttactacaataaaccctcttcgaaaacccataaaccaaactcttcttcttcttcttatacttcgtctcgtattcatgtagctatcatattcttctcccttgtctctgttttcatcggagtcgccggaactatcttcgcactctcctccaccggtcctgcttctgtttatcgatgcggcggatctaaagacacttctcgggttgtgtctgcttcaagaaagctcggaggagatggtggtaataatggtgttgttgttgaaagacgaaagcttttagggtttgttgggatccagactggttttgattccggtgatcgtagaactgctttgagaagtacttggttcccttctgatcctgattctcttctaaggttggaacaagcgactggattagcttttagattcgtcattggaaagtcaaaggatgccaaaaagatggctgagcttgagaaggagataaaagagtacagagattttgtgcttcttgataccgaggaagaatatatacgacttccatataaaacgttggctttcttcaaagcagcttttaaactctttgaagctgattattatgtcaaagccgacgatgacatttatttgagaccagatcgacttgcgacgcttcttgccaatgaaagacttcattcacagacatacattggctgcatgaagaaaggaccagttataactgaccctaaactaaaatggtacgagaaacaaggcaatttgattggaaatgaatactttttacatgcttatggaccgatatacgttctttcagccgagatagtagcttcacttgcagcagctaggaatggcagtctgagaatgtttaataatgaagatgtaactatcggatcttggatgcttgcaatggatgtacatcacgaagacaaccgcgctttatgcgatccgcattgttccccaaagtccatagcagtttgggacattcccaaatgctcagggctttgtgacccggagagtcggttaaaagagcttcataagacggatatgtgctccaagagtccgacattacctcccgatgacatcgatcagtag

SEQ ID NO: 28595 - protein, 371 aa, Arabidopsis thaliana
  misc_feature (1)..(371): Ceres Seq. ID no. 3024374
MPLFSHRFTTASSSSPASPSYYNKPSSKTHKPNSSSSSYTSSRIHVAIIFFSLVSVFIGVAGTIFALSSTGPASVYRCGGSKDTSRVVSASRKLGGDGGNNGVVVERRKLLGFVGIQTGFDSGDRRTALRSTWFPSDPDSLLRLEQATGLAFRFVIGKSKDAKKMAELEKEIKEYRDFVLLDTEEEYIRLPYKTLAFFKAAFKLFEADYYVKADDDIYLRPDRLATLLANERLHSQTYIGCMKKGPVITDPKLKWYEKQGNLIGNEYFLHAYGPIYVLSAEIVASLAAARNGSLRMFNNEDVTIGSWMLAMDVHHEDNRALCDPHCSPKSIAVWDIPKCSGLCDPESRLKELHKTDMCSKSPTLPPDDIDQ

SEQ ID NO: 28596 - protein, 207 aa, Arabidopsis thaliana
  misc_feature (1)..(207): Ceres Seq. ID no. 3024375
MAELEKEIKEYRDFVLLDTEEEYIRLPYKTLAFFKAAFKLFEADYYVKADDDIYLRPDRLATLLANERLHSQTYIGCMKKGPVITDPKLKWYEKQGNLIGNEYFLHAYGPIYVLSAEIVASLAAARNGSLRMFNNEDVTIGSWMLAMDVHHEDNRALCDPHCSPKSIAVWDIPKCSGLCDPESRLKELHKTDMCSKSPTLPPDDIDQ

SEQ ID NO: 28597 - DNA, 1116 bp, Arabidopsis thaliana
  misc_feature (1)..(1116): Ceres Seq. ID no. 3024541
atgcttctatacttgctcatcacttgtctctctttcttcttcttttccaaatctttatcctttcctcaatgggcatctaaaaccaaaaatttgctctccttctacttctccaagtatttgtttacaaacagtctacaccagatcacacccgatctagcctctccggtgctcggaaaaatgtcaattcttgacctccctgaccttccactcgactgcattcttgaacttcttccaccctctgaactatgtaccatggctagggtctgtagctcgttaagagagagatgtgtaagtgatcatttatgggagaaacacttgaagactaaatggggaaaaatccttggaccttctgctcacaaagaatggcaatgctatctatcttctccatatcatctcgattctcctcatcacaaaactagtcatcttggtttggccaaaatcatatctcttatgcgatcgctttcatccatttttcgagatgatgatcataggaggagatatccatcttcaatccctcttgactctaccatgaacttctacctatccctcgaaacaggtcgcttttggtttccagctcaagtttacaaccgtgagaatggacatgtagggttcatgttgtcatgctatgatgctgagctcagctatgacactgacactaatacttttcaagctaggtatccaccacatggtaaaagagcaattgcggttgaaaaagacgtgacatgggagaggataagagcagctcccgttgatgcatcaccccataatctctatgtgtcagattctctaaatgagttaaaacccggagaccacatagagatccagtggagaaggaacaaagagtttccttatggatggtggtatagtgttgttggacacatggaatcttgtgatggcaatctaaaccattgtcaatgccataatagcgagatgatggtgttggaatttaaccagtacacagtcggatcaaggtggagaaaaacgatgattaacaggagagatcatagagagaaaggtaacgaggaagacgggttctatggaggaattcgaaaaataaattgtaaagaagatattgaaatgtggaagcgtctttggccatcctccatcttggagtag

SEQ ID NO: 28598 - protein, 371 aa, Arabidopsis thaliana
  misc_feature (1)..(371): Ceres Seq. ID no. 3024542
MLLYLLITCLSFFFFSKSLSFPQWASKTKNLLSFYFSKYLFTNSLHQITPDLASPVLGKMSILDLPDLPLDCILELLPPSELCTMARVCSSLRERCVSDHLWEKHLKTKWGKILGPSAHKEWQCYLSSPYHLDSPHHKTSHLGLAKIISLMRSLSSIFRDDDHRRRYPSSIPLDSTMNFYLSLETGRFWFPAQVYNRENGHVGFMLSCYDAELSYDTDTNTFQARYPPHGKRAIAVEKDVTWERIRAAPVDASPHNLYVSDSLNELKPGDHIEIQWRRNKEFPYGWWYSVVGHMESCDGNLNHCQCHNSEMMVLEFNQYTVGSRWRKTMINRRDHREKGNEEDGFYGGIRKINCKEDIEMWKRLWPSSILE

SEQ ID NO: 28599 - protein, 312 aa, Arabidopsis thaliana
  misc_feature (1)..(312): Ceres Seq. ID no. 3024543
MSILDLPDLPLDCILELLPPSELCTMARVCSSLRERCVSDHLWEKHLKTKWGKILGPSAHKEWQCYLSSPYHLDSPHHKTSHLGLAKIISLMRSLSSIFRDDDHRRRYPSSIPLDSTMNFYLSLETGRFWFPAQVYNRENGHVGFMLSCYDAELSYDTDTNTFQARYPPHGKRAIAVEKDVTWERIRAAPVDASPHNLYVSDSLNELKPGDHIEIQWRRNKEFPYGWWYSVVGHMESCDGNLNHCQCHNSEMMVLEFNQYTVGSRWRKTMINRRDHREKGNEEDGFYGGIRKINCKEDIEMWKRLWPSSILE

SEQ ID NO: 28600 - protein, 287 aa, Arabidopsis thaliana
  misc_feature (1)..(287): Ceres Seq. ID no. 3024544
MARVCSSLRERCVSDHLWEKHLKTKWGKILGPSAHKEWQCYLSSPYHLDSPHHKTSHLGLAKIISLMRSLSSIFRDDDHRRRYPSSIPLDSTMNFYLSLETGRFWFPAQVYNRENGHVGFMLSCYDAELSYDTDTNTFQARYPPHGKRAIAVEKDVTWERIRAAPVDASPHNLYVSDSLNELKPGDHIEIQWRRNKEFPYGWWYSVVGHMESCDGNLNHCQCHNSEMMVLEFNQYTVGSRWRKTMINRRDHREKGNEEDGFYGGIRKINCKEDIEMWKRLWPSSILE

SEQ ID NO: 28601 - DNA, 711 bp, Arabidopsis thaliana
  misc_feature (1)..(711): Ceres Seq. ID no. 3024551
atgggtttggtctgctctaaaaatctaattacttttcacagttccgacggaaccgccgcagctgtagtcatcaacaagcgcaattctctaacaaattatcagttgacgaagtttacgtttggttctcatgttcttgagctctactgtctccaatcagcttcaactgattttgatttaacagggcagctggtttggcctggtgcgatgcttatgaatggttatctctcagaaaatgctgacattctccagggatgttcagttttggagttgggatctggcgttggtataactggagtcctatgtagcaaattttgccgtaaaatactgaagaaaaacattgaccttcatggacattcaagtggtcccaaaccctcagctgaattagaggctgcaaagcttgaatggggaaatagtgatcagcttggtcaaattttaaagaaacacaatgatggctttgatcttattcttggagctgagatctatatccttattgttgagcagcttctgcggatcaggggacaaggaaactgcaaattcatactagcatacgtatcacgggctagacagatggattctgcaatcttgagagaaggcgctcagcacgggatgctgatgaatgaagtttctgggactcggtgtaccgtaggaaacttggaaggggtcatatatgaaatcacacttcaaaagaagagaggaattgtgttcgagtaa

SEQ ID NO: 28602 - protein, 236 aa, Arabidopsis thaliana
  misc_feature (1)..(236): Ceres Seq. ID no. 3024552
MGLVCSKNLITFHSSDGTAAAVVINKRNSLTNYQLTKFTFGSHVLELYCLQSASTDFDLTGQLVWPGAMLMNGYLSENADILQGCSVLELGSGVGITGVLCSKFCRKILKKNIDLHGHSSGPKPSAELEAAKLEWGNSDQLGQILKKHNDGFDLILGAEIYILIVEQLLRIRGQGNCKFILAYVSRARQMDSAILREGAQHGMLMNEVSGTRCTVGNLEGVIYEITLQKKRGIVFE

SEQ ID NO: 28603 - protein, 168 aa, Arabidopsis thaliana
  misc_feature (1)..(168): Ceres Seq. ID no. 3024553
MLMNGYLSENADILQGCSVLELGSGVGITGVLCSKFCRKILKKNIDLHGHSSGPKPSAELEAAKLEWGNSDQLGQILKKHNDGFDLILGAEIYILIVEQLLRIRGQGNCKFILAYVSRARQMDSAILREGAQHGMLMNEVSGTRCTVGNLEGVIYEITLQKKRGIVFE

SEQ ID NO: 28604 - protein, 166 aa, Arabidopsis thaliana
  misc_feature (1)..(166): Ceres Seq. ID no. 3024554
MNGYLSENADILQGCSVLELGSGVGITGVLCSKFCRKILKKNIDLHGHSSGPKPSAELEAAKLEWGNSDQLGQILKKHNDGFDLILGAEIYILIVEQLLRIRGQGNCKFILAYVSRARQMDSAILREGAQHGMLMNEVSGTRCTVGNLEGVIYEITLQKKRGIVFE

SEQ ID NO: 28605 - DNA, 756 bp, Arabidopsis thaliana
  misc_feature (1)..(756): Ceres Seq. ID no. 3024708
atggctgaacaaaagaagtacctattgtttctagcgacaccggactcggagtttgcgaagaagacatatggaggataccataatgtgtttgtttcactgcttggcgatgaaggagagcaatgggactcttttagagtcgtggacggcgagtttccagaagagaaggatcttgagaaatacgaaggatttgtaatcagtggtagctctcatgatgcctttcaagacactgattggatcttaaagctctgtgatatcatcaagaaactcgatgacatgaacaagaaagtcctcggtatttgctttggccaccagctaatagctagagcgaagggaggcaaagtagcgagagcaaggaaaggaccagagctttgccttggaaacataaccatcgtgaaagaggcagtgatgccggaaaattacttcggcgaagaagttccagcgaatctgaggatcataaaatgtcatcaggatgaagttttggagcttccggaaaatgcaaaactgttagcatattcaagcatgtacgaggtagagatgtattcaatcaaagataacttcctttgcattcagggacatcctgagtataaccgtgacatcttgttcgatatcattgatcgtgttcttgccggaggccacattaagcaaaactttgccgaaacgtcaaaggcaacaatggaaaagaatgaagcagacaggaagttttggcagaaaatttgcaaaaacttcctcaaacgtcaaccctccttattagtttga

SEQ ID NO: 28606 - protein, 251 aa, Arabidopsis thaliana
  misc_feature (1)..(251): Ceres Seq. ID no. 3024709
MAEQKKYLLFLATPDSEFAKKTYGGYHNVFVSLLGDEGEQWDSFRVVDGEFPEEKDLEKYEGFVISGSSHDAFQDTDWILKLCDIIKKLDDMNKKVLGICFGHQLIARAKGGKVARARKGPELCLGNITIVKEAVMPENYFGEEVPANLRIIKCHQDEVLELPENAKLLAYSSMYEVEMYSIKDNFLCIQGHPEYNRDILFDIIDRVLAGGHIKQNFAETSKATMEKNEADRKFWQKICKNFLKRQPSLLV

SEQ ID NO: 28607 - protein, 160 aa, Arabidopsis thaliana
  misc_feature (1)..(160): Ceres Seq. ID no. 3024710
MNKKVLGICFGHQLIARAKGGKVARARKGPELCLGNITIVKEAVMPENYFGEEVPANLRIIKCHQDEVLELPENAKLLAYSSMYEVEMYSIKDNFLCIQGHPEYNRDILFDIIDRVLAGGHIKQNFAETSKATMEKNEADRKFWQKICKNFLKRQPSLLV

SEQ ID NO: 28608 - DNA, 2643 bp, Arabidopsis thaliana
  misc_feature (1)..(2643): Ceres Seq. ID no. 3025301
atggaaggtcgtcgtcaacgtttactggtgttcatctttggggctttggccattacacatcttgttcaagctcagccgcctgatcaacgaggattcatcagtttggattgcggtttacccgttaatgagtctccttataccgacccacgaaccggattaacattctcatctgatgctgattttattttaagtggtttacgtggtgaagctggggatgataacacatatatctacaggcagtacaaggatttgagatattttcccgatggaatacgaaactgctataatctgaaagtagagcaaggcatcaactatttgataagagcagggttcggatatggaaattatgatggtcttaatgtatatcccaaatttgatttacatgttgggcctaacatgtggattgcggttgatttggaattcggaaaagatcgtgagatcatttacatgacaacgtcgaacttattgcagatttgtcttgtcaaaacaggatcaactataccaatgatatcaaccttggaactacggccactaagaaatgattcatatttgactcaattcggtcccttagacctcatctaccggcgggcctatagtagcaattctaccggttttatacggtatcctgatgatatttttgatcgcaaatgggaccgatataatgaatttgaaacggatgtgaacaccaccctcaacgtgagatcctcgagtccctttcaagtaccagaagctgtaagtaggatgggaatcacgcccgaaaatgccagcttgccattgagattttacgtgtctctagatgacgacagtgacaaggttaacgtgtactttcactttgccgaaatccaagctttgaggggcaatgagactagagaattcgacattgaattggaagaagatattattcagtcagcatatagtcctacgatgttacaatcagataccaaatataacctatcacctcacaaatgtagctccgggttgtgctacttgaaactcgttagaactccaaggtcaactcttccaccgctgattagtgctattgaggctttcaaggttgtggactttccatacgctgaaacaaatccaaatgacgtcgctgctatgaaggatatcgaagcattttatggattgaagatgattagttggcaaggagatccttgtgtccctgaactattaaagtgggaagatctaaaatgcagctacacaaataagtctactcctccaagaattatttctttagatttgtcatcacgagggttaaaaggggtcattgcgcctgccttccaaaatttgaccgagcttcgaaaactagacttgtcaaataatagttttactggaggagtgcccgagtttctagccagcatgaagtcattatcgatcataaatttaaattggaatgaccttacgggtcctcttcctaaattgcttcttgatagagaaaagaatgggcttaagctaacgatccaaggaaacccaaagttgtgtaacgatgcgtcatgcaaaaataataacaatcaaacgtacattgtaccagttgttgcgtcagtagcttctgtgctcatcattatagccgtactgattctcattcttgttttcaaaaagagaaggccaacgcaagttgattcattacctacagtgcaacatgggttaccaaatagaccgtctatatttactcaaacgaaaaggttcacttattcagaggtagaagcattaacagataattttgaaagagttcttggagaaggagggtttggggtagtgtatcatggtattttaaatggtacgcaaccaatagctgttaaactactctctcaatcatcagtacaaggctataaggaattcaaagctgaggttgaacttcttttgagagtgcaccacgtcaatttggttagtttggttggatattgtgatgaagaaagcaacttggccctgctttatgagtatgcaccgaacggagacttaaaacaacatctatcaggagaacggggtggctctccattgaagtggtcaagtagactaaaaattgtcgtcgaaactgcgcaaggattagaatacttgcatacgggttgcaaacctccaatggtacatcgtgatgtaaaaacaacaaatatacttttagacgaacacttccaagcaaaactcgccgattttggcctttcaagatcatttccagttggaggtgaaactcatgtttcaacagctgttgctggaactcctggatatttggatcccgaatattatcgaacaaataggttgaacgaaaagagtgatgtatatagctttgggattgtattattggagatcatcacaagtcgacctgtgattcagcaaacccgagagaagccgcacatagcagcatgggtgggatacatgcttactaagggagatattgagaacgttgtggatccaagactcaatagagattatgagcctacttctgtttggaaggctcttgagatagcaatgtcttgcgtgaatccttcttcggagaaaagaccaaccatgtctcaagttactaatgaactaaagcaatgtctaacattagaaaactcaaagcgaggagtgagagaagacatgggatcaagaagttctgttgaaatgagcacaagctttacaaccgaaattaacccaaaagcacgataa

SEQ ID NO: 28609 - protein, 880 aa, Arabidopsis thaliana
  misc_feature (1)..(880): Ceres Seq. ID no. 3025302
MEGRRQRLLVFIFGALAITHLVQAQPPDQRGFISLDCGLPVNESPYTDPRTGLTFSSDADFILSGLRGEAGDDNTYIYRQYKDLRYFPDGIRNCYNLKVEQGINYLIRAGFGYGNYDGLNVYPKFDLHVGPNMWIAVDLEFGKDREIIYMTTSNLLQICLVKTGSTIPMISTLELRPLRNDSYLTQFGPLDLIYRRAYSSNSTGFIRYPDDIFDRKWDRYNEFETDVNTTLNVRSSSPFQVPEAVSRMGITPENASLPLRFYVSLDDDSDKVNVYFHFAEIQALRGNETREFDIELEEDIIQSAYSPTMLQSDTKYNLSPHKCSSGLCYLKLVRTPRSTLPPLISAIEAFKVVDFPYAETNPNDVAAMKDIEAFYGLKMISWQGDPCVPELLKWEDLKCSYTNKSTPPRIISLDLSSRGLKGVIAPAFQNLTELRKLDLSNNSFTGGVPEFLASMKSLSIINLNWNDLTGPLPKLLLDREKNGLKLTIQGNPKLCNDASCKNNNNQTYIVPVVASVASVLIIIAVLILILVFKKRRPTQVDSLPTVQHGLPNRPSIFTQTKRFTYSEVEALTDNFERVLGEGGFGVVYHGILNGTQPIAVKLLSQSSVQGYKEFKAEVELLLRVHHVNLVSLVGYCDEESNLALLYEYAPNGDLKQHLSGERGGSPLKWSSRLKIVVETAQGLEYLHTGCKPPMVHRDVKTTNILLDEHFQAKLADFGLSRSFPVGGETHVSTAVAGTPGYLDPEYYRTNRLNEKSDVYSFGIVLLEIITSRPVIQQTREKPHIAAWVGYMLTKGDIENVVDPRLNRDYEPTSVWKALEIAMSCVNPSSEKRPTMSQVTNELKQCLTLENSKRGVREDMGSRSSVEMSTSFTTEINPKAR

SEQ ID NO: 28610 - protein, 748 aa, Arabidopsis thaliana
  misc_feature (1)..(748): Ceres Seq. ID no. 3025303
MWIAVDLEFGKDREIIYMTTSNLLQICLVKTGSTIPMISTLELRPLRNDSYLTQFGPLDLIYRRAYSSNSTGFIRYPDDIFDRKWDRYNEFETDVNTTLNVRSSSPFQVPEAVSRMGITPENASLPLRFYVSLDDDSDKVNVYFHFAEIQALRGNETREFDIELEEDIIQSAYSPTMLQSDTKYNLSPHKCSSGLCYLKLVRTPRSTLPPLISAIEAFKVVDFPYAETNPNDVAAMKDIEAFYGLKMISWQGDPCVPELLKWEDLKCSYTNKSTPPRIISLDLSSRGLKGVIAPAFQNLTELRKLDLSNNSFTGGVPEFLASMKSLSIINLNWNDLTGPLPKLLLDREKNGLKLTIQGNPKLCNDASCKNNNNQTYIVPVVASVASVLIIIAVLILILVFKKRRPTQVDSLPTVQHGLPNRPSIFTQTKRFTYSEVEALTDNFERVLGEGGFGVVYHGILNGTQPIAVKLLSQSSVQGYKEFKAEVELLLRVHHVNLVSLVGYCDEESNLALLYEYAPNGDLKQHLSGERGGSPLKWSSRLKIVVETAQGLEYLHTGCKPPMVHRDVKTTNILLDEHFQAKLADFGLSRSFPVGGETHVSTAVAGTPGYLDPEYYRTNRLNEKSDVYSFGIVLLEIITSRPVIQQTREKPHIAAWVGYMLTKGDIENVVDPRLNRDYEPTSVWKALEIAMSCVNPSSEKRPTMSQVTNELKQCLTLENSKRGVREDMGSRSSVEMSTSFTTEINPKAR

SEQ ID NO: 28611 - protein, 731 aa, Arabidopsis thaliana
  misc_feature (1)..(731): Ceres Seq. ID no. 3025304
MTTSNLLQICLVKTGSTIPMISTLELRPLRNDSYLTQFGPLDLIYRRAYSSNSTGFIRYPDDIFDRKWDRYNEFETDVNTTLNVRSSSPFQVPEAVSRMGITPENASLPLRFYVSLDDDSDKVNVYFHFAEIQALRGNETREFDIELEEDIIQSAYSPTMLQSDTKYNLSPHKCSSGLCYLKLVRTPRSTLPPLISAIEAFKVVDFPYAETNPNDVAAMKDIEAFYGLKMISWQGDPCVPELLKWEDLKCSYTNKSTPPRIISLDLSSRGLKGVIAPAFQNLTELRKLDLSNNSFTGGVPEFLASMKSLSIINLNWNDLTGPLPKLLLDREKNGLKLTIQGNPKLCNDASCKNNNNQTYIVPVVASVASVLIIIAVLILILVFKKRRPTQVDSLPTVQHGLPNRPSIFTQTKRFTYSEVEALTDNFERVLGEGGFGVVYHGILNGTQPIAVKLLSQSSVQGYKEFKAEVELLLRVHHVNLVSLVGYCDEESNLALLYEYAPNGDLKQHLSGERGGSPLKWSSRLKIVVETAQGLEYLHTGCKPPMVHRDVKTTNILLDEHFQAKLADFGLSRSFPVGGETHVSTAVAGTPGYLDPEYYRTNRLNEKSDVYSFGIVLLEIITSRPVIQQTREKPHIAAWVGYMLTKGDIENVVDPRLNRDYEPTSVWKALEIAMSCVNPSSEKRPTMSQVTNELKQCLTLENSKRGVREDMGSRSSVEMSTSFTTEINPKAR

SEQ ID NO: 28612 - DNA, 867 bp, Arabidopsis thaliana
  misc_feature (1)..(867): Ceres Seq. ID no. 3025327
atggggatttctacagagacgcagcaaattgcggcttcagaggctgcacaaaagagatggactacaagcgatttcgatatcggaaagccacttggtagaggaaagtttggccatgtttatctagcaagagagaaacggagcgatcacattgtggctttaaaggttctttttaaggctcagcttcaacaatctcaagttgaacaccagttacgaagggaagtagagattcaatctcatcttcggcatcccaatattctgcggctctacggttacttctatgatcagaaaagagtttatttgattttggagtatgctgtaaggggtgagctttataaagagcttcagaagtgcaagtacttcagcgaacgtcgagcagcaacttatgttgcgtcattggctagagccctcatctattgccatggaaagcatgtaattcacagagatataaaacctgaaaatctgttgattggtgctcagggtgagctcaagattgcagattttggatggtcagtacacacattcaaccgtagaaggactatgtgtggcactttggattaccttccacctgagatggtggaaagcgttgaacatgatgcgagtgtcgatatatggagtctaggaattctctgctacgaatttctttatggtgttcctccttttgaggccagggagcattcagagacatacaaaaggattgttcaagtggatctcaagttccctcccaaacccattgtgtcatcatctgcaaaggacctgattagccagatgttggttaaggagtctacgcaacgtttggccttgcacaagcttcttgaacacccgtggattgtgcaaaacgcagacccatcaggcctttacagaggatga

SEQ ID NO: 28613 - protein, 288 aa, Arabidopsis thaliana
  misc_feature (1)..(288): Ceres Seq. ID no. 3025328
MGISTETQQIAASEAAQKRWTTSDFDIGKPLGRGKFGHVYLAREKRSDHIVALKVLFKAQLQQSQVEHQLRREVEIQSHLRHPNILRLYGYFYDQKRVYLILEYAVRGELYKELQKCKYFSERRAATYVASLARALIYCHGKHVIHRDIKPENLLIGAQGELKIADFGWSVHTFNRRRTMCGTLDYLPPEMVESVEHDASVDIWSLGILCYEFLYGVPPFEAREHSETYKRIVQVDLKFPPKPIVSSSAKDLISQMLVKESTQRLALHKLLEHPWIVQNADPSGLYRG

SEQ ID NO: 28614 - DNA, 987 bp, Arabidopsis thaliana
  misc_feature (1)..(987): Ceres Seq. ID no. 3025681
atgtgcaattgctcatcttccttcttctgttctcttccagttctcaatgctcgattggtgaaacccaattcagaaacttgtcgatggaggctcaaacggattcagcattcaatcctcaattgcttttggattgattcgaaaaactctccctttctcgggcaattcagttttatagagaaaccgagagacaatttcatctgttgcttgagttcttcactatctaatgaagaagatgtagtgcatcaaactgtggggagtgatagtgtagaattacctggagaaagtgatttggttcgactagtaggtgataatgatctgagcattacgggttcgcgaggattcaagcagtcgacgacaagatcgaatcttgttgctaagcaagttgttagtatacaatcagctttgagtttaggatttatctctcagctttgggttgacactacttcttggttggttttggtggttgatgttaaaccaagcttgctatctggagaatctgagagatttctgctcacagacattgtccgggtgggtgatgttgtccttgttgataatgagactgtcttggatactgaattcaagatggttggacttgaaacactggtaggttacagagtagttacaccaggagggagaaacattggaaaggttcgaggttactcattcaacattaactcgggaatagttgaatcgcttgagctcgattccttcggggtaactattataccatcaagcctggtgagtacatacagattagatgtcgaggatataatcgaggtcttacaagatatagttgtggttcaagaagatgcagcttctagaaaacagaggttgactaagggactctgggatgctcagtttgatagtgaataccctgatgttgaagatcttgaaagttcatctgatagaagacggcgaaggagaaacaatcgatccaaccgaaaaaagagagatttggatgatgaagaatgggacatattccgctag

SEQ ID NO: 28615 - protein, 328 aa, Arabidopsis thaliana
  misc_feature (1)..(328): Ceres Seq. ID no. 3025682
MCNCSSSFFCSLPVLNARLVKPNSETCRWRLKRIQHSILNCFWIDSKNSPFLGQFSFIEKPRDNFICCLSSSLSNEEDVVHQTVGSDSVELPGESDLVRLVGDNDLSITGSRGFKQSTTRSNLVAKQVVSIQSALSLGFISQLWVDTTSWLVLVVDVKPSLLSGESERFLLTDIVRVGDVVLVDNETVLDTEFKMVGLETLVGYRVVTPGGRNIGKVRGYSFNINSGIVESLELDSFGVTIIPSSLVSTYRLDVEDIIEVLQDIVVVQEDAASRKQRLTKGLWDAQFDSEYPDVEDLESSSDRRRRRRNNRSNRKKRDLDDEEWDIFR

SEQ ID NO: 28616 - DNA, 1074 bp, Arabidopsis thaliana
  misc_feature (1)..(1074): Ceres Seq. ID no. 3026036
atggagttgaagccggaggttcaatatggagatttttcgttaaccaacagcttagtgaatgtggacaaggaggaccttcgtagggaggaagcagatagcgacgcaggttcagtgattatctgcgaccattcgatatgtgatagtggtgatggtgatatatgcgctgtagcagattatgttgagtgtgtggcggtggagacgacggagaagttggagctgcctgaggaatttgcgaaaagcgttatggttctaacgtgcgaatccacagctgagggtggatcttgtgatgtgtacttagttggcactgctcacgtatcacaggaatcatgtcgagaagttgaagctgtaatcagcgccttgaaaccacaggctgtctttttggagttgtgttcaagtcgattgtctattctcacacctcagactgtgaaggccgccaagaagcttgaggtttttcctggtgctgaatttcgtgtgggatttgaagaggcaaacaaatatggtggcagagtgtttcttggcgatcgctcagtacagatcacgttacagagaacatggggtaagatgcctctatggcataaaataaaactagtgtatagcatagtaagtcaagctgtctttctgccgaaccctaaggaacttgagaagatgctgaaagacctgggcgatggggatatgctgacattggcgattcaagaaatgagcacggaatttccgactctcatggagacacttgtgcatgagcgagataagtacatggcatatcaattgttgagaattgcaagtgagcatagttcagtcgtggcagttgtgggtagaggacatcttcaagggatcaagaagaattggaaccaaactataaacgttagtaacctcattaatacacatttggttgaaaacaacacaataaacagagctaattttgtcaccatcactgtgctaatggtattgcagataaaggaactgatggagttaccgacaaatgaatccatatttactgtaaagaatattctgaaatatatggtggttgtagtcgttggaacagccatagtttccggaatgtatcttgctaagtaa

SEQ ID NO: 28617 - protein, 357 aa, Arabidopsis thaliana
  misc_feature (1)..(357): Ceres Seq. ID no. 3026037
MELKPEVQYGDFSLTNSLVNVDKEDLRREEADSDAGSVIICDHSICDSGDGDICAVADYVECVAVETTEKLELPEEFAKSVMVLTCESTAEGGSCDVYLVGTAHVSQESCREVEAVISALKPQAVFLELCSSRLSILTPQTVKAAKKLEVFPGAEFRVGFEEANKYGGRVFLGDRSVQITLQRTWGKMPLWHKIKLVYSIVSQAVFLPNPKELEKMLKDLGDGDMLTLAIQEMSTEFPTLMETLVHERDKYMAYQLLRIASEHSSVVAVVGRGHLQGIKKNWNQTINVSNLINTHLVENNTINRANFVTITVLMVLQIKELMELPTNESIFTVKNILKYMVVVVVGTAIVSGMYLAK

SEQ ID NO: 28618 - protein, 276 aa, Arabidopsis thaliana
  misc_feature (1)..(276): Ceres Seq. ID no. 3026038
MVLTCESTAEGGSCDVYLVGTAHVSQESCREVEAVISALKPQAVFLELCSSRLSILTPQTVKAAKKLEVFPGAEFRVGFEEANKYGGRVFLGDRSVQITLQRTWGKMPLWHKIKLVYSIVSQAVFLPNPKELEKMLKDLGDGDMLTLAIQEMSTEFPTLMETLVHERDKYMAYQLLRIASEHSSVVAVVGRGHLQGIKKNWNQTINVSNLINTHLVENNTINRANFVTITVLMVLQIKELMELPTNESIFTVKNILKYMVVVVVGTAIVSGMYLAK

SEQ ID NO: 28619 - DNA, 870 bp, Arabidopsis thaliana
  misc_feature (1)..(870): Ceres Seq. ID no. 3026462
atgaagatcagtccatggatactcatagccatcatcatgatgatcttagcatcatttccttctccgatcaaagtcgttggtgcaaaaaaagagctaccattttgcaatctggatcttctagcttgcgtccaaccttttctagttaacggtcacggaggcaaactgcctaaaggctgttttgctttgtgccaatcggattcggaagattctggcttcgaagtttctgatgttggtgaagaagagagtgatgcagaggaagtttttggtttggaacttacctcagctcctggaattgaaaccctttgcgttttccccaagaacagtgcaaaaataataaaagctggagttgagactgagctgcttgttggaatgaaaaatgatggtcaatccaatgtagatattgttgctgttaaaggcagtttacatcttccttttgatcaaaatgctgttcagaatctcactgctctgagtttcagcaacgcgtctgtgccaacttccgctcaagctaccttgccatatgcttttgctgtcagcaagttcctgcaggcgggtgcttttgattttgttggcaccatcatctatgagatagatggtaagccataccaaagcatcttttataatggaactattgaagttgttgaagatggtcctctcttcagaatggagtcagtcttccttagtggtcttttaatctttgttatcgcttttctcgccatctatatccaaaatgttttgaagcatatgaccaagaaaacaaagagagcaccaaaagttgaagttggaaccgcaactaaagatgcttcgcatgatgaatggcttgagggtacttcgtacactcaatcttcgagtaagtcaaagaagaagaagtag

SEQ ID NO: 28620 - protein, 289 aa, Arabidopsis thaliana
  misc_feature (1)..(289): Ceres Seq. ID no. 3026463
MKISPWILIAIIMMILASFPSPIKVVGAKKELPFCNLDLLACVQPFLVNGHGGKLPKGCFALCQSDSEDSGFEVSDVGEEESDAEEVFGLELTSAPGIETLCVFPKNSAKIIKAGVETELLVGMKNDGQSNVDIVAVKGSLHLPFDQNAVQNLTALSFSNASVPTSAQATLPYAFAVSKFLQAGAFDFVGTIIYEIDGKPYQSIFYNGTIEVVEDGPLFRMESVFLSGLLIFVIAFLAIYIQNVLKHMTKKTKRAPKVEVGTATKDASHDEWLEGTSYTQSSSKSKKKK

SEQ ID NO: 28621 - protein, 277 aa, Arabidopsis thaliana
  misc_feature (1)..(277): Ceres Seq. ID no. 3026464
MMILASFPSPIKVVGAKKELPFCNLDLLACVQPFLVNGHGGKLPKGCFALCQSDSEDSGFEVSDVGEEESDAEEVFGLELTSAPGIETLCVFPKNSAKIIKAGVETELLVGMKNDGQSNVDIVAVKGSLHLPFDQNAVQNLTALSFSNASVPTSAQATLPYAFAVSKFLQAGAFDFVGTIIYEIDGKPYQSIFYNGTIEVVEDGPLFRMESVFLSGLLIFVIAFLAIYIQNVLKHMTKKTKRAPKVEVGTATKDASHDEWLEGTSYTQSSSKSKKKK

SEQ ID NO: 28622 - protein, 276 aa, Arabidopsis thaliana
  misc_feature (1)..(276): Ceres Seq. ID no. 3026465
MILASFPSPIKVVGAKKELPFCNLDLLACVQPFLVNGHGGKLPKGCFALCQSDSEDSGFEVSDVGEEESDAEEVFGLELTSAPGIETLCVFPKNSAKIIKAGVETELLVGMKNDGQSNVDIVAVKGSLHLPFDQNAVQNLTALSFSNASVPTSAQATLPYAFAVSKFLQAGAFDFVGTIIYEIDGKPYQSIFYNGTIEVVEDGPLFRMESVFLSGLLIFVIAFLAIYIQNVLKHMTKKTKRAPKVEVGTATKDASHDEWLEGTSYTQSSSKSKKKK

SEQ ID NO: 28623 - DNA, 2427 bp, Arabidopsis thaliana
  misc_feature (1)..(2427): Ceres Seq. ID no. 3026736
atgagtggcggtggtggtccaaaggcggaagagggtcagctgtttgtggcggtggccgtgaagggtttgatcggagacaaattaggcggtgcaggaagtcgtcgtgccgtacggtgggctgtcgataatcttttaccgaaggctgataaatttgtgatgatccacgtcatccctaccattacttctattcctactccgaccggagatagattgccggtggaagaagtggaggagagtgtggtggaaatgtatgtaagagacgtgaaaaaagaatatgaaacagtctttgttccctttttgaaaatgtgcaagagtactaggagtaccaagtgtaaggtagagactctattgctagagtacgacgatcctgcaaaagcacttgtcagattgatatccaaatcaggagttaacagtttgcgatattttcggtctaggagaacaaaaggtacaggagtaccactgaccgttttaagatacgcaccagaaacatgtgaagtatacattgtgtgtaaagacagaatcactacaaaatctatggatccattaatcaaccgagagccgtgcacaagtccacacgcagccgcgactgcccatgacttcttgagagactgggcggctagtttccacactctacggtctccaacgttacccgatcctcgacagtcaactgaggcaggaacaaggaggtcagcatcggcaagagagctgagatttgaggcattaagccttacttgtaataaacccaaaacgcctcaaagtagtaaggcttctagtgcaacaactccagagatttttaggcgacggagaggatccgatattcctcagctgaattactcagattttgataaaacatgtaccaagccccaatcaaatgttgagaacatcgttagcgaacaccgagactctgatcgttcacccccggaaacatcaagaaaatccaagaaggttgagattgaagaagaggtcgaacgtttgaagaatgagctacaaagtacagtctttaaatataaacaagcttgtgaagagctcttctccacacaaaacaaggttaaaatgctttcgactgaatatttgaatgaatctaaaagagtgaacaatgctgtggagaaagaagagttgcagaggaacaccgcggcgctggagaaagagcggtacatgaaggcggtgaaagaggtcgaaaccgcgaaagcgttgctcgcaagagagttttgtcagcgacagatcgcggaggtgaatgctttaaggacttacttggagaagaagaaagtgatcgatcagcttttagggactgatcaccggtacagaaaatacacaattgaggaaattgtaacagccacagaaggattctcgccagagaaagtgattggagaaggaggatacgggaaagtttaccaatgtagccttgatagtactccggcggctgttaaagttgtccggctagatacaccggagaagaaacaagagttcttgaaagaggttgaggttctaagccaactccgacacccacacgtggttctcctcctcggagcttgtccggagaatggttgtttggtttacgagtacttggaaaatggaagcctcgaggaatatatatttcaccgaaaaaataaaccgcctttgccttggtttatccggtttagggtaattttcgaggtagcttgcggtttggccttcttacacagctctaaaccggaaccaattgttcaccgtgacttaaaaccgggaaatatcttgttaaaccggaactacgttagcaaaatcgctgacgttggcctagccaagctggttacggatgttgcacccgataatgtcacgatgtaccgaaactcggttcttgccggtacattgcattatattgatccagaataccacagaaccggaacaattagaccaaagtcggatctatatgcgttcggcataatcattcttcagttgttgacggctcgtaacccgagcgggattgtaccagcggtcgaaaacgcggtaaagaaagggacgttaaccgaaatgctagataaatcggttaccgattggcctttggcagaaaccgaggaattggctcggatcggtttaaaatgtgctgaatttcgatgccgagatagaccggatcttaaatcagaggttataccggttttgaaacggcttgtggagacggcgaattcgaaagtaaagaaagaaggaagcaatttacgtgcaccgagtcattacttctgtccaatcttacgggagataatggaggagccagagattgctgccgatggattcacgtacgagaggaaagcgatcttagcgtggcttgagaaacataacatttcaccggtgactcgacaaaagctagaccacttcaagctcacaccgaaccatacgctccggtctgcgattcgcgattggaaatcaagagtccggttttctaatgtcgttgtttaa

SEQ ID NO: 28624 - protein, 808 aa, Arabidopsis thaliana
  misc_feature (1)..(808): Ceres Seq. ID no. 3026737
MSGGGGPKAEEGQLFVAVAVKGLIGDKLGGAGSRRAVRWAVDNLLPKADKFVMIHVIPTITSIPTPTGDRLPVEEVEESVVEMYVRDVKKEYETVFVPFLKMCKSTRSTKCKVETLLLEYDDPAKALVRLISKSGVNSLRYFRSRRTKGTGVPLTVLRYAPETCEVYIVCKDRITTKSMDPLINREPCTSPHAAATAHDFLRDWAASFHTLRSPTLPDPRQSTEAGTRRSASARELRFEALSLTCNKPKTPQSSKASSATTPEIFRRRRGSDIPQLNYSDFDKTCTKPQSNVENIVSEHRDSDRSPPETSRKSKKVEIEEEVERLKNELQSTVFKYKQACEELFSTQNKVKMLSTEYLNESKRVNNAVEKEELQRNTAALEKERYMKAVKEVETAKALLAREFCQRQIAEVNALRTYLEKKKVIDQLLGTDHRYRKYTIEEIVTATEGFSPEKVIGEGGYGKVYQCSLDSTPAAVKVVRLDTPEKKQEFLKEVEVLSQLRHPHVVLLLGACPENGCLVYEYLENGSLEEYIFHRKNKPPLPWFIRFRVIFEVACGLAFLHSSKPEPIVHRDLKPGNILLNRNYVSKIADVGLAKLVTDVAPDNVTMYRNSVLAGTLHYIDPEYHRTGTIRPKSDLYAFGIIILQLLTARNPSGIVPAVENAVKKGTLTEMLDKSVTDWPLAETEELARIGLKCAEFRCRDRPDLKSEVIPVLKRLVETANSKVKKEGSNLRAPSHYFCPILREIMEEPEIAADGFTYERKAILAWLEKHNISPVTRQKLDHFKLTPNHTLRSAIRDWKSRVRFSNVVV

SEQ ID NO: 28625 - protein, 756 aa, Arabidopsis thaliana
  misc_feature (1)..(756): Ceres Seq. ID no. 3026738
MIHVIPTITSIPTPTGDRLPVEEVEESVVEMYVRDVKKEYETVFVPFLKMCKSTRSTKCKVETLLLEYDDPAKALVRLISKSGVNSLRYFRSRRTKGTGVPLTVLRYAPETCEVYIVCKDRITTKSMDPLINREPCTSPHAAATAHDFLRDWAASFHTLRSPTLPDPRQSTEAGTRRSASARELRFEALSLTCNKPKTPQSSKASSATTPEIFRRRRGSDIPQLNYSDFDKTCTKPQSNVENIVSEHRDSDRSPPETSRKSKKVEIEEEVERLKNELQSTVFKYKQACEELFSTQNKVKMLSTEYLNESKRVNNAVEKEELQRNTAALEKERYMKAVKEVETAKALLAREFCQRQIAEVNALRTYLEKKKVIDQLLGTDHRYRKYTIEEIVTATEGFSPEKVIGEGGYGKVYQCSLDSTPAAVKVVRLDTPEKKQEFLKEVEVLSQLRHPHVVLLLGACPENGCLVYEYLENGSLEEYIFHRKNKPPLPWFIRFRVIFEVACGLAFLHSSKPEPIVHRDLKPGNILLNRNYVSKIADVGLAKLVTDVAPDNVTMYRNSVLAGTLHYIDPEYHRTGTIRPKSDLYAFGIIILQLLTARNPSGIVPAVENAVKKGTLTEMLDKSVTDWPLAETEELARIGLKCAEFRCRDRPDLKSEVIPVLKRLVETANSKVKKEGSNLRAPSHYFCPILREIMEEPEIAADGFTYERKAILAWLEKHNISPVTRQKLDHFKLTPNHTLRSAIRDWKSRVRFSNVVV

SEQ ID NO: 28626 - protein, 726 aa, Arabidopsis thaliana
  misc_feature (1)..(726): Ceres Seq. ID no. 3026739
MYVRDVKKEYETVFVPFLKMCKSTRSTKCKVETLLLEYDDPAKALVRLISKSGVNSLRYFRSRRTKGTGVPLTVLRYAPETCEVYIVCKDRITTKSMDPLINREPCTSPHAAATAHDFLRDWAASFHTLRSPTLPDPRQSTEAGTRRSASARELRFEALSLTCNKPKTPQSSKASSATTPEIFRRRRGSDIPQLNYSDFDKTCTKPQSNVENIVSEHRDSDRSPPETSRKSKKVEIEEEVERLKNELQSTVFKYKQACEELFSTQNKVKMLSTEYLNESKRVNNAVEKEELQRNTAALEKERYMKAVKEVETAKALLAREFCQRQIAEVNALRTYLEKKKVIDQLLGTDHRYRKYTIEEIVTATEGFSPEKVIGEGGYGKVYQCSLDSTPAAVKVVRLDTPEKKQEFLKEVEVLSQLRHPHVVLLLGACPENGCLVYEYLENGSLEEYIFHRKNKPPLPWFIRFRVIFEVACGLAFLHSSKPEPIVHRDLKPGNILLNRNYVSKIADVGLAKLVTDVAPDNVTMYRNSVLAGTLHYIDPEYHRTGTIRPKSDLYAFGIIILQLLTARNPSGIVPAVENAVKKGTLTEMLDKSVTDWPLAETEELARIGLKCAEFRCRDRPDLKSEVIPVLKRLVETANSKVKKEGSNLRAPSHYFCPILREIMEEPEIAADGFTYERKAILAWLEKHNISPVTRQKLDHFKLTPNHTLRSAIRDWKSRVRFSNVVV

SEQ ID NO: 28627 - DNA, 1446 bp, Arabidopsis thaliana
  misc_feature (1)..(1446): Ceres Seq. ID no. 3026804
atgaagaacttaaagatggttttcttcaagatcctctttatctctttaatggcaggattagccatgaaaggatctaagatcaacgtagaagatctccaaaagttctccctccaccatacacagaacaacctccaaaccataagccttctattgtttcttgtcgtttttgtgtggatcctctacatgttaacccgacctaaacccgtttaccttgttgatttctcctgctaccttccaccgtcgcatctcaaggtcagtatccaaaccctaatgggacacgcaagacgtgcaagagaagcaggcatgtgttggaagaacaaagagagcgaccatttagttgacttccaggagaagattcttgaacgttccggtcttggtcaagaaacctacatccccgagggtcttcagtgcttcccacttcagcaaggcatgggtgcttcacgtaaagagacggaagaagtaatcttcggagctcttgacaatctttttcgcaacaccggtgtaaaacctgatgatatcggtatattggtggtgaattctagcacgtttaatccaactccatcactcgcctccatgattgtgaacaagtacaaactcagagacaacatcaagagtttgaatcttggagggatgggttgcagtgccggagttatagctgttgatgtcgctaagggattactacaagttcataggaacacttatgctattgtagtaagcacagagaacatcactcagaacttatacttggggaaaaacaaatcaatgctagtcacaaactgtttgttccgcgttggtggtgctgcggttctgctttcaaacagatctagagaccgtaaccgcgccaaatacgagcttgttcacaccgtacggatccataccggatcagatgataggtcgttcgaatgtgcgacacaagaagaggatgaagatggtataattggagttaccttgacaaagaatctacctatggtggctgcaaggactcttaagataaatatcgcaactttgggtcctcttgtacttccattaaaagagaagctagccttctttattacttttgtcaagaagaagtatttcaagccagagttaaggaattatacaccagatttcaagcttgcctttgagcatttctgtatccacgctggtggaagagctctaatagatgagctggagaagaaccttaagctttctccgttacacgtagaggcgtcaagaatgacactacacaggtttggtaacacttcttctagctcaatctggtacgagttagcttatacagaagctaaaggaaggatgaaggaaggagataggatttggcagattgctttggggtcaggttttaagtgtaacagttcagtatgggtggctctgcgagacgttaagccttcagctaacagtccatgggaagactgtatggatagatatccggttgagattgatatttaa

SEQ ID NO: 28628 - protein, 481 aa, Arabidopsis thaliana
  misc_feature (1)..(481): Ceres Seq. ID no. 3026805
MKNLKMVFFKILFISLMAGLAMKGSKINVEDLQKFSLHHTQNNLQTISLLLFLVVFVWILYMLTRPKPVYLVDFSCYLPPSHLKVSIQTLMGHARRAREAGMCWKNKESDHLVDFQEKILERSGLGQETYIPEGLQCFPLQQGMGASRKETEEVIFGALDNLFRNTGVKPDDIGILVVNSSTFNPTPSLASMIVNKYKLRDNIKSLNLGGMGCSAGVIAVDVAKGLLQVHRNTYAIVVSTENITQNLYLGKNKSMLVTNCLFRVGGAAVLLSNRSRDRNRAKYELVHTVRIHTGSDDRSFECATQEEDEDGIIGVTLTKNLPMVAARTLKINIATLGPLVLPLKEKLAFFITFVKKKYFKPELRNYTPDFKLAFEHFCIHAGGRALIDELEKNLKLSPLHVEASRMTLHRFGNTSSSSIWYELAYTEAKGRMKEGDRIWQIALGSGFKCNSSVWVALRDVKPSANSPWEDCMDRYPVEIDI

SEQ ID NO: 28629 - protein, 476 aa, Arabidopsis thaliana
  misc_feature (1)..(476): Ceres Seq. ID no. 3026806
MVFFKILFISLMAGLAMKGSKINVEDLQKFSLHHTQNNLQTISLLLFLVVFVWILYMLTRPKPVYLVDFSCYLPPSHLKVSIQTLMGHARRAREAGMCWKNKESDHLVDFQEKILERSGLGQETYIPEGLQCFPLQQGMGASRKETEEVIFGALDNLFRNTGVKPDDIGILVVNSSTFNPTPSLASMIVNKYKLRDNIKSLNLGGMGCSAGVIAVDVAKGLLQVHRNTYAIVVSTENITQNLYLGKNKSMLVTNCLFRVGGAAVLLSNRSRDRNRAKYELVHTVRIHTGSDDRSFECATQEEDEDGIIGVTLTKNLPMVAARTLKINIATLGPLVLPLKEKLAFFITFVKKKYFKPELRNYTPDFKLAFEHFCIHAGGRALIDELEKNLKLSPLHVEASRMTLHRFGNTSSSSIWYELAYTEAKGRMKEGDRIWQIALGSGFKCNSSVWVALRDVKPSANSPWEDCMDRYPVEIDI

SEQ ID NO: 28630 - protein, 465 aa, Arabidopsis thaliana
  misc_feature (1)..(465): Ceres Seq. ID no. 3026807
MAGLAMKGSKINVEDLQKFSLHHTQNNLQTISLLLFLVVFVWILYMLTRPKPVYLVDFSCYLPPSHLKVSIQTLMGHARRAREAGMCWKNKESDHLVDFQEKILERSGLGQETYIPEGLQCFPLQQGMGASRKETEEVIFGALDNLFRNTGVKPDDIGILVVNSSTFNPTPSLASMIVNKYKLRDNIKSLNLGGMGCSAGVIAVDVAKGLLQVHRNTYAIVVSTENITQNLYLGKNKSMLVTNCLFRVGGAAVLLSNRSRDRNRAKYELVHTVRIHTGSDDRSFECATQEEDEDGIIGVTLTKNLPMVAARTLKINIATLGPLVLPLKEKLAFFITFVKKKYFKPELRNYTPDFKLAFEHFCIHAGGRALIDELEKNLKLSPLHVEASRMTLHRFGNTSSSSIWYELAYTEAKGRMKEGDRIWQIALGSGFKCNSSVWVALRDVKPSANSPWEDCMDRYPVEIDI

SEQ ID NO: 28631 - DNA, 2160 bp, Arabidopsis thaliana
  misc_feature (1)..(2160): Ceres Seq. ID no. 3027471
atggctcaagaggcaaatcctgtcaccccaaccatcgctccaccagctttctctctggaggacctcaaagccatcttcgccaccatgactaaagatctctccgatgctgtcacagaaaccaaccgccgattcgacgagttagtaaggggaatcccgcaacatccaaactccaagataacaccgccgagatcaattcaaccgcgtggcctcaccttcgacttcacggacgcacagtccaacagggtcaacaccatgttcccagggctacaccatcatgtcagtcagcacgggagaccacccatgccccttgaagaggaagacgctaagttggcggggaagtctcaaccacccaaaataaaagacagagcgcgggaagacttccaggagccacaatggggcgatttcaaacatgcccaaggtgaacacgcgaacaaaggacaacacttgctggagaatcatccaaaccaagaggaagatcatgcggaggaattcaggaccctagagaatgaactcccggggccttcaaaaagatggaggggacaacaaccccagcgagctccagaccacccccgtggaagaatttccacgaatatggtcggtctgtccgacgatgaagattcagtgtcagctctaaagaaaagagcacgacaagtatgcagcgttagggtcgtcccagaggctgcaccgctaagccaagagcccatcgtcttcacaccagaggacgctagtggtattcagcatccgcataacgacgcactggtcgtcaaactagtaatggaagattttgatgtggagcgggtcttgatcaacactggcagctcggtcaacttgattttcttgaaaactttcttaaagatggggatctccgaaagaaagataatgccaaaaatccggcctttgacgagatacgatggagaagcgaagatgtccataggagaaattaagctccttgtccaggcggacggcatcacccagaaaactaagttcgttgtcattgattcggaaccgatctacaacgccatcctgggaagtctctggatttactcgatgagagctatcccctcaacctaccatctgtgtttgaagttcccaatagcaacgggaatcttcaccctgtacgagccatcccgaacagtcggtatcggaagagaactagagggggagatgaaggaaaagctgattgccttcctgaaatcaaggtcgtccaccttcgcttggtccacaaaggatatgactgggatcgctcaaaaggtaacctgtcacaaattcaatatggatccgacttttaaaccagttcgccagaagcgcaggcggttgggatctgatcgtgccaaggctgttcaaaacgaggtcgaaagactgctgaaggctggtctgatcaaggaagtccaatattctgaatggctagccaacccggttgtagacaagaagaaaaacgggaagtggagagtttgtgtcgattataccgatctgaatagagcgtgcccaaaagacagttatcctctcccacacatagaccgcctcgtagaggcgactgccgggaatcagcttttgtccttcatggacgctttcttgggagaagtaccaaggctgacaggtcgcatcgcagctttgaatcgctttatcgcccgatcaacagacaagtgcctttctgtctacaaacttctacgtggcaataaggatttccatttggatgagaaatgtgaaaccgccttccaggagctcaaatcctaccttatgagcaggacgatcttggccaaacctgaggttggtgagactctatatatatatgtctcgatgtcaagttcggcggtgagtggagtgttagtaagagacgatcatggtaatgaaaaactggagaagctagcattggcagttataaaggctgctcatttcataaccgaactatctccatgtgtgatcgatgaagtccctaaagaaaactggatactctacgcaaatggctcttcatcactacaaggttacggtcttggaatcctactccagtctccgaccagggaggtgcttgaacagttgctccgacttccattcaaagcatccaacaacaaagcgcagtacgaggcacttctcgctggacttcgcctcactgaagggattggggccaaacaaatcaaagcctttagcgaactcaactcgtag

SEQ ID NO: 28632 - protein, 719 aa, Arabidopsis thaliana
  misc_feature (1)..(719): Ceres Seq. ID no. 3027472
MAQEANPVTPTIAPPAFSLEDLKAIFATMTKDLSDAVTETNRRFDELVRGIPQHPNSKITPPRSIQPRGLTFDFTDAQSNRVNTMFPGLHHHVSQHGRPPMPLEEEDAKLAGKSQPPKIKDRAREDFQEPQWGDFKHAQGEHANKGQHLLENHPNQEEDHAEEFRTLENELPGPSKRWRGQQPQRAPDHPRGRISTNMVGLSDDEDSVSALKKRARQVCSVRVVPEAAPLSQEPIVFTPEDASGIQHPHNDALVVKLVMEDFDVERVLINTGSSVNLIFLKTFLKMGISERKIMPKIRPLTRYDGEAKMSIGEIKLLVQADGITQKTKFVVIDSEPIYNAILGSLWIYSMRAIPSTYHLCLKFPIATGIFTLYEPSRTVGIGRELEGEMKEKLIAFLKSRSSTFAWSTKDMTGIAQKVTCHKFNMDPTFKPVRQKRRRLGSDRAKAVQNEVERLLKAGLIKEVQYSEWLANPVVDKKKNGKWRVCVDYTDLNRACPKDSYPLPHIDRLVEATAGNQLLSFMDAFLGEVPRLTGRIAALNRFIARSTDKCLSVYKLLRGNKDFHLDEKCETAFQELKSYLMSRTILAKPEVGETLYIYVSMSSSAVSGVLVRDDHGNEKLEKLALAVIKAAHFITELSPCVIDEVPKENWILYANGSSSLQGYGLGILLQSPTREVLEQLLRLPFKASNNKAQYEALLAGLRLTEGIGAKQIKAFSELNS

SEQ ID NO: 28633 - protein, 691 aa, Arabidopsis thaliana
  misc_feature (1)..(691): Ceres Seq. ID no. 3027473
MTKDLSDAVTETNRRFDELVRGIPQHPNSKITPPRSIQPRGLTFDFTDAQSNRVNTMFPGLHHHVSQHGRPPMPLEEEDAKLAGKSQPPKIKDRAREDFQEPQWGDFKHAQGEHANKGQHLLENHPNQEEDHAEEFRTLENELPGPSKRWRGQQPQRAPDHPRGRISTNMVGLSDDEDSVSALKKRARQVCSVRVVPEAAPLSQEPIVFTPEDASGIQHPHNDALVVKLVMEDFDVERVLINTGSSVNLIFLKTFLKMGISERKIMPKIRPLTRYDGEAKMSIGEIKLLVQADGITQKTKFVVIDSEPIYNAILGSLWIYSMRAIPSTYHLCLKFPIATGIFTLYEPSRTVGIGRELEGEMKEKLIAFLKSRSSTFAWSTKDMTGIAQKVTCHKFNMDPTFKPVRQKRRRLGSDRAKAVQNEVERLLKAGLIKEVQYSEWLANPVVDKKKNGKWRVCVDYTDLNRACPKDSYPLPHIDRLVEATAGNQLLSFMDAFLGEVPRLTGRIAALNRFIARSTDKCLSVYKLLRGNKDFHLDEKCETAFQELKSYLMSRTILAKPEVGETLYIYVSMSSSAVSGVLVRDDHGNEKLEKLALAVIKAAHFITELSPCVIDEVPKENWILYANGSSSLQGYGLGILLQSPTREVLEQLLRLPFKASNNKAQYEALLAGLRLTEGIGAKQIKAFSELNS

SEQ ID NO: 28634 - protein, 635 aa, Arabidopsis thaliana
  misc_feature (1)..(635): Ceres Seq. ID no. 3027474
MFPGLHHHVSQHGRPPMPLEEEDAKLAGKSQPPKIKDRAREDFQEPQWGDFKHAQGEHANKGQHLLENHPNQEEDHAEEFRTLENELPGPSKRWRGQQPQRAPDHPRGRISTNMVGLSDDEDSVSALKKRARQVCSVRVVPEAAPLSQEPIVFTPEDASGIQHPHNDALVVKLVMEDFDVERVLINTGSSVNLIFLKTFLKMGISERKIMPKIRPLTRYDGEAKMSIGEIKLLVQADGITQKTKFVVIDSEPIYNAILGSLWIYSMRAIPSTYHLCLKFPIATGIFTLYEPSRTVGIGRELEGEMKEKLIAFLKSRSSTFAWSTKDMTGIAQKVTCHKFNMDPTFKPVRQKRRRLGSDRAKAVQNEVERLLKAGLIKEVQYSEWLANPVVDKKKNGKWRVCVDYTDLNRACPKDSYPLPHIDRLVEATAGNQLLSFMDAFLGEVPRLTGRIAALNRFIARSTDKCLSVYKLLRGNKDFHLDEKCETAFQELKSYLMSRTILAKPEVGETLYIYVSMSSSAVSGVLVRDDHGNEKLEKLALAVIKAAHFITELSPCVIDEVPKENWILYANGSSSLQGYGLGILLQSPTREVLEQLLRLPFKASNNKAQYEALLAGLRLTEGIGAKQIKAFSELNS

SEQ ID NO: 28635 - DNA, 753 bp, Arabidopsis thaliana
  misc_feature (1)..(753): Ceres Seq. ID no. 3027620
atgggagacggaagagaaggagactgggaatgtttaggatgcagaaacaggaattatgcgtttagatcattctgtaacagatgcaagcagcctcgtcttatcatggataataatacttctccaaactctaagtggcttcctcgtatcggcgattggatctgcactggttgtactaacaacaattatgcatcacgagaaaagtgcaagaaatgtgggcaatctaaggaagtagcagcattgtcagcacttgctatccctggagcttctcttcaaactcatctccattacttcacccgtggacctgagtcacatgatcaacctggttctttactcgcattctctaacgctacaaatcaagcttcggttcataaagaatggaggagtggtgactggatttgcagatgtggttttcacaattattcctctcgtatacagtgcaaaaagtgcaatgaaatagctccactagcccttggtacaaagagattagcatcagaagctttggctcatgaatgggatagcaaaagactgaatcaaggatatacaagcatgcaaacacagtcagcgatatatgcatcttttcctggtatgagcctaggaagggtctcaaattggcaacttcctctcccgtttctacaacaacactcaacacctgctttacttggaatgggagtgaaacaatggcgtgatggcgactggatgtgtacaaattgcaagaatcacaattatgcatcacgagcagagtgcaataggtga

SEQ ID NO: 28636 - protein, 250 aa, Arabidopsis thaliana
  misc_feature (1)..(250): Ceres Seq. ID no. 3027621
MGDGREGDWECLGCRNRNYAFRSFCNRCKQPRLIMDNNTSPNSKWLPRIGDWICTGCTNNNYASREKCKKCGQSKEVAALSALAIPGASLQTHLHYFTRGPESHDQPGSLLAFSNATNQASVHKEWRSGDWICRCGFHNYSSRIQCKKCNEIAPLALGTKRLASEALAHEWDSKRLNQGYTSMQTQSAIYASFPGMSLGRVSNWQLPLPFLQQHSTPALLGMGVKQWRDGDWMCTNCKNHNYASRAECNR

SEQ ID NO: 28637 - protein, 216 aa, Arabidopsis thaliana
  misc_feature (1)..(216): Ceres Seq. ID no. 3027622
MDNNTSPNSKWLPRIGDWICTGCTNNNYASREKCKKCGQSKEVAALSALAIPGASLQTHLHYFTRGPESHDQPGSLLAFSNATNQASVHKEWRSGDWICRCGFHNYSSRIQCKKCNEIAPLALGTKRLASEALAHEWDSKRLNQGYTSMQTQSAIYASFPGMSLGRVSNWQLPLPFLQQHSTPALLGMGVKQWRDGDWMCTNCKNHNYASRAECNR

SEQ ID NO: 28638 - DNA, 3714 bp, Arabidopsis thaliana
  misc_feature (1)..(3714): Ceres Seq. ID no. 3030441
atgtgcggaattgcaattgtagtgtgcggcgttcgtatcgaactctcgacactttcgtcgtctctctctgaaactgagactcctttcgaacgattacaagtctctgttgaagatgttaaagctgtcttaagccaaagaggtcctgatagtgtaggagaaaagactattcatcttcgaccaaattgtggtcaagaatctgctactctctctgttgttgagactagtgaaggaacttataagcttgaggagactacttctttgggtgaattgcattttattggttctacattacagcttagaggaactagtcctataaggcaaccattggtggattcttctgggaacattctagcttacaatggcgaagtatttggtggaattgaactcaacagctatgataatgatactgaagtgcttttgaagtctttagagaaagcaaaatctttagttccagatgttctttcgatgattaaaggtccctgggccattatatattggcaggaaagctcgagaacgttatggtttggtaaagatccgtttggtcggaggagccttcttgttcactcgccaactgtggaagaccctcgttttcttctatcgtctgtttcaccagcttcttcagtttctcaaggtgctggattggatactgaaaatggtaatagccttcatagatattgggaagagcttccatgtggcgtgtacagtatttcttttggggtttcagaattatgtattcatggtgaagttacaaaacacgaatggagaaataccatctggaaagaattgattgaatgggaaaggaaattagttgtacctagacctgaagatctatcaacgtcatcgcttagtggagttcaggaagacaaatctgtgtcaacttctctaggtttagctttaggatttgcgcagacagttttggtcgtgttaaaggaatcagtgaggcggcgaacttcacttcatagcatttatcagggagataaagaagctgtcccagtagctgttcttttctctggtggattggattcgatgattcttgctgcgctgttgcatcagtgccttgatccaaaatatgaagttgatctccttaatgtcagttttgatggtcctaatgctcctgataggatctccgccaaggctggaataaaggaactcaaaaagattgcaccttttagaaggtggaaacttgttgagattgatgctgatctgtcaaaactaggctttgagacaaaacgtgttatgtcactcataaatcctgcagacacttacatggaccttaacataggaacagcattatggttagctgctcgtggtgatggttggattcacgaagataatggaaatccaagtgtagaggaaaataaccagcgggtcaagtataagtccgatgctagaatcctgcttgttggcgctggtgctgatgagcaatgtgccggttacggtaggcacagaactaaatatcgaaatggaagttgggttgcgttggatcaagaaatgaaattagatatgcagagaatttggaaaagaaatttgggtcgagatgatcgatgcattgcagataacggtaaagaggggcgattcccgttcttagatgaagatgtgataaagactctccttgacattcccttgtgggaaatcgctgatcttgagcaaccaagtggaacgggagacaagaagattcttagacaggttgcaagcctgcttggtgtacatgaagttgcaaagatgcctaagagagcaattcagtttggatcaagaatcgctcgtgaatcaaaccggaagaattttggaagtaaccgtgccgcaaaccaggcttctgccgggagcagacattctttcaatgatctcaaaactggtttgaacactgaacacaaatggactaataagaggacattttggttcttcatgttggaaaccgaaagcagtgtctgcgacaacatcgccggcaatgagaaatggcgagcggaagctgaaattggtggcaacgagagagctctgcaagcgcttcgagaactcattatcttcccttttcgttaccctctcgaagctcgaactcttggtctcaaatggcctagaggattgcttctctacggtcctcctggaaccggcaagacaagcttggtccgtgctgttgtccaggaatgtgatgcacatttgattgttttaagccctcattctgtacatcgagcacatgctggagaaagcgagaaagtcttaagggaagctttcgctgaggcttcttctcacgctgtttcagacaagccttctgtgatttttattgatgaaatcgatgttctttgtcctcgtcgtgatgctagacgagaacaagatgttcgtattgcttctcaactgtttacacttatggactcaaacaagccttcatcatctgcaccaagagttgttgttgtagcatccacaaatagggtggatgcgattgacccagcgctaagaagagcgggacgatttgatgctttagttgaagtgagcacaccaaatgaggaggatcgtttaaaaatcctgcagctgtacacaaagaaagtcaatttagatcctagtgtcgatcttcaagccattgcaatatcttgcaacggttatgttggagcagatttggaagctttatgtcgtgaagcgacaatatctgcaagtaaaagatcttcagattctcttattctaacatctcaagacttcaagattgcaaaatctgtggttggtccaagtataaacagaggcatcacagttgaaatccctaaagtgacatgggacgatgttggtggtcttaaagacttaaagaaaaagctccagcaagctgttgaatggccaatcaaacattcagctgcatttgtaaaaatgggcatatcgccaatgcgtgggatacttctacatggtcctccaggttgctcaaagacaactcttgctaaagccgctgcaaatgctgctcaagcctccttcttttccttaagctgtgcggagctattttctatgtatgttggagaaggtgaagcattattgcggaatacatttcaaagagctcgacttgcttctccaagtataatattctttgatgaagctgatgtcgttgcctgtaaaagaggtgatgagagctcaagcaatagttctacagttggagaaaggcttctatctacactgttaaccgaaatggacggtcttgaagaagcaaagggaatcctcgtcttggctgccacaaaccgcccgtatgcaattgatgctgctctaatgcgacctggtcgatttgatctcgtgctatacgtgccaccgcctgatctagaagcccggtttgaaatactgcaagtgcatacacgcaacatgacactaggagacgacgttgatctcagaaaaatcgctgaagaaaccgatctcttcacaggtgccgagctcgagggtctatgcagagaaagcggaactgtctcacttagagaaaacatcgcagcaaccgctgtcttcaatcgccatttccaaaccgcaaaaagctcgcttaaaccagcgttaacaatcgaagaagtcgaaacttattcatcattcaggaaggcggcgaaaagatctgattcgaaaccgattccgattaacaaaaagaaggcgacttccaccgtcttcggattctcatggcaattaggtgttttgagcttattgttgcttgctactggaaactattacttcaaccacactaaacatgaattactagtagcttctgctacatga

SEQ ID NO: 28639 - protein, 1237 aa, Arabidopsis thaliana
  misc_feature (1)..(1237): Ceres Seq. ID no. 3030442
MCGIAIVVCGVRIELSTLSSSLSETETPFERLQVSVEDVKAVLSQRGPDSVGEKTIHLRPNCGQESATLSVVETSEGTYKLEETTSLGELHFIGSTLQLRGTSPIRQPLVDSSGNILAYNGEVFGGIELNSYDNDTEVLLKSLEKAKSLVPDVLSMIKGPWAIIYWQESSRTLWFGKDPFGRRSLLVHSPTVEDPRFLLSSVSPASSVSQGAGLDTENGNSLHRYWEELPCGVYSISFGVSELCIHGEVTKHEWRNTIWKELIEWERKLVVPRPEDLSTSSLSGVQEDKSVSTSLGLALGFAQTVLVVLKESVRRRTSLHSIYQGDKEAVPVAVLFSGGLDSMILAALLHQCLDPKYEVDLLNVSFDGPNAPDRISAKAGIKELKKIAPFRRWKLVEIDADLSKLGFETKRVMSLINPADTYMDLNIGTALWLAARGDGWIHEDNGNPSVEENNQRVKYKSDARILLVGAGADEQCAGYGRHRTKYRNGSWVALDQEMKLDMQRIWKRNLGRDDRCIADNGKEGRFPFLDEDVIKTLLDIPLWEIADLEQPSGTGDKKILRQVASLLGVHEVAKMPKRAIQFGSRIARESNRKNFGSNRAANQASAGSRHSFNDLKTGLNTEHKWTNKRTFWFFMLETESSVCDNIAGNEKWRAEAEIGGNERALQALRELIIFPFRYPLEARTLGLKWPRGLLLYGPPGTGKTSLVRAVVQECDAHLIVLSPHSVHRAHAGESEKVLREAFAEASSHAVSDKPSVIFIDEIDVLCPRRDARREQDVRIASQLFTLMDSNKPSSSAPRVVVVASTNRVDAIDPALRRAGRFDALVEVSTPNEEDRLKILQLYTKKVNLDPSVDLQAIAISCNGYVGADLEALCREATISASKRSSDSLILTSQDFKIAKSVVGPSINRGITVEIPKVTWDDVGGLKDLKKKLQQAVEWPIKHSAAFVKMGISPMRGILLHGPPGCSKTTLAKAAANAAQASFFSLSCAELFSMYVGEGEALLRNTFQRARLASPSIIFFDEADVVACKRGDESSSNSSTVGERLLSTLLTEMDGLEEAKGILVLAATNRPYAIDAALMRPGRFDLVLYVPPPDLEARFEILQVHTRNMTLGDDVDLRKIAEETDLFTGAELEGLCRESGTVSLRENIAATAVFNRHFQTAKSSLKPALTIEEVETYSSFRKAAKRSDSKPIPINKKKATSTVFGFSWQLGVLSLLLLATGNYYFNHTKHELLVASAT

SEQ ID NO: 28640 - protein, 1082 aa, Arabidopsis thaliana
  misc_feature (1)..(1082): Ceres Seq. ID no. 3030443
MIKGPWAIIYWQESSRTLWFGKDPFGRRSLLVHSPTVEDPRFLLSSVSPASSVSQGAGLDTENGNSLHRYWEELPCGVYSISFGVSELCIHGEVTKHEWRNTIWKELIEWERKLVVPRPEDLSTSSLSGVQEDKSVSTSLGLALGFAQTVLVVLKESVRRRTSLHSIYQGDKEAVPVAVLFSGGLDSMILAALLHQCLDPKYEVDLLNVSFDGPNAPDRISAKAGIKELKKIAPFRRWKLVEIDADLSKLGFETKRVMSLINPADTYMDLNIGTALWLAARGDGWIHEDNGNPSVEENNQRVKYKSDARILLVGAGADEQCAGYGRHRTKYRNGSWVALDQEMKLDMQRIWKRNLGRDDRCIADNGKEGRFPFLDEDVIKTLLDIPLWEIADLEQPSGTGDKKILRQVASLLGVHEVAKMPKRAIQFGSRIARESNRKNFGSNRAANQASAGSRHSFNDLKTGLNTEHKWTNKRTFWFFMLETESSVCDNIAGNEKWRAEAEIGGNERALQALRELIIFPFRYPLEARTLGLKWPRGLLLYGPPGTGKTSLVRAVVQECDAHLIVLSPHSVHRAHAGESEKVLREAFAEASSHAVSDKPSVIFIDEIDVLCPRRDARREQDVRIASQLFTLMDSNKPSSSAPRVVVVASTNRVDAIDPALRRAGRFDALVEVSTPNEEDRLKILQLYTKKVNLDPSVDLQAIAISCNGYVGADLEALCREATISASKRSSDSLILTSQDFKIAKSVVGPSINRGITVEIPKVTWDDVGGLKDLKKKLQQAVEWPIKHSAAFVKMGISPMRGILLHGPPGCSKTTLAKAAANAAQASFFSLSCAELFSMYVGEGEALLRNTFQRARLASPSIIFFDEADVVACKRGDESSSNSSTVGERLLSTLLTEMDGLEEAKGILVLAATNRPYAIDAALMRPGRFDLVLYVPPPDLEARFEILQVHTRNMTLGDDVDLRKIAEETDLFTGAELEGLCRESGTVSLRENIAATAVFNRHFQTAKSSLKPALTIEEVETYSSFRKAAKRSDSKPIPINKKKATSTVFGFSWQLGVLSLLLLATGNYYFNHTKHELLVASAT

SEQ ID NO: 28641 - protein, 895 aa, Arabidopsis thaliana
  misc_feature (1)..(895): Ceres Seq. ID no. 3030444
MILAALLHQCLDPKYEVDLLNVSFDGPNAPDRISAKAGIKELKKIAPFRRWKLVEIDADLSKLGFETKRVMSLINPADTYMDLNIGTALWLAARGDGWIHEDNGNPSVEENNQRVKYKSDARILLVGAGADEQCAGYGRHRTKYRNGSWVALDQEMKLDMQRIWKRNLGRDDRCIADNGKEGRFPFLDEDVIKTLLDIPLWEIADLEQPSGTGDKKILRQVASLLGVHEVAKMPKRAIQFGSRIARESNRKNFGSNRAANQASAGSRHSFNDLKTGLNTEHKWTNKRTFWFFMLETESSVCDNIAGNEKWRAEAEIGGNERALQALRELIIFPFRYPLEARTLGLKWPRGLLLYGPPGTGKTSLVRAVVQECDAHLIVLSPHSVHRAHAGESEKVLREAFAEASSHAVSDKPSVIFIDEIDVLCPRRDARREQDVRIASQLFTLMDSNKPSSSAPRVVVVASTNRVDAIDPALRRAGRFDALVEVSTPNEEDRLKILQLYTKKVNLDPSVDLQAIAISCNGYVGADLEALCREATISASKRSSDSLILTSQDFKIAKSVVGPSINRGITVEIPKVTWDDVGGLKDLKKKLQQAVEWPIKHSAAFVKMGISPMRGILLHGPPGCSKTTLAKAAANAAQASFFSLSCAELFSMYVGEGEALLRNTFQRARLASPSIIFFDEADVVACKRGDESSSNSSTVGERLLSTLLTEMDGLEEAKGILVLAATNRPYAIDAALMRPGRFDLVLYVPPPDLEARFEILQVHTRNMTLGDDVDLRKIAEETDLFTGAELEGLCRESGTVSLRENIAATAVFNRHFQTAKSSLKPALTIEEVETYSSFRKAAKRSDSKPIPINKKKATSTVFGFSWQLGVLSLLLLATGNYYFNHTKHELLVASAT

SEQ ID NO: 28642 - DNA, 1260 bp, Arabidopsis thaliana
  misc_feature (1)..(1260): Ceres Seq. ID no. 3030741
atgggaccttttgggatggaaacaacacccggttttcctgatacttttgctggattcaaatctgccagtgtgagaacatcttcttcttcatcacttgttgatgagaatcttggccattcaatggaggataaaatgagtgacatgaagcatttcctaatggatcctcatcatgataataccgcggtggacagtttcttaggtcttggtatggagaatatgggcttaacctccaagatggaggagttttcacatggatttgacgttagctttctcccagattatggtggagttaacacttttagcactcaagatgtggaagcaggtttaaagtttgaaattcttgatggaattctggatggagttgatgaagtggaagatatctacgcatcacatgagctttcttctattgttaaccatttccctccagaaactgaagtcaagaagaatgaattagagggtgacccctatggtcttatgaacttcagttcagaatcttattctcctggaattagtggaagcatcggactcgcggagtggtcaaaagaaactgttccatatgctgaatcccagattgtatccagcgaaaaagttaaagatagttgggatacaaatgagtcagaagatgacaagaaaccactatccacatttataggctcttggattaaacgaaagaatcggaaacagaaattgctcaacaccgcttgtagtagattagattcttctcgtgaaagaaagtcttgcgagtcctatgacttcaggccccggaaaggacctatgaagaaatacattcacacttcaatggagaaaacattttctgatgatcagcttactttatctgagagtgaagatgacatttctgtaacaaagacatccagaaccaaaagtgacaggagaaagaatcagaggatatggactcttgatgaagtaatgaatttggttgatggtatttctcactttggtgttgggaaatggaccgatataaagaaccacttctttcattatgcagcacaccgcaaacccgttgatatcagagacaaatggcgtaatctactgaaagcaagttataacgaaaagcataacgatggacaggctgaagaaaaacgaaagtcagtggctcgctctataccgaaggatattctacatcgtgtaagagaacttgcttcactccatccatatcccttctccaaatcaccgtgtattgttcatgattcctcaagaagccgaagcacttcaaagaacaagaagaagaagagtggatga

SEQ ID NO: 28643 - protein, 419 aa, Arabidopsis thaliana
  misc_feature (1)..(419): Ceres Seq. ID no. 3030742
MGPFGMETTPGFPDTFAGFKSASVRTSSSSSLVDENLGHSMEDKMSDMKHFLMDPHHDNTAVDSFLGLGMENMGLTSKMEEFSHGFDVSFLPDYGGVNTFSTQDVEAGLKFEILDGILDGVDEVEDIYASHELSSIVNHFPPETEVKKNELEGDPYGLMNFSSESYSPGISGSIGLAEWSKETVPYAESQIVSSEKVKDSWDTNESEDDKKPLSTFIGSWIKRKNRKQKLLNTACSRLDSSRERKSCESYDFRPRKGPMKKYIHTSMEKTFSDDQLTLSESEDDISVTKTSRTKSDRRKNQRIWTLDEVMNLVDGISHFGVGKWTDIKNHFFHYAAHRKPVDIRDKWRNLLKASYNEKHNDGQAEEKRKSVARSIPKDILHRVRELASLHPYPFSKSPCIVHDSSRSRSTSKNKKKKSG

SEQ ID NO: 28644 - protein, 414 aa, Arabidopsis thaliana
  misc_feature (1)..(414): Ceres Seq. ID no. 3030743
METTPGFPDTFAGFKSASVRTSSSSSLVDENLGHSMEDKMSDMKHFLMDPHHDNTAVDSFLGLGMENMGLTSKMEEFSHGFDVSFLPDYGGVNTFSTQDVEAGLKFEILDGILDGVDEVEDIYASHELSSIVNHFPPETEVKKNELEGDPYGLMNFSSESYSPGISGSIGLAEWSKETVPYAESQIVSSEKVKDSWDTNESEDDKKPLSTFIGSWIKRKNRKQKLLNTACSRLDSSRERKSCESYDFRPRKGPMKKYIHTSMEKTFSDDQLTLSESEDDISVTKTSRTKSDRRKNQRIWTLDEVMNLVDGISHFGVGKWTDIKNHFFHYAAHRKPVDIRDKWRNLLKASYNEKHNDGQAEEKRKSVARSIPKDILHRVRELASLHPYPFSKSPCIVHDSSRSRSTSKNKKKKSG

SEQ ID NO: 28645 - protein, 379 aa, Arabidopsis thaliana
  misc_feature (1)..(379): Ceres Seq. ID no. 3030744
MEDKMSDMKHFLMDPHHDNTAVDSFLGLGMENMGLTSKMEEFSHGFDVSFLPDYGGVNTFSTQDVEAGLKFEILDGILDGVDEVEDIYASHELSSIVNHFPPETEVKKNELEGDPYGLMNFSSESYSPGISGSIGLAEWSKETVPYAESQIVSSEKVKDSWDTNESEDDKKPLSTFIGSWIKRKNRKQKLLNTACSRLDSSRERKSCESYDFRPRKGPMKKYIHTSMEKTFSDDQLTLSESEDDISVTKTSRTKSDRRKNQRIWTLDEVMNLVDGISHFGVGKWTDIKNHFFHYAAHRKPVDIRDKWRNLLKASYNEKHNDGQAEEKRKSVARSIPKDILHRVRELASLHPYPFSKSPCIVHDSSRSRSTSKNKKKKSG

SEQ ID NO: 28646 - DNA, 570 bp, Arabidopsis thaliana
  misc_feature (1)..(570): Ceres Seq. ID no. 3030818
atggaggagccgaaatggctcgaaggtctcttaagaacaaacttcttcagcatttgccctcgacatcgcgagacaccgcgaaatgagtgcaacatgttctgtctctcctgtcaaaacgctgcgttttgcttctactgccgctcctcctttcacattgatcatcccgtccttcagataagaagatcgtcgtatcatgatgtggtgagagtatcggagatagagaatgcattggacataagaggagtgcaaacttatgtcatcaatagcgcgagggttctcttcttaaacgagagacctcagcctaagaactcctcccatggtgccgcctcctccactccgaaaaccatgtcctacttctgtgagacatgttgcagaacccttcttgatccctttcgcttctgttccttgggttgcaaggttgaaggaatgaggaagaataaggaagaggaagaagaaagattgcgtaaagaaagacaacaagaaacgcacaaaggcacgcatcctccaactcatacctctaattctaggcgacgaaaaggcattcctcatagagctccttttgcctcctaa

SEQ ID NO: 28647 - protein, 189 aa, Arabidopsis thaliana
  misc_feature (1)..(189): Ceres Seq. ID no. 3030819
MEEPKWLEGLLRTNFFSICPRHRETPRNECNMFCLSCQNAAFCFYCRSSFHIDHPVLQIRRSSYHDVVRVSEIENALDIRGVQTYVINSARVLFLNERPQPKNSSHGAASSTPKTMSYFCETCCRTLLDPFRFCSLGCKVEGMRKNKEEEEERLRKERQQETHKGTHPPTHTSNSRRRKGIPHRAPFAS

SEQ ID NO: 28648 - protein, 158 aa, Arabidopsis thaliana
  misc_feature (1)..(158): Ceres Seq. ID no. 3030820
MFCLSCQNAAFCFYCRSSFHIDHPVLQIRRSSYHDVVRVSEIENALDIRGVQTYVINSARVLFLNERPQPKNSSHGAASSTPKTMSYFCETCCRTLLDPFRFCSLGCKVEGMRKNKEEEEERLRKERQQETHKGTHPPTHTSNSRRRKGIPHRAPFAS

SEQ ID NO: 28649 - DNA, 1092 bp, Arabidopsis thaliana
  misc_feature (1)..(1092): Ceres Seq. ID no. 3031113
atgtcgacttctaagaccataaccttcactctcttcatagcagcactactctcgtcctgcgacgcagccacaaacgctacatcgcaaccactatttccagcgattcttatctttggcgattcaacagttgacacaggtaacaacaactaccactcacaaacaatcttcaaagccaaacatcttccttacggaatcgatctcccaaaccacaaagctagtggaagatttacaaatggcaaaatcttttccgacataatcgcaacaaaactcaacatcaaacagtttgttcctcccttcttacaaccaaatctctctgaccaagagattgtaaccggagtctgttttgcatcagccggtgcgggttacgatgaccataccagtctctctacgcaagcgattcgtgtcttggaccaacaaaagatgttcaagaattacattgctcgtcttaaaagtatcgtaggagacaagaaagctatggaaatcataaaaaatgctttggtggttataagtgcagggcctaacgattttatcttgaactattacgatattccttcaaggcgtcttgagtttcctcacatttctggttaccaagactttgttcttcaaaggcttgacaatttcgtgcgggagctttacagtttaggttgccggaaaattatggtaggaggtttaccgccgatgggttgtttaccgattcaaatgactgctaaattccgaaacgctctaaggttctgcttggaacaagagaaccgagactctgtcttatacaatcagaaacttcagaatctattacctcaaatcgaagcatcgcttacaggaagcaagatcctttactccaatgtctatgaccctatgatggacatgatgcaaaaccctagcaaatacggatttaaagagacgaagagaggatgttgtggaacagggcatttggagacgagcttcatgtgtaatgctttttctccaacgtgtagaaatcactcggagtttttgttctttgactcgattcatccatccgaagctacttataattatatgggcaattttctagatactcagatccgcgtgtggcttagcttgaggcttaagtcataa

SEQ ID NO: 28650 - protein, 363 aa, Arabidopsis thaliana
  misc_feature (1)..(363): Ceres Seq. ID no. 3031114
MSTSKTITFTLFIAALLSSCDAATNATSQPLFPAILIFGDSTVDTGNNNYHSQTIFKAKHLPYGIDLPNHKASGRFTNGKIFSDIIATKLNIKQFVPPFLQPNLSDQEIVTGVCFASAGAGYDDHTSLSTQAIRVLDQQKMFKNYIARLKSIVGDKKAMEIIKNALVVISAGPNDFILNYYDIPSRRLEFPHISGYQDFVLQRLDNFVRELYSLGCRKIMVGGLPPMGCLPIQMTAKFRNALRFCLEQENRDSVLYNQKLQNLLPQIEASLTGSKILYSNVYDPMMDMMQNPSKYGFKETKRGCCGTGHLETSFMCNAFSPTCRNHSEFLFFDSIHPSEATYNYMGNFLDTQIRVWLSLRLKS

SEQ ID NO: 28651 - protein, 223 aa, Arabidopsis thaliana
  misc_feature (1)..(223): Ceres Seq. ID no. 3031115
MFKNYIARLKSIVGDKKAMEIIKNALVVISAGPNDFILNYYDIPSRRLEFPHISGYQDFVLQRLDNFVRELYSLGCRKIMVGGLPPMGCLPIQMTAKFRNALRFCLEQENRDSVLYNQKLQNLLPQIEASLTGSKILYSNVYDPMMDMMQNPSKYGFKETKRGCCGTGHLETSFMCNAFSPTCRNHSEFLFFDSIHPSEATYNYMGNFLDTQIRVWLSLRLKS

SEQ ID NO: 28652 - protein, 205 aa, Arabidopsis thaliana
  misc_feature (1)..(205): Ceres Seq. ID no. 3031116
MEIIKNALVVISAGPNDFILNYYDIPSRRLEFPHISGYQDFVLQRLDNFVRELYSLGCRKIMVGGLPPMGCLPIQMTAKFRNALRFCLEQENRDSVLYNQKLQNLLPQIEASLTGSKILYSNVYDPMMDMMQNPSKYGFKETKRGCCGTGHLETSFMCNAFSPTCRNHSEFLFFDSIHPSEATYNYMGNFLDTQIRVWLSLRLKS

SEQ ID NO: 28653 - DNA, 1929 bp, Arabidopsis thaliana
  misc_feature (1)..(1929): Ceres Seq. ID no. 3031144
atgtctatctttctccaagccactactacctctttcaattccttcaagttacaagtcgaacaagtccaaacccatctcacaaaatcaggtcttgatcggttcgtatacgtgaaaacatctcttcttaatctctacttgaagaagggttgcgtaacgagtgcacaaatgttgttcgatgaaatgcctgagagagatacagttgtttggaatgcattgatttgtgggtattcacgaaatggttatgagtgtgatgcgtggaagctttttatcgtaatgcttcagcaagggttttctccatctgctactacacttgtgaatttgttacctttttgtggacaatgtggttttgtatctcaagggagatctgttcatggtgttgctgcaaagtctggccttgagttggattctcaggtgaagaatgcgttgatttcgttttactcaaagtgtgcagagttgggttcagcagaagtcttgtttagagaaatgaaagataaaagcacagtttcttggaatacaatgattggtgcctatagccagagtggtttacaggaagaagccatcactgttttcaagaatatgtttgagaagaatgtggaaattagtccagtcactatcatcaatcttctttctgctcatgttagtcacgagccactacattgtcttgttgttaaatgtggaatggtgaatgatatatctgtggttacttctttggtctgtgcatattcaaggtgtgggtgtttggtttcagcagagcgtctttatgcgtctgctaaacaagatagtattgtcggcttaacttcgattgtttcatgctatgcggagaaaggagatatggatatagcagttgtgtatttttctaaaacgcgtcagttgtgtatgaaaattgatgctgtagctttagttggaattctccatggatgtaaaaagtcttcccatattgacataggaatgtcgttacatggttatgcgatcaaaagcggattgtgcacaaaaacactggttgtgaatggactgataactatgtactctaagtttgatgatgtagagactgtcctgtttttgtttgagcaactgcaggagactcctttaattagctggaactcagtgatatccgggtgtgtacagtctggaagggcaagtacagcttttgaggtgttccatcagatgatgttaactggtggacttttgccggatgccattacgatagccagtttgcttgctggctgttcccagctttgttgcttgaatttggggaaggagcttcatggctatactcttaggaacaattttgaaaatgagaactttgtttgcactgctctgatagatatgtatgccaaatgtggaaacgaagtacaagcggaaagtgtgttcaagagtataaaagctccgtgtacagcaacatggaactcaatgatatcaggatacagcttatcggggttacaacatcgagctctttcttgttacttggaaatgcgagagaaggggttgaaacctgacgagatcacctttttgggggttctgtctgcatgtaaccatggaggctttgtcgatgaaggaaaaatatgtttcagagcaatgatcaaagagtttggaatatctccaactttacagcattatgcacttatggttggcttgttgggaagagcatgtttatttactgaggcattgtatttaatttggaagatggatataaagccggattctgcagtatggggtgctctacttagcgcgtgcattattcacagagagttggaggttggggaatatgtagctaggaaaatgtttatgctggattacaagaatggagggctgtatgtattgatgtcaaacctatatgcaacagaagcaatgtgggacgacgtagttagagtcaggaatatgatgaaagataatggatacgatggttatttgggagttagccaaatataa

SEQ ID NO: 28654 - protein, 642 aa, Arabidopsis thaliana
  misc_feature (1)..(642): Ceres Seq. ID no. 3031145
MSIFLQATTTSFNSFKLQVEQVQTHLTKSGLDRFVYVKTSLLNLYLKKGCVTSAQMLFDEMPERDTVVWNALICGYSRNGYECDAWKLFIVMLQQGFSPSATTLVNLLPFCGQCGFVSQGRSVHGVAAKSGLELDSQVKNALISFYSKCAELGSAEVLFREMKDKSTVSWNTMIGAYSQSGLQEEAITVFKNMFEKNVEISPVTIINLLSAHVSHEPLHCLVVKCGMVNDISVVTSLVCAYSRCGCLVSAERLYASAKQDSIVGLTSIVSCYAEKGDMDIAVVYFSKTRQLCMKIDAVALVGILHGCKKSSHIDIGMSLHGYAIKSGLCTKTLVVNGLITMYSKFDDVETVLFLFEQLQETPLISWNSVISGCVQSGRASTAFEVFHQMMLTGGLLPDAITIASLLAGCSQLCCLNLGKELHGYTLRNNFENENFVCTALIDMYAKCGNEVQAESVFKSIKAPCTATWNSMISGYSLSGLQHRALSCYLEMREKGLKPDEITFLGVLSACNHGGFVDEGKICFRAMIKEFGISPTLQHYALMVGLLGRACLFTEALYLIWKMDIKPDSAVWGALLSACIIHRELEVGEYVARKMFMLDYKNGGLYVLMSNLYATEAMWDDVVRVRNMMKDNGYDGYLGVSQI

SEQ ID NO: 28655 - protein, 587 aa, Arabidopsis thaliana
  misc_feature (1)..(587): Ceres Seq. ID no. 3031146
MLFDEMPERDTVVWNALICGYSRNGYECDAWKLFIVMLQQGFSPSATTLVNLLPFCGQCGFVSQGRSVHGVAAKSGLELDSQVKNALISFYSKCAELGSAEVLFREMKDKSTVSWNTMIGAYSQSGLQEEAITVFKNMFEKNVEISPVTIINLLSAHVSHEPLHCLVVKCGMVNDISVVTSLVCAYSRCGCLVSAERLYASAKQDSIVGLTSIVSCYAEKGDMDIAVVYFSKTRQLCMKIDAVALVGILHGCKKSSHIDIGMSLHGYAIKSGLCTKTLVVNGLITMYSKFDDVETVLFLFEQLQETPLISWNSVISGCVQSGRASTAFEVFHQMMLTGGLLPDAITIASLLAGCSQLCCLNLGKELHGYTLRNNFENENFVCTALIDMYAKCGNEVQAESVFKSIKAPCTATWNSMISGYSLSGLQHRALSCYLEMREKGLKPDEITFLGVLSACNHGGFVDEGKICFRAMIKEFGISPTLQHYALMVGLLGRACLFTEALYLIWKMDIKPDSAVWGALLSACIIHRELEVGEYVARKMFMLDYKNGGLYVLMSNLYATEAMWDDVVRVRNMMKDNGYDGYLGVSQI

SEQ ID NO: 28656 - protein, 582 aa, Arabidopsis thaliana
  misc_feature (1)..(582): Ceres Seq. ID no. 3031147
MPERDTVVWNALICGYSRNGYECDAWKLFIVMLQQGFSPSATTLVNLLPFCGQCGFVSQGRSVHGVAAKSGLELDSQVKNALISFYSKCAELGSAEVLFREMKDKSTVSWNTMIGAYSQSGLQEEAITVFKNMFEKNVEISPVTIINLLSAHVSHEPLHCLVVKCGMVNDISVVTSLVCAYSRCGCLVSAERLYASAKQDSIVGLTSIVSCYAEKGDMDIAVVYFSKTRQLCMKIDAVALVGILHGCKKSSHIDIGMSLHGYAIKSGLCTKTLVVNGLITMYSKFDDVETVLFLFEQLQETPLISWNSVISGCVQSGRASTAFEVFHQMMLTGGLLPDAITIASLLAGCSQLCCLNLGKELHGYTLRNNFENENFVCTALIDMYAKCGNEVQAESVFKSIKAPCTATWNSMISGYSLSGLQHRALSCYLEMREKGLKPDEITFLGVLSACNHGGFVDEGKICFRAMIKEFGISPTLQHYALMVGLLGRACLFTEALYLIWKMDIKPDSAVWGALLSACIIHRELEVGEYVARKMFMLDYKNGGLYVLMSNLYATEAMWDDVVRVRNMMKDNGYDGYLGVSQI

SEQ ID NO: 28657 - DNA, 2568 bp, Arabidopsis thaliana
  misc_feature (1)..(2568): Ceres Seq. ID no. 3031600
atggcttctgattcttctctcggcaacaccaacgacggtcctccttctcccggagaaaacgtttcaagccctatcgaaaacacatactcttcccccgccgcacttcaccgtcgccggcgaggaagatcctctactcccacgcaattcgcaactcctccaccaccgccttcacgtctcgcatcatccaattccactcctccaacatctcgtccttccgccgccagatctaaaggaagaaatggacacggaggtggcggtggtggcggtggtggcggagacccagggacgccaatgtccactgacgagccactgccttcttccgatgacggtgaagaagacggaggcgacgatactactccgactttcgtttggggaactaacatcagtgtgcaagatgttaaatctgcgattgaaatgtttgttaagcatttcagagaagctagagagaatagtgatgatttgtttagagaagggaagtatatggtttcgataaggaaggtgattgagattgaaggagaatggattgatgttgatgcgtttgatgtgtttgattatgatcctgatttgtataacaagatggttcgttatcctttggaagttctcgctatcttcgatattgtgctgatggatattgtttccacgattaatcgtttgttcgagaaacatgttcaagttaggatttttaacctcaggacatctacttccatgagaaatctcaatccatctgatatcgagaagatgatctctttgaaaggtatgataattcggagtagctctatcattcctgaaataagggaagctgtgtttagatgccttgtttgtggttacttctctgaccccatcatcgttgatagagggaaaataagtgagcctcctacttgcttgaaacaagagtgcatgaccaagaactccatgacactagtgcacaaccgatgcaggtttgctgataagcagattgtgaggcttcaggaaacacctgatgagattccagaaggaggaacacctcacacagttagcttgttgctgcatgataagctagttgataatgggaagcctggtgatagaattgaggtcaccggaatttacagagcaatgactgtccgagtgggacctgctcacaggactgtgaaatctgtgtttaaggcatgtcatcttatttcttcctctacctatatcgattgccttcacataaagaaagcaagtaagttaagaatgtctgctgaggatcctatggatgttgacaatagtctgcgtagagttgatgaagatgtcgagttagatgaggagaagctgaggaagtttcaggaactctctaaacaaccagatatatatgagaggcttagtagatcactagcaccaaacatctgggagttggatgatgttaaaaagggtcttctatgccagctttttggagggaatgctttgaacttagcatctggtgctaattttcgtggtgacatcaacatcttacttgttggtgaccctggtacgagcaagtcccagctgctccagtacattcataagctttcaccccgtggcatttacacaagtgggcgagggagctcagctgttggtttaacagcttatgtagctaaagatcctgagacaggagaaactgttttggagagtggagctcttgttcttagtgaccgaggtatctgctgtattgatgaatttgacaaaatgtctgacagtgcgaggagcatgctacacgaggtgatggaacagcagactgtttcaatagcaaaggctggtattattgcatctctaaatgccagaacctctgtgttggcttgtgcaaatcctagtggctcacgttataatccccggctttctgttattgagaatattcaccttcctccaaccttgctatctagattcgatttgatctacttgattcttgacaagcccgatgagcagactgaccgaaggcttgcaaagcatattgtggcccttcactttgagaacgctgagagtgctcaggaggaagctatagatattactacactgacaacttatgttagctatgcccgcaagaacattcatcctaaactgtcagatgaagctgcagaggagttgacccgaggatatgttgagctgagaaaagcagggaagtttgctggcagtagcaaaaaggtcataacagcaactcctaggcagattgaaagtttgatcagacttagtgaggccttggctcggatgcgcttctccgaatgggttgaaaagcatgacgtggacgaggcatttcgacttctcagagttgcaatgcagcaatcagcaacggatcacgccacagggaccattgacatggacctgataaatactggagtgtcagcaagtgaacgaatgaggcgggatacctttgcgtcgtcaattagagacatagctctggagaagatgcaaattggaggatcatcaatgcgcttatccgagttacttgaagaactgaagaagcatggaggcaacataaacaccgaaattcatcttcatgatgttagaaaagcagtcgcgacgctagcgagtgaaggatttctggtagctgaaggtgatagaatcaagagagtataa

SEQ ID NO: 28658 - protein, 855 aa, Arabidopsis thaliana
  misc_feature (1)..(855): Ceres Seq. ID no. 3031601
MASDSSLGNTNDGPPSPGENVSSPIENTYSSPAALHRRRRGRSSTPTQFATPPPPPSRLASSNSTPPTSRPSAARSKGRNGHGGGGGGGGGGDPGTPMSTDEPLPSSDDGEEDGGDDTTPTFVWGTNISVQDVKSAIEMFVKHFREARENSDDLFREGKYMVSIRKVIEIEGEWIDVDAFDVFDYDPDLYNKMVRYPLEVLAIFDIVLMDIVSTINRLFEKHVQVRIFNLRTSTSMRNLNPSDIEKMISLKGMIIRSSSIIPEIREAVFRCLVCGYFSDPIIVDRGKISEPPTCLKQECMTKNSMTLVHNRCRFADKQIVRLQETPDEIPEGGTPHTVSLLLHDKLVDNGKPGDRIEVTGIYRAMTVRVGPAHRTVKSVFKACHLISSSTYIDCLHIKKASKLRMSAEDPMDVDNSLRRVDEDVELDEEKLRKFQELSKQPDIYERLSRSLAPNIWELDDVKKGLLCQLFGGNALNLASGANFRGDINILLVGDPGTSKSQLLQYIHKLSPRGIYTSGRGSSAVGLTAYVAKDPETGETVLESGALVLSDRGICCIDEFDKMSDSARSMLHEVMEQQTVSIAKAGIIASLNARTSVLACANPSGSRYNPRLSVIENIHLPPTLLSRFDLIYLILDKPDEQTDRRLAKHIVALHFENAESAQEEAIDITTLTTYVSYARKNIHPKLSDEAAEELTRGYVELRKAGKFAGSSKKVITATPRQIESLIRLSEALARMRFSEWVEKHDVDEAFRLLRVAMQQSATDHATGTIDMDLINTGVSASERMRRDTFASSIRDIALEKMQIGGSSMRLSELLEELKKHGGNINTEIHLHDVRKAVATLASEGFLVAEGDRIKRV

SEQ ID NO: 28659 - protein, 758 aa, Arabidopsis thaliana
  misc_feature (1)..(758): Ceres Seq. ID no. 3031602
MSTDEPLPSSDDGEEDGGDDTTPTFVWGTNISVQDVKSAIEMFVKHFREARENSDDLFREGKYMVSIRKVIEIEGEWIDVDAFDVFDYDPDLYNKMVRYPLEVLAIFDIVLMDIVSTINRLFEKHVQVRIFNLRTSTSMRNLNPSDIEKMISLKGMIIRSSSIIPEIREAVFRCLVCGYFSDPIIVDRGKISEPPTCLKQECMTKNSMTLVHNRCRFADKQIVRLQETPDEIPEGGTPHTVSLLLHDKLVDNGKPGDRIEVTGIYRAMTVRVGPAHRTVKSVFKACHLISSSTYIDCLHIKKASKLRMSAEDPMDVDNSLRRVDEDVELDEEKLRKFQELSKQPDIYERLSRSLAPNIWELDDVKKGLLCQLFGGNALNLASGANFRGDINILLVGDPGTSKSQLLQYIHKLSPRGIYTSGRGSSAVGLTAYVAKDPETGETVLESGALVLSDRGICCIDEFDKMSDSARSMLHEVMEQQTVSIAKAGIIASLNARTSVLACANPSGSRYNPRLSVIENIHLPPTLLSRFDLIYLILDKPDEQTDRRLAKHIVALHFENAESAQEEAIDITTLTTYVSYARKNIHPKLSDEAAEELTRGYVELRKAGKFAGSSKKVITATPRQIESLIRLSEALARMRFSEWVEKHDVDEAFRLLRVAMQQSATDHATGTIDMDLINTGVSASERMRRDTFASSIRDIALEKMQIGGSSMRLSELLEELKKHGGNINTEIHLHDVRKAVATLASEGFLVAEGDRIKRV

SEQ ID NO: 28660 - protein, 717 aa, Arabidopsis thaliana
  misc_feature (1)..(717): Ceres Seq. ID no. 3031603
MFVKHFREARENSDDLFREGKYMVSIRKVIEIEGEWIDVDAFDVFDYDPDLYNKMVRYPLEVLAIFDIVLMDIVSTINRLFEKHVQVRIFNLRTSTSMRNLNPSDIEKMISLKGMIIRSSSIIPEIREAVFRCLVCGYFSDPIIVDRGKISEPPTCLKQECMTKNSMTLVHNRCRFADKQIVRLQETPDEIPEGGTPHTVSLLLHDKLVDNGKPGDRIEVTGIYRAMTVRVGPAHRTVKSVFKACHLISSSTYIDCLHIKKASKLRMSAEDPMDVDNSLRRVDEDVELDEEKLRKFQELSKQPDIYERLSRSLAPNIWELDDVKKGLLCQLFGGNALNLASGANFRGDINILLVGDPGTSKSQLLQYIHKLSPRGIYTSGRGSSAVGLTAYVAKDPETGETVLESGALVLSDRGICCIDEFDKMSDSARSMLHEVMEQQTVSIAKAGIIASLNARTSVLACANPSGSRYNPRLSVIENIHLPPTLLSRFDLIYLILDKPDEQTDRRLAKHIVALHFENAESAQEEAIDITTLTTYVSYARKNIHPKLSDEAAEELTRGYVELRKAGKFAGSSKKVITATPRQIESLIRLSEALARMRFSEWVEKHDVDEAFRLLRVAMQQSATDHATGTIDMDLINTGVSASERMRRDTFASSIRDIALEKMQIGGSSMRLSELLEELKKHGGNINTEIHLHDVRKAVATLASEGFLVAEGDRIKRV

SEQ ID NO: 28661 - DNA, 1077 bp, Arabidopsis thaliana
  misc_feature (1)..(1077): Ceres Seq. ID no. 3031896
atgggattccgtgggaagtacttcttcccaattctcatgactctatcgttatttctaataatcagatacaactacatagtctccgatgatcctcctctccggcaagaactccccggtcgccgatcagcttcttccggagatgacatcacatataccgtcaagactccgtcaaagaagacaaagagactgtttcacacggcggtgacagccacggattccgtgtacagcacgtggcagtgtcgggtcatgtattattggtacaacaggttcagggacgaacccgggtcggatatgggcgggtatacccggatcttgcattcgggtcgacccgatggactcatggatgagatccctactttcgttgctgaccctcttccctccggtgttgacaagggatatgttgttctaaataggccttgggcctttgttcaatggcttcaacaagcacatatagaggaagattacattctcatggcggaacctgatcatatcatagttaaaccgataccaaacctagctagaggcaatctcgcggctgcgtttccctttttctacattgaaccaaagaaatatgaatcggttctccgcaaattcttccccaaagagaatggaccaatatcaagaatcgatcccatcgggaattctccagtgatcgtcactaagaatgcattaatgaaaattgctccaacatggatgaatgtttctttggctatgaagaatgacccacaaacagataaagcttttggttgggtccttgaaatgtatgcatatgctgtttcttctgcgttacacggcgtgagcaacattctacacaaggacttcatgattcagcctccttgggacactgaaacaaagaagacgttcataatacattacacttacggctgtgatttcgacatgaaggggaagatgatggtagggaagattggagaatggagattcgataaacggtcttacggggataaaccacccccaagaaatctcacactgcctccccgaggtgttcccgagagcgtggtgacattggtgacaatgataaacgaagctactgctaatattcccaactgggaatcttga

SEQ ID NO: 28662 - protein, 358 aa, Arabidopsis thaliana
  misc_feature (1)..(358): Ceres Seq. ID no. 3031897
MGFRGKYFFPILMTLSLFLIIRYNYIVSDDPPLRQELPGRRSASSGDDITYTVKTPSKKTKRLFHTAVTATDSVYSTWQCRVMYYWYNRFRDEPGSDMGGYTRILHSGRPDGLMDEIPTFVADPLPSGVDKGYVVLNRPWAFVQWLQQAHIEEDYILMAEPDHIIVKPIPNLARGNLAAAFPFFYIEPKKYESVLRKFFPKENGPISRIDPIGNSPVIVTKNALMKIAPTWMNVSLAMKNDPQTDKAFGWVLEMYAYAVSSALHGVSNILHKDFMIQPPWDTETKKTFIIHYTYGCDFDMKGKMMVGKIGEWRFDKRSYGDKPPPRNLTLPPRGVPESVVTLVTMINEATANIPNWES

SEQ ID NO: 28663 - protein, 346 aa, Arabidopsis thaliana
  misc_feature (1)..(346): Ceres Seq. ID no. 3031898
MTLSLFLIIRYNYIVSDDPPLRQELPGRRSASSGDDITYTVKTPSKKTKRLFHTAVTATDSVYSTWQCRVMYYWYNRFRDEPGSDMGGYTRILHSGRPDGLMDEIPTFVADPLPSGVDKGYVVLNRPWAFVQWLQQAHIEEDYILMAEPDHIIVKPIPNLARGNLAAAFPFFYIEPKKYESVLRKFFPKENGPISRIDPIGNSPVIVTKNALMKIAPTWMNVSLAMKNDPQTDKAFGWVLEMYAYAVSSALHGVSNILHKDFMIQPPWDTETKKTFIIHYTYGCDFDMKGKMMVGKIGEWRFDKRSYGDKPPPRNLTLPPRGVPESVVTLVTMINEATANIPNWES

SEQ ID NO: 28664 - protein, 276 aa, Arabidopsis thaliana
  misc_feature (1)..(276): Ceres Seq. ID no. 3031899
MYYWYNRFRDEPGSDMGGYTRILHSGRPDGLMDEIPTFVADPLPSGVDKGYVVLNRPWAFVQWLQQAHIEEDYILMAEPDHIIVKPIPNLARGNLAAAFPFFYIEPKKYESVLRKFFPKENGPISRIDPIGNSPVIVTKNALMKIAPTWMNVSLAMKNDPQTDKAFGWVLEMYAYAVSSALHGVSNILHKDFMIQPPWDTETKKTFIIHYTYGCDFDMKGKMMVGKIGEWRFDKRSYGDKPPPRNLTLPPRGVPESVVTLVTMINEATANIPNWES

SEQ ID NO: 28665 - DNA, 1689 bp, Arabidopsis thaliana
  misc_feature (1)..(1689): Ceres Seq. ID no. 3031983
atggattctgaagaagacatgctcgatgcgcacgatatggagtctggagaggatgatttctacagcggtggaactgatgattgtaatgatagtgatgatggtgaacctgattatgggtttgttgaggaagatgctgatgattctgctatgatcgcctctcatcgctctcagaaaaacttttgtgttctgagggaagaagatattcgcaggcatcagatggataatattgaacgagtttccgttgttctctcgataactgaggttgaagcgagtattctacttcgtcactttcactggagtgtcggtagagttcatgatgagtggtttgctgatgaagagagagttcggaagactgttggcatattggagagtcatgttgttccaccatctgatgacagtgaacttacatgtggaatctgtttcgattcctaccctcctgagaaaatcgcttcagtttcttgtggccatcctttctgcactacatgctggacaggttatatcagcacaaccattaatgatggcccgggatgtttgatgctaagatgtcctgacccatcttgtcttgctgctgttggtcatgatatggttgacaaattagcgtctgaagacgaaaaggagaagtacaacagatattttcttaggtcttatattgaagacaacagaaagatgaagtggtgtcctgccccgggatgtgattttgcgattgattttgttgcagggtctggaaattatgatgtttcctgcttgtgctcgtttagcttttgctggaattgcactgaggaggctcaccgacctgtggattgtagcacagtttcaaaatggatattaaagaacagcgctgaatctgaaaatatgaattggatacttgccaattcaaagccttgtccgagatgtaagaggccaattgaaaagaatcagggctgtatgcacatgacatgtacaccgccttgtaaatatgaattttgttggctatgtcttggtgcatggatggatcacggggaaagaactggtggtttttatgcttgtaaccgttatgaggtggccaagcaagaaggacagtatgatgagacagagaggaggagagagatggccaaaaattcgctagagagatacacacactattatgaacgctgggcaagcaatcaaacgtcgaggcaaaaggctatggctgatctgcagcaagcgcagatgcagaatcttgagaagcttagtgataaacagtgcacaccagagtctcagctcaaattcattttagaagcttggcttcagatcatcgaatgtaggcgagtcttgaaatggacttatgcatatggatactacctacctgagcatgaacatgccaaacgacaatttttcgagtatttgcaaggtgaagctgagtcaggtttagagaggctccatcaatgcgtagagaaagacttggttcagtttctcattgcggaaggtccatcaaaagatttcaatgatttccggacaaaactagctggtttgaccagcgtgacgaaaaactactttgagaatttggtgaaagctctggagaacggtcttgctgatgtagactcacatgcggcttgcagcagcaaatcaacaagctctaaatcaacaggttgcagtagcaaaacaagaggtaaaggcaaaggaagttccagaactggtggatccagcagaaacccagatgacaacttataa

SEQ ID NO: 28666 - protein, 562 aa, Arabidopsis thaliana
  misc_feature (1)..(562): Ceres Seq. ID no. 3031984
MDSEEDMLDAHDMESGEDDFYSGGTDDCNDSDDGEPDYGFVEEDADDSAMIASHRSQKNFCVLREEDIRRHQMDNIERVSVVLSITEVEASILLRHFHWSVGRVHDEWFADEERVRKTVGILESHVVPPSDDSELTCGICFDSYPPEKIASVSCGHPFCTTCWTGYISTTINDGPGCLMLRCPDPSCLAAVGHDMVDKLASEDEKEKYNRYFLRSYIEDNRKMKWCPAPGCDFAIDFVAGSGNYDVSCLCSFSFCWNCTEEAHRPVDCSTVSKWILKNSAESENMNWILANSKPCPRCKRPIEKNQGCMHMTCTPPCKYEFCWLCLGAWMDHGERTGGFYACNRYEVAKQEGQYDETERRREMAKNSLERYTHYYERWASNQTSRQKAMADLQQAQMQNLEKLSDKQCTPESQLKFILEAWLQIIECRRVLKWTYAYGYYLPEHEHAKRQFFEYLQGEAESGLERLHQCVEKDLVQFLIAEGPSKDFNDFRTKLAGLTSVTKNYFENLVKALENGLADVDSHAACSSKSTSSKSTGCSSKTRGKGKGSSRTGGSSRNPDDNL

SEQ ID NO: 28667 - protein, 556 aa, Arabidopsis thaliana
  misc_feature (1)..(556): Ceres Seq. ID no. 3031985
MLDAHDMESGEDDFYSGGTDDCNDSDDGEPDYGFVEEDADDSAMIASHRSQKNFCVLREEDIRRHQMDNIERVSVVLSITEVEASILLRHFHWSVGRVHDEWFADEERVRKTVGILESHVVPPSDDSELTCGICFDSYPPEKIASVSCGHPFCTTCWTGYISTTINDGPGCLMLRCPDPSCLAAVGHDMVDKLASEDEKEKYNRYFLRSYIEDNRKMKWCPAPGCDFAIDFVAGSGNYDVSCLCSFSFCWNCTEEAHRPVDCSTVSKWILKNSAESENMNWILANSKPCPRCKRPIEKNQGCMHMTCTPPCKYEFCWLCLGAWMDHGERTGGFYACNRYEVAKQEGQYDETERRREMAKNSLERYTHYYERWASNQTSRQKAMADLQQAQMQNLEKLSDKQCTPESQLKFILEAWLQIIECRRVLKWTYAYGYYLPEHEHAKRQFFEYLQGEAESGLERLHQCVEKDLVQFLIAEGPSKDFNDFRTKLAGLTSVTKNYFENLVKALENGLADVDSHAACSSKSTSSKSTGCSSKTRGKGKGSSRTGGSSRNPDDNL

SEQ ID NO: 28668 - protein, 550 aa, Arabidopsis thaliana
  misc_feature (1)..(550): Ceres Seq. ID no. 3031986
MESGEDDFYSGGTDDCNDSDDGEPDYGFVEEDADDSAMIASHRSQKNFCVLREEDIRRHQMDNIERVSVVLSITEVEASILLRHFHWSVGRVHDEWFADEERVRKTVGILESHVVPPSDDSELTCGICFDSYPPEKIASVSCGHPFCTTCWTGYISTTINDGPGCLMLRCPDPSCLAAVGHDMVDKLASEDEKEKYNRYFLRSYIEDNRKMKWCPAPGCDFAIDFVAGSGNYDVSCLCSFSFCWNCTEEAHRPVDCSTVSKWILKNSAESENMNWILANSKPCPRCKRPIEKNQGCMHMTCTPPCKYEFCWLCLGAWMDHGERTGGFYACNRYEVAKQEGQYDETERRREMAKNSLERYTHYYERWASNQTSRQKAMADLQQAQMQNLEKLSDKQCTPESQLKFILEAWLQIIECRRVLKWTYAYGYYLPEHEHAKRQFFEYLQGEAESGLERLHQCVEKDLVQFLIAEGPSKDFNDFRTKLAGLTSVTKNYFENLVKALENGLADVDSHAACSSKSTSSKSTGCSSKTRGKGKGSSRTGGSSRNPDDNL

SEQ ID NO: 28669 - DNA, 558 bp, Arabidopsis thaliana
  misc_feature (1)..(558): Ceres Seq. ID no. 3032488
atgctacaaccttcagtgtcgtggttcatacaaacaagtaacaccattattcttggaggcaccattactcctgtctctacattcgagggtaaacaatttgagatcactgtatcagtatggaaagatcaagagtccgaaaactggtggctgagtttgggatccaaccattcattggttggatattggccaggtacaattttcccaaatttagcttatgcagacgacgtgcaatggggtggtgaggtcgtgaattcacaaagtcttggccgacacacaacaacacaaatgggatctggtcgcttctccgacggaggcttcagaaaagttagctactttcacaatttggagattgtcgataacaacagattcaagtccgttcgtgatgtaggagtactagtagacgaccctaagttctacaacatcagagcgatgtttagagatgattggggtagttacattttgtatggagggccagaccatatgcattcaggagtctcttttctagcattgagttcgcttattttttactttagtttcatcattttcattattatttag

SEQ ID NO: 28670 - protein, 185 aa, Arabidopsis thaliana
  misc_feature (1)..(185): Ceres Seq. ID no. 3032489
MLQPSVSWFIQTSNTIILGGTITPVSTFEGKQFEITVSVWKDQESENWWLSLGSNHSLVGYWPGTIFPNLAYADDVQWGGEVVNSQSLGRHTTTQMGSGRFSDGGFRKVSYFHNLEIVDNNRFKSVRDVGVLVDDPKFYNIRAMFRDDWGSYILYGGPDHMHSGVSFLALSSLIFYFSFIIFIII

SEQ ID NO: 28671 - DNA, 1050 bp, Arabidopsis thaliana
  misc_feature (1)..(1050): Ceres Seq. ID no. 3032595
atggttagattcatcgaagaaaatattactaaaatgttggagacaaaggccatctcaaactcggaggttttatatgtcggaggagacgacggagacacgtcaccaacgacgaaagttcttcatgattttcagatcaacagcggaggaggactgataagatcatgggttgattctatgagagcttgttctcctactcgccctaaatccttcaatagccaatcttgttggattaaggaacatccatctgctttgaacatgttcgaagaaatacttcataaatctgaaggaaaacaaatagttatgtttcttgattatgatggtactctctctcccattgttgatgatcctgatcgagctttcatgtccaagaagatgcgaaatactgtgaggaaacttgcaaagtgttttccaacagccatagttagtgggagatgcagagagaaggtttctagttttgtgaaattaactgagttatactacgctggaagtcatggcatggacatcaaaggaccagagcaaggatctaaatacaagaaagaaaatcagtctcttctttgtcaacccgcaactgaattcctcccggtgataaacgaggtttataaaaaactagtcgagaacactcaatcgattccaggagcgaaagttgagaacaacaaattttgtgcgtctgttcactttcgatgcgtagaagaaaataaatggagtgacttggcccatcaagttcgatcagtcttgaagaattaccccaagctcatgcttacccaaggaagaaaagtattggagattcgtccaatcattaagtgggataaaggcaaagcactcgagtttttgttagaatcactaggatatgataattgtaccgatgtttttcctatatatattggagatgatcgtaccgacgaagacgcctttaagatactgagagacaaaaaacaaggtcttggaattcttgtgtccaaatacgcaaaggagactaatgcttcttattctttgcaagagccagatgagatttcttataaaaaaaagtctcttattttctacgttttatag

SEQ ID NO: 28672 - protein, 349 aa, Arabidopsis thaliana
  misc_feature (1)..(349): Ceres Seq. ID no. 3032596
MVRFIEENITKMLETKAISNSEVLYVGGDDGDTSPTTKVLHDFQINSGGGLIRSWVDSMRACSPTRPKSFNSQSCWIKEHPSALNMFEEILHKSEGKQIVMFLDYDGTLSPIVDDPDRAFMSKKMRNTVRKLAKCFPTAIVSGRCREKVSSFVKLTELYYAGSHGMDIKGPEQGSKYKKENQSLLCQPATEFLPVINEVYKKLVENTQSIPGAKVENNKFCASVHFRCVEENKWSDLAHQVRSVLKNYPKLMLTQGRKVLEIRPIIKWDKGKALEFLLESLGYDNCTDVFPIYIGDDRTDEDAFKILRDKKQGLGILVSKYAKETNASYSLQEPDEISYKKKSLIFYVL

SEQ ID NO: 28673 - protein, 338 aa, Arabidopsis thaliana
  misc_feature (1)..(338): Ceres Seq. ID no. 3032597
MLETKAISNSEVLYVGGDDGDTSPTTKVLHDFQINSGGGLIRSWVDSMRACSPTRPKSFNSQSCWIKEHPSALNMFEEILHKSEGKQIVMFLDYDGTLSPIVDDPDRAFMSKKMRNTVRKLAKCFPTAIVSGRCREKVSSFVKLTELYYAGSHGMDIKGPEQGSKYKKENQSLLCQPATEFLPVINEVYKKLVENTQSIPGAKVENNKFCASVHFRCVEENKWSDLAHQVRSVLKNYPKLMLTQGRKVLEIRPIIKWDKGKALEFLLESLGYDNCTDVFPIYIGDDRTDEDAFKILRDKKQGLGILVSKYAKETNASYSLQEPDEISYKKKSLIFYVL

SEQ ID NO: 28674 - protein, 291 aa, Arabidopsis thaliana
  misc_feature (1)..(291): Ceres Seq. ID no. 3032598
MRACSPTRPKSFNSQSCWIKEHPSALNMFEEILHKSEGKQIVMFLDYDGTLSPIVDDPDRAFMSKKMRNTVRKLAKCFPTAIVSGRCREKVSSFVKLTELYYAGSHGMDIKGPEQGSKYKKENQSLLCQPATEFLPVINEVYKKLVENTQSIPGAKVENNKFCASVHFRCVEENKWSDLAHQVRSVLKNYPKLMLTQGRKVLEIRPIIKWDKGKALEFLLESLGYDNCTDVFPIYIGDDRTDEDAFKILRDKKQGLGILVSKYAKETNASYSLQEPDEISYKKKSLIFYVL

SEQ ID NO: 28675 - DNA, 1356 bp, Arabidopsis thaliana
  misc_feature (1)..(1356): Ceres Seq. ID no. 3034710
atgggtggagaagagagatcaggagatggagaaaaaagaggggaagaagtagttgatgctggttctctcttcgtccttaaatccaaagggacatggtggcactgcggattccacttgacgacgtctatagtggcgcctgcgctactgagtctaccgtacgccttcaagttcttaggatgggctgccgggatatcttgtctggtcggaggagcagccgttactttctactcgtacactcttctttctcttactctcgaacaccacgcttctctcggcaaccgttacctccgcttccgtgacatggctcatcacatcctcagtccgaaatggggaaggtactacgttggaccaatacaaatggcggtgtgctatggtgtggttattgccaatgcgctcttgggagggcaatgcctaaaggcaatgtacttggtagtgcagccaaatggggaaatgaaactctttgagtttgtgattatttttggatgcttacttttggttttggcacaattcccatcctttcactctctacgatacatcaactcactgtctctcctcctctgcctcctctacagtgcttctgccgctgctgcatccatctacattggaaaagaaccaaatgcaccagagaaggactatactatagttggtgatccagaaactagagtgtttggaatctttaatgctatggctattattgctactacatacggcaatggcattatacctgaaattcaggcaacaatatcggcaccagtgaaaggaaaaatgatgaaagggttgtgtatgtgttaccttgtagtaataatgacatttttcacagtagccatcacaggatattgggcattcggtaaaaaagccaatggacttatcttcaccaatttcttaaatgccgagacaaaccattactttgtccctacttggtttatttttctcgtcaatctcttcactgtccttcaactttcggccgttgctgtggtatacctacaacctataaacgatattttggaaagtgtgatcagcgatccaacaaagaaagaattctctatccgcaatgtcatccctcgactagttgtgcgttccctcttcgtcgtgatggctacaatcgttgcggcaatgcttccattttttggagatgtaaactccttgttaggcgctttcggttttatacctctagacttcgttcttcctgtagttttcttcaactttactttcaagccgtctaaaaaaagtttcattttttggatcaacactgtgatcgccgtggttttttcgtgtttaggggtgattgctatggtagcggcggttagacagattataatagatgccaatacgtataagttgtttgcggatgtataa

SEQ ID NO: 28676 - protein, 451 aa, Arabidopsis thaliana
  misc_feature (1)..(451): Ceres Seq. ID no. 3034711
MGGEERSGDGEKRGEEVVDAGSLFVLKSKGTWWHCGFHLTTSIVAPALLSLPYAFKFLGWAAGISCLVGGAAVTFYSYTLLSLTLEHHASLGNRYLRFRDMAHHILSPKWGRYYVGPIQMAVCYGVVIANALLGGQCLKAMYLVVQPNGEMKLFEFVIIFGCLLLVLAQFPSFHSLRYINSLSLLLCLLYSASAAAASIYIGKEPNAPEKDYTIVGDPETRVFGIFNAMAIIATTYGNGIIPEIQATISAPVKGKMMKGLCMCYLVVIMTFFTVAITGYWAFGKKANGLIFTNFLNAETNHYFVPTWFIFLVNLFTVLQLSAVAVVYLQPINDILESVISDPTKKEFSIRNVIPRLVVRSLFVVMATIVAAMLPFFGDVNSLLGAFGFIPLDFVLPVVFFNFTFKPSKKSFIFWINTVIAVVFSCLGVIAMVAAVRQIIIDANTYKLFADV

SEQ ID NO: 28677 - protein, 351 aa, Arabidopsis thaliana
  misc_feature (1)..(351): Ceres Seq. ID no. 3034712
MAHHILSPKWGRYYVGPIQMAVCYGVVIANALLGGQCLKAMYLVVQPNGEMKLFEFVIIFGCLLLVLAQFPSFHSLRYINSLSLLLCLLYSASAAAASIYIGKEPNAPEKDYTIVGDPETRVFGIFNAMAIIATTYGNGIIPEIQATISAPVKGKMMKGLCMCYLVVIMTFFTVAITGYWAFGKKANGLIFTNFLNAETNHYFVPTWFIFLVNLFTVLQLSAVAVVYLQPINDILESVISDPTKKEFSIRNVIPRLVVRSLFVVMATIVAAMLPFFGDVNSLLGAFGFIPLDFVLPVVFFNFTFKPSKKSFIFWINTVIAVVFSCLGVIAMVAAVRQIIIDANTYKLFADV

SEQ ID NO: 28678 - protein, 332 aa, Arabidopsis thaliana
  misc_feature (1)..(332): Ceres Seq. ID no. 3034713
MAVCYGVVIANALLGGQCLKAMYLVVQPNGEMKLFEFVIIFGCLLLVLAQFPSFHSLRYINSLSLLLCLLYSASAAAASIYIGKEPNAPEKDYTIVGDPETRVFGIFNAMAIIATTYGNGIIPEIQATISAPVKGKMMKGLCMCYLVVIMTFFTVAITGYWAFGKKANGLIFTNFLNAETNHYFVPTWFIFLVNLFTVLQLSAVAVVYLQPINDILESVISDPTKKEFSIRNVIPRLVVRSLFVVMATIVAAMLPFFGDVNSLLGAFGFIPLDFVLPVVFFNFTFKPSKKSFIFWINTVIAVVFSCLGVIAMVAAVRQIIIDANTYKLFADV

SEQ ID NO: 28679 - DNA, 1770 bp, Arabidopsis thaliana
  misc_feature (1)..(1770): Ceres Seq. ID no. 3034891
atggggaagagcgaaaagacgtcgttggggcgatcactcgtgaagcaccacaaccatatgatacaagaatccaaagacaaaggcaagtactacaagaatctacagaagaaagttctcgaatctgtgactgaggtcagtgacatcgacgccatcattgagcaagctgaggaggcagagcgtctttacaccattaatcacagctcctccacacctttgtctatcaatctagacacaaattctagctcaagtgttatagcagctgaagaatggagagagcaacagaagatagaggaggctttacacgccagtagtcttcaagtacctcgaagacctccgtggacacctgaaatgtcagtggaagaacttgatgctaatgaaaaacaagcttttctaaattggcgccggatgcttgtgagccttgaggaaaatgaaaagctagtgttgactccattcgaaaagaaccttgacatctggagacagctttggagagtgcttgaacgcagtgatttgattgttatggtagttgatgctagagatccactgttttaccgctgccctgatcttgaggcatatgctcaagaaattgatgagcataaaaaaataatgcttctagtgaacaaggcggatcttttacctactgatgtcagggagaaatgggcagaatatttccgccttaacaacattctgtttgttttctggtcagccatagctgctacagctaccctagaaggtaaagtcttgaaagagcaatggagacaacccgataacttgcagaagacagatgatccagacattatgatatatggcagagacgagctgttgagtcgtttgcaatttgaggctcaagagattgtcaaagtaaggaattctagagcagcatccgtatcatcacagtcatggactggtgaatatcaacgtgatcaagccgtggttggatttgttgggtacccaaatgttggaaagagttctacaatcaatgcattggtgggtcagaagcgaacaggtgtcacctctaccccaggaaaaacaaagcatttccagactttgatcatctctgatgagcttatgctatgcgattgccctggtttagtcttcccttcgttctcaagctcaagatatgaaatgattgcttctggtgtacttccgattgaccggatgacggagcaccgtgaagctattcaggtggtggctgacaaggtccctcgccgtgtaattgagagtgtgtacaacatttctcttcctaaacccaaaacctatgagcgtcagtcccgcccgcctcatgctgcagagctcttaaaaagttactgtgcttctcgtggctatgttgcctcgagtggactaccggatgaaacgaaagctgcaaggctgattctgaaagattacattggaggtaagctgccacattatgcaatgccacctggaatgccccaagctgatgaaccggacatagaagacactcaagaactggaggatattctcgaaggttcagagtccgatgactctgcagtaggagatgagacagaaaacgagcaagttcctggtattgatgatgtgctagatgatctgagctcgtttgatcttgccaatgggcttaagtcttcaaagaaagtgacagcaaagaagcaaaccgcgtcacataaacagcacaaaaagccacagaggaaaaaggatcggacttggagggttcaaaacacagaagatggagatggaatgccttctgttaaagttttccagaaaccagctaacacaggtcctcttacgatgcggtga

SEQ ID NO: 28680 - protein, 589 aa, Arabidopsis thaliana
  misc_feature (1)..(589): Ceres Seq. ID no. 3034892
MGKSEKTSLGRSLVKHHNHMIQESKDKGKYYKNLQKKVLESVTEVSDIDAIIEQAEEAERLYTINHSSSTPLSINLDTNSSSSVIAAEEWREQQKIEEALHASSLQVPRRPPWTPEMSVEELDANEKQAFLNWRRMLVSLEENEKLVLTPFEKNLDIWRQLWRVLERSDLIVMVVDARDPLFYRCPDLEAYAQEIDEHKKIMLLVNKADLLPTDVREKWAEYFRLNNILFVFWSAIAATATLEGKVLKEQWRQPDNLQKTDDPDIMIYGRDELLSRLQFEAQEIVKVRNSRAASVSSQSWTGEYQRDQAVVGFVGYPNVGKSSTINALVGQKRTGVTSTPGKTKHFQTLIISDELMLCDCPGLVFPSFSSSRYEMIASGVLPIDRMTEHREAIQVVADKVPRRVIESVYNISLPKPKTYERQSRPPHAAELLKSYCASRGYVASSGLPDETKAARLILKDYIGGKLPHYAMPPGMPQADEPDIEDTQELEDILEGSESDDSAVGDETENEQVPGIDDVLDDLSSFDLANGLKSSKKVTAKKQTASHKQHKKPQRKKDRTWRVQNTEDGDGMPSVKVFQKPANTGPLTMR

SEQ ID NO: 28681 - protein, 570 aa, Arabidopsis thaliana
  misc_feature (1)..(570): Ceres Seq. ID no. 3034893
MIQESKDKGKYYKNLQKKVLESVTEVSDIDAIIEQAEEAERLYTINHSSSTPLSINLDTNSSSSVIAAEEWREQQKIEEALHASSLQVPRRPPWTPEMSVEELDANEKQAFLNWRRMLVSLEENEKLVLTPFEKNLDIWRQLWRVLERSDLIVMVVDARDPLFYRCPDLEAYAQEIDEHKKIMLLVNKADLLPTDVREKWAEYFRLNNILFVFWSAIAATATLEGKVLKEQWRQPDNLQKTDDPDIMIYGRDELLSRLQFEAQEIVKVRNSRAASVSSQSWTGEYQRDQAVVGFVGYPNVGKSSTINALVGQKRTGVTSTPGKTKHFQTLIISDELMLCDCPGLVFPSFSSSRYEMIASGVLPIDRMTEHREAIQVVADKVPRRVIESVYNISLPKPKTYERQSRPPHAAELLKSYCASRGYVASSGLPDETKAARLILKDYIGGKLPHYAMPPGMPQADEPDIEDTQELEDILEGSESDDSAVGDETENEQVPGIDDVLDDLSSFDLANGLKSSKKVTAKKQTASHKQHKKPQRKKDRTWRVQNTEDGDGMPSVKVFQKPANTGPLTMR

SEQ ID NO: 28682 - protein, 473 aa, Arabidopsis thaliana
  misc_feature (1)..(473): Ceres Seq. ID no. 3034894
MSVEELDANEKQAFLNWRRMLVSLEENEKLVLTPFEKNLDIWRQLWRVLERSDLIVMVVDARDPLFYRCPDLEAYAQEIDEHKKIMLLVNKADLLPTDVREKWAEYFRLNNILFVFWSAIAATATLEGKVLKEQWRQPDNLQKTDDPDIMIYGRDELLSRLQFEAQEIVKVRNSRAASVSSQSWTGEYQRDQAVVGFVGYPNVGKSSTINALVGQKRTGVTSTPGKTKHFQTLIISDELMLCDCPGLVFPSFSSSRYEMIASGVLPIDRMTEHREAIQVVADKVPRRVIESVYNISLPKPKTYERQSRPPHAAELLKSYCASRGYVASSGLPDETKAARLILKDYIGGKLPHYAMPPGMPQADEPDIEDTQELEDILEGSESDDSAVGDETENEQVPGIDDVLDDLSSFDLANGLKSSKKVTAKKQTASHKQHKKPQRKKDRTWRVQNTEDGDGMPSVKVFQKPANTGPLTMR

SEQ ID NO: 28683 - DNA, 2589 bp, Arabidopsis thaliana
  misc_feature (1)..(2589): Ceres Seq. ID no. 3036346
atgggagcgattgctggagaagagctgaagaaaatggagaagacacaggtgcatgttgcccgggaagagaagatattggttctggtgagactgagacctctgaacgagaaagagatcttggctaatgaagctgcggactgggaatgcatcaacgacaccaccgtattgtacagaaacacgttgcgtgagggctcaacttttccttctgcatactcatttgatagagtgtaccgaggtgaatgcccaaccagacaagtttacgaagatggccccaaggaagttgctctctcggtggtcaaaggaattaactctagtattttcgcgtatggtcagacgagcagtggaaagacatacaccatgtctggtataactgagtttgctgtggctgacatatttgattatatatttaagcatgaagatagggcatttgttgtgaaattttcggctatagagatctacaatgaggccatccgcgatcttctcagcccagatagtacaccactgaggctacgagatgaccctgagaaaggggccgccgttgaaaaagccacagaggaaacgctgagagattggaaccatttgaaggaacttatctcagtttgtgaagcacagcggaagattggtgaaacttcactaaatgagagaagttcaagatctcatcaaattatcaaactaacagttgaaagctctgctcgtgagttcttaggcaaggaaaactcaaccactctcatggcgagtgtgaattttattgatttggcggggagcgagcgtgcatcgcaggccttatcagctggtgcaagacttaaggagggttgtcatatcaatcgaagcttgctgactctaggaacagtgatacgcaaactcagcaacggaagacaaggacacatcaactatagagactccaaactcacacgcattcttcagccgtgcttggggggcaatgccagaaccgccatagtctgcacgctgagtccagcgaggagtcatgtggagcagactagaaacactctcttgtttgcttgctgtgccaaggaagtcaccacgaaagcacagatcaatgttgttatgtcagacaaggctttggtgaagcaactacagcgtgagctagccaggctcgagagcgagctgagaaacccagcacctgcaacctcaagctgcgattgtggggtgacactgagaaagaaagatcttcagatacaaaagatggagaagcagcttgcagaaatgacaaaacagcgggatattgctcaatctcggcttgaagattttatgaagatggtggaacacgatgcgtcttcgaaggctggaactccgcatttccgtaaccgtaccaacaagtgggaggatggttcagtgtcagagatatcaggcgtggttgatccagacaggaccagtttcatatcagatgggacgtcaacgcctctgtcgactgcaagagctcatgttaggtctcactctgatgatgatctggaggaggaaatgtcgcccaggcattcaggagatcaatcagaagaatactgcaaagaggtacaatgcattgagatggaagaatcgaccagagacattaataacgacagtgaagaaaggacagacgcagaaacacttttgggacacaatgcagaggcaaacggtgaaacaggtagtgctcaacacaggatcccgtcaagtgttagaagtgtcaggaggaggaagagttggagccgtggagataccatgacaggcacaagcactcctcctgatgccctggagacagactaccgtggaagaccggagggtcatggatttgcgtttcctgatttggagtttggttctggtgggaaattgttgaggaacgattcaatgacttctcgtggaagtgattcaactgaggctcacagcattggaacaccgttggtgggagaagagggaggtatcaccagcatacggtcatttgttgaagggctgaaggagatggtttcggatccggagaattcagggaaaatgaggaaggacattggtgtggatgctatggaggaagaggtgtctgggacaatgacaaactggtcggaggaattcgagagacagagagaacaaattctggggctgtggcagacatgtcatgtctcgttggtgcatagaacgtacttcttcttgctcttcacgggagatcaagcggattcgatatacatcggagtagagctaagaagactctcctttatgaaagaaagtttctctcaaggaaaccatgcctttgaaagaggacagacactcacaatagcttcaagcctgaaggcgcttcatagggagagacggatgctaagcaagcttgtcgggaagaggtttactggagaggaaaggaagagactttaccagaagtttgggattgctgtgaactcgaaacgtcggcggttgcagctagcgaaccagctctggagtaaacccaatgacataactcatgcggttgaaagcgcagccgttgtagcgaaactggttaggtttgtggagcaaggtagagctatgaaggagatgtttggtctgagcttcacgcctccgctaccgacaacgcggagatcactaaactggaggaaaagcatggccacactgttctaa

SEQ ID NO: 28684 - protein, 862 aa, Arabidopsis thaliana
  misc_feature (1)..(862): Ceres Seq. ID no. 3036347
MGAIAGEELKKMEKTQVHVAREEKILVLVRLRPLNEKEILANEAADWECINDTTVLYRNTLREGSTFPSAYSFDRVYRGECPTRQVYEDGPKEVALSVVKGINSSIFAYGQTSSGKTYTMSGITEFAVADIFDYIFKHEDRAFVVKFSAIEIYNEAIRDLLSPDSTPLRLRDDPEKGAAVEKATEETLRDWNHLKELISVCEAQRKIGETSLNERSSRSHQIIKLTVESSAREFLGKENSTTLMASVNFIDLAGSERASQALSAGARLKEGCHINRSLLTLGTVIRKLSNGRQGHINYRDSKLTRILQPCLGGNARTAIVCTLSPARSHVEQTRNTLLFACCAKEVTTKAQINVVMSDKALVKQLQRELARLESELRNPAPATSSCDCGVTLRKKDLQIQKMEKQLAEMTKQRDIAQSRLEDFMKMVEHDASSKAGTPHFRNRTNKWEDGSVSEISGVVDPDRTSFISDGTSTPLSTARAHVRSHSDDDLEEEMSPRHSGDQSEEYCKEVQCIEMEESTRDINNDSEERTDAETLLGHNAEANGETGSAQHRIPSSVRSVRRRKSWSRGDTMTGTSTPPDALETDYRGRPEGHGFAFPDLEFGSGGKLLRNDSMTSRGSDSTEAHSIGTPLVGEEGGITSIRSFVEGLKEMVSDPENSGKMRKDIGVDAMEEEVSGTMTNWSEEFERQREQILGLWQTCHVSLVHRTYFFLLFTGDQADSIYIGVELRRLSFMKESFSQGNHAFERGQTLTIASSLKALHRERRMLSKLVGKRFTGEERKRLYQKFGIAVNSKRRRLQLANQLWSKPNDITHAVESAAVVAKLVRFVEQGRAMKEMFGLSFTPPLPTTRRSLNWRKSMATLF

SEQ ID NO: 28685 - protein, 851 aa, Arabidopsis thaliana
  misc_feature (1)..(851): Ceres Seq. ID no. 3036348
MEKTQVHVAREEKILVLVRLRPLNEKEILANEAADWECINDTTVLYRNTLREGSTFPSAYSFDRVYRGECPTRQVYEDGPKEVALSVVKGINSSIFAYGQTSSGKTYTMSGITEFAVADIFDYIFKHEDRAFVVKFSAIEIYNEAIRDLLSPDSTPLRLRDDPEKGAAVEKATEETLRDWNHLKELISVCEAQRKIGETSLNERSSRSHQIIKLTVESSAREFLGKENSTTLMASVNFIDLAGSERASQALSAGARLKEGCHINRSLLTLGTVIRKLSNGRQGHINYRDSKLTRILQPCLGGNARTAIVCTLSPARSHVEQTRNTLLFACCAKEVTTKAQINVVMSDKALVKQLQRELARLESELRNPAPATSSCDCGVTLRKKDLQIQKMEKQLAEMTKQRDIAQSRLEDFMKMVEHDASSKAGTPHFRNRTNKWEDGSVSEISGVVDPDRTSFISDGTSTPLSTARAHVRSHSDDDLEEEMSPRHSGDQSEEYCKEVQCIEMEESTRDINNDSEERTDAETLLGHNAEANGETGSAQHRIPSSVRSVRRRKSWSRGDTMTGTSTPPDALETDYRGRPEGHGFAFPDLEFGSGGKLLRNDSMTSRGSDSTEAHSIGTPLVGEEGGITSIRSFVEGLKEMVSDPENSGKMRKDIGVDAMEEEVSGTMTNWSEEFERQREQILGLWQTCHVSLVHRTYFFLLFTGDQADSIYIGVELRRLSFMKESFSQGNHAFERGQTLTIASSLKALHRERRMLSKLVGKRFTGEERKRLYQKFGIAVNSKRRRLQLANQLWSKPNDITHAVESAAVVAKLVRFVEQGRAMKEMFGLSFTPPLPTTRRSLNWRKSMATLF

SEQ ID NO: 28686 - protein, 743 aa, Arabidopsis thaliana
  misc_feature (1)..(743): Ceres Seq. ID no. 3036349
MSGITEFAVADIFDYIFKHEDRAFVVKFSAIEIYNEAIRDLLSPDSTPLRLRDDPEKGAAVEKATEETLRDWNHLKELISVCEAQRKIGETSLNERSSRSHQIIKLTVESSAREFLGKENSTTLMASVNFIDLAGSERASQALSAGARLKEGCHINRSLLTLGTVIRKLSNGRQGHINYRDSKLTRILQPCLGGNARTAIVCTLSPARSHVEQTRNTLLFACCAKEVTTKAQINVVMSDKALVKQLQRELARLESELRNPAPATSSCDCGVTLRKKDLQIQKMEKQLAEMTKQRDIAQSRLEDFMKMVEHDASSKAGTPHFRNRTNKWEDGSVSEISGVVDPDRTSFISDGTSTPLSTARAHVRSHSDDDLEEEMSPRHSGDQSEEYCKEVQCIEMEESTRDINNDSEERTDAETLLGHNAEANGETGSAQHRIPSSVRSVRRRKSWSRGDTMTGTSTPPDALETDYRGRPEGHGFAFPDLEFGSGGKLLRNDSMTSRGSDSTEAHSIGTPLVGEEGGITSIRSFVEGLKEMVSDPENSGKMRKDIGVDAMEEEVSGTMTNWSEEFERQREQILGLWQTCHVSLVHRTYFFLLFTGDQADSIYIGVELRRLSFMKESFSQGNHAFERGQTLTIASSLKALHRERRMLSKLVGKRFTGEERKRLYQKFGIAVNSKRRRLQLANQLWSKPNDITHAVESAAVVAKLVRFVEQGRAMKEMFGLSFTPPLPTTRRSLNWRKSMATLF

SEQ ID NO: 28687 - DNA, 1476 bp, Arabidopsis thaliana
  misc_feature (1)..(1476): Ceres Seq. ID no. 3036983
atggccggaagaggaggagagctcacggaggctctggtgaaaaagaccggcagagaagaagaggatgagttggggatgaaggagaaggtttggattgaatcaaagaaactgtgggttgtggcggcgccagcgatcttcacaagatactctacgttcggagtttcaatggtaactcaagctttcattggccatcttggcccaaccgagttggccgcttactctatcaccttcaccattctcctccgtttcagtaatggtatcttgttaggtatggccggtgcactaggaacattatgtggtcaagcctacggagccaaacaataccagatgctcgggatctacctccaaaggtcatggatcgtcctcacaggtggtaccatttgcctcatgcccgtcttcatctttgcgggccctatcctcttagctttaggtcaagaggaacgcattgttcgtgtggctcgggtcttagccctatgggtcataggcatcaacttctccttcgtgccctccttcacttgccaaatgtttctccaagctcagagcaagaacaagattatttcctacgtgactgctgtctccttagggctccatgtcttcttctcgtggctcctagtggctcatttcaattttgggatcactggtgcgatgacctctatgctaattgcgttctggttgcctatcattgtgcagctcttgtatgtaacatgtggtggatgtaaggatacatggagaggattctctatgttggccttcaaagatttgtggcccgtcttaaaactatctttgtcttccggtggaatgctttgcttggagttatggtacaactcggtattggtattgctcactggaaatttgaaaaacgcagaggtggctcttgatgcactagcaatctgcatcagcataaatgcactggagatgatgatagcacttgggtttttggcagcagtaagtgtaagagtgtccaacgagctcggtagtggaaaccccaaaggagccaagtttgcaacattgatagcggttttcacgtcactctctataggaatagttctattcttcgtttttttgtttttgaggggaagaatttcctacattttcactacaagtgaagctgtcgcggccgaagttgctgatctttctccacttttagcattttccatcctcttgaacagtgttcaacctgttctctctggagtggcaatcggagcgggatggcaaggatatgtggcttacgttaaccttgcttgctattaccttgtcggaattcctattggtgttatccttggttatgttgttggtttgcaagtgaaaggtgtatggataggaatgctttttggaatattcgttcagacttgtgtgctcaccgtcatgactctcagaacagattgggatcaacaggtatctacgtcgttgagaaatataaaccggtgggttgtaccagaatctagagatgcaaatcaaatttcatcagaggaataa

SEQ ID NO: 28688 - protein, 491 aa, Arabidopsis thaliana
  misc_feature (1)..(491): Ceres Seq. ID no. 3036984
MAGRGGELTEALVKKTGREEEDELGMKEKVWIESKKLWVVAAPAIFTRYSTFGVSMVTQAFIGHLGPTELAAYSITFTILLRFSNGILLGMAGALGTLCGQAYGAKQYQMLGIYLQRSWIVLTGGTICLMPVFIFAGPILLALGQEERIVRVARVLALWVIGINFSFVPSFTCQMFLQAQSKNKIISYVTAVSLGLHVFFSWLLVAHFNFGITGAMTSMLIAFWLPIIVQLLYVTCGGCKDTWRGFSMLAFKDLWPVLKLSLSSGGMLCLELWYNSVLVLLTGNLKNAEVALDALAICISINALEMMIALGFLAAVSVRVSNELGSGNPKGAKFATLIAVFTSLSIGIVLFFVFLFLRGRISYIFTTSEAVAAEVADLSPLLAFSILLNSVQPVLSGVAIGAGWQGYVAYVNLACYYLVGIPIGVILGYVVGLQVKGVWIGMLFGIFVQTCVLTVMTLRTDWDQQVSTSLRNINRWVVPESRDANQISSEE

SEQ ID NO: 28689 - protein, 466 aa, Arabidopsis thaliana
  misc_feature (1)..(466): Ceres Seq. ID no. 3036985
MKEKVWIESKKLWVVAAPAIFTRYSTFGVSMVTQAFIGHLGPTELAAYSITFTILLRFSNGILLGMAGALGTLCGQAYGAKQYQMLGIYLQRSWIVLTGGTICLMPVFIFAGPILLALGQEERIVRVARVLALWVIGINFSFVPSFTCQMFLQAQSKNKIISYVTAVSLGLHVFFSWLLVAHFNFGITGAMTSMLIAFWLPIIVQLLYVTCGGCKDTWRGFSMLAFKDLWPVLKLSLSSGGMLCLELWYNSVLVLLTGNLKNAEVALDALAICISINALEMMIALGFLAAVSVRVSNELGSGNPKGAKFATLIAVFTSLSIGIVLFFVFLFLRGRISYIFTTSEAVAAEVADLSPLLAFSILLNSVQPVLSGVAIGAGWQGYVAYVNLACYYLVGIPIGVILGYVVGLQVKGVWIGMLFGIFVQTCVLTVMTLRTDWDQQVSTSLRNINRWVVPESRDANQISSEE

SEQ ID NO: 28690 - protein, 436 aa, Arabidopsis thaliana
  misc_feature (1)..(436): Ceres Seq. ID no. 3036986
MVTQAFIGHLGPTELAAYSITFTILLRFSNGILLGMAGALGTLCGQAYGAKQYQMLGIYLQRSWIVLTGGTICLMPVFIFAGPILLALGQEERIVRVARVLALWVIGINFSFVPSFTCQMFLQAQSKNKIISYVTAVSLGLHVFFSWLLVAHFNFGITGAMTSMLIAFWLPIIVQLLYVTCGGCKDTWRGFSMLAFKDLWPVLKLSLSSGGMLCLELWYNSVLVLLTGNLKNAEVALDALAICISINALEMMIALGFLAAVSVRVSNELGSGNPKGAKFATLIAVFTSLSIGIVLFFVFLFLRGRISYIFTTSEAVAAEVADLSPLLAFSILLNSVQPVLSGVAIGAGWQGYVAYVNLACYYLVGIPIGVILGYVVGLQVKGVWIGMLFGIFVQTCVLTVMTLRTDWDQQVSTSLRNINRWVVPESRDANQISSEE

SEQ ID NO: 28691 - DNA, 1485 bp, Arabidopsis thaliana
  misc_feature (1)..(1485): Ceres Seq. ID no. 3036987
atggccggagaaggaggagagctcacggcggctttgttgaaaaagacgactgagaacggaggagaagaaaatgatgagttagggttgaaggaaaaagtttggattgaatcaaagaagctatgggttgtggcggcgccatcgatcttcacgaagttctctacgtacggagtttcattggtaactcaaggctttgttggccatattggcccaaccgagttggccgcttactctatcaccttcaccgttctcctccgtttcagtaatggtatcttgttaggtatggccagtgcactaggaacattatgtggtcaagcctacggagccaaacaataccatatgctcgggattcacctccaaaggtcatggatcgtccttacaggttgtaccatttgcatcatgcccatcttcatcttttcaggcccgatcctcttagccttaggtcaagaggaccacattgttcgtgtggctcgggtcatagccctatggctcatagccatcaacttcaccttcgtacccgccttcacttgccaaatattcctccaatctcagagcaagaacaagatcatcgcctacgtgtctgctgtaaccttagggctccatgttttcttctcgtggctcctagtggttcatttcaatttcgggatcactggtgcaatgacctctacgctagttgcgttctggatgcctaacattgtgcagctcttgtatgtcacatccggtgggtgtaaggatacatggagaggattcactatgttggccttcaaagatttatggcccgtcttcaaactatctttgtcttccggtggaatggtttgcttggagttatggtacaactcgatattagtattgctcactgggaatttgaaaaacgcagaggtggcgattgatgcactagcaatctgcatcaacgtaaatgcactgcagatgatgatagcacttgggtttttggcagcagtaagtgtaagagtgtccaacgagctcggtaggggaaaccccgaaggcgccaaatttgcaacaatcgtagcggttttcacgtcactctctataggattagttctattcttcgtcttcttgtttctaaggggaagaatttcgtacattttcactacaagtgaagctgtggcagccgaagtcgctgatctttctccacttttagcattttccatcctcttgaacagtgttcaacccgttctctcaggagtggcagtgggagcgggatggcaaggatatgtggcttacattaaccttgcttgctattaccttctcggaattcctgttggtcttgtccttggttacgttgttggtttgcaagtcaaaggtgtatggataggaatgctttttggaatatttgttcagacttgtgtgcttaccatcatgactctcagaacagattgggatcaacaggtatctacgtcgttgaaaaatataaaccggtgggttgtaccagaatctagagatgcaaatcaaatttcatcagaggaataa

SEQ ID NO: 28692 - protein, 494 aa, Arabidopsis thaliana
  misc_feature (1)..(494): Ceres Seq. ID no. 3036988
MAGEGGELTAALLKKTTENGGEENDELGLKEKVWIESKKLWVVAAPSIFTKFSTYGVSLVTQGFVGHIGPTELAAYSITFTVLLRFSNGILLGMASALGTLCGQAYGAKQYHMLGIHLQRSWIVLTGCTICIMPIFIFSGPILLALGQEDHIVRVARVIALWLIAINFTFVPAFTCQIFLQSQSKNKIIAYVSAVTLGLHVFFSWLLVVHFNFGITGAMTSTLVAFWMPNIVQLLYVTSGGCKDTWRGFTMLAFKDLWPVFKLSLSSGGMVCLELWYNSILVLLTGNLKNAEVAIDALAICINVNALQMMIALGFLAAVSVRVSNELGRGNPEGAKFATIVAVFTSLSIGLVLFFVFLFLRGRISYIFTTSEAVAAEVADLSPLLAFSILLNSVQPVLSGVAVGAGWQGYVAYINLACYYLLGIPVGLVLGYVVGLQVKGVWIGMLFGIFVQTCVLTIMTLRTDWDQQVSTSLKNINRWVVPESRDANQISSEE

SEQ ID NO: 28693 - protein, 401 aa, Arabidopsis thaliana
  misc_feature (1)..(401): Ceres Seq. ID no. 3036989
MASALGTLCGQAYGAKQYHMLGIHLQRSWIVLTGCTICIMPIFIFSGPILLALGQEDHIVRVARVIALWLIAINFTFVPAFTCQIFLQSQSKNKIIAYVSAVTLGLHVFFSWLLVVHFNFGITGAMTSTLVAFWMPNIVQLLYVTSGGCKDTWRGFTMLAFKDLWPVFKLSLSSGGMVCLELWYNSILVLLTGNLKNAEVAIDALAICINVNALQMMIALGFLAAVSVRVSNELGRGNPEGAKFATIVAVFTSLSIGLVLFFVFLFLRGRISYIFTTSEAVAAEVADLSPLLAFSILLNSVQPVLSGVAVGAGWQGYVAYINLACYYLLGIPVGLVLGYVVGLQVKGVWIGMLFGIFVQTCVLTIMTLRTDWDQQVSTSLKNINRWVVPESRDANQISSEE

SEQ ID NO: 28694 - protein, 382 aa, Arabidopsis thaliana
  misc_feature (1)..(382): Ceres Seq. ID no. 3036990
MLGIHLQRSWIVLTGCTICIMPIFIFSGPILLALGQEDHIVRVARVIALWLIAINFTFVPAFTCQIFLQSQSKNKIIAYVSAVTLGLHVFFSWLLVVHFNFGITGAMTSTLVAFWMPNIVQLLYVTSGGCKDTWRGFTMLAFKDLWPVFKLSLSSGGMVCLELWYNSILVLLTGNLKNAEVAIDALAICINVNALQMMIALGFLAAVSVRVSNELGRGNPEGAKFATIVAVFTSLSIGLVLFFVFLFLRGRISYIFTTSEAVAAEVADLSPLLAFSILLNSVQPVLSGVAVGAGWQGYVAYINLACYYLLGIPVGLVLGYVVGLQVKGVWIGMLFGIFVQTCVLTIMTLRTDWDQQVSTSLKNINRWVVPESRDANQISSEE

SEQ ID NO: 28695 - DNA, 1548 bp, Arabidopsis thaliana
  misc_feature (1)..(1548): Ceres Seq. ID no. 3037975
atggatggagaggttacttcttggattaggagagcaaatttctctcatactgtttgttatcgtatgattacgccgagtttagaatctatgccttttactgtaaaccaagagaagagttctggattgaaaagaatgactttgagttcaccatctgatttgaaatcacttgtaggaatttgtcagagtacgcagcagctgactggtttgagttgtggtagtgttgttggtactgaagtgcagaggaatccagttactaataagaagagatctgtttctccgttgcctcatatggctctttctgatgcttttatcgaagcaaagtctgatattaagaggttttctactccacatcctagaagagtggaaccagagaagggaatgaaggccaagtcgtcgtcccgcaaagattcttctgagaaaaaatcagttaatctacggtccctgtctcactcgggtcctattagggatcttagtacgcagaaagttaaagagaggggaaagagcaagatagataagaagtcttcaaagtctgttgactatagaggttctaaagtaagttctgcaggagtgcttgaagaatgcctcattgatgtgtctaagttgtcttatggggataggtttgctcacgggaaatatagccagatttatcatggtgaatatgaaggcaaagctgttgctctgaagattatcacagcgcctgaggatagtgacgacatattcttgggagctcgtttagaaaaagagtttatcgtggaagccactcttttatctcgactaagccatccaaatgtcgttaagtttgttggagtgaatactggaaactgtatcatcacagagtatgtacctcgagggtctttaagatcatatctgcacaagctcgagcagaaatcccttcctttggaacagctaatcgattttggtctggatattgctaaaggaatggaatatattcactcaagagagatagttcatcaggatctgaagccagaaaacgtgttgatcgacaatgactttcacttgaagattgctgactttggcatagcgtgcgaggaggagtactgtgatgttttgggggataacataggaacttataggtggatggcacctgaagttttaaaacggataccacatggacggaagtgcgatgtttatagttttggacttcttttatgggaaatggtagctggagcacttccatatgaggagatgaaatttgctgaacaaattgcctacgcagttatatacaagaaaattaggccagttataccgacggattgtccagcggccatgaaagagctgatcgagcgatgttggtcatcgcaaacagacaagagaccggaattctggcagattgtcaaagtgttggaacatttcaagaagtctctaacaagcgaaggaaaacttaatcttttacctagccagatctgtccagaactaaagaaatgtcctaaattctggattcatatattcggatcattccaccaccacagcagcggtggcggcagcagcagcaacaactcagccttacctaagcctaaattcgcttga

SEQ ID NO: 28696 - protein, 515 aa, Arabidopsis thaliana
  misc_feature (1)..(515): Ceres Seq. ID no. 3037976
MDGEVTSWIRRANFSHTVCYRMITPSLESMPFTVNQEKSSGLKRMTLSSPSDLKSLVGICQSTQQLTGLSCGSVVGTEVQRNPVTNKKRSVSPLPHMALSDAFIEAKSDIKRFSTPHPRRVEPEKGMKAKSSSRKDSSEKKSVNLRSLSHSGPIRDLSTQKVKERGKSKIDKKSSKSVDYRGSKVSSAGVLEECLIDVSKLSYGDRFAHGKYSQIYHGEYEGKAVALKIITAPEDSDDIFLGARLEKEFIVEATLLSRLSHPNVVKFVGVNTGNCIITEYVPRGSLRSYLHKLEQKSLPLEQLIDFGLDIAKGMEYIHSREIVHQDLKPENVLIDNDFHLKIADFGIACEEEYCDVLGDNIGTYRWMAPEVLKRIPHGRKCDVYSFGLLLWEMVAGALPYEEMKFAEQIAYAVIYKKIRPVIPTDCPAAMKELIERCWSSQTDKRPEFWQIVKVLEHFKKSLTSEGKLNLLPSQICPELKKCPKFWIHIFGSFHHHSSGGGSSSNNSALPKPKFA

SEQ ID NO: 28697 - protein, 494 aa, Arabidopsis thaliana
  misc_feature (1)..(494): Ceres Seq. ID no. 3037977
MITPSLESMPFTVNQEKSSGLKRMTLSSPSDLKSLVGICQSTQQLTGLSCGSVVGTEVQRNPVTNKKRSVSPLPHMALSDAFIEAKSDIKRFSTPHPRRVEPEKGMKAKSSSRKDSSEKKSVNLRSLSHSGPIRDLSTQKVKERGKSKIDKKSSKSVDYRGSKVSSAGVLEECLIDVSKLSYGDRFAHGKYSQIYHGEYEGKAVALKIITAPEDSDDIFLGARLEKEFIVEATLLSRLSHPNVVKFVGVNTGNCIITEYVPRGSLRSYLHKLEQKSLPLEQLIDFGLDIAKGMEYIHSREIVHQDLKPENVLIDNDFHLKIADFGIACEEEYCDVLGDNIGTYRWMAPEVLKRIPHGRKCDVYSFGLLLWEMVAGALPYEEMKFAEQIAYAVIYKKIRPVIPTDCPAAMKELIERCWSSQTDKRPEFWQIVKVLEHFKKSLTSEGKLNLLPSQICPELKKCPKFWIHIFGSFHHHSSGGGSSSNNSALPKPKFA

SEQ ID NO: 28698 - protein, 486 aa, Arabidopsis thaliana
  misc_feature (1)..(486): Ceres Seq. ID no. 3037978
MPFTVNQEKSSGLKRMTLSSPSDLKSLVGICQSTQQLTGLSCGSVVGTEVQRNPVTNKKRSVSPLPHMALSDAFIEAKSDIKRFSTPHPRRVEPEKGMKAKSSSRKDSSEKKSVNLRSLSHSGPIRDLSTQKVKERGKSKIDKKSSKSVDYRGSKVSSAGVLEECLIDVSKLSYGDRFAHGKYSQIYHGEYEGKAVALKIITAPEDSDDIFLGARLEKEFIVEATLLSRLSHPNVVKFVGVNTGNCIITEYVPRGSLRSYLHKLEQKSLPLEQLIDFGLDIAKGMEYIHSREIVHQDLKPENVLIDNDFHLKIADFGIACEEEYCDVLGDNIGTYRWMAPEVLKRIPHGRKCDVYSFGLLLWEMVAGALPYEEMKFAEQIAYAVIYKKIRPVIPTDCPAAMKELIERCWSSQTDKRPEFWQIVKVLEHFKKSLTSEGKLNLLPSQICPELKKCPKFWIHIFGSFHHHSSGGGSSSNNSALPKPKFA

SEQ ID NO: 28699 - DNA, 1611 bp, Arabidopsis thaliana
  misc_feature (1)..(1611): Ceres Seq. ID no. 3038306
atgagagagaacacacaagtggctcaattcacagaagatcatcaccagagacatcaaaccccaataacttgtttaagctctaaactagcaaagatatggacattgttcaccaccaaaatcttcatcttcgtcctcttcatcatcctccttagtgcttctgtctcttggatgtatgcgtttgttttaggtgagaataaattccaagtgacatcaatattcacaagaaacaccaaaaaaagcactcccacaaaaacaacaacaactacagatatccccaagatcgccatcaagatcccattaaactgcacatcactcaacagcaacacaacacaaacatgtccttcaaattacccaaccaagttcgaaccagcgatctcttcctcggagacatgtcctgactacttcaagtggatccaccgagacttaaaggtatggcaaaagacagggatcacaagggaaacactagagagagcaagaccaaatgctcacttcaggatagtgataaagtcagggagattgtacgttcatcaatacgagaaagcatttcagacaagagatgtgttcacaatctggggaatacttcagcttctaaggatgtatcctggtcaaatccctgaccttgagcttctcttcctctgccatgatagacccgccatttggaaaagagacttgaagaaaaaacgaaaggatacgtggcctcctccgccgttgtttcactactgtggtcaccgtgatgcatacgacatagttttccctgattggagcttctggggatggcctgagctgaatataaaggagtggaataaattatctgtggcactaaaagaagggaacaaaaaggtgaaatgggaagatagagttccgtacgcttattggaaaggaaaccctcatgtttctcctataagaggagatcttatgagatgtaacttctccgacaagtatgatcctatggttcgtctctatgtccaggattggaggagtgagatagaggcagggttcagaggatcgaacctagaagatcaatgtactcatagatataagatctacatagaaggaaacgcatggtcggtgagcgaaaagtatatactttcgtgtgatagtatgactctgttggttaaaccagagtactacgactttttcttccgaagtatggtcccaatgaagcatttttggcctattagacaaaacaacaaatgtggtgacctcaaatttgcagtcgaatggggcaacaacaacaccgaaaaggcacaaatcatagggagacaaggaagtgagtacatgatgaagaacctaaagatgaagtatgtgtatgattacatgttgtatgtgttacaaggctatgggaaattgatgaagttggatgtgacagtgcctgaaaatgccacggaggtttgttcagagacgatggcttgttcgattactgatggtggacggatcaggcagtgcatggacgactcgttggttatgtctccgagtgtcaaggcggcttgtgatttgccaccttcttatggagactatgagctcaagaagtttcgtaagaaacaagaaagtgcggagagaaaggttgagcagtggaccaataagtattggaacttgagagatccaaaataa

SEQ ID NO: 28700 - protein, 536 aa, Arabidopsis thaliana
  misc_feature (1)..(536): Ceres Seq. ID no. 3038307
MRENTQVAQFTEDHHQRHQTPITCLSSKLAKIWTLFTTKIFIFVLFIILLSASVSWMYAFVLGENKFQVTSIFTRNTKKSTPTKTTTTTDIPKIAIKIPLNCTSLNSNTTQTCPSNYPTKFEPAISSSETCPDYFKWIHRDLKVWQKTGITRETLERARPNAHFRIVIKSGRLYVHQYEKAFQTRDVFTIWGILQLLRMYPGQIPDLELLFLCHDRPAIWKRDLKKKRKDTWPPPPLFHYCGHRDAYDIVFPDWSFWGWPELNIKEWNKLSVALKEGNKKVKWEDRVPYAYWKGNPHVSPIRGDLMRCNFSDKYDPMVRLYVQDWRSEIEAGFRGSNLEDQCTHRYKIYIEGNAWSVSEKYILSCDSMTLLVKPEYYDFFFRSMVPMKHFWPIRQNNKCGDLKFAVEWGNNNTEKAQIIGRQGSEYMMKNLKMKYVYDYMLYVLQGYGKLMKLDVTVPENATEVCSETMACSITDGGRIRQCMDDSLVMSPSVKAACDLPPSYGDYELKKFRKKQESAERKVEQWTNKYWNLRDPK

SEQ ID NO: 28701 - protein, 480 aa, Arabidopsis thaliana
  misc_feature (1)..(480): Ceres Seq. ID no. 3038308
MYAFVLGENKFQVTSIFTRNTKKSTPTKTTTTTDIPKIAIKIPLNCTSLNSNTTQTCPSNYPTKFEPAISSSETCPDYFKWIHRDLKVWQKTGITRETLERARPNAHFRIVIKSGRLYVHQYEKAFQTRDVFTIWGILQLLRMYPGQIPDLELLFLCHDRPAIWKRDLKKKRKDTWPPPPLFHYCGHRDAYDIVFPDWSFWGWPELNIKEWNKLSVALKEGNKKVKWEDRVPYAYWKGNPHVSPIRGDLMRCNFSDKYDPMVRLYVQDWRSEIEAGFRGSNLEDQCTHRYKIYIEGNAWSVSEKYILSCDSMTLLVKPEYYDFFFRSMVPMKHFWPIRQNNKCGDLKFAVEWGNNNTEKAQIIGRQGSEYMMKNLKMKYVYDYMLYVLQGYGKLMKLDVTVPENATEVCSETMACSITDGGRIRQCMDDSLVMSPSVKAACDLPPSYGDYELKKFRKKQESAERKVEQWTNKYWNLRDPK

SEQ ID NO: 28702 - protein, 338 aa, Arabidopsis thaliana
  misc_feature (1)..(338): Ceres Seq. ID no. 3038309
MYPGQIPDLELLFLCHDRPAIWKRDLKKKRKDTWPPPPLFHYCGHRDAYDIVFPDWSFWGWPELNIKEWNKLSVALKEGNKKVKWEDRVPYAYWKGNPHVSPIRGDLMRCNFSDKYDPMVRLYVQDWRSEIEAGFRGSNLEDQCTHRYKIYIEGNAWSVSEKYILSCDSMTLLVKPEYYDFFFRSMVPMKHFWPIRQNNKCGDLKFAVEWGNNNTEKAQIIGRQGSEYMMKNLKMKYVYDYMLYVLQGYGKLMKLDVTVPENATEVCSETMACSITDGGRIRQCMDDSLVMSPSVKAACDLPPSYGDYELKKFRKKQESAERKVEQWTNKYWNLRDPK

SEQ ID NO: 28703 - DNA, 1353 bp, Arabidopsis thaliana
  misc_feature (1)..(1353): Ceres Seq. ID no. 3038950
atgccaaaataccttgatcagaatgacgaggagaacaaaggaagatcaacggacaataacaatcaccgtcaaatggattacaacgattggttaccagtcacagcgtctagagaagccaaatggtattactccgccttccacaatgtcacggccatggttggcgccggagttcttggtctccctttcgccatgtcacaacttggctggggacctggacttgttgctataataatgtcatgggctataacgttctactcgttatggcaaatggtacagttgcacgaagccgttccagggaaacggttggaccgttaccccgagctagggcaagaagcttttggaccaaaactaggttactggatcgtcatgccgcaacagcttcttgtccaaatcgcttccgacatagtctacaacgtgacaggaggaaaatctctcaagaaatttgtcgagcttctatttccgaatctcgaacatatccgtcagacttattacatccttggattcgccgcgcttcagcttgtcctctctcaatctcctgatttcaactccatcaagatcgtctctctcctcgccgccctcatgtctttcctttactcaatgatagcttcggtggcgtcaatagcaaaaggaacggaacaccgtccttcaacttacggagtcaggggagacacggtggcctcaatggtctttgatgcatttaacggcattggaaccatagcgtttgcgtttgcaggacacagtgtggttcttgagatccaagcaactattccttcaacacctgaagtgccttccaagaaaccaatgtggaaaggagttgttgtagcttacataatcgtcatcatttgttacctttttgtggctatctccggctattgggcgtttggggctcatgttgaggatgatgttctcatttccttagagagaccagcttggcttatagcggctgctaacttcatggtttttatccatgtcataggaagttatcaggtttttgcgatgattgtgtttgacacgatcgagtcttatcttgtgaaaacactgaaattcactccttcaacaacactgcgtctagtcgcacgtagtacatatgttgcattgatttgtcttgtagcagtttgtatcccctttttcggaggtcttttagggttcttcggcggtcttgtcttctcatcaacctcgtacttcttgccttgcattatatggttgataatgaagcgaccaaaaagatttagcgcccattggtggtgttcttgggtagcaatagtcactggtatctcgatagcgattcttgcgcccattggaggaatgagacacattattctttcagcaagaacctacaagctcttctcatag

SEQ ID NO: 28704 - protein, 450 aa, Arabidopsis thaliana
  misc_feature (1)..(450): Ceres Seq. ID no. 3038951
MPKYLDQNDEENKGRSTDNNNHRQMDYNDWLPVTASREAKWYYSAFHNVTAMVGAGVLGLPFAMSQLGWGPGLVAIIMSWAITFYSLWQMVQLHEAVPGKRLDRYPELGQEAFGPKLGYWIVMPQQLLVQIASDIVYNVTGGKSLKKFVELLFPNLEHIRQTYYILGFAALQLVLSQSPDFNSIKIVSLLAALMSFLYSMIASVASIAKGTEHRPSTYGVRGDTVASMVFDAFNGIGTIAFAFAGHSVVLEIQATIPSTPEVPSKKPMWKGVVVAYIIVIICYLFVAISGYWAFGAHVEDDVLISLERPAWLIAAANFMVFIHVIGSYQVFAMIVFDTIESYLVKTLKFTPSTTLRLVARSTYVALICLVAVCIPFFGGLLGFFGGLVFSSTSYFLPCIIWLIMKRPKRFSAHWWCSWVAIVTGISIAILAPIGGMRHIILSARTYKLFS

SEQ ID NO: 28705 - protein, 426 aa, Arabidopsis thaliana
  misc_feature (1)..(426): Ceres Seq. ID no. 3038952
MDYNDWLPVTASREAKWYYSAFHNVTAMVGAGVLGLPFAMSQLGWGPGLVAIIMSWAITFYSLWQMVQLHEAVPGKRLDRYPELGQEAFGPKLGYWIVMPQQLLVQIASDIVYNVTGGKSLKKFVELLFPNLEHIRQTYYILGFAALQLVLSQSPDFNSIKIVSLLAALMSFLYSMIASVASIAKGTEHRPSTYGVRGDTVASMVFDAFNGIGTIAFAFAGHSVVLEIQATIPSTPEVPSKKPMWKGVVVAYIIVIICYLFVAISGYWAFGAHVEDDVLISLERPAWLIAAANFMVFIHVIGSYQVFAMIVFDTIESYLVKTLKFTPSTTLRLVARSTYVALICLVAVCIPFFGGLLGFFGGLVFSSTSYFLPCIIWLIMKRPKRFSAHWWCSWVAIVTGISIAILAPIGGMRHIILSARTYKLFS

SEQ ID NO: 28706 - protein, 399 aa, Arabidopsis thaliana
  misc_feature (1)..(399): Ceres Seq. ID no. 3038953
MVGAGVLGLPFAMSQLGWGPGLVAIIMSWAITFYSLWQMVQLHEAVPGKRLDRYPELGQEAFGPKLGYWIVMPQQLLVQIASDIVYNVTGGKSLKKFVELLFPNLEHIRQTYYILGFAALQLVLSQSPDFNSIKIVSLLAALMSFLYSMIASVASIAKGTEHRPSTYGVRGDTVASMVFDAFNGIGTIAFAFAGHSVVLEIQATIPSTPEVPSKKPMWKGVVVAYIIVIICYLFVAISGYWAFGAHVEDDVLISLERPAWLIAAANFMVFIHVIGSYQVFAMIVFDTIESYLVKTLKFTPSTTLRLVARSTYVALICLVAVCIPFFGGLLGFFGGLVFSSTSYFLPCIIWLIMKRPKRFSAHWWCSWVAIVTGISIAILAPIGGMRHIILSARTYKLFS

SEQ ID NO: 28707 - DNA, 1047 bp, Arabidopsis thaliana
  misc_feature (1)..(1047): Ceres Seq. ID no. 3039385
atgcgcaagtggatatgttgtgcgggtaaaaaaggagtttcagattcttcaaatgagaacacaaatcaaaagaatcaaaaaccacaagatcttgcaaagcctaaggagattcttcccattatagttccttccttgtcagtggatgaggttaatgaacagactgacaattttggaccaaattctctgattggtgagggatcttatggaagggtatactatgcaactctaaatgatggaaaagcagttgctttgaagaaactcgatcttgcacctgaagatgaaacaaacaccgagtttttaagccaggtttccatggtttcaagactaaagcatgagaatctcattcaactggtcggttattgtgttgatgaaaaccttcgtgttcttgcttatgagtttgcaacaatgggatcattgcacgatattctgcatggtaggaagggagttcaagatgcactaccaggtccaacacttgactggataacaagggtgaagatagccgttgaggcagctagaggtttagaataccttcatgagaaggttcagcctcaagtaatacatagagacataagatctagcaatatacttctttttgacgactatcaagcaaaaattgctgattttaatctttcaaatcaatctcctgataatgctgctcgtttacaatctacaagagttttgggcagctttggctattactctccagaatatgctatgactggagagttgacacataagagtgatgtatatggttttggggttgtacttctagagctcttgacagggaggaaaccagttgaccatacaatgccgcgaggccaacaaagtcttgtaacttgggctacaccgaaacttagtgaagatacagtagaggagtgtgttgatccaaagctaaagggagaatattctcctaaatcagtagctaagctagcagcggtggcagcattgtgtgtgcaatatgaatctaattgtagaccaaaaatgagtacagttgtgaaagctttgcaacaacttcttatagcgacaggctcaataccgcaattctaa

SEQ ID NO: 28708 - protein, 348 aa, Arabidopsis thaliana
  misc_feature (1)..(348): Ceres Seq. ID no. 3039386
MRKWICCAGKKGVSDSSNENTNQKNQKPQDLAKPKEILPIIVPSLSVDEVNEQTDNFGPNSLIGEGSYGRVYYATLNDGKAVALKKLDLAPEDETNTEFLSQVSMVSRLKHENLIQLVGYCVDENLRVLAYEFATMGSLHDILHGRKGVQDALPGPTLDWITRVKIAVEAARGLEYLHEKVQPQVIHRDIRSSNILLFDDYQAKIADFNLSNQSPDNAARLQSTRVLGSFGYYSPEYAMTGELTHKSDVYGFGVVLLELLTGRKPVDHTMPRGQQSLVTWATPKLSEDTVEECVDPKLKGEYSPKSVAKLAAVAALCVQYESNCRPKMSTVVKALQQLLIATGSIPQF

SEQ ID NO: 28709 - protein, 244 aa, Arabidopsis thaliana; identical to SEQ ID NO: 28097
  misc_feature (1)..(244): Ceres Seq. ID no. 3039387

SEQ ID NO: 28710 - protein, 213 aa, Arabidopsis thaliana; identical to SEQ ID NO: 28098
  misc_feature (1)..(213): Ceres Seq. ID no. 3039388

SEQ ID NO: 28711 - DNA, 1074 bp, Arabidopsis thaliana
  misc_feature (1)..(1074): Ceres Seq. ID no. 3039612
atggaggaaacaaaaatgagtttgcttgatgattcttttacaagtgcaatgacacttaccaattcaggtgtgcctcaagtccctgatcgctacgttcttcctccttcgcaaaggccagctcttggttcaagcttaggcaccagcgagactacacttcctgtcattgatctctctcttttgcaccaacctttccttcgatccctcgcaatccacgagattagcatggcctgcaaggagtttggtttctttcaggttataaaccatggaataccatcatcagtggttaacgatgccttagatgcagcaacacagttcttcgacttacctgtggaagagaagatgcttctggtgtctgcaaacgttcatgagccagtcaggtatggcacaagccttaaccattcaacagacagagttcactactggagagatttcatcaagcattactctcatccactctcaaagtggatcgatatgtggccatcaaatcctccatgctacaaggataaagtgggcaagtatgcagaggcaacacatttgctacacaagcagttaatagaagctatctcagaaagcctgggactggagaaaaattacttacaagaagagatagaagaaggctcacaagtcatggcagtgaattgttatccagcatgcccggaacctgaaatggccttgggaatgccaccacactcagacttcagctcactgaccatcttacttcagagtagcaagggactccagataatggactgcaacaaaaactgggtttgtgtgccgtatatagaaggagctttgatagttcagctgggagatcaggtagaggtgatgagcaacggcatatacaagagcgtcattcatcgtgtaacagtgaacaaagaagtcaaaaggctatcttttgcaagtcttcacagtctacctctgcacaagaaaataagtccagcaccaaaactcgtcaacccaaacaatgcaccagcctatggagagtttagtttcaacgattttctgaactacatctcaagcaacgattttatacaagaaagattcattgacacaataaagaaaagcagttcctaa

SEQ ID NO: 28712 - protein, 357 aa, Arabidopsis thaliana
  misc_feature (1)..(357): Ceres Seq. ID no. 3039613
MEETKMSLLDDSFTSAMTLTNSGVPQVPDRYVLPPSQRPALGSSLGTSETTLPVIDLSLLHQPFLRSLAIHEISMACKEFGFFQVINHGIPSSVVNDALDAATQFFDLPVEEKMLLVSANVHEPVRYGTSLNHSTDRVHYWRDFIKHYSHPLSKWIDMWPSNPPCYKDKVGKYAEATHLLHKQLIEAISESLGLEKNYLQEEIEEGSQVMAVNCYPACPEPEMALGMPPHSDFSSLTILLQSSKGLQIMDCNKNWVCVPYIEGALIVQLGDQVEVMSNGIYKSVIHRVTVNKEVKRLSFASLHSLPLHKKISPAPKLVNPNNAPAYGEFSFNDFLNYISSNDFIQERFIDTIKKSSS

SEQ ID NO: 28713 - protein, 352 aa, Arabidopsis thaliana
  misc_feature (1)..(352): Ceres Seq. ID no. 3039614
MSLLDDSFTSAMTLTNSGVPQVPDRYVLPPSQRPALGSSLGTSETTLPVIDLSLLHQPFLRSLAIHEISMACKEFGFFQVINHGIPSSVVNDALDAATQFFDLPVEEKMLLVSANVHEPVRYGTSLNHSTDRVHYWRDFIKHYSHPLSKWIDMWPSNPPCYKDKVGKYAEATHLLHKQLIEAISESLGLEKNYLQEEIEEGSQVMAVNCYPACPEPEMALGMPPHSDFSSLTILLQSSKGLQIMDCNKNWVCVPYIEGALIVQLGDQVEVMSNGIYKSVIHRVTVNKEVKRLSFASLHSLPLHKKISPAPKLVNPNNAPAYGEFSFNDFLNYISSNDFIQERFIDTIKKSSS

SEQ ID NO: 28714 - protein, 341 aa, Arabidopsis thaliana
  misc_feature (1)..(341): Ceres Seq. ID no. 3039615
MTLTNSGVPQVPDRYVLPPSQRPALGSSLGTSETTLPVIDLSLLHQPFLRSLAIHEISMACKEFGFFQVINHGIPSSVVNDALDAATQFFDLPVEEKMLLVSANVHEPVRYGTSLNHSTDRVHYWRDFIKHYSHPLSKWIDMWPSNPPCYKDKVGKYAEATHLLHKQLIEAISESLGLEKNYLQEEIEEGSQVMAVNCYPACPEPEMALGMPPHSDFSSLTILLQSSKGLQIMDCNKNWVCVPYIEGALIVQLGDQVEVMSNGIYKSVIHRVTVNKEVKRLSFASLHSLPLHKKISPAPKLVNPNNAPAYGEFSFNDFLNYISSNDFIQERFIDTIKKSSS

SEQ ID NO: 28715 - DNA, 495 bp, Arabidopsis thaliana
  misc_feature (1)..(495): Ceres Seq. ID no. 3039824
atggctaactctgtgatggcaaccgaacagctctgctacatcccttgcaacttttgcaacataattcttgcggtgaatgtcccatgcagcagcctgttcgacatcgtgaccgtccgatgcggtcactgcaccaatctgtggtctgtaaacatggcagctgctcttcagtcgctttcacgccctaatttccaggcaacaaactatgcagtaccagagtatggatcctcctcaagaagccacacaaaaatcccttcaagaatttcaactcgtaccataactgagcaacggattgtaaaccgtcctccggagaagcggcagcgagtaccttctgcgtacaatcaattcataaaagaggaaattcagaggattaaggcgaataatccagacataagccacagagaagcattcagcactgctgccaagaattgggcacactttcctcatattcactttggtctaatgctggagagtaacaagcaagctaagatagcctaa

SEQ ID NO: 28716 - protein, 164 aa, Arabidopsis thaliana
  misc_feature (1)..(164): Ceres Seq. ID no. 3039825
MANSVMATEQLCYIPCNFCNIILAVNVPCSSLFDIVTVRCGHCTNLWSVNMAAALQSLSRPNFQATNYAVPEYGSSSRSHTKIPSRISTRTITEQRIVNRPPEKRQRVPSAYNQFIKEEIQRIKANNPDISHREAFSTAAKNWAHFPHIHFGLMLESNKQAKIA

SEQ ID NO: 28717 - protein, 159 aa, Arabidopsis thaliana
  misc_feature (1)..(159): Ceres Seq. ID no. 3039826
MATEQLCYIPCNFCNIILAVNVPCSSLFDIVTVRCGHCTNLWSVNMAAALQSLSRPNFQATNYAVPEYGSSSRSHTKIPSRISTRTITEQRIVNRPPEKRQRVPSAYNQFIKEEIQRIKANNPDISHREAFSTAAKNWAHFPHIHFGLMLESNKQAKIA

SEQ ID NO: 28718 - protein, 114 aa, Arabidopsis thaliana
  misc_feature (1)..(114): Ceres Seq. ID no. 3039827
MAAALQSLSRPNFQATNYAVPEYGSSSRSHTKIPSRISTRTITEQRIVNRPPEKRQRVPSAYNQFIKEEIQRIKANNPDISHREAFSTAAKNWAHFPHIHFGLMLESNKQAKIA

SEQ ID NO: 28719 - DNA, 1584 bp, Arabidopsis thaliana
  misc_feature (1)..(1584): Ceres Seq. ID no. 3040245
atggcgtcttttctccgagtcatcgttctgtcatgggcttttaccgttgcgtggtttaccctctggatgttgatgctatacttgacgaacgagatgaagctaaagttcacagacgcagctgcgattgtaaatgtgtttgctggtgtatcagctattggtcatcttggcatgcaatttcttgttgatgcatttattggtcacttttggatgctctgtctctctactttagcattcagtttcggtttcgggttcttggcaatatcagcgtcaccaatactttcaggcaatggacaaaagggcctgttctacgtagcgctaacggttatatccgttggtatatttggacggtctatctctttgggagtatttacagaagaccaactagaagacggtaggaacaagggaaaccccgccaagctcgttagctttgtcattggaaatgtggggaattttgtgttcttgttacttgctgctattgcaatgcctcagataagtccgtggtttgttaggttcacgatcccctcgggctgtgaggtattagcaatgctgatttttatttccggtgcgtgttcatacaaacgggttaaaccaggtgggagccctttgacaacggttttccgggtctttatggcttctgcttccaaaatgtcttgtgcatactcgaacaactcaagccagctctatgaaaaagctgagtgtgatcaagatattaagccccacacaagcagcttaaggtatctagatagagctgcaatgatactccaaacagagtctttggaacaacagaggaaaaacagatggaagctttgtcgggtgacagaagtggagcaaacgaaaagcgtcatacgcacggttcctttgtttgcgacatctctcatttcggggattgtcttctctcttggtaatactttcttccttgaacaagcaaaccatatggactccaagttcggatcatggaaccttcctctcccactcctcttactctttagtgaagctgcaaggctaggatcccgagaactatgtgtcatggctgcaaaacgccatgccattgacttccctgaatcacctaaacaaaccaaaacgccttatggtataccagtctccatcatcctatcgatattttgctgctccatcgctgcacatgttgagtctaggaggctcaaagtagttagtactcaaggtttactacatgaaactgtccccatgagtgtattctggctgctcccacagtacattctactcggttcaatcacaggaatctacgaaaacagctttgcgctttacctagaagaaacggtgcctgaagagttgagccaatacatggttctattaaacgtgggagtgtgcggggtcgggatcatgagcaacattgctcttgttagtttggtgggcagtgtaagcggaggcaaatggtttcaagacacaataaacaagagccgggtggataactattattgggttataacagtgttttgcatgttcaatctcttgttatatttcattgtaacctataggtacacagtgtgtaacaagaaagatggtgcaacacaagaaaatgatcgaaggataatcgcttctgtgtag

SEQ ID NO: 28720 - protein, 527 aa, Arabidopsis thaliana
  misc_feature (1)..(527): Ceres Seq. ID no. 3040246
MASFLRVIVLSWAFTVAWFTLWMLMLYLTNEMKLKFTDAAAIVNVFAGVSAIGHLGMQFLVDAFIGHFWMLCLSTLAFSFGFGFLAISASPILSGNGQKGLFYVALTVISVGIFGRSISLGVFTEDQLEDGRNKGNPAKLVSFVIGNVGNFVFLLLAAIAMPQISPWFVRFTIPSGCEVLAMLIFISGACSYKRVKPGGSPLTTVFRVFMASASKMSCAYSNNSSQLYEKAECDQDIKPHTSSLRYLDRAAMILQTESLEQQRKNRWKLCRVTEVEQTKSVIRTVPLFATSLISGIVFSLGNTFFLEQANHMDSKFGSWNLPLPLLLLFSEAARLGSRELCVMAAKRHAIDFPESPKQTKTPYGIPVSIILSIFCCSIAAHVESRRLKVVSTQGLLHETVPMSVFWLLPQYILLGSITGIYENSFALYLEETVPEELSQYMVLLNVGVCGVGIMSNIALVSLVGSVSGGKWFQDTINKSRVDNYYWVITVFCMFNLLLYFIVTYRYTVCNKKDGATQENDRRIIASV

SEQ ID NO: 28721 - protein, 505 aa, Arabidopsis thaliana; identical to SEQ ID NO: 28201
  misc_feature (1)..(505): Ceres Seq. ID no. 3040247

SEQ ID NO: 28722 - protein, 503 aa, Arabidopsis thaliana; identical to SEQ ID NO: 28202
  misc_feature (1)..(503): Ceres Seq. ID no. 3040248

SEQ ID NO: 28723 - DNA, 1032 bp, Arabidopsis thaliana
  misc_feature (1)..(1032): Ceres Seq. ID no. 3041857
atggtgattcaaacgaatctctcatatcgtttcttcatcttaattgtgtttttatttaccctagcgaatccaaaatcagattcagatctcaaaaacgaactagtctccctccgatcaaccgccgaatcaggcgtgatctccttcaacaacgacgacgtttccaaattcataacctccgtatccactcctagaccttactcactcatcatcttcttcgacgccgttcatctccacggcaatagccagctacgtcttccagagttccgccgcgaattcagactcgtctccgccactttcatcaccaacaacaacaatgaatctaacggcacaaagctcttcttctgcgagatcgaatcaactcactccgaggcttctttccgccgcttcgccgtcgagtcactaccacacatttccctcgttagccccacgacagagaatttaacagaatcagatcaaatggacggtggagatttcactggattagccgaatcaatggcagagttcgtcgaacgtcaaacaaaactcaccgtttgttcaatccaacgaccaccactcatatcaaagacacaaatcggaatcatcgttgctataatcataatctcgactccgattctcatcaagaagattctaaaaggagaaacacttctccatgaccatagaatctggttagttggcgcggttttcgtctacttcttcagcgtctcggggacaatgcataacatcattagagaaatgccaatgtatatcaaagattatgaagattcaagtaagtttgttttctttatagaagaatcagagatgcagcttggagcagaaggtttctttgtagggtttttgtatactgttgttggattgcttttggcgtttgttactaatgtagttgtacgagtcaagaaactcgatgagcaaaggatggctatgcttttggctctgtctatatcgttttgggctgtgaggaaagttgtttacttggataattggaagactggttatgaaatttacccatattggccatcgagttggcggggatga

SEQ ID NO: 28724 - protein, 343 aa, Arabidopsis thaliana
  misc_feature (1)..(343): Ceres Seq. ID no. 3041858
MVIQTNLSYRFFILIVFLFTLANPKSDSDLKNELVSLRSTAESGVISFNNDDVSKFITSVSTPRPYSLIIFFDAVHLHGNSQLRLPEFRREFRLVSATFITNNNNESNGTKLFFCEIESTHSEASFRRFAVESLPHISLVSPTTENLTESDQMDGGDFTGLAESMAEFVERQTKLTVCSIQRPPLISKTQIGIIVAIIIISTPILIKKILKGETLLHDHRIWLVGAVFVYFFSVSGTMHNIIREMPMYIKDYEDSSKFVFFIEESEMQLGAEGFFVGFLYTVVGLLLAFVTNVVVRVKKLDEQRMAMLLALSISFWAVRKVVYLDNWKTGYEIYPYWPSSWRG

SEQ ID NO: 28725 - protein, 191 aa, Arabidopsis thaliana
  misc_feature (1)..(191): Ceres Seq. ID no. 3041859
MDGGDFTGLAESMAEFVERQTKLTVCSIQRPPLISKTQIGIIVAIIIISTPILIKKILKGETLLHDHRIWLVGAVFVYFFSVSGTMHNIIREMPMYIKDYEDSSKFVFFIEESEMQLGAEGFFVGFLYTVVGLLLAFVTNVVVRVKKLDEQRMAMLLALSISFWAVRKVVYLDNWKTGYEIYPYWPSSWRG

SEQ ID NO: 28726 - protein, 179 aa, Arabidopsis thaliana
  misc_feature (1)..(179): Ceres Seq. ID no. 3041860
MAEFVERQTKLTVCSIQRPPLISKTQIGIIVAIIIISTPILIKKILKGETLLHDHRIWLVGAVFVYFFSVSGTMHNIIREMPMYIKDYEDSSKFVFFIEESEMQLGAEGFFVGFLYTVVGLLLAFVTNVVVRVKKLDEQRMAMLLALSISFWAVRKVVYLDNWKTGYEIYPYWPSSWRG

SEQ ID NO: 28727 - DNA, 1086 bp, Arabidopsis thaliana
  misc_feature (1)..(1086): Ceres Seq. ID no. 3042231
atgggatacacaaatgtgtccattttattaggcctgttgatggtctttgttacaccgatggtgttcgcagatgatgtgacaccaatcccagagggcaaaccccaagtggcgcagtggttcaatgccaacgttggtccattggctcaacgtaaaggcttagatcctgctcttgtagctgctgaggctgctccacgtatcatcaacgtgaatccaaagggtggtgaattcaaaacactaacggacgcaataaagagcgttcctgcagggaacacaaagcgggtgatcataaagatggctcctggtgaatacaaagagaaggtcactatcgacaggaacaaacccttcattacattgatgggacaacccaatgccatgcctgttatcacctatgacggtaccgccgccaagtatggaaccgttgatagcgcctctctcattatcttatccgactatttcatggccgttaacatcgtcgttaagaacactgcgccggcaccagatggtaaaactaagggagcacaagctttatccatgagaatctccggaaattttgctgctttctacaactgcaaattctacggtttccaagacacaatctgtgacgatacaggaaaccatttcttcaaggattgttacgttgaaggaacattcgatttcatcttcggaagtggaacctctatgtacttgggaacacaattgcacgtggttggagacggtattagagtgatagcagcgcatgcaggaaagagcgcagaagagaagagtggatactctttcgtgcactgcaaggtgactggaaccggtggaggaatttatttgggaagagcatggatgagccaccctaaggttgtttatgcctacaccgagatgaccagcgttgtcaaccccaccggatggcaagaaaacaagactcccgcacatgacaaaaccgtgttctacggagagtacaagtgttcaggaccaggatcacacaaagccaagagagtaccattcacacaagacattgacgacaaagaagctaaccgtttcctatccctcggctacatccaaggatccaagtggcttctcccaccacccgctttgtaa

SEQ ID NO: 28728 - protein, 361 aa, Arabidopsis thaliana
  misc_feature (1)..(361): Ceres Seq. ID no. 3042232
MGYTNVSILLGLLMVFVTPMVFADDVTPIPEGKPQVAQWFNANVGPLAQRKGLDPALVAAEAAPRIINVNPKGGEFKTLTDAIKSVPAGNTKRVIIKMAPGEYKEKVTIDRNKPFITLMGQPNAMPVITYDGTAAKYGTVDSASLIILSDYFMAVNIVVKNTAPAPDGKTKGAQALSMRISGNFAAFYNCKFYGFQDTICDDTGNHFFKDCYVEGTFDFIFGSGTSMYLGTQLHVVGDGIRVIAAHAGKSAEEKSGYSFVHCKVTGTGGGIYLGRAWMSHPKVVYAYTEMTSVVNPTGWQENKTPAHDKTVFYGEYKCSGPGSHKAKRVPFTQDIDDKEANRFLSLGYIQGSKWLLPPPAL

SEQ ID NO: 28729 - protein, 348 aa, Arabidopsis thaliana
  misc_feature (1)..(348): Ceres Seq. ID no. 3042233
MVFVTPMVFADDVTPIPEGKPQVAQWFNANVGPLAQRKGLDPALVAAEAAPRIINVNPKGGEFKTLTDAIKSVPAGNTKRVIIKMAPGEYKEKVTIDRNKPFITLMGQPNAMPVITYDGTAAKYGTVDSASLIILSDYFMAVNIVVKNTAPAPDGKTKGAQALSMRISGNFAAFYNCKFYGFQDTICDDTGNHFFKDCYVEGTFDFIFGSGTSMYLGTQLHVVGDGIRVIAAHAGKSAEEKSGYSFVHCKVTGTGGGIYLGRAWMSHPKVVYAYTEMTSVVNPTGWQENKTPAHDKTVFYGEYKCSGPGSHKAKRVPFTQDIDDKEANRFLSLGYIQGSKWLLPPPAL

SEQ ID NO: 28730 - protein, 342 aa, Arabidopsis thaliana
  misc_feature (1)..(342): Ceres Seq. ID no. 3042234
MVFADDVTPIPEGKPQVAQWFNANVGPLAQRKGLDPALVAAEAAPRIINVNPKGGEFKTLTDAIKSVPAGNTKRVIIKMAPGEYKEKVTIDRNKPFITLMGQPNAMPVITYDGTAAKYGTVDSASLIILSDYFMAVNIVVKNTAPAPDGKTKGAQALSMRISGNFAAFYNCKFYGFQDTICDDTGNHFFKDCYVEGTFDFIFGSGTSMYLGTQLHVVGDGIRVIAAHAGKSAEEKSGYSFVHCKVTGTGGGIYLGRAWMSHPKVVYAYTEMTSVVNPTGWQENKTPAHDKTVFYGEYKCSGPGSHKAKRVPFTQDIDDKEANRFLSLGYIQGSKWLLPPPAL

SEQ ID NO: 28731 - DNA, 2166 bp, Arabidopsis thaliana
  misc_feature (1)..(2166): Ceres Seq. ID no. 3042945
atgaatcagacgccatggaagttcaaaacttttcgagaccttctactgaaatctgtagcggagagagatctcttcactgggaaatcacttcacgcgctctacgtgaaatccattgtagcttcgtccacttatctctcaaatcacttcgtgaatctctactccaaatgtggtcgcctttcctacgcacgagccgcgttctactccacggaagaacccaatgtcttctcttacaatgtaattgtcaaagcttacgcgaaagattcgaaaatccatattgcacgccagttgttcgacgaaattccccaaccagacactgtctcttacaatactcttatctcggggtacgctgatgctagagaaacttttgccgcaatggttctgtttaagagaatgagaaaattgggatttgaggttgatgggtttacgttatcagggttgatagcagcttgttgtgaccgtgttgatttgataaagcagcttcactgtttctctgtctcgggagggtttgattcgtactcgtctgtgaataacgcgtttgttacgtattatagtaaaggcgggcttttgagagaggcggtatcggtgttttatgggatggatgaattaagagatgaagtttcgtggaattcgatgattgtggcttatgggcagcacaaggaaggagcaaaggcattagctttgtataaagaaatgatctttaaaggattcaagattgatatgtttacattggcaagtgttttaaatgctctcactagcttggatcatttgatcggtggccgtcagttccacggtaagctgatcaaggctggatttcaccagaactcacatgtgggaagtggtttgattgatttttactcaaaatgcgggggttgtgatggtatgtatgatagtgagaaggtatttcaagagattctatcgccggatttggttgtttggaatacgatgatttctggatattcaatgaacgaggaactctctgaagaagctgtgaagagttttagacagatgcaacgtattggacatagacctgatgattgcagttttgtctgtgtcacaagcgcttgctcgaatctctcctctccttctcagtgcaagcagattcatggcttggcgatcaaatctcacatcccttcgaatagaatctctgtgaacaacgcgttgatttcgttgtattacaaaagcggaaacctgcaagacgcaaggtgggtatttgatagaatgccggaacttaatgcggtatctttcaattgtatgatcaaaggttatgcgcagcacgggcatggaacagaagctttgcttttataccaacggatgctggactcgggtattgcgcctaacaagataacctttgtagccgttctttctgcttgtgcgcactgtggtaaggtcgacgagggtcaggagtacttcaacaccatgaaggagacgttcaagatcgaaccagaggctgagcactattcttgtatgattgatcttttaggccgagcagggaagctagaagaggcagagagattcatagatgcaatgccttataagccaggctctgttgcttgggctgctttgctcggggcttgtaggaaacacaaaaacatggctcttgcagagagagcagctaatgagcttatggtgatgcaaccattagctgccacgccatatgtgatgctagcaaacatgtatgcagatgccaggaaatgggaagagatggcctcggtgaggaaatcaatgagggggaaaaggataaggaagaaaccgggatgtagttggatcgaagtgaagaagaaaaagcatgtattcgtcgcagaagattggtctcatccgatgatacgagaagtgaatgaatatctagaggagatgatgaagaagatgaagaaagttgggtatgtgatggataagaaatgggcaatggtaaaagaggatgaagcaggcgaaggggacgaagaaatgcggttaggacatcacagcgagaagctagcggtggcttttgggttgatgtcgactagagatggagaagaattagttgtagttaagaatttgaggatatgtggggattgtcacaatgctatcaagtttatgtctgcggttgcaggtagagagatcattgtaagagataaccttcggtttcattgcttcaaagatggcaagtgttcatgtggggattattggtga

SEQ ID NO: 28732 - protein, 721 aa, Arabidopsis thaliana
  misc_feature (1)..(721): Ceres Seq. ID no. 3042946
MNQTPWKFKTFRDLLLKSVAERDLFTGKSLHALYVKSIVASSTYLSNHFVNLYSKCGRLSYARAAFYSTEEPNVFSYNVIVKAYAKDSKIHIARQLFDEIPQPDTVSYNTLISGYADARETFAAMVLFKRMRKLGFEVDGFTLSGLIAACCDRVDLIKQLHCFSVSGGFDSYSSVNNAFVTYYSKGGLLREAVSVFYGMDELRDEVSWNSMIVAYGQHKEGAKALALYKEMIFKGFKIDMFTLASVLNALTSLDHLIGGRQFHGKLIKAGFHQNSHVGSGLIDFYSKCGGCDGMYDSEKVFQEILSPDLVVWNTMISGYSMNEELSEEAVKSFRQMQRIGHRPDDCSFVCVTSACSNLSSPSQCKQIHGLAIKSHIPSNRISVNNALISLYYKSGNLQDARWVFDRMPELNAVSFNCMIKGYAQHGHGTEALLLYQRMLDSGIAPNKITFVAVLSACAHCGKVDEGQEYFNTMKETFKIEPEAEHYSCMIDLLGRAGKLEEAERFIDAMPYKPGSVAWAALLGACRKHKNMALAERAANELMVMQPLAATPYVMLANMYADARKWEEMASVRKSMRGKRIRKKPGCSWIEVKKKKHVFVAEDWSHPMIREVNEYLEEMMKKMKKVGYVMDKKWAMVKEDEAGEGDEEMRLGHHSEKLAVAFGLMSTRDGEELVVVKNLRICGDCHNAIKFMSAVAGREIIVRDNLRFHCFKDGKCSCGDYW

SEQ ID NO: 28733 - protein, 597 aa, Arabidopsis thaliana
  misc_feature (1)..(597): Ceres Seq. ID no. 3042947
MVLFKRMRKLGFEVDGFTLSGLIAACCDRVDLIKQLHCFSVSGGFDSYSSVNNAFVTYYSKGGLLREAVSVFYGMDELRDEVSWNSMIVAYGQHKEGAKALALYKEMIFKGFKIDMFTLASVLNALTSLDHLIGGRQFHGKLIKAGFHQNSHVGSGLIDFYSKCGGCDGMYDSEKVFQEILSPDLVVWNTMISGYSMNEELSEEAVKSFRQMQRIGHRPDDCSFVCVTSACSNLSSPSQCKQIHGLAIKSHIPSNRISVNNALISLYYKSGNLQDARWVFDRMPELNAVSFNCMIKGYAQHGHGTEALLLYQRMLDSGIAPNKITFVAVLSACAHCGKVDEGQEYFNTMKETFKIEPEAEHYSCMIDLLGRAGKLEEAERFIDAMPYKPGSVAWAALLGACRKHKNMALAERAANELMVMQPLAATPYVMLANMYADARKWEEMASVRKSMRGKRIRKKPGCSWIEVKKKKHVFVAEDWSHPMIREVNEYLEEMMKKMKKVGYVMDKKWAMVKEDEAGEGDEEMRLGHHSEKLAVAFGLMSTRDGEELVVVKNLRICGDCHNAIKFMSAVAGREIIVRDNLRFHCFKDGKCSCGDYW

SEQ ID NO: 28734 - protein, 591 aa, Arabidopsis thaliana
  misc_feature (1)..(591): Ceres Seq. ID no. 3042948
MRKLGFEVDGFTLSGLIAACCDRVDLIKQLHCFSVSGGFDSYSSVNNAFVTYYSKGGLLREAVSVFYGMDELRDEVSWNSMIVAYGQHKEGAKALALYKEMIFKGFKIDMFTLASVLNALTSLDHLIGGRQFHGKLIKAGFHQNSHVGSGLIDFYSKCGGCDGMYDSEKVFQEILSPDLVVWNTMISGYSMNEELSEEAVKSFRQMQRIGHRPDDCSFVCVTSACSNLSSPSQCKQIHGLAIKSHIPSNRISVNNALISLYYKSGNLQDARWVFDRMPELNAVSFNCMIKGYAQHGHGTEALLLYQRMLDSGIAPNKITFVAVLSACAHCGKVDEGQEYFNTMKETFKIEPEAEHYSCMIDLLGRAGKLEEAERFIDAMPYKPGSVAWAALLGACRKHKNMALAERAANELMVMQPLAATPYVMLANMYADARKWEEMASVRKSMRGKRIRKKPGCSWIEVKKKKHVFVAEDWSHPMIREVNEYLEEMMKKMKKVGYVMDKKWAMVKEDEAGEGDEEMRLGHHSEKLAVAFGLMSTRDGEELVVVKNLRICGDCHNAIKFMSAVAGREIIVRDNLRFHCFKDGKCSCGDYW

SEQ ID NO: 28735 - DNA, 933 bp, Arabidopsis thaliana
  misc_feature (1)..(933): Ceres Seq. ID no. 3043944
atgtctcaaagcggcggtgacttcaacctctccgacgagattctcgccgtgattcccaccgacccttatgatcaactcgacctcgccaggaagatcacttccatggctatcgcttcaagggtttcgaatctggaatctcaagtctccggcttgagacagaagcttcttgagaaggatcggcttgttcatgaacttgaagacagagtctcttcctttgaaagactttaccatgaagctgactcgagtttgaagaatgttgtcgatgaaaatatgaaactgactcaagaacgagattcactggcaatcactgcgaagaaactcggtcgtgattatgcaaagttggaagcattcaagagacaattgatgcagtcattgaatgatgataatccatctcaaactgagactgctgatgtcagaatggttcctcgaggcaaagatgagaattcaaatggatcctactcaaacaatgaaggtttaagtgaagcgaggcaaagacagtctatgactccgcagttctctcccgcgtttacaccaagcggaacaccaaagatcttatctactgctgcttctccgagaagctactctgctgcttcatcgccaaagctattctctggagctgcatctccaacatcttcacattatgatatacgtatgtggtcttcaactagccagcaatcttcagtagcaaactctcctccacgctcgcattctgtttcagctcggcatccgcggattgatgggaaagagttctttagacaagccaggagccgtttgtcttacgaacagttcagtgcattcctggctaacatcaaggaacttaacgcccggaagcagggccgcgaggaaacattacagaaagcagaggaaatatttggaaaggaaaacaatgatctttacatatcctttaagggacttctcacaagtgggcgttga

SEQ ID NO: 28736 - protein, 310 aa, Arabidopsis thaliana
  misc_feature (1)..(310): Ceres Seq. ID no. 3043945
MSQSGGDFNLSDEILAVIPTDPYDQLDLARKITSMAIASRVSNLESQVSGLRQKLLEKDRLVHELEDRVSSFERLYHEADSSLKNVVDENMKLTQERDSLAITAKKLGRDYAKLEAFKRQLMQSLNDDNPSQTETADVRMVPRGKDENSNGSYSNNEGLSEARQRQSMTPQFSPAFTPSGTPKILSTAASPRSYSAASSPKLFSGAASPTSSHYDIRMWSSTSQQSSVANSPPRSHSVSARHPRIDGKEFFRQARSRLSYEQFSAFLANIKELNARKQGREETLQKAEEIFGKENNDLYISFKGLLTSGR

SEQ ID NO: 28737 - protein, 276 aa, Arabidopsis thaliana
  misc_feature (1)..(276): Ceres Seq. ID no. 3043946
MAIASRVSNLESQVSGLRQKLLEKDRLVHELEDRVSSFERLYHEADSSLKNVVDENMKLTQERDSLAITAKKLGRDYAKLEAFKRQLMQSLNDDNPSQTETADVRMVPRGKDENSNGSYSNNEGLSEARQRQSMTPQFSPAFTPSGTPKILSTAASPRSYSAASSPKLFSGAASPTSSHYDIRMWSSTSQQSSVANSPPRSHSVSARHPRIDGKEFFRQARSRLSYEQFSAFLANIKELNARKQGREETLQKAEEIFGKENNDLYISFKGLLTSGR

SEQ ID NO: 28738 - protein, 220 aa, Arabidopsis thaliana
  misc_feature (1)..(220): Ceres Seq. ID no. 3043947
MKLTQERDSLAITAKKLGRDYAKLEAFKRQLMQSLNDDNPSQTETADVRMVPRGKDENSNGSYSNNEGLSEARQRQSMTPQFSPAFTPSGTPKILSTAASPRSYSAASSPKLFSGAASPTSSHYDIRMWSSTSQQSSVANSPPRSHSVSARHPRIDGKEFFRQARSRLSYEQFSAFLANIKELNARKQGREETLQKAEEIFGKENNDLYISFKGLLTSGR

SEQ ID NO: 28739 - DNA, 1134 bp, Arabidopsis thaliana
  misc_feature (1)..(1134): Ceres Seq. ID no. 3045591
atgaagagcacgaacgacgaatctccttccttgggatacgacttcgccggagttagcatcaaggacggaaaatctaagccgccggcgccggtaatatgttacgatggcttgttcggagggagagacgtgattagaatcgtgctattggtcacgaccgtgacactttcttgtctattattctacaaatctgcaaacaatccactcaatatggtgttttctccatggaagaccgattgttatgcttccaaacttacaaacgagtcttcctcaaaaacggaaccaaagaaggagccggtttcagaactagagagagtattgatgaatgcggctatggaagataacacggtgatcataacggcgttaaaccaagcatgggccgaaccaaactctacattcgatgtgtttcgagagagttttaaagtcggaatagaaacggagaggttattgaagcatgtgatcgcggtttgcttggatatcaaggcatatgatcagtgcctaaaggttcatcctcattgctatttgatcaacgccacagattcagaccaactctcaggtccgaatcggtttatgacgcctggttacttgaaacttatttggcggcgaatggatcttcttaggcaagttattggtttagggtacaacttcatattcacggatgcagatatattatggcttcgagacccatttcctcgtttttttccggatgctgattttcaaataacatgcgatgattacaatggaagaccatcggacaaaaagaatcacgtgaactccggatttacatacgtcaaggcaaacaacaaaacttcaaaattttacaaatattggattagatcgagtcggaaatttcctggaaaacacgatcaagatgtgttcaacttcataaaaaacgatcttcacgtcgagaaacttgggataaagatgaggtttttcgataccgtttactttggagggttttgtcagccgagccgagacatcaatgtggtcaacacaatgcatgctaattgttgtattggcttggacaacaaagtgaataatcttaaggcagctctcgaagattggaaacgatatgtgtcactaaacacgaccgtgtccgagactaaatggaatattccgcctaggtgtggttattaa

SEQ ID NO: 28740 - protein, 377 aa, Arabidopsis thaliana
  misc_feature (1)..(377): Ceres Seq. ID no. 3045592
MKSTNDESPSLGYDFAGVSIKDGKSKPPAPVICYDGLFGGRDVIRIVLLVTTVTLSCLLFYKSANNPLNMVFSPWKTDCYASKLTNESSSKTEPKKEPVSELERVLMNAAMEDNTVIITALNQAWAEPNSTFDVFRESFKVGIETERLLKHVIAVCLDIKAYDQCLKVHPHCYLINATDSDQLSGPNRFMTPGYLKLIWRRMDLLRQVIGLGYNFIFTDADILWLRDPFPRFFPDADFQITCDDYNGRPSDKKNHVNSGFTYVKANNKTSKFYKYWIRSSRKFPGKHDQDVFNFIKNDLHVEKLGIKMRFFDTVYFGGFCQPSRDINVVNTMHANCCIGLDNKVNNLKAALEDWKRYVSLNTTVSETKWNIPPRCGY

SEQ ID NO: 28741 - protein, 308 aa, Arabidopsis thaliana
  misc_feature (1)..(308): Ceres Seq. ID no. 3045593
MVFSPWKTDCYASKLTNESSSKTEPKKEPVSELERVLMNAAMEDNTVIITALNQAWAEPNSTFDVFRESFKVGIETERLLKHVIAVCLDIKAYDQCLKVHPHCYLINATDSDQLSGPNRFMTPGYLKLIWRRMDLLRQVIGLGYNFIFTDADILWLRDPFPRFFPDADFQITCDDYNGRPSDKKNHVNSGFTYVKANNKTSKFYKYWIRSSRKFPGKHDQDVFNFIKNDLHVEKLGIKMRFFDTVYFGGFCQPSRDINVVNTMHANCCIGLDNKVNNLKAALEDWKRYVSLNTTVSETKWNIPPRCGY

SEQ ID NO: 28742 - protein, 271 aa, Arabidopsis thaliana
  misc_feature (1)..(271): Ceres Seq. ID no. 3045594
MNAAMEDNTVIITALNQAWAEPNSTFDVFRESFKVGIETERLLKHVIAVCLDIKAYDQCLKVHPHCYLINATDSDQLSGPNRFMTPGYLKLIWRRMDLLRQVIGLGYNFIFTDADILWLRDPFPRFFPDADFQITCDDYNGRPSDKKNHVNSGFTYVKANNKTSKFYKYWIRSSRKFPGKHDQDVFNFIKNDLHVEKLGIKMRFFDTVYFGGFCQPSRDINVVNTMHANCCIGLDNKVNNLKAALEDWKRYVSLNTTVSETKWNIPPRCGY

SEQ ID NO: 28743 - DNA, 2292 bp, Arabidopsis thaliana
  misc_feature (1)..(2292): Ceres Seq. ID no. 3047980
atgtggctaccaaaagcaaatggggcaaagaaagaaacaggaagtggttcagtagcagttgcaatagacaaagacaaaggaagccaacatgctcttaaatggacaatcgacaatcttgcttctcgtggccaaaccatttctcttattcatgtcctctgcagatctcattcttcttcagatcttgaagaaggaacgccacaacagaaacagcaaatggagaagatagctaaagatctctttgtatccttccactgctattgttcccgtaaagagataaattgtcgagacattttgctggaagacgcagacaaagttcgagccattaccgaatatgtttcatcttctgcaattgagaacttagtcgttggatctgcatcacgtaatggcttcatgagaagattcaagacggatttgccaacaacagtgtcaaaatcagctccagatttctgcaatgtttatgtcatttcaaaaggcaaaattgcttcagtacgaaatgcatcacgtcctgctccttaccaaaattcgatgcagcaatgtgaaattgacaatcatcacccacatactcctgacaaagcaccaaagtaccatgaccatcccaattctgcaggtagtacaccatctagaccgcgcaaatcagttgaagcagataggtataggaattggaagcttgttgtgatgtctttaagatcgccgttggtgaaaaggaagccatatggggacttctatgattcagatagtgacctttcgtttatcagtccgtcttctcatcgtgactctgacatttccttcatcagctcaggaagaccaagcgttgagcggtcttcctttagccttgattttcctgaatctgcaaggacttcaagaatgtcaacgagctcagagcaaagcattggctcaaatcgtttgggaattaagttcagtgatcctgatttccttaacgaatcctctacattctctgaagagagtggtagaacatcctcctattcatctcagagcttggatgatgttgaagctgaaatgaagaggctgcgtctagagctgaaacaaaccatggatatgtatagcacagcttgtaaagaagctttaagcgctagacaacaggcaacggagctgcaaaagctgagaaccgaagaggagagacggttggaagaagcaaaaagttcagaggaagcagcaatgtcaatagtggaaaaggagagagctaaagccaaagcagcgttggaagctgctgaagctgcaaagagattagcagaagtggaatctaaaagaaggttgactgcagagatgaagacaatgaaggaatcagattcattctctcgcggatttgttcggtataggaaatacacggttgacgaaatcgaagaagctacttcaaattttgcagagtctcaaaaggtaggagaaggaggctatggtcctgtctttagaggctttcttgatcacacaagtgttgctgttaaagttctacgcccagacgcagctcaagggagatcacagtttcagaaagaggttgaagtgttaagctgcataaggcatccaaacatggtgcttcttcttggagcttgtccagaatttgggattcttgtttatgaatacatggccaaaggaagtttagaagaccggcttttcatgcgaggaaacacaccgccgattacctggcagctacgtttcagaatcgctgctgagatcgccacgggactcctcttcctccaccagaccaaacctgaaccaattgtccacagagaccttaaaccaggaaatgttctgctcgattacaactatgtgagcaagatcagtgatgtcgggctagcgagattagtccctgcagtagcggaaaacgttacacagtacagagtcacttcagctgcaggaactttctgttacattgatcctgagtaccaacaaacaggaatgttgggtgtgaagtcagatgtttattctcttggaatcatgcttttgcagatcttaaccgcaaaacagccaatgggtttggcttattacgttgaacaagcgatcgaagaagggactcttaaggatatgcttgatccagcagtaccggactggcctatagaagaagctctatctttagcaaagctttcgcttcaatgcgcggaactaagaagaaaagatagacctgacctcgggaaagagatattgcctgagctcaatcggttaagagagataggtgaagagagtttagagagtgtgttttatgcaggaaatcaaggaaagtctccaaacactagccaagtctcgattccggaatctccagctgcagaatctcaatcctag

SEQ ID NO: 28744 - protein, 763 aa, Arabidopsis thaliana
  misc_feature (1)..(763): Ceres Seq. ID no. 3047981
MWLPKANGAKKETGSGSVAVAIDKDKGSQHALKWTIDNLASRGQTISLIHVLCRSHSSSDLEEGTPQQKQQMEKIAKDLFVSFHCYCSRKEINCRDILLEDADKVRAITEYVSSSAIENLVVGSASRNGFMRRFKTDLPTTVSKSAPDFCNVYVISKGKIASVRNASRPAPYQNSMQQCEIDNHHPHTPDKAPKYHDHPNSAGSTPSRPRKSVEADRYRNWKLVVMSLRSPLVKRKPYGDFYDSDSDLSFISPSSHRDSDISFISSGRPSVERSSFSLDFPESARTSRMSTSSEQSIGSNRLGIKFSDPDFLNESSTFSEESGRTSSYSSQSLDDVEAEMKRLRLELKQTMDMYSTACKEALSARQQATELQKLRTEEERRLEEAKSSEEAAMSIVEKERAKAKAALEAAEAAKRLAEVESKRRLTAEMKTMKESDSFSRGFVRYRKYTVDEIEEATSNFAESQKVGEGGYGPVFRGFLDHTSVAVKVLRPDAAQGRSQFQKEVEVLSCIRHPNMVLLLGACPEFGILVYEYMAKGSLEDRLFMRGNTPPITWQLRFRIAAEIATGLLFLHQTKPEPIVHRDLKPGNVLLDYNYVSKISDVGLARLVPAVAENVTQYRVTSAAGTFCYIDPEYQQTGMLGVKSDVYSLGIMLLQILTAKQPMGLAYYVEQAIEEGTLKDMLDPAVPDWPIEEALSLAKLSLQCAELRRKDRPDLGKEILPELNRLREIGEESLESVFYAGNQGKSPNTSQVSIPESPAAESQS

SEQ ID NO: 28745 - protein, 692 aa, Arabidopsis thaliana
  misc_feature (1)..(692): Ceres Seq. ID no. 3047982
MEKIAKDLFVSFHCYCSRKEINCRDILLEDADKVRAITEYVSSSAIENLVVGSASRNGFMRRFKTDLPTTVSKSAPDFCNVYVISKGKIASVRNASRPAPYQNSMQQCEIDNHHPHTPDKAPKYHDHPNSAGSTPSRPRKSVEADRYRNWKLVVMSLRSPLVKRKPYGDFYDSDSDLSFISPSSHRDSDISFISSGRPSVERSSFSLDFPESARTSRMSTSSEQSIGSNRLGIKFSDPDFLNESSTFSEESGRTSSYSSQSLDDVEAEMKRLRLELKQTMDMYSTACKEALSARQQATELQKLRTEEERRLEEAKSSEEAAMSIVEKERAKAKAALEAAEAAKRLAEVESKRRLTAEMKTMKESDSFSRGFVRYRKYTVDEIEEATSNFAESQKVGEGGYGPVFRGFLDHTSVAVKVLRPDAAQGRSQFQKEVEVLSCIRHPNMVLLLGACPEFGILVYEYMAKGSLEDRLFMRGNTPPITWQLRFRIAAEIATGLLFLHQTKPEPIVHRDLKPGNVLLDYNYVSKISDVGLARLVPAVAENVTQYRVTSAAGTFCYIDPEYQQTGMLGVKSDVYSLGIMLLQILTAKQPMGLAYYVEQAIEEGTLKDMLDPAVPDWPIEEALSLAKLSLQCAELRRKDRPDLGKEILPELNRLREIGEESLESVFYAGNQGKSPNTSQVSIPESPAAESQS

SEQ ID NO: 28746 - protein, 633 aa, Arabidopsis thaliana
  misc_feature (1)..(633): Ceres Seq. ID no. 3047983
MRRFKTDLPTTVSKSAPDFCNVYVISKGKIASVRNASRPAPYQNSMQQCEIDNHHPHTPDKAPKYHDHPNSAGSTPSRPRKSVEADRYRNWKLVVMSLRSPLVKRKPYGDFYDSDSDLSFISPSSHRDSDISFISSGRPSVERSSFSLDFPESARTSRMSTSSEQSIGSNRLGIKFSDPDFLNESSTFSEESGRTSSYSSQSLDDVEAEMKRLRLELKQTMDMYSTACKEALSARQQATELQKLRTEEERRLEEAKSSEEAAMSIVEKERAKAKAALEAAEAAKRLAEVESKRRLTAEMKTMKESDSFSRGFVRYRKYTVDEIEEATSNFAESQKVGEGGYGPVFRGFLDHTSVAVKVLRPDAAQGRSQFQKEVEVLSCIRHPNMVLLLGACPEFGILVYEYMAKGSLEDRLFMRGNTPPITWQLRFRIAAEIATGLLFLHQTKPEPIVHRDLKPGNVLLDYNYVSKISDVGLARLVPAVAENVTQYRVTSAAGTFCYIDPEYQQTGMLGVKSDVYSLGIMLLQILTAKQPMGLAYYVEQAIEEGTLKDMLDPAVPDWPIEEALSLAKLSLQCAELRRKDRPDLGKEILPELNRLREIGEESLESVFYAGNQGKSPNTSQVSIPESPAAESQS

SEQ ID NO: 28747 - DNA, 1107 bp, Arabidopsis thaliana
  misc_feature (1)..(1107): Ceres Seq. ID no. 3048784
atggcggatgttaaggactcagtgattaccaagtacggaatcgtagggattggtatgatgggaagagaacatctcatcaatcttcaccatctccgtgaccaaggcctcgccgtcgtttgcatcgccgatcctcaccctccttcacagctcctggccattgaactcgctcaatcttttggatgggagcttaaggttttctcaggacacgaggagttgctcaagagtgagctgtgtgacgttattgttgtctcttctccaaatatgactcatcatcagattcttatggacattatcaattattcaaaaccgcatcatgttcttgttgagaagcctttatgcaccacagttgcagattgcaaacaggttttggaggctgcaaagaaaaggtcagatatggtggtgcaagttgggttggagtacagatacatgccgccagttgctaagctaatagaacaagtaaaaggcagagactttggtaatgtcaagatggtagcaatccgagaacatagattccctttcttggttaaggtgaacaactggaatagattcaatgtgaacactggagggaccttagtggagaaatgctgccacttctttgatctaatgaggctctttgccggtgcaaatcctgtctgtgtgatggcttctggaggcatggatgtgaaccacaaggatgaagtttatggtggaaaggtgcctgatataattgataacgcatatgttattattgagtttgacaatggatgtcgtgggatgctcgatctttgcatgtttgctgaaggaagcaaaaacgagcaagaaatttctgttactggtgacattggaaagggggaggcacttgttccagagggtatagttcgatctggcagtcgtattggaggaagagaacacgttcaaacaataaaagcagaagatgaaagaataaaatatgaagggttgcatcacgggtcaagttacttggaacacctcaccttcttatcagcaatcagaggtgaaggaatagcagctgttgatttggaagacggattgatggctgttgccatgggagttgctgcacagctctccattcaggagcgccgctatgtaaccattgacgaggtcttgtga

SEQ ID NO: 28748 - protein, 368 aa, Arabidopsis thaliana
  misc_feature (1)..(368): Ceres Seq. ID no. 3048785
MADVKDSVITKYGIVGIGMMGREHLINLHHLRDQGLAVVCIADPHPPSQLLAIELAQSFGWELKVFSGHEELLKSELCDVIVVSSPNMTHHQILMDIINYSKPHHVLVEKPLCTTVADCKQVLEAAKKRSDMVVQVGLEYRYMPPVAKLIEQVKGRDFGNVKMVAIREHRFPFLVKVNNWNRFNVNTGGTLVEKCCHFFDLMRLFAGANPVCVMASGGMDVNHKDEVYGGKVPDIIDNAYVIIEFDNGCRGMLDLCMFAEGSKNEQEISVTGDIGKGEALVPEGIVRSGSRIGGREHVQTIKAEDERIKYEGLHHGSSYLEHLTFLSAIRGEGIAAVDLEDGLMAVAMGVAAQLSIQERRYVTIDEVL

SEQ ID NO: 28749 - protein, 350 aa, Arabidopsis thaliana
  misc_feature (1)..(350): Ceres Seq. ID no. 3048786
MMGREHLINLHHLRDQGLAVVCIADPHPPSQLLAIELAQSFGWELKVFSGHEELLKSELCDVIVVSSPNMTHHQILMDIINYSKPHHVLVEKPLCTTVADCKQVLEAAKKRSDMVVQVGLEYRYMPPVAKLIEQVKGRDFGNVKMVAIREHRFPFLVKVNNWNRFNVNTGGTLVEKCCHFFDLMRLFAGANPVCVMASGGMDVNHKDEVYGGKVPDIIDNAYVIIEFDNGCRGMLDLCMFAEGSKNEQEISVTGDIGKGEALVPEGIVRSGSRIGGREHVQTIKAEDERIKYEGLHHGSSYLEHLTFLSAIRGEGIAAVDLEDGLMAVAMGVAAQLSIQERRYVTIDEVL

SEQ ID NO: 28750 - protein, 349 aa, Arabidopsis thaliana
  misc_feature (1)..(349): Ceres Seq. ID no. 3048787
MGREHLINLHHLRDQGLAVVCIADPHPPSQLLAIELAQSFGWELKVFSGHEELLKSELCDVIVVSSPNMTHHQILMDIINYSKPHHVLVEKPLCTTVADCKQVLEAAKKRSDMVVQVGLEYRYMPPVAKLIEQVKGRDFGNVKMVAIREHRFPFLVKVNNWNRFNVNTGGTLVEKCCHFFDLMRLFAGANPVCVMASGGMDVNHKDEVYGGKVPDIIDNAYVIIEFDNGCRGMLDLCMFAEGSKNEQEISVTGDIGKGEALVPEGIVRSGSRIGGREHVQTIKAEDERIKYEGLHHGSSYLEHLTFLSAIRGEGIAAVDLEDGLMAVAMGVAAQLSIQERRYVTIDEVL

SEQ ID NO: 28751 - DNA, 1344 bp, Arabidopsis thaliana
  misc_feature (1)..(1344): Ceres Seq. ID no. 3049085
atggagaaaagagtagagaagagaaggatagtgttggttccacttccattactaggacatttcactccgatgatgcaactcggccaagcccttatcttgaagggattctcaattatagttcctcagggagaattcaatcgagtaaactcttcgcagaagttccctggttttcaatttatcaccataccagattctgaactcgaggcaaatggaccagtcgggtctctaacacagctcaacaaaattatggaggcaagcttcaaggactgtataaggcagttgttgaaacaacaaggcaatgatattgcatgtatcatctacgacgagttcatgtatttttgtggagccgtagctgaggagttgaagcttcccaatttcatcttcagtactcaaactgctacacataaagtttgctgcaatgttttaagcaaacttaatgccaagaagtacttgatcgacatggaagagcatgacgtgcaaaacaaggtagtggaaaatatgcatccattaagatacaaagacttaccaactgcaacatttggagaactagaaccttttttggagctctgtagagatgtagtcaacaaaagaacagcctctgctgttatcatcaacaccgtgacctgtctagagagctcgtctctcacaaggctgcaacaagaactccaaattccggtgtatccattaggccctcttcacattacagattcatcgacaggatttactgtgctgcaagaggataggagctgcgttgaatggctgaacaagcagaaaccaaggtctgtcatatacataagtttaggaagcatggttctcatggaaaccaaggagatgttagagatggcttggggaatgttgaatagcaaccaacctttcttatgggtcatccgacctggatctgtctcaggctccgaggggatagagtcattgccagaggaagtcagtaagatggttttagagaaaggatacattgtgaaatgggcaccacaaatagaagtactaggacatccctcagtgggaggcttttggagccactgtggatggaactcaacactcgagagcattgtggaaggagttccaatgatttgcaggccttatcaaggcgagcagatgttaaatgcaatatatctagagagtgtatggagaatagggattcaggtaggaggtgaactggaaagaggagccgtcgagagagctgtgaagaggttgattgtggataaagaaggtgcaagcatgagggagagaacccttgttttaaaagagaagctcaaagcctctattagaggtggaggctcctcatgcaatgcattagatgagcttgtcaagcacttgaagacagagtga

SEQ ID NO: 28752 - protein, 447 aa, Arabidopsis thaliana
  misc_feature (1)..(447): Ceres Seq. ID no. 3049086
MEKRVEKRRIVLVPLPLLGHFTPMMQLGQALILKGFSIIVPQGEFNRVNSSQKFPGFQFITIPDSELEANGPVGSLTQLNKIMEASFKDCIRQLLKQQGNDIACIIYDEFMYFCGAVAEELKLPNFIFSTQTATHKVCCNVLSKLNAKKYLIDMEEHDVQNKVVENMHPLRYKDLPTATFGELEPFLELCRDVVNKRTASAVIINTVTCLESSSLTRLQQELQIPVYPLGPLHITDSSTGFTVLQEDRSCVEWLNKQKPRSVIYISLGSMVLMETKEMLEMAWGMLNSNQPFLWVIRPGSVSGSEGIESLPEEVSKMVLEKGYIVKWAPQIEVLGHPSVGGFWSHCGWNSTLESIVEGVPMICRPYQGEQMLNAIYLESVWRIGIQVGGELERGAVERAVKRLIVDKEGASMRERTLVLKEKLKASIRGGGSSCNALDELVKHLKTE

SEQ ID NO: 28753 - protein, 424 aa, Arabidopsis thaliana
  misc_feature (1)..(424): Ceres Seq. ID no. 3049087
MMQLGQALILKGFSIIVPQGEFNRVNSSQKFPGFQFITIPDSELEANGPVGSLTQLNKIMEASFKDCIRQLLKQQGNDIACIIYDEFMYFCGAVAEELKLPNFIFSTQTATHKVCCNVLSKLNAKKYLIDMEEHDVQNKVVENMHPLRYKDLPTATFGELEPFLELCRDVVNKRTASAVIINTVTCLESSSLTRLQQELQIPVYPLGPLHITDSSTGFTVLQEDRSCVEWLNKQKPRSVIYISLGSMVLMETKEMLEMAWGMLNSNQPFLWVIRPGSVSGSEGIESLPEEVSKMVLEKGYIVKWAPQIEVLGHPSVGGFWSHCGWNSTLESIVEGVPMICRPYQGEQMLNAIYLESVWRIGIQVGGELERGAVERAVKRLIVDKEGASMRERTLVLKEKLKASIRGGGSSCNALDELVKHLKTE

SEQ ID NO: 28754 - protein, 423 aa, Arabidopsis thaliana
  misc_feature (1)..(423): Ceres Seq. ID no. 3049088
MQLGQALILKGFSIIVPQGEFNRVNSSQKFPGFQFITIPDSELEANGPVGSLTQLNKIMEASFKDCIRQLLKQQGNDIACIIYDEFMYFCGAVAEELKLPNFIFSTQTATHKVCCNVLSKLNAKKYLIDMEEHDVQNKVVENMHPLRYKDLPTATFGELEPFLELCRDVVNKRTASAVIINTVTCLESSSLTRLQQELQIPVYPLGPLHITDSSTGFTVLQEDRSCVEWLNKQKPRSVIYISLGSMVLMETKEMLEMAWGMLNSNQPFLWVIRPGSVSGSEGIESLPEEVSKMVLEKGYIVKWAPQIEVLGHPSVGGFWSHCGWNSTLESIVEGVPMICRPYQGEQMLNAIYLESVWRIGIQVGGELERGAVERAVKRLIVDKEGASMRERTLVLKEKLKASIRGGGSSCNALDELVKHLKTE

SEQ ID NO: 28755 - DNA, 1161 bp, Arabidopsis thaliana
  misc_feature (1)..(1161): Ceres Seq. ID no. 3049249
atgaagaagcaaaagattacaacctttgttaaagaactcaacttacggatgaattcgaagaaagaaccgataagtctccgatacattcacatccttggcaccgttgtcttcttctcctctgtctcctctctcgtcatcctccttgctttttaccttaaccaacgcctccaaacatcactcttcctcgtcgaagattatcacactctctcctcaaatcctctcacttctccttccctctctcctcctccttctccttctcctcgcagctctggtagtaatattgcagacgaagagctgatgtggcgagcagcgatggccccacgcagccccatgaagaatgagacccatccaaaggttgcgttcatgtttctaacgaggtggaatttgccgttgtcccctctttgggaaatgttcttcaaaggtcatgaagggttttattccatctacgttcatacctcgccggagttcactcaagagccgccggaatcttcagtattttacaagaaacggataccaagcaaggccgttgaatggggaaaatgttcgatgatggatgcagagaagcgtcttatatctcatgccctactagaaccttccaacgcacgcttcgtcctcctctccgagacttgtatccctctcttcaacttcaccacaatctacacttacctcacgcgctccactcgctctttcctcggctcattcgacgacccaaggcccatgggccgaggccgttacacccctaaaatgctcccacacgtgtcgctctctgactggcggaaaggaaaccaatggttcgaaatctcacgtagagtcgccgccgagatcgtctctgatcgccggtactacgccgtctttaaggatcactgccgaccgccgtgttatatcgacgagcattatcttccgacgttagttaacaagatttgtccggagatgaattcgaaccggacagtgacgtgggttgattggtcaagaggtgggtcccatccagcgaggtttgtgaggaaagatattcgggtcgggttcttggatcggatccggttcggttcgaattgtagctacgaaggtgaggtgacgaatgtgtgttttcttttcgggaggaagtttcatgtgagcaccctcgagcctctcatgaagattgctccatatttgtttggaatttaa

SEQ ID NO: 28756 - protein, 386 aa, Arabidopsis thaliana
  misc_feature (1)..(386): Ceres Seq. ID no. 3049250
MKKQKITTFVKELNLRMNSKKEPISLRYIHILGTVVFFSSVSSLVILLAFYLNQRLQTSLFLVEDYHTLSSNPLTSPSLSPPPSPSPRSSGSNIADEELMWRAAMAPRSPMKNETHPKVAFMFLTRWNLPLSPLWEMFFKGHEGFYSIYVHTSPEFTQEPPESSVFYKKRIPSKAVEWGKCSMMDAEKRLISHALLEPSNARFVLLSETCIPLFNFTTIYTYLTRSTRSFLGSFDDPRPMGRGRYTPKMLPHVSLSDWRKGNQWFEISRRVAAEIVSDRRYYAVFKDHCRPPCYIDEHYLPTLVNKICPEMNSNRTVTWVDWSRGGSHPARFVRKDIRVGFLDRIRFGSNCSYEGEVTNVCFLFGRKFHVSTLEPLMKIAPYLFGI

SEQ ID NO: 28757 - protein, 370 aa, Arabidopsis thaliana
  misc_feature (1)..(370): Ceres Seq. ID no. 3049251
MNSKKEPISLRYIHILGTVVFFSSVSSLVILLAFYLNQRLQTSLFLVEDYHTLSSNPLTSPSLSPPPSPSPRSSGSNIADEELMWRAAMAPRSPMKNETHPKVAFMFLTRWNLPLSPLWEMFFKGHEGFYSIYVHTSPEFTQEPPESSVFYKKRIPSKAVEWGKCSMMDAEKRLISHALLEPSNARFVLLSETCIPLFNFTTIYTYLTRSTRSFLGSFDDPRPMGRGRYTPKMLPHVSLSDWRKGNQWFEISRRVAAEIVSDRRYYAVFKDHCRPPCYIDEHYLPTLVNKICPEMNSNRTVTWVDWSRGGSHPARFVRKDIRVGFLDRIRFGSNCSYEGEVTNVCFLFGRKFHVSTLEPLMKIAPYLFGI

SEQ ID NO: 28758 - protein, 287 aa, Arabidopsis thaliana
  misc_feature (1)..(287): Ceres Seq. ID no. 3049252
MWRAAMAPRSPMKNETHPKVAFMFLTRWNLPLSPLWEMFFKGHEGFYSIYVHTSPEFTQEPPESSVFYKKRIPSKAVEWGKCSMMDAEKRLISHALLEPSNARFVLLSETCIPLFNFTTIYTYLTRSTRSFLGSFDDPRPMGRGRYTPKMLPHVSLSDWRKGNQWFEISRRVAAEIVSDRRYYAVFKDHCRPPCYIDEHYLPTLVNKICPEMNSNRTVTWVDWSRGGSHPARFVRKDIRVGFLDRIRFGSNCSYEGEVTNVCFLFGRKFHVSTLEPLMKIAPYLFGI

SEQ ID NO: 28759 - DNA, 1682 bp, Arabidopsis thaliana
  misc_feature (1)..(1682): Ceres Seq. ID no. 3051014
aatgattcacacaaactctctatataaagccattacttaataccacacaaattacaaaaaaaaaaagaaaaaaggagataataatcacaaactacaaaagtagaaagaagaaaaaagaacaaagtatcagttcttgaatatttgcatcaatggaggaatccaaaacacctcacgttgcgatcataccaagtccgggaatgggtcatctcataccactcgtcgagtttgctaaacgactcgtccatcttcacggcctcaccgttaccttcgtcatcgccggcgaaggtccaccatcaaaagctcagagaaccgtcctcgactctctcccttcttcaatctcctccgtctttctccctcctgttgatctcaccgatctctcttcgtccactcgcatcgaatctcggatctccctcaccgtgactcgttcaaacccggagctccggaaagtcttcgactcgttcgtggagggaggtcgtttgccaacggcgctcgtcgtcgatctcttcggtacggacgctttcgacgtggccgtagaatttcacgtgccaccgtatattttctacccaacaacggccaacgtcttgtcgttttttctccatttgcctaaactagacgaaacggtgtcgtgtgagttcagggaattaaccgaaccgcttatgcttcctggatgtgtaccggttgccgggaaagatttccttgacccggcccaagaccggaaagacgatgcatacaaatggcttctccataacaccaagaggtacaaagaagccgaaggtattcttgtgaataccttctttgagctagagccaaatgctataaaggccttgcaagaaccgggtcttgataaaccaccggtttatccggttggaccgttggttaacattggtaagcaagaggctaagcaaaccgaagagtctgaatgtttaaagtggttggataaccagccgctcggttcggttttatatgtgtcctttggtagtggcggtaccctcacatgtgagcagctcaatgagcttgctcttggtcttgcagatagtgagcaacggtttctttgggtcatacgaagtcctagtgggatcgctaattcgtcgtattttgattcacatagccaaacagatccattgacatttttaccaccgggatttttagagcggactaaaaaaagaggttttgtgatccctttttgggctccacaagcccaagtcttggcgcatccatccacgggaggatttttaactcattgtggatggaattcgactctagagagtgtagtaagcggtattccacttatagcatggccattatacgcagaacagaagatgaatgcggttttgttgagtgaagatattcgtgcggcacttaggccgcgtgccggggacgatgggttagttagaagagaagaggtggctagagtggtaaaaggattgatggaaggtgaagaaggcaaaggagtgaggaacaagatgaaggagttgaaggaagcagcttgtagggtgttgaaggatgatgggacttcgacaaaagcacttagtcttgtggccttaaagtggaaagcccacaaaaaagagttagagcaaaatggcaaccactaaatatttgatgttctaatatgatttgtataatcaacggtgggatttgtgcaaatgtgtttctgtatgtatatgtatgttctacttttcttt

SEQ ID NO: 28760 - protein, 480 aa, Arabidopsis thaliana
  misc_feature (1)..(480): Ceres Seq. ID no. 3051015
MEESKTPHVAIIPSPGMGHLIPLVEFAKRLVHLHGLTVTFVIAGEGPPSKAQRTVLDSLPSSISSVFLPPVDLTDLSSSTRIESRISLTVTRSNPELRKVFDSFVEGGRLPTALVVDLFGTDAFDVAVEFHVPPYIFYPTTANVLSFFLHLPKLDETVSCEFRELTEPLMLPGCVPVAGKDFLDPAQDRKDDAYKWLLHNTKRYKEAEGILVNTFFELEPNAIKALQEPGLDKPPVYPVGPLVNIGKQEAKQTEESECLKWLDNQPLGSVLYVSFGSGGTLTCEQLNELALGLADSEQRFLWVIRSPSGIANSSYFDSHSQTDPLTFLPPGFLERTKKRGFVIPFWAPQAQVLAHPSTGGFLTHCGWNSTLESVVSGIPLIAWPLYAEQKMNAVLLSEDIRAALRPRAGDDGLVRREEVARVVKGLMEGEEGKGVRNKMKELKEAACRVLKDDGTSTKALSLVALKWKAHKKELEQNGNH

SEQ ID NO: 28761 - protein, 464 aa, Arabidopsis thaliana
  misc_feature (1)..(464): Ceres Seq. ID no. 3051016
MGHLIPLVEFAKRLVHLHGLTVTFVIAGEGPPSKAQRTVLDSLPSSISSVFLPPVDLTDLSSSTRIESRISLTVTRSNPELRKVFDSFVEGGRLPTALVVDLFGTDAFDVAVEFHVPPYIFYPTTANVLSFFLHLPKLDETVSCEFRELTEPLMLPGCVPVAGKDFLDPAQDRKDDAYKWLLHNTKRYKEAEGILVNTFFELEPNAIKALQEPGLDKPPVYPVGPLVNIGKQEAKQTEESECLKWLDNQPLGSVLYVSFGSGGTLTCEQLNELALGLADSEQRFLWVIRSPSGIANSSYFDSHSQTDPLTFLPPGFLERTKKRGFVIPFWAPQAQVLAHPSTGGFLTHCGWNSTLESVVSGIPLIAWPLYAEQKMNAVLLSEDIRAALRPRAGDDGLVRREEVARVVKGLMEGEEGKGVRNKMKELKEAACRVLKDDGTSTKALSLVALKWKAHKKELEQNGNH

SEQ ID NO: 28762 - protein, 311 aa, Arabidopsis thaliana
  misc_feature (1)..(311): Ceres Seq. ID no. 3051017
MLPGCVPVAGKDFLDPAQDRKDDAYKWLLHNTKRYKEAEGILVNTFFELEPNAIKALQEPGLDKPPVYPVGPLVNIGKQEAKQTEESECLKWLDNQPLGSVLYVSFGSGGTLTCEQLNELALGLADSEQRFLWVIRSPSGIANSSYFDSHSQTDPLTFLPPGFLERTKKRGFVIPFWAPQAQVLAHPSTGGFLTHCGWNSTLESVVSGIPLIAWPLYAEQKMNAVLLSEDIRAALRPRAGDDGLVRREEVARVVKGLMEGEEGKGVRNKMKELKEAACRVLKDDGTSTKALSLVALKWKAHKKELEQNGNH

SEQ ID NO: 28763 - DNA, 1218 bp, Arabidopsis thaliana
  misc_feature (1)..(1218): Ceres Seq. ID no. 3061811
atgttgagtgcctttttgggtcatgcgtcagctattgctatagcttcaccagtagtcagcattgtgggcatcaggcgacaaacatatggagagatgaaacacgtgggggtcgttgaaaaacaaagagaaatgccaacatttcctcaatcgtttcctatgaacggtggtgatggtccgcacagttacatccacaattcctcttatcaaaaagtagcgatagatggcgctaaagaaaagacaagtgaagccatcctaaaaaacctcgatctcgaactcttgaaccgtaattctgatgaaaatatcttaagaattgcggattttggttgttctattggacccaacacgttcgaagtagtccaaaatattatcgatacggtgaagcaaaaaaacctaaaagaaaacaatgcctatattggtgctcctctcgagttccaagtttgcttcaatgatcaaccaaacaatgattttaacacactttttagaacccaacctatctcttccaaacaagcatatttatcggttggagttccaggatctttccatggtagagtattaccaaaaaatagcctccatatcggtcacattacctatgcgctccactggctttctacagttccccaacatgtttgcgacaagaaatctccggcattgaataaaagctacattcaatgtaataatttagtagaggaagtgactgaagcttaccgggtccagtttaaaaaggacatgggagattttcttggggcaagagctgaagagcttgtttcgggcggattgatgatcctatcaggacaatgcttgcccgatggtgtccctaaggctttgacatggcaaggggttgtgatcgatatgattggagattgtcttatggatatggctaaacagggaattacgaccaaggaaaagatcgaactgttcagtttgcccatatatattccgcatattagtgaattcaaggcagaaatagagcgaaatgaaaactttagtatcgagacaatggagaagataagtcatcctatggattataagccactaaccaacgacttcatcacttccatgtttcgagccattctcaatacgattattgaagaacactttggagatggtgtggtcaatgagctattcgatcgatttgctaagaagctcaacaagtacccaattgatttcaaaaggtgtaaaaagtatgtgaattattttatcgtgcttaaaagaaaataa

SEQ ID NO: 28764 - protein, 405 aa, Arabidopsis thaliana
  misc_feature (1)..(405): Ceres Seq. ID no. 3061812
MLSAFLGHASAIAIASPVVSIVGIRRQTYGEMKHVGVVEKQREMPTFPQSFPMNGGDGPHSYIHNSSYQKVAIDGAKEKTSEAILKNLDLELLNRNSDENILRIADFGCSIGPNTFEVVQNIIDTVKQKNLKENNAYIGAPLEFQVCFNDQPNNDFNTLFRTQPISSKQAYLSVGVPGSFHGRVLPKNSLHIGHITYALHWLSTVPQHVCDKKSPALNKSYIQCNNLVEEVTEAYRVQFKKDMGDFLGARAEELVSGGLMILSGQCLPDGVPKALTWQGVVIDMIGDCLMDMAKQGITTKEKIELFSLPIYIPHISEFKAEIERNENFSIETMEKISHPMDYKPLTNDFITSMFRAILNTIIEEHFGDGVVNELFDRFAKKLNKYPIDFKRCKKYVNYFIVLKRK

SEQ ID NO: 28765 - protein, 374 aa, Arabidopsis thaliana
  misc_feature (1)..(374): Ceres Seq. ID no. 3061813
MKHVGVVEKQREMPTFPQSFPMNGGDGPHSYIHNSSYQKVAIDGAKEKTSEAILKNLDLELLNRNSDENILRIADFGCSIGPNTFEVVQNIIDTVKQKNLKENNAYIGAPLEFQVCFNDQPNNDFNTLFRTQPISSKQAYLSVGVPGSFHGRVLPKNSLHIGHITYALHWLSTVPQHVCDKKSPALNKSYIQCNNLVEEVTEAYRVQFKKDMGDFLGARAEELVSGGLMILSGQCLPDGVPKALTWQGVVIDMIGDCLMDMAKQGITTKEKIELFSLPIYIPHISEFKAEIERNENFSIETMEKISHPMDYKPLTNDFITSMFRAILNTIIEEHFGDGVVNELFDRFAKKLNKYPIDFKRCKKYVNYFIVLKRK

SEQ ID NO: 28766 - protein, 362 aa, Arabidopsis thaliana
  misc_feature (1)..(362): Ceres Seq. ID no. 3061814
MPTFPQSFPMNGGDGPHSYIHNSSYQKVAIDGAKEKTSEAILKNLDLELLNRNSDENILRIADFGCSIGPNTFEVVQNIIDTVKQKNLKENNAYIGAPLEFQVCFNDQPNNDFNTLFRTQPISSKQAYLSVGVPGSFHGRVLPKNSLHIGHITYALHWLSTVPQHVCDKKSPALNKSYIQCNNLVEEVTEAYRVQFKKDMGDFLGARAEELVSGGLMILSGQCLPDGVPKALTWQGVVIDMIGDCLMDMAKQGITTKEKIELFSLPIYIPHISEFKAEIERNENFSIETMEKISHPMDYKPLTNDFITSMFRAILNTIIEEHFGDGVVNELFDRFAKKLNKYPIDFKRCKKYVNYFIVLKRK

SEQ ID NO: 28767 - DNA, 921 bp, Arabidopsis thaliana
  misc_feature (1)..(921): Ceres Seq. ID no. 3061894
atggagagaagcttgaagaagacgaagaacaattataacaactccataaagagcaatcttatgaaagatgatgaattgtttcatgtgattcacaaagttccctgtggagacactccttatgtcagagccaaacatgctcagttgatagagaagaacccggagatggcaatagtgtggttttggaaagccatcaacactggagacagagtagacagtgccctcaaggacatggctgttgtaatgaaacaacttgaccgttctgaagaagctattgaagctatcaaatctttccgtcctcgttgttccaagaattcccaagattcccttgacaatgtcctcatcgacttatacaagaaatgtgggagaatggaggagcaagttgagttgttgaagaggaaattaaggcagatctatcaaggagaagctttcaatggtaaacctaccaaaaccgctcgctcccacggaaaaaagtttcaagtgactgttcaacaagaaatctcaagattactgggtaacttggggtgggcatatatgcaacaagccaagtacttatcggccgaagcggtatacagaaaagcccagatggttgagccagatgctaacaaatcgtgcaaccttgcgatgtgccttatcaaacaaggcaggtttgaggagggaagattggttcttgacgatgttctcgagtatagggttttgggtgcggatgattgtagaacaaggcaacgggccgaagagcttctgagtgaattagagtcttcgctgccacggatgcgagatgctgagatggaggatgtcttgggaaatatcttagacgatgactttgttcttgggcttgaagagatgacatccactagttttaaatctaagagactcccaatcttcgaacagatctcgtcttttagaaatacattagtttgctag

SEQ ID NO: 28768 - protein, 306 aa, Arabidopsis thaliana
  misc_feature (1)..(306): Ceres Seq. ID no. 3061895
MERSLKKTKNNYNNSIKSNLMKDDELFHVIHKVPCGDTPYVRAKHAQLIEKNPEMAIVWFWKAINTGDRVDSALKDMAVVMKQLDRSEEAIEAIKSFRPRCSKNSQDSLDNVLIDLYKKCGRMEEQVELLKRKLRQIYQGEAFNGKPTKTARSHGKKFQVTVQQEISRLLGNLGWAYMQQAKYLSAEAVYRKAQMVEPDANKSCNLAMCLIKQGRFEEGRLVLDDVLEYRVLGADDCRTRQRAEELLSELESSLPRMRDAEMEDVLGNILDDDFVLGLEEMTSTSFKSKRLPIFEQISSFRNTLVC

SEQ ID NO: 28769 - protein, 286 aa, Arabidopsis thaliana
  misc_feature (1)..(286): Ceres Seq. ID no. 3061896
MKDDELFHVIHKVPCGDTPYVRAKHAQLIEKNPEMAIVWFWKAINTGDRVDSALKDMAVVMKQLDRSEEAIEAIKSFRPRCSKNSQDSLDNVLIDLYKKCGRMEEQVELLKRKLRQIYQGEAFNGKPTKTARSHGKKFQVTVQQEISRLLGNLGWAYMQQAKYLSAEAVYRKAQMVEPDANKSCNLAMCLIKQGRFEEGRLVLDDVLEYRVLGADDCRTRQRAEELLSELESSLPRMRDAEMEDVLGNILDDDFVLGLEEMTSTSFKSKRLPIFEQISSFRNTLVC

SEQ ID NO: 28770 - protein, 252 aa, Arabidopsis thaliana
  misc_feature (1)..(252): Ceres Seq. ID no. 3061897
MAIVWFWKAINTGDRVDSALKDMAVVMKQLDRSEEAIEAIKSFRPRCSKNSQDSLDNVLIDLYKKCGRMEEQVELLKRKLRQIYQGEAFNGKPTKTARSHGKKFQVTVQQEISRLLGNLGWAYMQQAKYLSAEAVYRKAQMVEPDANKSCNLAMCLIKQGRFEEGRLVLDDVLEYRVLGADDCRTRQRAEELLSELESSLPRMRDAEMEDVLGNILDDDFVLGLEEMTSTSFKSKRLPIFEQISSFRNTLVC

SEQ ID NO: 28771 - DNA, 1980 bp, Arabidopsis thaliana
  misc_feature (1)..(1980): Ceres Seq. ID no. 3063784
atgaaggttcggagtaaaaaagcactgttttgttccgtctctcgtcttctccacacggagagacacacagagagacaaaacctaacaacgctgttcaacagatatgtcgacaaaacagatgttttctcatggaactctgtcatcgccgacctcgctcgtagcggtgattctgctgaagctcttctcgctttttcctcaatgcggaagctttctctatacccaactcgctctagctttccttgcgccattaaagcatgttcgtctctttttgatatcttctccggcaaacagacccatcagcaagcttttgtcttcggttatcaatccgacatctttgtgtcttcggctttgatcgttatgtattcaacttgtgggaaactggaggatgcacggaaagtgttcgacgaaattcccaagagaaatattgtatcttggacttcgatgattcgagggtatgatcttaacggtaatgcccttgatgctgtttctcttttcaaggatctattggtcgatgaaaatgatgatgacgatgcaatgtttcttgattctatgggtttggtttcggtaatctctgcttgttctcgtgttcctgctaagggtttaacggaatctattcatagctttgtgattaagagaggttttgatagaggagtgagtgttggtaatactcttttggatgcttatgctaagggtggagaaggaggtgttgctgtggcgagaaaaatctttgatcagattgtggataaggatcgtgtttcgtataattcgattatgagtgtgtatgctcagagtgggatgtctaatgaggcttttgaggtttttcgtagacttgttaagaataaagttgtgacctttaacgccattacattgtctactgtgttgttggcggtctcgcattcaggtgctctgcgtattggaaagtgtatacatgatcaggtaataaggatgggtcttgaggatgatgtgatagtggggacgtcgataattgatatgtattgcaaatgcggaagagttgagacggcgagaaaagcatttgatcgaatgaaaaacaagaatgttaggtcgtggaccgccatgattgctggatatggaatgcacggccacgcggctaaagcgttagagttattccctgctatgatcgattcaggggttcgaccaaattacattacttttgtatcagtgttagctgcttgcagtcatgcgggtcttcatgtggaaggctggcgctggtttaacgcaatgaaggggagatttggtgtggaaccagggttagaacactacggttgtatggttgatcttctaggtagagctgggtttcttcagaaagcttatgatttgattcagagaatgaagatgaagccggactctatcatctggagctcacttcttgcagcttgtagaattcacaagaacgtggagctagctgagatatccgtggcgcgtttgtttgaattggactcttcgaattgcggttactacatgctgctttcgcatatctacgctgatgcgggtcgttggaaagatgttgagagggtgagaatgatcatgaagaatcgcggattggtgaaaccgccaggttttagtctactcgagttgaatggtgaggttcatgtgttcttgatcggagacgaagagcatcctcagcgtgagaagatttacgagtttttagcagaactgaacaggaagctgttagaggcaggttacgtatcgaacacgtcatctgtatgtcatgatgttgatgaggaagagaaagagatgacactgagagttcacagcgagaaactagcgattgcgtttgggatcatgaacacggttcctggctcgacggttaatgtggtcaagaatctgagagtttgcagcgattgtcacaatgtgatcaagttgatttcaaagattgttgatagagagtttgtggttagagatgcgaagaggtttcaccatttcaaagatggtggatgttcctgtggagattactggtga

SEQ ID NO: 28772 - protein, 659 aa, Arabidopsis thaliana
  misc_feature (1)..(659): Ceres Seq. ID no. 3063785
MKVRSKKALFCSVSRLLHTERHTERQNLTTLFNRYVDKTDVFSWNSVIADLARSGDSAEALLAFSSMRKLSLYPTRSSFPCAIKACSSLFDIFSGKQTHQQAFVFGYQSDIFVSSALIVMYSTCGKLEDARKVFDEIPKRNIVSWTSMIRGYDLNGNALDAVSLFKDLLVDENDDDDAMFLDSMGLVSVISACSRVPAKGLTESIHSFVIKRGFDRGVSVGNTLLDAYAKGGEGGVAVARKIFDQIVDKDRVSYNSIMSVYAQSGMSNEAFEVFRRLVKNKVVTFNAITLSTVLLAVSHSGALRIGKCIHDQVIRMGLEDDVIVGTSIIDMYCKCGRVETARKAFDRMKNKNVRSWTAMIAGYGMHGHAAKALELFPAMIDSGVRPNYITFVSVLAACSHAGLHVEGWRWFNAMKGRFGVEPGLEHYGCMVDLLGRAGFLQKAYDLIQRMKMKPDSIIWSSLLAACRIHKNVELAEISVARLFELDSSNCGYYMLLSHIYADAGRWKDVERVRMIMKNRGLVKPPGFSLLELNGEVHVFLIGDEEHPQREKIYEFLAELNRKLLEAGYVSNTSSVCHDVDEEEKEMTLRVHSEKLAIAFGIMNTVPGSTVNVVKNLRVCSDCHNVIKLISKIVDREFVVRDAKRFHHFKDGGCSCGDYW

SEQ ID NO: 28773 - protein, 593 aa, Arabidopsis thaliana
  misc_feature (1)..(593): Ceres Seq. ID no. 3063786
MRKLSLYPTRSSFPCAIKACSSLFDIFSGKQTHQQAFVFGYQSDIFVSSALIVMYSTCGKLEDARKVFDEIPKRNIVSWTSMIRGYDLNGNALDAVSLFKDLLVDENDDDDAMFLDSMGLVSVISACSRVPAKGLTESIHSFVIKRGFDRGVSVGNTLLDAYAKGGEGGVAVARKIFDQIVDKDRVSYNSIMSVYAQSGMSNEAFEVFRRLVKNKVVTFNAITLSTVLLAVSHSGALRIGKCIHDQVIRMGLEDDVIVGTSIIDMYCKCGRVETARKAFDRMKNKNVRSWTAMIAGYGMHGHAAKALELFPAMIDSGVRPNYITFVSVLAACSHAGLHVEGWRWFNAMKGRFGVEPGLEHYGCMVDLLGRAGFLQKAYDLIQRMKMKPDSIIWSSLLAACRIHKNVELAEISVARLFELDSSNCGYYMLLSHIYADAGRWKDVERVRMIMKNRGLVKPPGFSLLELNGEVHVFLIGDEEHPQREKIYEFLAELNRKLLEAGYVSNTSSVCHDVDEEEKEMTLRVHSEKLAIAFGIMNTVPGSTVNVVKNLRVCSDCHNVIKLISKIVDREFVVRDAKRFHHFKDGGCSCGDYW

SEQ ID NO: 28774 - protein, 540 aa, Arabidopsis thaliana
  misc_feature (1)..(540): Ceres Seq. ID no. 3063787
MYSTCGKLEDARKVFDEIPKRNIVSWTSMIRGYDLNGNALDAVSLFKDLLVDENDDDDAMFLDSMGLVSVISACSRVPAKGLTESIHSFVIKRGFDRGVSVGNTLLDAYAKGGEGGVAVARKIFDQIVDKDRVSYNSIMSVYAQSGMSNEAFEVFRRLVKNKVVTFNAITLSTVLLAVSHSGALRIGKCIHDQVIRMGLEDDVIVGTSIIDMYCKCGRVETARKAFDRMKNKNVRSWTAMIAGYGMHGHAAKALELFPAMIDSGVRPNYITFVSVLAACSHAGLHVEGWRWFNAMKGRFGVEPGLEHYGCMVDLLGRAGFLQKAYDLIQRMKMKPDSIIWSSLLAACRIHKNVELAEISVARLFELDSSNCGYYMLLSHIYADAGRWKDVERVRMIMKNRGLVKPPGFSLLELNGEVHVFLIGDEEHPQREKIYEFLAELNRKLLEAGYVSNTSSVCHDVDEEEKEMTLRVHSEKLAIAFGIMNTVPGSTVNVVKNLRVCSDCHNVIKLISKIVDREFVVRDAKRFHHFKDGGCSCGDYW

SEQ ID NO: 28775 - DNA, 1176 bp, Arabidopsis thaliana
  misc_feature (1)..(1176): Ceres Seq. ID no. 3064164
atggattgcttagaacccaaaacaaagaacaatctcactggaaagcttctcttagtagcttcactcttaattttagccattattgtgatcagtcaatcttcaagtttcacatctccaagcgcgttttctcaaagagaggaaggagtgactcatgtgttagtcactggtggtgctggttatatcgggtcacatgcggctttaagacttcttagagattcataccgcgtaaccattgtggacaatctttcgcgtggaaatcttggtgcggttaagactttacagcaattattcccgcagacaggaagacttcagttcatttatgctgacttaggagatcccttagcggtcgagaaaatcttctcggagaatgcttttgacgctgtaatgcattttgctgcggtagcttatgtcggagaaagcactctttatcctctaaaatattaccataacattacatcaaacacgttaggagttcttgaagctatggctagacataaagtaaagaaactgatatattctagcacttgtgctacatatggagagcctgaaaaaatgccgattactgaagacactccacaggtaccgattaatccatacggaaaagctaaaaagatggcagaggatatgatcttggatttctcaaagaactctgacatggcggttatgatcttaagatacttcaatgtgattggttcagatccaggaggtagattaggagaagcgccaagacccgaacttcgtgagcaaggaaggatttctggtgcttgtttcgatgcagctcgtggtttcattcccggactacaagtgaaaggaacggattacaaaacatcggacggtacttgcattagagactatatagatgttactgacctcgtggatgctcacgtgaaggctctcgagaaagctcagcctcgaaaagtcggtatctacaatgttggaaccggaaaagggagatcggttaaagaattcgttgaggcatgtaagaaggcgacaggagttgagatcaaagtagatttcttgcctcgacgaccgggagattacgcagaggtttacagtgatccaacaaagattttgaaagatttgaattggactgctcgattcactaatcttcaagatagtcttcaagttgcttggagatggcaaaaaattcatcctcatggatataattcttattaa

SEQ ID NO: 28776 - protein, 391 aa, Arabidopsis thaliana
  misc_feature (1)..(391): Ceres Seq. ID no. 3064165
MDCLEPKTKNNLTGKLLLVASLLILAIIVISQSSSFTSPSAFSQREEGVTHVLVTGGAGYIGSHAALRLLRDSYRVTIVDNLSRGNLGAVKTLQQLFPQTGRLQFIYADLGDPLAVEKIFSENAFDAVMHFAAVAYVGESTLYPLKYYHNITSNTLGVLEAMARHKVKKLIYSSTCATYGEPEKMPITEDTPQVPINPYGKAKKMAEDMILDFSKNSDMAVMILRYFNVIGSDPGGRLGEAPRPELREQGRISGACFDAARGFIPGLQVKGTDYKTSDGTCIRDYIDVTDLVDAHVKALEKAQPRKVGIYNVGTGKGRSVKEFVEACKKATGVEIKVDFLPRRPGDYAEVYSDPTKILKDLNWTARFTNLQDSLQVAWRWQKIHPHGYNSY

SEQ ID NO: 28777 - protein, 263 aa, Arabidopsis thaliana
  misc_feature (1)..(263): Ceres Seq. ID no. 3064167
MHFAAVAYVGESTLYPLKYYHNITSNTLGVLEAMARHKVKKLIYSSTCATYGEPEKMPITEDTPQVPINPYGKAKKMAEDMILDFSKNSDMAVMILRYFNVIGSDPGGRLGEAPRPELREQGRISGACFDAARGFIPGLQVKGTDYKTSDGTCIRDYIDVTDLVDAHVKALEKAQPRKVGIYNVGTGKGRSVKEFVEACKKATGVEIKVDFLPRRPGDYAEVYSDPTKILKDLNWTARFTNLQDSLQVAWRWQKIHPHGYNSY

SEQ ID NO: 28778 - protein, 230 aa, Arabidopsis thaliana
  misc_feature (1)..(230): Ceres Seq. ID no. 3064168
MARHKVKKLIYSSTCATYGEPEKMPITEDTPQVPINPYGKAKKMAEDMILDFSKNSDMAVMILRYFNVIGSDPGGRLGEAPRPELREQGRISGACFDAARGFIPGLQVKGTDYKTSDGTCIRDYIDVTDLVDAHVKALEKAQPRKVGIYNVGTGKGRSVKEFVEACKKATGVEIKVDFLPRRPGDYAEVYSDPTKILKDLNWTARFTNLQDSLQVAWRWQKIHPHGYNSY

SEQ ID NO: 28779 - DNA, 660 bp, Arabidopsis thaliana
  misc_feature (1)..(660): Ceres Seq. ID no. 3065961
atgaacccatctctcttccaaaattacacttggaacaacatcatcaacagcagcaacaacaacaacaagaatgatgatcatcatcatcaacataataatgatccaatcggtatggccatggaccagtacacacagctccatatcttcaatcctttctcttcttctcatttccctcctctctcttcttccctcacaaccaccactcttctctccggagatcaagaagacgacgaagacgaagaagaacctctagaggaactcggtgctatgaaggaaatgatgtacaagatcgcagccatgcaatcggttgacatcgacccagcaaccgtcaagaaacccaaacgccgtaacgtgaggatctccgacgaccctcagagtgtggcggctagacatcgccgtgagagaatcagtgagaggatcagaattcttcagagactcgtgccaggtggcactaaaatggatacggcttcaatgctcgatgaagctatacgctatgtcaagttcttgaaacggcagatccggctactcaataataataccggatatactcctccgccgccgcaagatcaagcttctcaggcggtgacgacgtcatgggtttcaccgccaccaccgccaagtttcggccgtgggggaagaggagtaggagaattaatctag

SEQ ID NO: 28780 - protein, 219 aa, Arabidopsis thaliana
  misc_feature (1)..(219): Ceres Seq. ID no. 3065962
MNPSLFQNYTWNNIINSSNNNNKNDDHHHQHNNDPIGMAMDQYTQLHIFNPFSSSHFPPLSSSLTTTTLLSGDQEDDEDEEEPLEELGAMKEMMYKIAAMQSVDIDPATVKKPKRRNVRISDDPQSVAARHRRERISERIRILQRLVPGGTKMDTASMLDEAIRYVKFLKRQIRLLNNNTGYTPPPPQDQASQAVTTSWVSPPPPPSFGRGGRGVGELI

SEQ ID NO: 28781 - protein, 182 aa, Arabidopsis thaliana
  misc_feature (1)..(182): Ceres Seq. ID no. 3065963
MAMDQYTQLHIFNPFSSSHFPPLSSSLTTTTLLSGDQEDDEDEEEPLEELGAMKEMMYKIAAMQSVDIDPATVKKPKRRNVRISDDPQSVAARHRRERISERIRILQRLVPGGTKMDTASMLDEAIRYVKFLKRQIRLLNNNTGYTPPPPQDQASQAVTTSWVSPPPPPSFGRGGRGVGELI

SEQ ID NO: 28782 - protein, 180 aa, Arabidopsis thaliana
  misc_feature (1)..(180): Ceres Seq. ID no. 3065964
MDQYTQLHIFNPFSSSHFPPLSSSLTTTTLLSGDQEDDEDEEEPLEELGAMKEMMYKIAAMQSVDIDPATVKKPKRRNVRISDDPQSVAARHRRERISERIRILQRLVPGGTKMDTASMLDEAIRYVKFLKRQIRLLNNNTGYTPPPPQDQASQAVTTSWVSPPPPPSFGRGGRGVGELI

SEQ ID NO: 28783 - DNA, 1521 bp, Arabidopsis thaliana
  misc_feature (1)..(1521): Ceres Seq. ID no. 3066605
atggcggtgaagaagaaatcatcttggagatcattgatggttttgtgtttccaagatccagacaacatatattctcccaagaagacaaagaaagatgatggtgaacgtgtgattaccaaacagaaatcgtttcttggattgtcgattctagacataagtaatccaagttccactaccttgtccgaagatctctcaatctccctcgccggctcggatctccacgtgttcacacaagcagagcttagagtcataacacaaagcttctcttctagcaactttcttggtgaaggagggtttggtccggttcataaagggttcatcgatgacaagctccgtcctggtcttaaggctcagcccgttgccgttaaacttcttgatcttgatggtcttcaaggtcaccgtgagtttatgacggaggttatgtgtttgggaaaactaaagcatccgaatctggtgaagctgatcggatattgctgcgaggaagcacatagacttcttgtttatgagttcatgcctcgtggaagtttggagtctcaactcttcagaaggtgctccctaccgctgccatggacaacgaggttgaacatcgcttatgaagctgcaaagggtctacagtttctacatgaagccgagaagcccatcatctatcgcgatttcaaggcctctaatatcttgttagattctgattatacagcgaaactctcggacttcgggctagcaaaagacggaccacaaggcgatgatacacatgtgtcgactcgcgtgatgggcacacaagggtacgcggcgccagagtacataatgacaggtcatttaacggctaagagtgatgtgtacagctttggagtggtgttgcttgagctgttgacaggtcggaaatcggtggacatagcgagatcatcaagaaaagaaaccctcgttgagtgggctcgtccaatgctcaacgacgcacgtaaactcgggagaataatggacccgaggcttgaagatcagtactcagagaccggagcacgaaaggcagcaactctagcttatcaatgcctaaggtaccgaccaaagacaaggccagacattagcactgttgtctccgttctccaagacatcaaagattacaaagatgatattcccattgggatattcacttacaccgttcctaccaagccacgccgggaagttaaagagacaagtcttcaaaactttgacaagccacgccgtgaaactaaagtgacaagtcttcaaaacttcgacaaaacacgccgtgaagttaaagatacaagtcttcaaaacttcgacaaaacacgccgtgaagttaaagagacaagtcttcaaaacttcgacaaaacacgccgtgaagttaaagagacaagtcttcaaaacttcgacaagcctcgcaacgtttccacgactgataaccatcaaaagttccggtcgcccgcacacacggcaagaaaccaccggataactttgagaaacggatataattcaccaatgcgtaacgaggccggaggggaacggtactga

SEQ ID NO: 28784 - protein, 506 aa, Arabidopsis thaliana
  misc_feature (1)..(506): Ceres Seq. ID no. 3066606
MAVKKKSSWRSLMVLCFQDPDNIYSPKKTKKDDGERVITKQKSFLGLSILDISNPSSTTLSEDLSISLAGSDLHVFTQAELRVITQSFSSSNFLGEGGFGPVHKGFIDDKLRPGLKAQPVAVKLLDLDGLQGHREFMTEVMCLGKLKHPNLVKLIGYCCEEAHRLLVYEFMPRGSLESQLFRRCSLPLPWTTRLNIAYEAAKGLQFLHEAEKPIIYRDFKASNILLDSDYTAKLSDFGLAKDGPQGDDTHVSTRVMGTQGYAAPEYIMTGHLTAKSDVYSFGVVLLELLTGRKSVDIARSSRKETLVEWARPMLNDARKLGRIMDPRLEDQYSETGARKAATLAYQCLRYRPKTRPDISTVVSVLQDIKDYKDDIPIGIFTYTVPTKPRREVKETSLQNFDKPRRETKVTSLQNFDKTRREVKDTSLQNFDKTRREVKETSLQNFDKTRREVKETSLQNFDKPRNVSTTDNHQKFRSPAHTARNHRITLRNGYNSPMRNEAGGERY

SEQ ID NO: 28785 - protein, 494 aa, Arabidopsis thaliana
  misc_feature (1)..(494): Ceres Seq. ID no. 3066607
MVLCFQDPDNIYSPKKTKKDDGERVITKQKSFLGLSILDISNPSSTTLSEDLSISLAGSDLHVFTQAELRVITQSFSSSNFLGEGGFGPVHKGFIDDKLRPGLKAQPVAVKLLDLDGLQGHREFMTEVMCLGKLKHPNLVKLIGYCCEEAHRLLVYEFMPRGSLESQLFRRCSLPLPWTTRLNIAYEAAKGLQFLHEAEKPIIYRDFKASNILLDSDYTAKLSDFGLAKDGPQGDDTHVSTRVMGTQGYAAPEYIMTGHLTAKSDVYSFGVVLLELLTGRKSVDIARSSRKETLVEWARPMLNDARKLGRIMDPRLEDQYSETGARKAATLAYQCLRYRPKTRPDISTVVSVLQDIKDYKDDIPIGIFTYTVPTKPRREVKETSLQNFDKPRRETKVTSLQNFDKTRREVKDTSLQNFDKTRREVKETSLQNFDKTRREVKETSLQNFDKPRNVSTTDNHQKFRSPAHTARNHRITLRNGYNSPMRNEAGGERY

SEQ ID NO: 28786 - protein, 370 aa, Arabidopsis thaliana
  misc_feature (1)..(370): Ceres Seq. ID no. 3066608
MTEVMCLGKLKHPNLVKLIGYCCEEAHRLLVYEFMPRGSLESQLFRRCSLPLPWTTRLNIAYEAAKGLQFLHEAEKPIIYRDFKASNILLDSDYTAKLSDFGLAKDGPQGDDTHVSTRVMGTQGYAAPEYIMTGHLTAKSDVYSFGVVLLELLTGRKSVDIARSSRKETLVEWARPMLNDARKLGRIMDPRLEDQYSETGARKAATLAYQCLRYRPKTRPDISTVVSVLQDIKDYKDDIPIGIFTYTVPTKPRREVKETSLQNFDKPRRETKVTSLQNFDKTRREVKDTSLQNFDKTRREVKETSLQNFDKTRREVKETSLQNFDKPRNVSTTDNHQKFRSPAHTARNHRITLRNGYNSPMRNEAGGERY

SEQ ID NO: 28787 - DNA, 1377 bp, Arabidopsis thaliana
  misc_feature (1)..(1377): Ceres Seq. ID no. 3067643
atgagaggaaataaaattgttgatctagaaaaagttgaagagcttgtgcttatcaaacgatctaaatggaattttcctcccagccctcctaagtttccggtcatcggaaacttacatcaacttggagaattgcctcacaggtcacttcaacgtctagccgaaaaaaccggagatgttatgcttattcacttagggtttgtccctgtaactgttatctcatcgaaagaagcagctgaagaagtgcttagaactcatgacctaaactgttgcagcaggcctaatcttgttgggacgaggctactttctcggggttttaaagatgttggttttactccatacggtgaagagtggaaggagcggcgtaagttcttggtgcgtgagtttttctctttgaaaaaggttcagtctttcggttatatcagagaggaagaatgtaactttcttgtcaagaaactgttggaatcagccgtggatcaatctccggttgatttgagcaaaacccttttttggctaaccgcgagtgtcatgtttagagttgcttttggacagagtttccacgagagcgagttcatcgataaagacaaggtcgatgagcttgtgtttgaagccgagaccgctcaagctagtttcacttgctctgatttcttccctattgctggacttggttggctcgttgactgtatttccgggcaacacaagaggctcaaagatgttttcttcaagctggatgctctgtttcaatgttggatgtcatgcagaaacaacaatatatttctcggagggatagacaccggagctcttactatgatatgggcaatgacggagctcgctagaaacccggaagtgatgaagaaagttcaaggcgagatccgagaccgccttggcagaaataaagagagaatcaccgaagaagatatcaataaagttccttacttgaacctagtgatcaaggaaacattcagattacaccatccagttcctcttcttctcccaagggaaacaatggctcacatcaaggttcaaggctatgatattcctcccaagagacggatcttggtcaacgcttgggcgataggaagagatccaaaactctggactaacccggaagagtttaaccccgagagatttatcaatagtcctgtggattataggggacaacatttcgagctcttaccgtttgggtctggacgaaggatatgtcccgggatatcgatgggtatggctactgtagaattgggactcttgaacttactttacttcttcgactggaagttgcctgatgggatgacacataaagatatcgatactgaagaagttggcactcttacaatcgtcaagaaagtaccactaaaacttcttccagttcgatttcagtga

SEQ ID NO: 28788 - protein, 458 aa, Arabidopsis thaliana
  misc_feature (1)..(458): Ceres Seq. ID no. 3067644
MRGNKIVDLEKVEELVLIKRSKWNFPPSPPKFPVIGNLHQLGELPHRSLQRLAEKTGDVMLIHLGFVPVTVISSKEAAEEVLRTHDLNCCSRPNLVGTRLLSRGFKDVGFTPYGEEWKERRKFLVREFFSLKKVQSFGYIREEECNFLVKKLLESAVDQSPVDLSKTLFWLTASVMFRVAFGQSFHESEFIDKDKVDELVFEAETAQASFTCSDFFPIAGLGWLVDCISGQHKRLKDVFFKLDALFQCWMSCRNNNIFLGGIDTGALTMIWAMTELARNPEVMKKVQGEIRDRLGRNKERITEEDINKVPYLNLVIKETFRLHHPVPLLLPRETMAHIKVQGYDIPPKRRILVNAWAIGRDPKLWTNPEEFNPERFINSPVDYRGQHFELLPFGSGRRICPGISMGMATVELGLLNLLYFFDWKLPDGMTHKDIDTEEVGTLTIVKKVPLKLLPVRFQ

SEQ ID NO: 28789 - protein, 399 aa, Arabidopsis thaliana
  misc_feature (1)..(399): Ceres Seq. ID no. 3067645
MLIHLGFVPVTVISSKEAAEEVLRTHDLNCCSRPNLVGTRLLSRGFKDVGFTPYGEEWKERRKFLVREFFSLKKVQSFGYIREEECNFLVKKLLESAVDQSPVDLSKTLFWLTASVMFRVAFGQSFHESEFIDKDKVDELVFEAETAQASFTCSDFFPIAGLGWLVDCISGQHKRLKDVFFKLDALFQCWMSCRNNNIFLGGIDTGALTMIWAMTELARNPEVMKKVQGEIRDRLGRNKERITEEDINKVPYLNLVIKETFRLHHPVPLLLPRETMAHIKVQGYDIPPKRRILVNAWAIGRDPKLWTNPEEFNPERFINSPVDYRGQHFELLPFGSGRRICPGISMGMATVELGLLNLLYFFDWKLPDGMTHKDIDTEEVGTLTIVKKVPLKLLPVRFQ

SEQ ID NO: 28790 - protein, 283 aa, Arabidopsis thaliana
  misc_feature (1)..(283): Ceres Seq. ID no. 3067646
MFRVAFGQSFHESEFIDKDKVDELVFEAETAQASFTCSDFFPIAGLGWLVDCISGQHKRLKDVFFKLDALFQCWMSCRNNNIFLGGIDTGALTMIWAMTELARNPEVMKKVQGEIRDRLGRNKERITEEDINKVPYLNLVIKETFRLHHPVPLLLPRETMAHIKVQGYDIPPKRRILVNAWAIGRDPKLWTNPEEFNPERFINSPVDYRGQHFELLPFGSGRRICPGISMGMATVELGLLNLLYFFDWKLPDGMTHKDIDTEEVGTLTIVKKVPLKLLPVRFQ

SEQ ID NO: 28791 - DNA, 777 bp, Arabidopsis thaliana
  misc_feature (1)..(777): Ceres Seq. ID no. 3067976
atgtctatatccatggcgttattctctccgccgatctcttcctcacttcagaaccctaatctcatccccaagatctcaacctctcttctctccaccaagcgtttctctctaatctccgtccctagagcttcctccgacaatggtacgacttcccccgtcgtggagattccgaagcctgcttctgtggctgtagaggaagttccagttaaatctccagccgaaagctcctccgcttctgaaaacggcgccgttggaggtgaagcgactgattcgagtactgagacggtaatcaaatatcagaatgcgaagtgggttaatggaacttgggatctgaaacagttcgagaaagatggcaaaactgattgggattctgttatcgtttctgaggcaaagaggagaaaatggcttgaagataacccggaaacaacgagtaacgacgagcttgttgtcttcgatacttcgattattccatggtgggcatggatgaagagataccatctacctgaagctgaacttctcaatggtcgtgctgcgatgatagggttcttcatggcttactttgttgatagtcttaccggagtaggacttgttgatcaaatgggaaatttcttctgcaaaacactcttgtttgtggctgtagctggagttctcttcatccgtaagaatgaagatttagacaaacttaaggatctgttcgatgagactacgttatatgacaaacaatggcaagctgcatggaaagagccagattcatcaacagtttcttcaaagaagtga

SEQ ID NO: 28792 - protein, 258 aa, Arabidopsis thaliana
  misc_feature (1)..(258): Ceres Seq. ID no. 3067977
MSISMALFSPPISSSLQNPNLIPKISTSLLSTKRFSLISVPRASSDNGTTSPVVEIPKPASVAVEEVPVKSPAESSSASENGAVGGEATDSSTETVIKYQNAKWVNGTWDLKQFEKDGKTDWDSVIVSEAKRRKWLEDNPETTSNDELVVFDTSIIPWWAWMKRYHLPEAELLNGRAAMIGFFMAYFVDSLTGVGLVDQMGNFFCKTLLFVAVAGVLFIRKNEDLDKLKDLFDETTLYDKQWQAAWKEPDSSTVSSKK

SEQ ID NO: 28793 - protein, 254 aa, Arabidopsis thaliana
  misc_feature (1)..(254): Ceres Seq. ID no. 3067978
MALFSPPISSSLQNPNLIPKISTSLLSTKRFSLISVPRASSDNGTTSPVVEIPKPASVAVEEVPVKSPAESSSASENGAVGGEATDSSTETVIKYQNAKWVNGTWDLKQFEKDGKTDWDSVIVSEAKRRKWLEDNPETTSNDELVVFDTSIIPWWAWMKRYHLPEAELLNGRAAMIGFFMAYFVDSLTGVGLVDQMGNFFCKTLLFVAVAGVLFIRKNEDLDKLKDLFDETTLYDKQWQAAWKEPDSSTVSSKK

SEQ ID NO: 28794 - DNA, 1440 bp, Arabidopsis thaliana
  misc_feature (1)..(1440): Ceres Seq. ID no. 3068637
atgaaaatagagctagtattcattccctctccggcaattagtcatctcatggcgacggtagagatggcggagcaactagttgataaaaacgacaacctctctatcaccgtaatcatcatatcttttagttctaaaaatacatccatgatcacctctcttacatccaacaaccgcctccggtacgaaataatctccggaggagatcaacaaccaacggagctcaaagcaactgattcccacatccaaagtctaaagccactggtgagagacgcggttgctaaactcgtagattccactctaccagacgcgcctcgtcttgcgggattcgttgttgacatgtactgcacgtcgatgatcgatgtcgctaacgaatttggcgtccctagttacttgttttacacctctaacgctggatttcttggacttttgcttcacattcagttcatgtacgatgcagaggatatctatgacatgagcgaattagaagactctgacgtagagttggtggttccgagtttgactagtccttatccgttgaaatgtcttccttacattttcaaatcaaaagagtggctcactttttttgtaactcaagcgagaagattcagagaaactaagggcattttggtaaacacggttcctgacttggaacctcaagcgttgacgtttctttccaatggtaacattccacgtgcttacccagtaggaccattgttgcatctcaaaaacgtaaattgtgattacgtggacaagaagcaatcggagattttacggtggctagacgagcaaccgccaagatctgtagtgttcctctgtttcgggagcatgggagggttcagtgaggaacaagtgagagaaaccgcattagctctcgatcgaagcggccaccggtttctttggtctctccgtcgtgcatctccgaatatattgagagagcctcccggagaattcacaaacctagaggagattctcccagaagggtttttcgatcggacggctaacagaggaaaggttatcggatgggctgaacaggtggccatattggcgaagccggcgatcggaggttttgtttctcacggcggatggaattcgacgttggagagtttgtggtttggtgttccgatggcgatttggccgctttacgctgaacagaagtttaacgctttcgagatggtggaagagcttggtttggctgtggagatcaagaagcattggcgaggagatcttttgttggggaggtcggagattgtgacggcggaggagattgagaaaggaatcatatgtttgatggagcaagacagtgacgtcaggaagagagtgaatgagatcagcgagaagtgccacgtggctttaatggacggtggatcgtcagaaactgctttgaaaagatttattcaagacgtaacggagaatattgcttggtcggaaactgaaagctag

SEQ ID NO: 28795 - protein, 479 aa, Arabidopsis thaliana
  misc_feature (1)..(479): Ceres Seq. ID no. 3068638
MKIELVFIPSPAISHLMATVEMAEQLVDKNDNLSITVIIISFSSKNTSMITSLTSNNRLRYEIISGGDQQPTELKATDSHIQSLKPLVRDAVAKLVDSTLPDAPRLAGFVVDMYCTSMIDVANEFGVPSYLFYTSNAGFLGLLLHIQFMYDAEDIYDMSELEDSDVELVVPSLTSPYPLKCLPYIFKSKEWLTFFVTQARRFRETKGILVNTVPDLEPQALTFLSNGNIPRAYPVGPLLHLKNVNCDYVDKKQSEILRWLDEQPPRSVVFLCFGSMGGFSEEQVRETALALDRSGHRFLWSLRRASPNILREPPGEFTNLEEILPEGFFDRTANRGKVIGWAEQVAILAKPAIGGFVSHGGWNSTLESLWFGVPMAIWPLYAEQKFNAFEMVEELGLAVEIKKHWRGDLLLGRSEIVTAEEIEKGIICLMEQDSDVRKRVNEISEKCHVALMDGGSSETALKRFIQDVTENIAWSETES

SEQ ID NO: 28796 - protein, 463 aa, Arabidopsis thaliana
  misc_feature (1)..(463): Ceres Seq. ID no. 3068639
MATVEMAEQLVDKNDNLSITVIIISFSSKNTSMITSLTSNNRLRYEIISGGDQQPTELKATDSHIQSLKPLVRDAVAKLVDSTLPDAPRLAGFVVDMYCTSMIDVANEFGVPSYLFYTSNAGFLGLLLHIQFMYDAEDIYDMSELEDSDVELVVPSLTSPYPLKCLPYIFKSKEWLTFFVTQARRFRETKGILVNTVPDLEPQALTFLSNGNIPRAYPVGPLLHLKNVNCDYVDKKQSEILRWLDEQPPRSVVFLCFGSMGGFSEEQVRETALALDRSGHRFLWSLRRASPNILREPPGEFTNLEEILPEGFFDRTANRGKVIGWAEQVAILAKPAIGGFVSHGGWNSTLESLWFGVPMAIWPLYAEQKFNAFEMVEELGLAVEIKKHWRGDLLLGRSEIVTAEEIEKGIICLMEQDSDVRKRVNEISEKCHVALMDGGSSETALKRFIQDVTENIAWSETES

SEQ ID NO: 28797 - protein, 458 aa, Arabidopsis thaliana
  misc_feature (1)..(458): Ceres Seq. ID no. 3068640
MAEQLVDKNDNLSITVIIISFSSKNTSMITSLTSNNRLRYEIISGGDQQPTELKATDSHIQSLKPLVRDAVAKLVDSTLPDAPRLAGFVVDMYCTSMIDVANEFGVPSYLFYTSNAGFLGLLLHIQFMYDAEDIYDMSELEDSDVELVVPSLTSPYPLKCLPYIFKSKEWLTFFVTQARRFRETKGILVNTVPDLEPQALTFLSNGNIPRAYPVGPLLHLKNVNCDYVDKKQSEILRWLDEQPPRSVVFLCFGSMGGFSEEQVRETALALDRSGHRFLWSLRRASPNILREPPGEFTNLEEILPEGFFDRTANRGKVIGWAEQVAILAKPAIGGFVSHGGWNSTLESLWFGVPMAIWPLYAEQKFNAFEMVEELGLAVEIKKHWRGDLLLGRSEIVTAEEIEKGIICLMEQDSDVRKRVNEISEKCHVALMDGGSSETALKRFIQDVTENIAWSETES

SEQ ID NO: 28798 - DNA, 2154 bp, Arabidopsis thaliana
  misc_feature (1)..(2154): Ceres Seq. ID no. 3070337
atgtcatcggcgccgcctcccggtggtactccgtcacctcctccacagcctctcccaattcctcctccgcctcagcctctgcccgttactcctccacctccacctactgcccttcctcccgcccttccccctccacctccgcctactgcccttccacccgcccttcctcctccacctccacctaccaccgttcctcctatacctccctctacgccttctcccccacctcccttgaccccttctcctctgcctccatctcccacaactccttcacctcccttgacgccttctcccacaactccttcacctcccttgactccttctcctccacctgccatcactccttcacctcctttgacaccatctcctctgcctccgtctcccaccaccccttcacctccgcctccatctccaagcattccttcacctcccttgacgccttcccctccaccgtcttctcccttgaggccttcttctcctccaccgccctctcccgccactccttcaactccgccaagatctccgccacctccctcaacacccactcctcctcctcgggtaggcagtctgagccctccacctccagcgagtccctctggcgggagatctcctagtactccatctaccactccaggctcttctccaccggcacaatcttccaaagaattatcaaagggagctatggtcgggatcgccataggaggaggatttgtgcttcttgtggcattggctttgatatttttcctttgtaagaagaaacgacgaagagacaatgaagcaccccctgctcccatagatggagtcccttacggtggtcagcaacaacaaaatgcatcacgacgatcagatcacgtggtgatgtcagtgccaccaccgaagtctccctcctctgcaccaccacgtccaccgcatttcatgagcagcggcagcagcggagactacgactcaaactactcggatcaatcagttcttcctccaccatcaccagggcttgcattaggcttaggcatatatcaaggcactttcaattacgaggagctatctagagccaccaatggattctctgaggccaatttgttaggacaaggcggtttcggatacgtgttcaaaggtatgttacgtaatgggaaagaagttgctgtgaaacaattgaaagaagggagttctcaaggagaaagagagtttcaagcagaggttgggatcattagccgagtacatcatagacatttggttgctcttgtcggttattgcatcgccgatgctcaaagattgcttgtctatgagtttgttcccaacaacactctcgagtttcacctccatggaaagggacggcctacgatggaatggagttcaagattgaagattgctgttggttctgccaaaggattgtcttatcttcatgaaaattgcaatcctaaaattattcaccgtgatatcaaggcgtcaaacatattgatagatttcaaatttgaagcaaaggttgctgattttggtcttgccaagattgcttctgatacaaatactcatgtatctacacgtgtgatgggaacttttgggtatttggctccggaatatgcttcaagcggaaaactcacggaaaagtctgacgttttctcatttggcgttgtacttctggagctaataactggacgtcgccctattgatgtaaacaatgtccatgcagataacagcttggttgattgggcacgacctttgcttaaccaagtatctgaattaggaaactttgaggttgtggttgataaaaaactgaataatgagtatgacaaagaagagatggctcgcatggttgcttgtgccgcagcttgtgttcggtccacagctccacgtagacctcgcatggatcaggttgcacgtgtgctagaaggaaacatatcaccatcagatctaaaccaaggaatcacaccgggacacagcaatgtgtatggctcatctggaggaagcacagattatgactcgagccaagacaatgaaggcatgaacaagtttaggaaagtgggacttgagactcaagatttatatagtaacccaattagtgaatatgatttgtacccgtcctggtcgagcactgacggtcagaccacacagggaaaggcgaccggcaatattaaaagacccggtcaaggttatggttaa

SEQ ID NO: 28799 - protein, 717 aa, Arabidopsis thaliana
  misc_feature (1)..(717): Ceres Seq. ID no. 3070338
MSSAPPPGGTPSPPPQPLPIPPPPQPLPVTPPPPPTALPPALPPPPPPTALPPALPPPPPPTTVPPIPPSTPSPPPPLTPSPLPPSPTTPSPPLTPSPTTPSPPLTPSPPPAITPSPPLTPSPLPPSPTTPSPPPPSPSIPSPPLTPSPPPSSPLRPSSPPPPSPATPSTPPRSPPPPSTPTPPPRVGSLSPPPPASPSGGRSPSTPSTTPGSSPPAQSSKELSKGAMVGIAIGGGFVLLVALALIFFLCKKKRRRDNEAPPAPIDGVPYGGQQQQNASRRSDHVVMSVPPPKSPSSAPPRPPHFMSSGSSGDYDSNYSDQSVLPPPSPGLALGLGIYQGTFNYEELSRATNGFSEANLLGQGGFGYVFKGMLRNGKEVAVKQLKEGSSQGEREFQAEVGIISRVHHRHLVALVGYCIADAQRLLVYEFVPNNTLEFHLHGKGRPTMEWSSRLKIAVGSAKGLSYLHENCNPKIIHRDIKASNILIDFKFEAKVADFGLAKIASDTNTHVSTRVMGTFGYLAPEYASSGKLTEKSDVFSFGVVLLELITGRRPIDVNNVHADNSLVDWARPLLNQVSELGNFEVVVDKKLNNEYDKEEMARMVACAAACVRSTAPRRPRMDQVARVLEGNISPSDLNQGITPGHSNVYGSSGGSTDYDSSQDNEGMNKFRKVGLETQDLYSNPISEYDLYPSWSSTDGQTTQGKATGNIKRPGQGYG

SEQ ID NO: 28800 - protein, 490 aa, Arabidopsis thaliana
  misc_feature (1)..(490): Ceres Seq. ID no. 3070339
MVGIAIGGGFVLLVALALIFFLCKKKRRRDNEAPPAPIDGVPYGGQQQQNASRRSDHVVMSVPPPKSPSSAPPRPPHFMSSGSSGDYDSNYSDQSVLPPPSPGLALGLGIYQGTFNYEELSRATNGFSEANLLGQGGFGYVFKGMLRNGKEVAVKQLKEGSSQGEREFQAEVGIISRVHHRHLVALVGYCIADAQRLLVYEFVPNNTLEFHLHGKGRPTMEWSSRLKIAVGSAKGLSYLHENCNPKIIHRDIKASNILIDFKFEAKVADFGLAKIASDTNTHVSTRVMGTFGYLAPEYASSGKLTEKSDVFSFGVVLLELITGRRPIDVNNVHADNSLVDWARPLLNQVSELGNFEVVVDKKLNNEYDKEEMARMVACAAACVRSTAPRRPRMDQVARVLEGNISPSDLNQGITPGHSNVYGSSGGSTDYDSSQDNEGMNKFRKVGLETQDLYSNPISEYDLYPSWSSTDGQTTQGKATGNIKRPGQGYG

SEQ ID NO: 28801 - protein, 431 aa, Arabidopsis thaliana
  misc_feature (1)..(431): Ceres Seq. ID no. 3070340
MSVPPPKSPSSAPPRPPHFMSSGSSGDYDSNYSDQSVLPPPSPGLALGLGIYQGTFNYEELSRATNGFSEANLLGQGGFGYVFKGMLRNGKEVAVKQLKEGSSQGEREFQAEVGIISRVHHRHLVALVGYCIADAQRLLVYEFVPNNTLEFHLHGKGRPTMEWSSRLKIAVGSAKGLSYLHENCNPKIIHRDIKASNILIDFKFEAKVADFGLAKIASDTNTHVSTRVMGTFGYLAPEYASSGKLTEKSDVFSFGVVLLELITGRRPIDVNNVHADNSLVDWARPLLNQVSELGNFEVVVDKKLNNEYDKEEMARMVACAAACVRSTAPRRPRMDQVARVLEGNISPSDLNQGITPGHSNVYGSSGGSTDYDSSQDNEGMNKFRKVGLETQDLYSNPISEYDLYPSWSSTDGQTTQGKATGNIKRPGQGYG

SEQ ID NO: 28802 - DNA, 693 bp, Arabidopsis thaliana
  misc_feature (1)..(693): Ceres Seq. ID no. 3071019
atggatccagatgcagtcaaatcgactctctcgaatctagcatttggaaatgtaatggcggctgctgcaagaaattatcaaaaggaagttcttgcaaatgagaaggcgcaaggatcaaatcctgttaatgaagaggttgatcttgatgaacttatggatgatccagagctagaaagattgcacgcagataggattgcagcactaaagagagaggttgagaagagagaatcgtttaaaagacaagggcatggtgaatatcgagaggtgagtgaaggagatttcttgggtgaagtcaccaggagtgagaaagtgatatgtcatttctaccataaggaattttaccggtgcaagattatggacaagcatctgaaaactcttgcacctagacatgtggacacaaagttcattaaagtggacgcagagaatgctcctttctttgtcacgaagcttgcaataaagactttgccttgcgttgtgcttttcagcaagggagttgcgatggataggctagttgggttccaggatctgggaaccaaggacgatttcacaacgaataaactagagaacgttcttcttaaaaagggaatgctcagcaagaagaagaaagaggaagatgatgaagacgccgaatatcaagagagcatacggaggtctgttaggtcttcagagaatctggactctgattctgactga

SEQ ID NO: 28803 - protein, 230 aa, Arabidopsis thaliana
  misc_feature (1)..(230): Ceres Seq. ID no. 3071020
MDPDAVKSTLSNLAFGNVMAAAARNYQKEVLANEKAQGSNPVNEEVDLDELMDDPELERLHADRIAALKREVEKRESFKRQGHGEYREVSEGDFLGEVTRSEKVICHFYHKEFYRCKIMDKHLKTLAPRHVDTKFIKVDAENAPFFVTKLAIKTLPCVVLFSKGVAMDRLVGFQDLGTKDDFTTNKLENVLLKKGMLSKKKKEEDDEDAEYQESIRRSVRSSENLDSDSD

SEQ ID NO: 28804 - protein, 212 aa, Arabidopsis thaliana
  misc_feature (1)..(212): Ceres Seq. ID no. 3071021
MAAAARNYQKEVLANEKAQGSNPVNEEVDLDELMDDPELERLHADRIAALKREVEKRESFKRQGHGEYREVSEGDFLGEVTRSEKVICHFYHKEFYRCKIMDKHLKTLAPRHVDTKFIKVDAENAPFFVTKLAIKTLPCVVLFSKGVAMDRLVGFQDLGTKDDFTTNKLENVLLKKGMLSKKKKEEDDEDAEYQESIRRSVRSSENLDSDSD

SEQ ID NO: 28805 - protein, 179 aa, Arabidopsis thaliana
  misc_feature (1)..(179): Ceres Seq. ID no. 3071022
MDDPELERLHADRIAALKREVEKRESFKRQGHGEYREVSEGDFLGEVTRSEKVICHFYHKEFYRCKIMDKHLKTLAPRHVDTKFIKVDAENAPFFVTKLAIKTLPCVVLFSKGVAMDRLVGFQDLGTKDDFTTNKLENVLLKKGMLSKKKKEEDDEDAEYQESIRRSVRSSENLDSDSD

SEQ ID NO: 28806 - DNA, 804 bp, Arabidopsis thaliana
  misc_feature (1)..(804): Ceres Seq. ID no. 3073080
atggataccaacgcaaaaacaattttcttcatggctatgtgtttcatctatctatctttccctaatatttcacacgctcattctgaagtcgacgacgaaactccatttacttacgaacaaaaaacggaaaagggaccagagggatggggcaaaataaatccgcactggaaagtttgtaacaccggaagatatcaatccccgatcgatcttactaacgaaagagtcagtcttattcatgatcaagcatggacaagacaatataaaccagctccggctgtaattacaaacagaggccatgacattatggtatcatggaaaggagatgctgggaagatgacaatacggaaaacggattttaatttggtgcaatgccattggcattcaccttctgagcataccgttaacggaactaggtacgacctagagcttcacatggttcacacgagtgcacgaggcagaactgcggttatcggagttctttacaaattaggcgaacctaatgaattcctcaccaagctactaaatggaataaaagcagtgggaaataaagagataaatctagggatgattgatccacgagagattaggtttcaaacaagaaaattctatagatacattggctctctcactgttcctccttgcactgaaggcgtcatttggactgtcgtcaaaagggtgaacacaatatcaatggagcaaattacagctcttaggcaagccgttgacgatggatttgagacaaattcaagaccggttcaagactcaaagggaagatcagtttggttctatgatccaaatgtttga

SEQ ID NO: 28807 - protein, 267 aa, Arabidopsis thaliana
  misc_feature (1)..(267): Ceres Seq. ID no. 3073081
MDTNAKTIFFMAMCFIYLSFPNISHAHSEVDDETPFTYEQKTEKGPEGWGKINPHWKVCNTGRYQSPIDLTNERVSLIHDQAWTRQYKPAPAVITNRGHDIMVSWKGDAGKMTIRKTDFNLVQCHWHSPSEHTVNGTRYDLELHMVHTSARGRTAVIGVLYKLGEPNEFLTKLLNGIKAVGNKEINLGMIDPREIRFQTRKFYRYIGSLTVPPCTEGVIWTVVKRVNTISMEQITALRQAVDDGFETNSRPVQDSKGRSVWFYDPNV

SEQ ID NO: 28808 - protein, 257 aa, Arabidopsis thaliana
  misc_feature (1)..(257): Ceres Seq. ID no. 3073082
MAMCFIYLSFPNISHAHSEVDDETPFTYEQKTEKGPEGWGKINPHWKVCNTGRYQSPIDLTNERVSLIHDQAWTRQYKPAPAVITNRGHDIMVSWKGDAGKMTIRKTDFNLVQCHWHSPSEHTVNGTRYDLELHMVHTSARGRTAVIGVLYKLGEPNEFLTKLLNGIKAVGNKEINLGMIDPREIRFQTRKFYRYIGSLTVPPCTEGVIWTVVKRVNTISMEQITALRQAVDDGFETNSRPVQDSKGRSVWFYDPNV

SEQ ID NO: 28809 - protein, 255 aa, Arabidopsis thaliana
  misc_feature (1)..(255): Ceres Seq. ID no. 3073083
MCFIYLSFPNISHAHSEVDDETPFTYEQKTEKGPEGWGKINPHWKVCNTGRYQSPIDLTNERVSLIHDQAWTRQYKPAPAVITNRGHDIMVSWKGDAGKMTIRKTDFNLVQCHWHSPSEHTVNGTRYDLELHMVHTSARGRTAVIGVLYKLGEPNEFLTKLLNGIKAVGNKEINLGMIDPREIRFQTRKFYRYIGSLTVPPCTEGVIWTVVKRVNTISMEQITALRQAVDDGFETNSRPVQDSKGRSVWFYDPNV

SEQ ID NO: 28810 - DNA, 3435 bp, Arabidopsis thaliana
  misc_feature (1)..(3435): Ceres Seq. ID no. 3073438
atggtttacttttggttatatttctcttttggtttttcgtttcttttgctgtcactgatagctatcgtatttgtgaaagcagagcaaatgtatccgactcctaaggaaatggaggacttggggaagtctttagggttaacattgaaggaagtacgtggatggttcaagagaagaaggagtagagggaaaggtgtaaaatccatggcgaatgatgggttgggagcaaagaatcctcagttatacgatagatccctcatgaggagttccacatcttccagatgcgttggagtagctgttgaggaaagatgtattgtgggaacaaggaaggccagttgtcaaaacttgttgccttcatcacacattttggctaaagtttttcgaaaggatggtccatcgcttggttctgaatttgatcatctcccgtctggagctcgcaaagcttcttggctgggcacttcttctgtcggtcaacagaaacagaaagtggcaagaaaaagaaagatttctgagctgatggatcataccagtcaggattgcattcaagagaatgctactgtgatgaaacatggtattggaaagggtttgatgactgtatggcgtgtaatgaatccaaacaggagggatgtatctccttgcgttgatttattggatgaaagagctacattacctcaaagctcagcacgtaatcccccacatcaaaagaaaaagcaaagacaattagcatcaatactgaagcagaaactgttgcagaagaggtcgacagaaaagaagaggcgttctatacatagagaggcggaattaaacaaagatgaaactcagagagaatttaaagaaaactgtgagcttgccgcggacggggaggtatttaaagaaacctgccagacaatttcgacactagtggatgacgaggaattagagatgcgtgagcgacatgagcgaggaaatccgttgacatgttcatgccatcatcctagtagtggatctcatggttgttttctttgcaaaggtattgccatgcggtcctctgacagttctttattgtttccagatttattgcccaagtttcccccaaactctgttcagatgaggatgccttttggtttgcatccatggaattcttctccagagtctgttaagaaactgtttaaggattccttgctccttggtaaaattcatctttccctgctgaagctgcttttgcttgatgttgaaaccgagctggaaaggggatctttttcaaacttgagtatatcatgcaagtttctagccctgcttcagtcggttgagagccaaattcttattcttgatatgtggagaaattcattaaattctcttacatggacggaactattgcggcagatattggttgccgctggttatggttcattgaagtgtgctgttcaatcagaagaactaagtaagcaactagcatctacttgttttgttcttggagatagatcagttatatgtggggaattgaaggctcttgctcgattatattttgttattgatgatatccacatgaaactcatgaaaaagtatggccttcgtcttggaacgttaaagggtgaattatttagaatgcttaatgggcaaggcaataatggcttgaaaatatccgagttagccgatgctccagaggttgctgtgctaaatcttgcaactgtaccagaagaacgagagaattcaatatgttcaactctagcaagtgatattacattattcgaaaagatatcagaatcaacgtatcgtgtacgtgttaattgtttctctgaggaccctgacaagagccagtctgattcggacgactccgggagtgttgatgatgaatctgatgattgctcaattagttctggtgatgaaattgaacatgtttcagaaaatcctgcacttcgaaaagttaagtgtaggaaaaggcggaagcataaaagtaaaatgcgggaagtatgtagtgagattgatgaaagccatcccggagaaccatggctgttggggctaatggaaggcgaatattcagacctaagcgttgaagagaagttagatgtttttgtggctttgattgatcttcttagttctggttccactatcagaatggaggatctaccgagagctgtggctgactgtgcccctagtatctatagtcatggttctggtggaaaaattaagcgatcctcctctaatcagtacagctatccacgtggatcatgggtccatggaggagagctttatggaataaaagcactatctaaatcgtctgattctcatccagttgattcttcatcaattgtgggggcatttgcaaagctggctggaaatagagcgaataatgttcaccctatgcaatctgtgtaccttggttctgatcgaaggttcaacaggtactggcttttcttaggcacatgcaatgcaaatgaccctggtcataggtgtgtgttctttgaatcttctgaagatggtcattgggaagttatcaacaacaaggaggctttgcgggcgctgttgtcagttttggacgataggggcagacgggaagctcgtcttattgagtcgttggagaaacgagaaagttttctttgtcaagccatgctgagtagacaggtgacccagtcggagacagcccatttcacagatatagttagagaggacagttcttcacctgtttctgatatagacaacaacctatgtctgaatgaaattgccaatgatcaattctcctcgcaacatgcggctatagtatttgagattggaagtaagcgggagaaaagcttattgtggagccttattcaggaatttgatgattggatatgggcaaattttaattttaatctcaattctgttaaacaccgccgaagatcctaccttgattcacttactaggtgtaagagttgccatgatttgtattggagagatgagaagcactgtaagatttgccatgccacgtttgaggttgatatagatcttgaagaaagatatgcgattcatgcggccacatgtatgaggaaagaagagtgtgatacatttccggatcataaagttctatcttcccagttgcaatcactaaaagctgcagtatatgccattgagtctgctatgcctgaagatgccttgattggtgcatggagaaagtcagctcataggttatgggcgaaaagacttcggcgaagctcatctgtgtctgaaattacgcaggtgattggcgactttgttggggcaatcaatgaagaatggctatggcactgtagtgatcaagggcagactttaatgggagaaatcataaattgcttcccttcgatgcctcaaacaacttctgcgattgctctctggttggtaaaattggataccttgattgctccctatgtcgaaaaagctccacctgaaagggatcaaccgttgtgcaggaccagaaatacaagtagacgagcgtctaagcggtag

SEQ ID NO: 28811 - protein, 1144 aa, Arabidopsis thaliana
  misc_feature (1)..(1144): Ceres Seq. ID no. 3073439
MVYFWLYFSFGFSFLLLSLIAIVFVKAEQMYPTPKEMEDLGKSLGLTLKEVRGWFKRRRSRGKGVKSMANDGLGAKNPQLYDRSLMRSSTSSRCVGVAVEERCIVGTRKASCQNLLPSSHILAKVFRKDGPSLGSEFDHLPSGARKASWLGTSSVGQQKQKVARKRKISELMDHTSQDCIQENATVMKHGIGKGLMTVWRVMNPNRRDVSPCVDLLDERATLPQSSARNPPHQKKKQRQLASILKQKLLQKRSTEKKRRSIHREAELNKDETQREFKENCELAADGEVFKETCQTISTLVDDEELEMRERHERGNPLTCSCHHPSSGSHGCFLCKGIAMRSSDSSLLFPDLLPKFPPNSVQMRMPFGLHPWNSSPESVKKLFKDSLLLGKIHLSLLKLLLLDVETELERGSFSNLSISCKFLALLQSVESQILILDMWRNSLNSLTWTELLRQILVAAGYGSLKCAVQSEELSKQLASTCFVLGDRSVICGELKALARLYFVIDDIHMKLMKKYGLRLGTLKGELFRMLNGQGNNGLKISELADAPEVAVLNLATVPEERENSICSTLASDITLFEKISESTYRVRVNCFSEDPDKSQSDSDDSGSVDDESDDCSISSGDEIEHVSENPALRKVKCRKRRKHKSKMREVCSEIDESHPGEPWLLGLMEGEYSDLSVEEKLDVFVALIDLLSSGSTIRMEDLPRAVADCAPSIYSHGSGGKIKRSSSNQYSYPRGSWVHGGELYGIKALSKSSDSHPVDSSSIVGAFAKLAGNRANNVHPMQSVYLGSDRRFNRYWLFLGTCNANDPGHRCVFFESSEDGHWEVINNKEALRALLSVLDDRGRREARLIESLEKRESFLCQAMLSRQVTQSETAHFTDIVREDSSSPVSDIDNNLCLNEIANDQFSSQHAAIVFEIGSKREKSLLWSLIQEFDDWIWANFNFNLNSVKHRRRSYLDSLTRCKSCHDLYWRDEKHCKICHATFEVDIDLEERYAIHAATCMRKEECDTFPDHKVLSSQLQSLKAAVYAIESAMPEDALIGAWRKSAHRLWAKRLRRSSSVSEITQVIGDFVGAINEEWLWHCSDQGQTLMGEIINCFPSMPQTTSAIALWLVKLDTLIAPYVEKAPPERDQPLCRTRNTSRRASKR

SEQ ID NO: 28812 - protein, 1115 aa, Arabidopsis thaliana
  misc_feature (1)..(1115): Ceres Seq. ID no. 3073440
MYPTPKEMEDLGKSLGLTLKEVRGWFKRRRSRGKGVKSMANDGLGAKNPQLYDRSLMRSSTSSRCVGVAVEERCIVGTRKASCQNLLPSSHILAKVFRKDGPSLGSEFDHLPSGARKASWLGTSSVGQQKQKVARKRKISELMDHTSQDCIQENATVMKHGIGKGLMTVWRVMNPNRRDVSPCVDLLDERATLPQSSARNPPHQKKKQRQLASILKQKLLQKRSTEKKRRSIHREAELNKDETQREFKENCELAADGEVFKETCQTISTLVDDEELEMRERHERGNPLTCSCHHPSSGSHGCFLCKGIAMRSSDSSLLFPDLLPKFPPNSVQMRMPFGLHPWNSSPESVKKLFKDSLLLGKIHLSLLKLLLLDVETELERGSFSNLSISCKFLALLQSVESQILILDMWRNSLNSLTWTELLRQILVAAGYGSLKCAVQSEELSKQLASTCFVLGDRSVICGELKALARLYFVIDDIHMKLMKKYGLRLGTLKGELFRMLNGQGNNGLKISELADAPEVAVLNLATVPEERENSICSTLASDITLFEKISESTYRVRVNCFSEDPDKSQSDSDDSGSVDDESDDCSISSGDEIEHVSENPALRKVKCRKRRKHKSKMREVCSEIDESHPGEPWLLGLMEGEYSDLSVEEKLDVFVALIDLLSSGSTIRMEDLPRAVADCAPSIYSHGSGGKIKRSSSNQYSYPRGSWVHGGELYGIKALSKSSDSHPVDSSSIVGAFAKLAGNRANNVHPMQSVYLGSDRRFNRYWLFLGTCNANDPGHRCVFFESSEDGHWEVINNKEALRALLSVLDDRGRREARLIESLEKRESFLCQAMLSRQVTQSETAHFTDIVREDSSSPVSDIDNNLCLNEIANDQFSSQHAAIVFEIGSKREKSLLWSLIQEFDDWIWANFNFNLNSVKHRRRSYLDSLTRCKSCHDLYWRDEKHCKICHATFEVDIDLEERYAIHAATCMRKEECDTFPDHKVLSSQLQSLKAAVYAIESAMPEDALIGAWRKSAHRLWAKRLRRSSSVSEITQVIGDFVGAINEEWLWHCSDQGQTLMGEIINCFPSMPQTTSAIALWLVKLDTLIAPYVEKAPPERDQPLCRTRNTSRRASKR

SEQ ID NO: 28813 - protein, 1108 aa, Arabidopsis thaliana
  misc_feature (1)..(1108): Ceres Seq. ID no. 3073441
MEDLGKSLGLTLKEVRGWFKRRRSRGKGVKSMANDGLGAKNPQLYDRSLMRSSTSSRCVGVAVEERCIVGTRKASCQNLLPSSHILAKVFRKDGPSLGSEFDHLPSGARKASWLGTSSVGQQKQKVARKRKISELMDHTSQDCIQENATVMKHGIGKGLMTVWRVMNPNRRDVSPCVDLLDERATLPQSSARNPPHQKKKQRQLASILKQKLLQKRSTEKKRRSIHREAELNKDETQREFKENCELAADGEVFKETCQTISTLVDDEELEMRERHERGNPLTCSCHHPSSGSHGCFLCKGIAMRSSDSSLLFPDLLPKFPPNSVQMRMPFGLHPWNSSPESVKKLFKDSLLLGKIHLSLLKLLLLDVETELERGSFSNLSISCKFLALLQSVESQILILDMWRNSLNSLTWTELLRQILVAAGYGSLKCAVQSEELSKQLASTCFVLGDRSVICGELKALARLYFVIDDIHMKLMKKYGLRLGTLKGELFRMLNGQGNNGLKISELADAPEVAVLNLATVPEERENSICSTLASDITLFEKISESTYRVRVNCFSEDPDKSQSDSDDSGSVDDESDDCSISSGDEIEHVSENPALRKVKCRKRRKHKSKMREVCSEIDESHPGEPWLLGLMEGEYSDLSVEEKLDVFVALIDLLSSGSTIRMEDLPRAVADCAPSIYSHGSGGKIKRSSSNQYSYPRGSWVHGGELYGIKALSKSSDSHPVDSSSIVGAFAKLAGNRANNVHPMQSVYLGSDRRFNRYWLFLGTCNANDPGHRCVFFESSEDGHWEVINNKEALRALLSVLDDRGRREARLIESLEKRESFLCQAMLSRQVTQSETAHFTDIVREDSSSPVSDIDNNLCLNEIANDQFSSQHAAIVFEIGSKREKSLLWSLIQEFDDWIWANFNFNLNSVKHRRRSYLDSLTRCKSCHDLYWRDEKHCKICHATFEVDIDLEERYAIHAATCMRKEECDTFPDHKVLSSQLQSLKAAVYAIESAMPEDALIGAWRKSAHRLWAKRLRRSSSVSEITQVIGDFVGAINEEWLWHCSDQGQTLMGEIINCFPSMPQTTSAIALWLVKLDTLIAPYVEKAPPERDQPLCRTRNTSRRASKR

SEQ ID NO: 28814 - DNA, 732 bp, Arabidopsis thaliana
  misc_feature (1)..(732): Ceres Seq. ID no. 3074320
atggcgaaaaggctgccattgattttcctccttacttcacattttttagtatcgggagtgttgtccatgagtatccttaccatagagaacaagtgcaatcacacagtttggccagttatcttctcatggaacgttgactcacaagtctccccaacaggctttgctctcagaagaggggaggctcgagccctacaggcgccatcttcatggtacggtcttatctcggctaggacgctatgctccatcgactcaacaggaacattctcttgcgccacaggagactgcgaatcgggtacgatcgagtgtcctggcaattacggttgggctccggtgacttatgtctactttagaatgaacagctacaccatcagtgttgagtacggttacaaccttccactaatggtggtcccttcacagcgtagccggacatgtatcagcgctggttgcgttgttgaactgaaaaagacttgtccaaaagatcttatgaaaatgtccagagaaaatctagtcgcctgtagtagcacgtgcatggagtttgatactccggaggcttgttgcacccgagacttcaagtcaaagcaaaactgcaagccgacagtgtacacgcagaactttgagcgagcttgcccactcgctcatatctacgcctatgatgataacaatagcaccgttacatgcctaaactctactgactacgtcatcacgttttgtccttcaaacaaaactaattag

SEQ ID NO: 28815 - protein, 243 aa, Arabidopsis thaliana
  misc_feature (1)..(243): Ceres Seq. ID no. 3074321
MAKRLPLIFLLTSHFLVSGVLSMSILTIENKCNHTVWPVIFSWNVDSQVSPTGFALRRGEARALQAPSSWYGLISARTLCSIDSTGTFSCATGDCESGTIECPGNYGWAPVTYVYFRMNSYTISVEYGYNLPLMVVPSQRSRTCISAGCVVELKKTCPKDLMKMSRENLVACSSTCMEFDTPEACCTRDFKSKQNCKPTVYTQNFERACPLAHIYAYDDNNSTVTCLNSTDYVITFCPSNKTN

SEQ ID NO: 28816 - protein, 221 aa, Arabidopsis thaliana
  misc_feature (1)..(221): Ceres Seq. ID no. 3074322
MSILTIENKCNHTVWPVIFSWNVDSQVSPTGFALRRGEARALQAPSSWYGLISARTLCSIDSTGTFSCATGDCESGTIECPGNYGWAPVTYVYFRMNSYTISVEYGYNLPLMVVPSQRSRTCISAGCVVELKKTCPKDLMKMSRENLVACSSTCMEFDTPEACCTRDFKSKQNCKPTVYTQNFERACPLAHIYAYDDNNSTVTCLNSTDYVITFCPSNKTN

SEQ ID NO: 28817 - protein, 126 aa, Arabidopsis thaliana
  misc_feature (1)..(126): Ceres Seq. ID no. 3074323
MNSYTISVEYGYNLPLMVVPSQRSRTCISAGCVVELKKTCPKDLMKMSRENLVACSSTCMEFDTPEACCTRDFKSKQNCKPTVYTQNFERACPLAHIYAYDDNNSTVTCLNSTDYVITFCPSNKTN

SEQ ID NO: 28818 - DNA, 864 bp, Arabidopsis thaliana
  misc_feature (1)..(864): Ceres Seq. ID no. 3074433
atggtgactgtaaaccctagccaagctcattgtttgcctatgaaaatgagtctaccgggtttcaatactcttccccacacggcaacaacgataccggtttccatacggagcaataggacgatgtcgttttttgaggatccaacaaagaaggttagaaagccttacactatcaccaaatctagagagaactggacggagcaagaacacgacaagttccttgaagcccttcatctatttgaccgggattggaagaaaataaaggcctttgttggatcaaaaacagtgatacagatacgaagccacgcacagaagtactttctcaaagttcagaagaatgggactaaagaacatctcccacctcctcgaccaaagaggaaagccaatcacccatatccacaaaaagctcctaaatttactctttcttcttcaaacgcattatttcaacatgactacttatacaacactaattcacatccggtgattagcaccacccgtaagcatggattagtgcattgcgatgttagtataccaagttctgttatcaaagaggaatttggtgtctcagagaactgttgcagcactagtagtagtagagataagcagaggactagaatcgttacagagacaaatgaccaagaaagttgtggaaagccacatagagtggcgccaaatttcgctgaagtttacaattttataggaagtgtgtttgatcctaaaacaacaggtcatgtcaagagattaaaggaaatggatccaataaatcttgagacggttctcttactgatgaaaaatttatctgtaaacctgacgagtcccgagtttgatgaacaacggaagttgatatcatcttacaacgccagttag

SEQ ID NO: 28819 - protein, 287 aa, Arabidopsis thaliana
  misc_feature (1)..(287): Ceres Seq. ID no. 3074434
MVTVNPSQAHCLPMKMSLPGFNTLPHTATTIPVSIRSNRTMSFFEDPTKKVRKPYTITKSRENWTEQEHDKFLEALHLFDRDWKKIKAFVGSKTVIQIRSHAQKYFLKVQKNGTKEHLPPPRPKRKANHPYPQKAPKFTLSSSNALFQHDYLYNTNSHPVISTTRKHGLVHCDVSIPSSVIKEEFGVSENCCSTSSSRDKQRTRIVTETNDQESCGKPHRVAPNFAEVYNFIGSVFDPKTTGHVKRLKEMDPINLETVLLLMKNLSVNLTSPEFDEQRKLISSYNAS

SEQ ID NO: 28820 - protein, 274 aa, Arabidopsis thaliana
  misc_feature (1)..(274): Ceres Seq. ID no. 3074435
MKMSLPGFNTLPHTATTIPVSIRSNRTMSFFEDPTKKVRKPYTITKSRENWTEQEHDKFLEALHLFDRDWKKIKAFVGSKTVIQIRSHAQKYFLKVQKNGTKEHLPPPRPKRKANHPYPQKAPKFTLSSSNALFQHDYLYNTNSHPVISTTRKHGLVHCDVSIPSSVIKEEFGVSENCCSTSSSRDKQRTRIVTETNDQESCGKPHRVAPNFAEVYNFIGSVFDPKTTGHVKRLKEMDPINLETVLLLMKNLSVNLTSPEFDEQRKLISSYNAS

SEQ ID NO: 28821 - protein, 272 aa, Arabidopsis thaliana
  misc_feature (1)..(272): Ceres Seq. ID no. 3074436
MSLPGFNTLPHTATTIPVSIRSNRTMSFFEDPTKKVRKPYTITKSRENWTEQEHDKFLEALHLFDRDWKKIKAFVGSKTVIQIRSHAQKYFLKVQKNGTKEHLPPPRPKRKANHPYPQKAPKFTLSSSNALFQHDYLYNTNSHPVISTTRKHGLVHCDVSIPSSVIKEEFGVSENCCSTSSSRDKQRTRIVTETNDQESCGKPHRVAPNFAEVYNFIGSVFDPKTTGHVKRLKEMDPINLETVLLLMKNLSVNLTSPEFDEQRKLISSYNAS

SEQ ID NO: 28822 - DNA, 318 bp, Arabidopsis thaliana
  misc_feature (1)..(318): Ceres Seq. ID no. 3075564
atgtcggctcattggacgtttaagacaaaggaattagaagatcaggtggagaatcaaaggagaattgatcaggagctgaagaagaaggtgctgaagttagaattttgcctacgcgaaacacgcatccaaactcgaaaacttcaaaagatgggagagcgaaacgatatggcaatacaagaagtactcaacgagcaattggctgcaaaaaaacagcatgaagctgatctttctagcaaccaaaacttgtgggacaaatcaggtttcaagattattgtctccatgtcgatgctgatattagttgccttttctaggcgttga

SEQ ID NO: 28823 - protein, 105 aa, Arabidopsis thaliana
  misc_feature (1)..(105): Ceres Seq. ID no. 3075565
MSAHWTFKTKELEDQVENQRRIDQELKKKVLKLEFCLRETRIQTRKLQKMGERNDMAIQEVLNEQLAAKKQHEADLSSNQNLWDKSGFKIIVSMSMLILVAFSRR

SEQ ID NO: 28824 - protein, 56 aa, Arabidopsis thaliana
  misc_feature (1)..(56): Ceres Seq. ID no. 3075566
MGERNDMAIQEVLNEQLAAKKQHEADLSSNQNLWDKSGFKIIVSMSMLILVAFSRR

SEQ ID NO: 28825 - DNA, 870 bp, Arabidopsis thaliana
  misc_feature (1)..(870): Ceres Seq. ID no. 3077477
aacccacaaattgatctcttctctcttctcttacaccatcttcttcattcaccatgggaagatctccttgttgtgaaaaagctcacacaaacaaaggagcttggactaaagaagaagatcaacgtctcgtagattatatccgtaatcacggtgaaggttgttggcgttctcttcctaaatccgctggattgttgcgttgtggtaaaagttgtagattgagatggattaattaccttcgtcctgatcttaaacgtggtaattttactgatgatgaagatcaaatcatcatcaaactccatagcttactcggtaacaaatggtcattgatagctggaagattaccaggaagaacagataacgaaataaagaattattggaacactcatattaagaggaagcttcttagtcacggtattgatccacaaactcatcgtcagattaacgaatccaaaacggtgtcgtctcaagttgttgttcctattcaaaacgatgccgttgagtattctttttccaatttagccgttaaaccgaagacggaaaattcctccgataacggagcttcgactagcggcacgacgacggacgaggatctccggcagaatggggagtgttattatagtgataattcaggacatataaagctgaatttggatttaactcttgggtttggatcctggtcgggtcggatagtcggagtcgggtcatcggctgattctaaaccgtggtgcgacccggtgatggaggcgcgtttgtcactgttgtaataatttgtcaaaaaaatcccaaaaaatgggttttgttacttcatttttttttttgcttgagtccttttggataaatatagaaattctttacttcagtttctttggt

SEQ ID NO: 28826 - protein, 236 aa, Arabidopsis thaliana
  misc_feature (1)..(236): Ceres Seq. ID no. 3077478
MGRSPCCEKAHTNKGAWTKEEDQRLVDYIRNHGEGCWRSLPKSAGLLRCGKSCRLRWINYLRPDLKRGNFTDDEDQIIIKLHSLLGNKWSLIAGRLPGRTDNEIKNYWNTHIKRKLLSHGIDPQTHRQINESKTVSSQVVVPIQNDAVEYSFSNLAVKPKTENSSDNGASTSGTTTDEDLRQNGECYYSDNSGHIKLNLDLTLGFGSWSGRIVGVGSSADSKPWCDPVMEARLSLL

SEQ ID NO: 28827 - DNA, 1350 bp, Arabidopsis thaliana
  misc_feature (1)..(1350): Ceres Seq. ID no. 3081672
atggaattcagttgtgttcattttcttcaaaacaagacgattcttgtcacaggcgcaaccggtttccttgccaaagtttttgtggagaaaatattgagagtgcaaccaaatgtgaataagctgtacctcgtggtgagagcatccgacaatgaagccgcgacgaaacgcttacgcacagaggcattcgagaaagatcttttcaaggtgttaagagataatcttggcgatgagaaattgaatacattgttgtccgaaaaagttgtcccggtcgcaggtgatatcgcgatggatcatttaggcatgaaggactctaatctaagagaacgtatgcaaaaagaaatcgatattgttgtcaatgtcgcagctacaactaatttcgacgagagatatgatattggtcttggaataaacacatttggagctctcaatgtccttaacttcgccaaaaaatgtgttaaagctcaattgcttctccatgtttcaactgcttatgtttgcggagaaaaaccaggtctcctacctgaaaaaccgttcgtcatggaagagatttgtaatgagaatggtcttcaattggatataaaccttgaaagggagctgatgaaacaaagattgaaagaactcaatgaacaaggttgttcagaagaaggcactactttctacatgaaagaactcggcatggaaagggcaaagcttcatggatggccaaacacatatgttttcaccaaatcgatgggagagatgcttcttggtaaccataaagaaaatcttcctctcgtcattatccgtcccacgatgatcactagcactctttttgaaccatttcctggttggattgaaggactaagaactgtagacagtgtaattattgcgtacggaaagggagtgctcaagtgttttcttgtcgatgtaaactcggtttgcgatatgataccagcggatatggtggcaaacgcgatgatcgcagctgcagccacacatgctggaggttcaaaggttcacatggtgtaccaatcgcaatggctcaatgataactgtctcgaaaatgaagctgataccaactctggctttgttcagcctctacatgaccatacggaaggagacgaatacaaaaacaaaaaccgcaagatcgatatggtgatgagattggtaaagctttacgagccttacgtactcttcaagggcatattcgacgataggaatactaaaaacttatgcgccaagcagaaagaagaggacaacagaaattcagaaaattttatgtttgatttcgaccctaaaatcattaaatggaaagattatcttataaatgtacacattcctggcctcatcactcacgtgcttaagaagtaa

SEQ ID NO: 28828 - protein, 449 aa, Arabidopsis thaliana
  misc_feature (1)..(449): Ceres Seq. ID no. 3081673
MEFSCVHFLQNKTILVTGATGFLAKVFVEKILRVQPNVNKLYLVVRASDNEAATKRLRTEAFEKDLFKVLRDNLGDEKLNTLLSEKVVPVAGDIAMDHLGMKDSNLRERMQKEIDIVVNVAATTNFDERYDIGLGINTFGALNVLNFAKKCVKAQLLLHVSTAYVCGEKPGLLPEKPFVMEEICNENGLQLDINLERELMKQRLKELNEQGCSEEGTTFYMKELGMERAKLHGWPNTYVFTKSMGEMLLGNHKENLPLVIIRPTMITSTLFEPFPGWIEGLRTVDSVIIAYGKGVLKCFLVDVNSVCDMIPADMVANAMIAAAATHAGGSKVHMVYQSQWLNDNCLENEADTNSGFVQPLHDHTEGDEYKNKNRKIDMVMRLVKLYEPYVLFKGIFDDRNTKNLCAKQKEEDNRNSENFMFDFDPKIIKWKDYLINVHIPGLITHVLKK

SEQ ID NO: 28829 - protein, 354 aa, Arabidopsis thaliana
  misc_feature (1)..(354): Ceres Seq. ID no. 3081674
MDHLGMKDSNLRERMQKEIDIVVNVAATTNFDERYDIGLGINTFGALNVLNFAKKCVKAQLLLHVSTAYVCGEKPGLLPEKPFVMEEICNENGLQLDINLERELMKQRLKELNEQGCSEEGTTFYMKELGMERAKLHGWPNTYVFTKSMGEMLLGNHKENLPLVIIRPTMITSTLFEPFPGWIEGLRTVDSVIIAYGKGVLKCFLVDVNSVCDMIPADMVANAMIAAAATHAGGSKVHMVYQSQWLNDNCLENEADTNSGFVQPLHDHTEGDEYKNKNRKIDMVMRLVKLYEPYVLFKGIFDDRNTKNLCAKQKEEDNRNSENFMFDFDPKIIKWKDYLINVHIPGLITHVLKK

SEQ ID NO: 28830 - protein, 349 aa, Arabidopsis thaliana
  misc_feature (1)..(349): Ceres Seq. ID no. 3081675
MKDSNLRERMQKEIDIVVNVAATTNFDERYDIGLGINTFGALNVLNFAKKCVKAQLLLHVSTAYVCGEKPGLLPEKPFVMEEICNENGLQLDINLERELMKQRLKELNEQGCSEEGTTFYMKELGMERAKLHGWPNTYVFTKSMGEMLLGNHKENLPLVIIRPTMITSTLFEPFPGWIEGLRTVDSVIIAYGKGVLKCFLVDVNSVCDMIPADMVANAMIAAAATHAGGSKVHMVYQSQWLNDNCLENEADTNSGFVQPLHDHTEGDEYKNKNRKIDMVMRLVKLYEPYVLFKGIFDDRNTKNLCAKQKEEDNRNSENFMFDFDPKIIKWKDYLINVHIPGLITHVLKK

SEQ ID NO: 28831 - DNA, 1491 bp, Arabidopsis thaliana
  misc_feature (1)..(1491): Ceres Seq. ID no. 3081676
atggaactcaattgtgttcaatttcttcgaaacaagacgattcttgtcaccggagctaccggtttccttgcgaaggtttttgtggagaaaattctgagagtgcaaccaaatgtgaagaagctgtaccttttggtgagagcatctgacaatgaagctgccactaaacgcttacgcacagaggtatttgagaaagaactttttaaggtattgagacagaatcttggcgatgagaaattaaatacattgttgtacgaaaaagttgtttcggtcccgggtgatatagcgactgatcaattaggcataaatgactctcatcttagagaacgtatgcaaaaagaaatagatattgttgtcaatgttgcagccacaacaaactttgacgaaagatatgatgttgggcttgggatcaatacatttggagctctcaacgtccttaactttgccaaaaaatgtgttaaagttcaattgcttctccatgtctcaactgcttatgtttgtggagaaaagccaggtctcatacctgaaaaaccattcatcatggaagagattcgtaacgagaatggtcttcaattggatattaaccttgaaagggagcttatgaagcaaagattgaaagaactcaatgaacaagattgttccgaagaagacattactctttccatgaaagaactcggaatggaaagggccaagcttcatggatggcctaacacatatgttttcaccaaatcaatgggagaaatgcttcttggtaagcataaagaaaatctccccctcgtcatcatccgtcccacgatgatcactagtactctttcggaaccttttcctggttggatcgaaggcttgagaactgtcgacagcgtgattattgcatatggaaagggagtgctcaagtgttttcttgtcgatgttaactcggtctgcgatatgataccagtggatatggtggcaaacgcaatgatcacggctgcagccaaacacgctggaggttcaggggttcacatggtgtaccatgtcggctcatctcaccagaacccagtcacatttggagagattcatgagattgcggttcgttactttacgaaaaaccctttgcgaagtcgcaatggctcactcataaccgtctcaaaagtgaggttcataccaaccatggctttgttcagcctctacatgaccctacgttacaaactacctctccagttattaaaactagttgacataatatatccttggagaaacggagataaatatggagacaagaaccgcaaaatcgagttggtgatgagattggtagagctttatgagccttatgtactcttcaagggaatattcgacgatagaaatacaaagagtttatgcgcaaaccagaaggaagaggagatcaaaaatacagaaaaattgatgtttgatttcgacccaaaaggaattaattggggagattatctcacaaatatacacatttctggactcgtcacacacgtgcttaagaagtga

SEQ ID NO: 28832 - protein, 496 aa, Arabidopsis thaliana
  misc_feature (1)..(496): Ceres Seq. ID no. 3081677
MELNCVQFLRNKTILVTGATGFLAKVFVEKILRVQPNVKKLYLLVRASDNEAATKRLRTEVFEKELFKVLRQNLGDEKLNTLLYEKVVSVPGDIATDQLGINDSHLRERMQKEIDIVVNVAATTNFDERYDVGLGINTFGALNVLNFAKKCVKVQLLLHVSTAYVCGEKPGLIPEKPFIMEEIRNENGLQLDINLERELMKQRLKELNEQDCSEEDITLSMKELGMERAKLHGWPNTYVFTKSMGEMLLGKHKENLPLVIIRPTMITSTLSEPFPGWIEGLRTVDSVIIAYGKGVLKCFLVDVNSVCDMIPVDMVANAMITAAAKHAGGSGVHMVYHVGSSHQNPVTFGEIHEIAVRYFTKNPLRSRNGSLITVSKVRFIPTMALFSLYMTLRYKLPLQLLKLVDIIYPWRNGDKYGDKNRKIELVMRLVELYEPYVLFKGIFDDRNTKSLCANQKEEEIKNTEKLMFDFDPKGINWGDYLTNIHISGLVTHVLKK

SEQ ID NO: 28833 - protein, 387 aa, Arabidopsis thaliana
  misc_feature (1)..(387): Ceres Seq. ID no. 3081678
MQKEIDIVVNVAATTNFDERYDVGLGINTFGALNVLNFAKKCVKVQLLLHVSTAYVCGEKPGLIPEKPFIMEEIRNENGLQLDINLERELMKQRLKELNEQDCSEEDITLSMKELGMERAKLHGWPNTYVFTKSMGEMLLGKHKENLPLVIIRPTMITSTLSEPFPGWIEGLRTVDSVIIAYGKGVLKCFLVDVNSVCDMIPVDMVANAMITAAAKHAGGSGVHMVYHVGSSHQNPVTFGEIHEIAVRYFTKNPLRSRNGSLITVSKVRFIPTMALFSLYMTLRYKLPLQLLKLVDIIYPWRNGDKYGDKNRKIELVMRLVELYEPYVLFKGIFDDRNTKSLCANQKEEEIKNTEKLMFDFDPKGINWGDYLTNIHISGLVTHVLKK

SEQ ID NO: 28834 - protein, 317 aa, Arabidopsis thaliana
  misc_feature (1)..(317): Ceres Seq. ID no. 3081679
MEEIRNENGLQLDINLERELMKQRLKELNEQDCSEEDITLSMKELGMERAKLHGWPNTYVFTKSMGEMLLGKHKENLPLVIIRPTMITSTLSEPFPGWIEGLRTVDSVIIAYGKGVLKCFLVDVNSVCDMIPVDMVANAMITAAAKHAGGSGVHMVYHVGSSHQNPVTFGEIHEIAVRYFTKNPLRSRNGSLITVSKVRFIPTMALFSLYMTLRYKLPLQLLKLVDIIYPWRNGDKYGDKNRKIELVMRLVELYEPYVLFKGIFDDRNTKSLCANQKEEEIKNTEKLMFDFDPKGINWGDYLTNIHISGLVTHVLKK

SEQ ID NO: 28835 - DNA, 2031 bp, Arabidopsis thaliana
  misc_feature (1)..(2031): Ceres Seq. ID no. 3081922
atgtctttcttctggctttttccttttctccttcatctttcatttgccgattccttatctcctctttcagctccagttcaaaattttattcacctaaaccattcttgtccaagtagtatattaacgtattcaagaaacagcacttacttcaccaatctcaaaacacttttgtcctctctctcttcccggaacgcttcatactctaccggattccaaactgccacggcgggacaagctcccgaccgtgtcaccggacttttcctttgtcgcggagacgtctcacaagaagtttgccgtaactgcgtcgccttttccgtcaaggagactttatattggtgtccgtataacaaagaagtcgtgctttattacgatgagtgtatgcttagatactctcaccgaaatattctctcgaccgttacatacgatggaagtgctatcttgttgaacggcgctaatatttcatcaagtaatcaaaatcaagtagatgagtttagggatttggtgtcgtccacgttgaacctagctgccgttgaagcagcgaatagttctaaaaaattttatacgagaaaggtcatcacaccccagcctttgtacttgttagttcagtgcacacctgatcttacaagacaagactgtttacgttgcctacaaaaatccatcaagggaatgtctctttacagaattggaggaagatttttttaccctagttgtaattcaaggtacgagaattactcgttctacaatgaaaccgccactagatcatcatcaccaccgtctcttccgcctcgctctactcctcaacagcagctgaagttagctcccccaccgctgatttcagaacgtggaaaaggccggaactcctctgtaatcatcgttgttgttgttccaatcattgctctcctgcttctgttcgtagctttctttagtctccgggctaagaaaacaaggacgaattatgagagggaaccacttaccgaagaaagtgatgatattaccactgcgggctcacttcagtttgattttaaagcaattgaggcagcaacaaataagttttgtgagactaacaaacttggtcaaggtggtttcggcgaagtttacaagggtatatttcctagtggagtacaagttgcagtgaagaggttatccaagacatcaggacaaggtgaaagagagttcgcaaacgaagttattgttgtggcaaagcttcaacatagaaatttggtaagattgctagggttttgtttggaaagagatgagaggatacttgtctatgagtttgttcccaacaaaagtctcgactacttcatttttgactctaccatgcaaagcctgctggactggactagacggtacaaaatcattggaggaattgctagagggattctttatcttcatcaagattcacgactcacaatcatacatcgtgatctcaaagcaggtaatatcctccttggtgatgatatgaatgcaaaaatcgccgactttggaatggcgagaattttcggaatggaccaaacggaagccaatactaggagaatagttggaacatatggctatatgtctcccgagtatgcgatgtatggccaattctccatgaaatcagatgtgtatagcttcggggtcttggttctcgaaattataagtgggaaaaagaacagcaatgtctatcaaatggatggtactagtgctggcaatttggttacatatacttggagactatggagcaatgggtcaccgttagagctagtggatccatcctttcgtgataactatcgaataaatgaagtttcgagatgcatccatatcgctttactatgtgttcaagaagaagctgaagatcgtccaaccatgtcagctattgtccagatgctcactactagctcaattgctctcgcagttcctcaacgacctggttttttcttccggagtagtaaacatgaacaagtaggattagtggatcgtctatctatcaatacgtccgctctttgttcagtcgatgatgcttccattactaatgtaactcctcgttga

SEQ ID NO: 28836 - protein, 676 aa, Arabidopsis thaliana
  misc_feature (1)..(676): Ceres Seq. ID no. 3081923
MSFFWLFPFLLHLSFADSLSPLSAPVQNFIHLNHSCPSSILTYSRNSTYFTNLKTLLSSLSSRNASYSTGFQTATAGQAPDRVTGLFLCRGDVSQEVCRNCVAFSVKETLYWCPYNKEVVLYYDECMLRYSHRNILSTVTYDGSAILLNGANISSSNQNQVDEFRDLVSSTLNLAAVEAANSSKKFYTRKVITPQPLYLLVQCTPDLTRQDCLRCLQKSIKGMSLYRIGGRFFYPSCNSRYENYSFYNETATRSSSPPSLPPRSTPQQQLKLAPPPLISERGKGRNSSVIIVVVVPIIALLLLFVAFFSLRAKKTRTNYEREPLTEESDDITTAGSLQFDFKAIEAATNKFCETNKLGQGGFGEVYKGIFPSGVQVAVKRLSKTSGQGEREFANEVIVVAKLQHRNLVRLLGFCLERDERILVYEFVPNKSLDYFIFDSTMQSLLDWTRRYKIIGGIARGILYLHQDSRLTIIHRDLKAGNILLGDDMNAKIADFGMARIFGMDQTEANTRRIVGTYGYMSPEYAMYGQFSMKSDVYSFGVLVLEIISGKKNSNVYQMDGTSAGNLVTYTWRLWSNGSPLELVDPSFRDNYRINEVSRCIHIALLCVQEEAEDRPTMSAIVQMLTTSSIALAVPQRPGFFFRSSKHEQVGLVDRLSINTSALCSVDDASITNVTPR

SEQ ID NO: 28837 - protein, 550 aa, Arabidopsis thaliana
  misc_feature (1)..(550): Ceres Seq. ID no. 3081924
MLRYSHRNILSTVTYDGSAILLNGANISSSNQNQVDEFRDLVSSTLNLAAVEAANSSKKFYTRKVITPQPLYLLVQCTPDLTRQDCLRCLQKSIKGMSLYRIGGRFFYPSCNSRYENYSFYNETATRSSSPPSLPPRSTPQQQLKLAPPPLISERGKGRNSSVIIVVVVPIIALLLLFVAFFSLRAKKTRTNYEREPLTEESDDITTAGSLQFDFKAIEAATNKFCETNKLGQGGFGEVYKGIFPSGVQVAVKRLSKTSGQGEREFANEVIVVAKLQHRNLVRLLGFCLERDERILVYEFVPNKSLDYFIFDSTMQSLLDWTRRYKIIGGIARGILYLHQDSRLTIIHRDLKAGNILLGDDMNAKIADFGMARIFGMDQTEANTRRIVGTYGYMSPEYAMYGQFSMKSDVYSFGVLVLEIISGKKNSNVYQMDGTSAGNLVTYTWRLWSNGSPLELVDPSFRDNYRINEVSRCIHIALLCVQEEAEDRPTMSAIVQMLTTSSIALAVPQRPGFFFRSSKHEQVGLVDRLSINTSALCSVDDASITNVTPR

SEQ ID NO: 28838 - protein, 454 aa, Arabidopsis thaliana
  misc_feature (1)..(454): Ceres Seq. ID no. 3081925
MSLYRIGGRFFYPSCNSRYENYSFYNETATRSSSPPSLPPRSTPQQQLKLAPPPLISERGKGRNSSVIIVVVVPIIALLLLFVAFFSLRAKKTRTNYEREPLTEESDDITTAGSLQFDFKAIEAATNKFCETNKLGQGGFGEVYKGIFPSGVQVAVKRLSKTSGQGEREFANEVIVVAKLQHRNLVRLLGFCLERDERILVYEFVPNKSLDYFIFDSTMQSLLDWTRRYKIIGGIARGILYLHQDSRLTIIHRDLKAGNILLGDDMNAKIADFGMARIFGMDQTEANTRRIVGTYGYMSPEYAMYGQFSMKSDVYSFGVLVLEIISGKKNSNVYQMDGTSAGNLVTYTWRLWSNGSPLELVDPSFRDNYRINEVSRCIHIALLCVQEEAEDRPTMSAIVQMLTTSSIALAVPQRPGFFFRSSKHEQVGLVDRLSINTSALCSVDDASITNVTPR

SEQ ID NO: 28839 - DNA, 2739 bp, Arabidopsis thaliana
  misc_feature (1)..(2739): Ceres Seq. ID no. 3081939
atgaaaaacaacaaaaaggttgggaccgaagattcaacgaaatggatgctagagagcgtcgagatagatccaaaaggcgatagttctgtgaaacaacccgaaagcacaatcaatagcaataatcctgagagtagtggtgctggtggtgggatcttgaagaatgtgtctaagaatctcgccgtgggatcaataatcaggtccatgagcgtaaacaaatggagaaagagcggtaatctcgggtccccgagcacgaggaagagtggaaacctggggcctccactccctgtgtcccaagtaaaaagaccggggccacaaagagtcgagaggactacatctagcgcggctagaggactacaaagtctccggttccttgatcggaccgtcacgggaagagaacgagattcgtggagatcaatcgaaaaccggttcaatcaatttgctgttgacgggaggcttcccaaggataaattcggcgtttgcattggaatgggagatacattggagtttgcggcaaaagtatacgaagcattgggtaggagaagacaaataaaaacagaaaatgggattgacaaggaacaactcaagcttttttgggaagacatgatcaagaaggatctcgactgtcgcctccaaatcttcttcgacatgtgtgataaggacggagacgggaagttaacagaagaggaggttaaagaagtcatagtcttaagtgcatccgcgaacaggctcgtgaatctgaagaagaatgctgcgtcttatgcttctttgatcatggaagagctcgaccccaatgagcagggttacattgagatgtggcaactcgaggtgctactaacaggaattgtatcaaacgccgactcacataaggtcgtgaggaaatcgcaacagctaacgcgagccatgatcccaaaacgttacagaacaccgactagtaaatacgttgtagtgaccgcagagctaatgtacgagcactggaagaagatttgggtcgtcacattgtggctcgcagtaaacgtcgtcctcttcatgtggaaatacgaagagttcaccacaagccctctttacaacatcactggacgctgcctttgcgccgctaaaggaacggcagaaatactaaaactcaacatggctttgattttggtccctgttttaagaagaaccctaacgttcctcagatcgactttcttgaaccacttgatcccattcgacgataacatcaacttccataagttgatagccgtggcgatagcagttatttccttgcttcacacggcattacacatgctatgcaactaccctaggctaagttcttgcccctacaatttctactccgactatgcggggaatctcttgggagccaagcaaccgacctatttaggcctaatgctgaccccggtttcggtcacaggagttctaatgatcatcttcatgggtatctcattcacccttgctatgcattacttcagaagaaacatagtgaaattgcctataccatttaaccgtcttgctggatttaattcgttttggtatgctcatcatttgctggttattgcctacgctcttcttatcatccatggttacattcttatcatcgagaaaccttggtaccaaaagacgacgtggatgtacgtggccataccaatggtgttgtacgcgagcgagaggcttttctcacgagttcaagaacacaaccatcgtgtccacattatcaaagctattgtatattcaggcaatgttcttgcactctatatgaccaaacctcaagggttcaagtacaaaagtggcatgtacatgtttgtcaagtgccctgatatctccaaattcgaatggcatccattctccatcacttctgcacccggagatgaatatttgagcgttcacataagagcattaggagattggacttctgaacttaggaacagatttgcagagacatgtgagcctcatcaaaaatcgaaacctagtccaaatgatcttattaggatggaaacaagagcgagaggtgcaaatcctcatgttgaagaatcccaagccttatttccaagaatatttatcaaaggaccatatggggctccggcacaaagctatcagaagtttgatatccttttgttgattgggctagggatcggggcaaccccatttataagtatcctaaaagatatgttgaataatctcaaacctggtattccaaaaaccgggcaaaagtatgaaggaagtgtaggaggtgagagcttaggaggatcaagtgtatatggaggatcgagtgtaaatggaggaggtagtgtaaatggaggaggtagtgtaagtggaggaggtagaaagtttccacaaagagcatatttttattgggtgacaagagaacaagcttctttcgaatggttcaaaggagttatggatgatattgcagtgtatgacaaaaccaatgtgatagagatgcataactacttaacaagtatgtacgaagcaggagatgcgagatctgctctaattgctatggtccagaaacttcaacatgccaaaaatggtgttgacattgtttccgagagccgaatacgaacccatttcgcaagacctaattggaggaaggttttttctgaattgtcaaacaagcacgagacttctcgcataggtgtgttctactgtggaagtccaacgcttgttcgaccgctaaaatcactttgtcaggagttcagtctcgagtcgtccacccgctttacttttcacaaagagaatttctga

SEQ ID NO: 28840 - protein, 912 aa, Arabidopsis thaliana
  misc_feature (1)..(912): Ceres Seq. ID no. 3081940
MKNNKKVGTEDSTKWMLESVEIDPKGDSSVKQPESTINSNNPESSGAGGGILKNVSKNLAVGSIIRSMSVNKWRKSGNLGSPSTRKSGNLGPPLPVSQVKRPGPQRVERTTSSAARGLQSLRFLDRTVTGRERDSWRSIENRFNQFAVDGRLPKDKFGVCIGMGDTLEFAAKVYEALGRRRQIKTENGIDKEQLKLFWEDMIKKDLDCRLQIFFDMCDKDGDGKLTEEEVKEVIVLSASANRLVNLKKNAASYASLIMEELDPNEQGYIEMWQLEVLLTGIVSNADSHKVVRKSQQLTRAMIPKRYRTPTSKYVVVTAELMYEHWKKIWVVTLWLAVNVVLFMWKYEEFTTSPLYNITGRCLCAAKGTAEILKLNMALILVPVLRRTLTFLRSTFLNHLIPFDDNINFHKLIAVAIAVISLLHTALHMLCNYPRLSSCPYNFYSDYAGNLLGAKQPTYLGLMLTPVSVTGVLMIIFMGISFTLAMHYFRRNIVKLPIPFNRLAGFNSFWYAHHLLVIAYALLIIHGYILIIEKPWYQKTTWMYVAIPMVLYASERLFSRVQEHNHRVHIIKAIVYSGNVLALYMTKPQGFKYKSGMYMFVKCPDISKFEWHPFSITSAPGDEYLSVHIRALGDWTSELRNRFAETCEPHQKSKPSPNDLIRMETRARGANPHVEESQALFPRIFIKGPYGAPAQSYQKFDILLLIGLGIGATPFISILKDMLNNLKPGIPKTGQKYEGSVGGESLGGSSVYGGSSVNGGGSVNGGGSVSGGGRKFPQRAYFYWVTREQASFEWFKGVMDDIAVYDKTNVIEMHNYLTSMYEAGDARSALIAMVQKLQHAKNGVDIVSESRIRTHFARPNWRKVFSELSNKHETSRIGVFYCGSPTLVRPLKSLCQEFSLESSTRFTFHKENF

SEQ ID NO: 28841 - protein, 897 aa, Arabidopsis thaliana
  misc_feature (1)..(897): Ceres Seq. ID no. 3081941
MLESVEIDPKGDSSVKQPESTINSNNPESSGAGGGILKNVSKNLAVGSIIRSMSVNKWRKSGNLGSPSTRKSGNLGPPLPVSQVKRPGPQRVERTTSSAARGLQSLRFLDRTVTGRERDSWRSIENRFNQFAVDGRLPKDKFGVCIGMGDTLEFAAKVYEALGRRRQIKTENGIDKEQLKLFWEDMIKKDLDCRLQIFFDMCDKDGDGKLTEEEVKEVIVLSASANRLVNLKKNAASYASLIMEELDPNEQGYIEMWQLEVLLTGIVSNADSHKVVRKSQQLTRAMIPKRYRTPTSKYVVVTAELMYEHWKKIWVVTLWLAVNVVLFMWKYEEFTTSPLYNITGRCLCAAKGTAEILKLNMALILVPVLRRTLTFLRSTFLNHLIPFDDNINFHKLIAVAIAVISLLHTALHMLCNYPRLSSCPYNFYSDYAGNLLGAKQPTYLGLMLTPVSVTGVLMIIFMGISFTLAMHYFRRNIVKLPIPFNRLAGFNSFWYAHHLLVIAYALLIIHGYILIIEKPWYQKTTWMYVAIPMVLYASERLFSRVQEHNHRVHIIKAIVYSGNVLALYMTKPQGFKYKSGMYMFVKCPDISKFEWHPFSITSAPGDEYLSVHIRALGDWTSELRNRFAETCEPHQKSKPSPNDLIRMETRARGANPHVEESQALFPRIFIKGPYGAPAQSYQKFDILLLIGLGIGATPFISILKDMLNNLKPGIPKTGQKYEGSVGGESLGGSSVYGGSSVNGGGSVNGGGSVSGGGRKFPQRAYFYWVTREQASFEWFKGVMDDIAVYDKTNVIEMHNYLTSMYEAGDARSALIAMVQKLQHAKNGVDIVSESRIRTHFARPNWRKVFSELSNKHETSRIGVFYCGSPTLVRPLKSLCQEFSLESSTRFTFHKENF

SEQ ID NO: 28842 - protein, 845 aa, Arabidopsis thaliana
  misc_feature (1)..(845): Ceres Seq. ID no. 3081942
MSVNKWRKSGNLGSPSTRKSGNLGPPLPVSQVKRPGPQRVERTTSSAARGLQSLRFLDRTVTGRERDSWRSIENRFNQFAVDGRLPKDKFGVCIGMGDTLEFAAKVYEALGRRRQIKTENGIDKEQLKLFWEDMIKKDLDCRLQIFFDMCDKDGDGKLTEEEVKEVIVLSASANRLVNLKKNAASYASLIMEELDPNEQGYIEMWQLEVLLTGIVSNADSHKVVRKSQQLTRAMIPKRYRTPTSKYVVVTAELMYEHWKKIWVVTLWLAVNVVLFMWKYEEFTTSPLYNITGRCLCAAKGTAEILKLNMALILVPVLRRTLTFLRSTFLNHLIPFDDNINFHKLIAVAIAVISLLHTALHMLCNYPRLSSCPYNFYSDYAGNLLGAKQPTYLGLMLTPVSVTGVLMIIFMGISFTLAMHYFRRNIVKLPIPFNRLAGFNSFWYAHHLLVIAYALLIIHGYILIIEKPWYQKTTWMYVAIPMVLYASERLFSRVQEHNHRVHIIKAIVYSGNVLALYMTKPQGFKYKSGMYMFVKCPDISKFEWHPFSITSAPGDEYLSVHIRALGDWTSELRNRFAETCEPHQKSKPSPNDLIRMETRARGANPHVEESQALFPRIFIKGPYGAPAQSYQKFDILLLIGLGIGATPFISILKDMLNNLKPGIPKTGQKYEGSVGGESLGGSSVYGGSSVNGGGSVNGGGSVSGGGRKFPQRAYFYWVTREQASFEWFKGVMDDIAVYDKTNVIEMHNYLTSMYEAGDARSALIAMVQKLQHAKNGVDIVSESRIRTHFARPNWRKVFSELSNKHETSRIGVFYCGSPTLVRPLKSLCQEFSLESSTRFTFHKENF

SEQ ID NO: 28843 - DNA, 1740 bp, Arabidopsis thaliana
  misc_feature (1)..(1740): Ceres Seq. ID no. 3082487
atggaggataatagctgtatcgggtttgagggatcgaaaagatttggtgagactagtaaacgtatcattggtttgattgactcagtgactgagtcaacgactgattcaagtcttagcagctcaagttctggtgttggatcgagctccgggaggtcttctgtagctgagagatctgtttcatcacctccgacgaaatcgcagattcttggatggccgttaggacaaggttcatggaggaagagttctggtaaaatgaagaagaaaactccgacaaagatcgatgattttgggtttaagagagttggaacagagacttcagagattgagttgttgaaagagagaatggcgaagttgttgcttggtgaagacatgtctggttctggtgaaggagtttgtcctgctttggctatttctaatgccattaccaatctctatgctgcaatattgggacaacaatggaggctagagccaatccctagtgagaaaaaattaatgtggagaagagaaatcgaagttcttctttctgttagtgatcacattgttgaattggtaccttcctttcagaatttccccaatggaaacaagattgaggtgatgaactgcagaccaagatcagatctctttacttgtcttcctgctcttaggaagctagacaatatgcttattgaaatattagatagttttggagaaacagagttctggtacgttgatcaagggattgtagctgcggaatctgcaaggtctaactctttccgtgaagacggagacaaatggtggcttccgctgccgcgtgtgccatccgatggacttaccgaacaaactaggaagaaactggatcatactcgcgaattcaccaaccaaatcttgaaagcttgtatgtcaatcaacagcattgctttagctgaaatggaagttccacaatcataccttgaagcccttccaaagaacggaagatcttgtcttggagattttctatatagaaacatcacatcggataacttctctgcggatcacttgctagaatcaatagatctttcatctgagcttgcggttgtagaaatggcgaaccgagtagaagcatcaatgtacgtttggaggagaagagctcactcgaggcatctgatatctctgtatcgatccacaagtacaagatgggggatgatagtgaaggagatgatgatgcatcaaaccgatggtgacaaaagggaaatatttgcggagagagcagaaagcttattgatccgtctcaagcaacgtttcccgggacttagacaaacagctttagacacaagcaagatccaatacaacaaggatgtaggaaagtctatacttgagagctactcaagggtattagagagtttagcgtatagcattggtgtacgcatagaggaagtgttgttcatggatgacatcagcaaagatgatggtgatggtgatgatgattcttgttcagacaagttgagattgttgtctaaagaagcagctagtggtggttcaggctctctaagggagaaactttctgctccatcgctgttctctgtgtcattctcaggcacgtcaactccgtacagaactctatctttctctgcatcgactccaagttattcaccaatgccgttgataagccccatcaacggaggaagaggaggagaaagagctccgtttctctctgggaggaacattagagaacgttgcgggtttggtccaaagaaagcattggccaattatctccggggttga

SEQ ID NO: 28844 - protein, 579 aa, Arabidopsis thaliana
  misc_feature (1)..(579): Ceres Seq. ID no. 3082488
MEDNSCIGFEGSKRFGETSKRIIGLIDSVTESTTDSSLSSSSSGVGSSSGRSSVAERSVSSPPTKSQILGWPLGQGSWRKSSGKMKKKTPTKIDDFGFKRVGTETSEIELLKERMAKLLLGEDMSGSGEGVCPALAISNAITNLYAAILGQQWRLEPIPSEKKLMWRREIEVLLSVSDHIVELVPSFQNFPNGNKIEVMNCRPRSDLFTCLPALRKLDNMLIEILDSFGETEFWYVDQGIVAAESARSNSFREDGDKWWLPLPRVPSDGLTEQTRKKLDHTREFTNQILKACMSINSIALAEMEVPQSYLEALPKNGRSCLGDFLYRNITSDNFSADHLLESIDLSSELAVVEMANRVEASMYVWRRRAHSRHLISLYRSTSTRWGMIVKEMMMHQTDGDKREIFAERAESLLIRLKQRFPGLRQTALDTSKIQYNKDVGKSILESYSRVLESLAYSIGVRIEEVLFMDDISKDDGDGDDDSCSDKLRLLSKEAASGGSGSLREKLSAPSLFSVSFSGTSTPYRTLSFSASTPSYSPMPLISPINGGRGGERAPFLSGRNIRERCGFGPKKALANYLRG

SEQ ID NO: 28845 - protein, 495 aa, Arabidopsis thaliana
  misc_feature (1)..(495): Ceres Seq. ID no. 3082489
MKKKTPTKIDDFGFKRVGTETSEIELLKERMAKLLLGEDMSGSGEGVCPALAISNAITNLYAAILGQQWRLEPIPSEKKLMWRREIEVLLSVSDHIVELVPSFQNFPNGNKIEVMNCRPRSDLFTCLPALRKLDNMLIEILDSFGETEFWYVDQGIVAAESARSNSFREDGDKWWLPLPRVPSDGLTEQTRKKLDHTREFTNQILKACMSINSIALAEMEVPQSYLEALPKNGRSCLGDFLYRNITSDNFSADHLLESIDLSSELAVVEMANRVEASMYVWRRRAHSRHLISLYRSTSTRWGMIVKEMMMHQTDGDKREIFAERAESLLIRLKQRFPGLRQTALDTSKIQYNKDVGKSILESYSRVLESLAYSIGVRIEEVLFMDDISKDDGDGDDDSCSDKLRLLSKEAASGGSGSLREKLSAPSLFSVSFSGTSTPYRTLSFSASTPSYSPMPLISPINGGRGGERAPFLSGRNIRERCGFGPKKALANYLRG

SEQ ID NO: 28846 - protein, 465 aa, Arabidopsis thaliana
  misc_feature (1)..(465): Ceres Seq. ID no. 3082490
MAKLLLGEDMSGSGEGVCPALAISNAITNLYAAILGQQWRLEPIPSEKKLMWRREIEVLLSVSDHIVELVPSFQNFPNGNKIEVMNCRPRSDLFTCLPALRKLDNMLIEILDSFGETEFWYVDQGIVAAESARSNSFREDGDKWWLPLPRVPSDGLTEQTRKKLDHTREFTNQILKACMSINSIALAEMEVPQSYLEALPKNGRSCLGDFLYRNITSDNFSADHLLESIDLSSELAVVEMANRVEASMYVWRRRAHSRHLISLYRSTSTRWGMIVKEMMMHQTDGDKREIFAERAESLLIRLKQRFPGLRQTALDTSKIQYNKDVGKSILESYSRVLESLAYSIGVRIEEVLFMDDISKDDGDGDDDSCSDKLRLLSKEAASGGSGSLREKLSAPSLFSVSFSGTSTPYRTLSFSASTPSYSPMPLISPINGGRGGERAPFLSGRNIRERCGFGPKKALANYLRG

SEQ ID NO: 28847 - DNA, 1863 bp, Arabidopsis thaliana
  misc_feature (1)..(1863): Ceres Seq. ID no. 3083111
atggagcacaacaaggttgatacagaacctcaagattcatatgatgatcaacaaaaatgggttctcgattcttcgaccgatagtagaggagagattccgcttcgggctcaaaccggagcttggagagctgcactcttcatcattggtatcgaattcagcgagaggctaagttactttgggatctccacgaacttagtggtctacttgactaccattcttcaccaagatctcaagatggctgtaaaaaatacgaactactggtctggtgtcactactttgatgcctcttcttggaggcttcgtcgcagatgcttatctcggccgttatggaactgtcctacttgcaaccaccatttaccttatgggcttgattctgttaacattgtcttggtttataccgggattgaaagcatgtcatgaagacatgtgtgttgagccaaggaaagcccacgagatagccttcttcattgcaatctacttgatctccataggcactggaggtcataagccatcccttgagagctttggagctgaccaattcgaagatggccatccggaagaacgaaaaatgaaaatgtcttactttaactggtggaatgctggtctatgcgctggtattttaaccgcggtgactgtaattgtctatatcgaagaccggattggttggggtgtggctagcatcatactcacaatagttatggctacttcgttttttatcttccgtatcggcaaaccgttttaccgttatagagcaccttctggtagcccattgaccccaatgttgcaagtctttgtcgccgccattgccaaaagaaatcttccttgtcccagtgattcttctcttcttcatgagttaactaatgaagagtatactaaaggccggcttctttccagctcaaagaatcttaaatttctagacaaagcagcagttattgaggaccgaaacgagaacactaaagccgagaagcagagtccatggcgactcgcaacggttacgaaagtggaagaagttaagctactcatcaacatgattccaatctggttctttacattagcctttggagtatgcgccactcaaagctcaacactctttatcaaacaagccataataatggaccgacacatcacagggacaagcttcatagttcctccagcttcattgttctctctcatagctctctccataatcatcaccgtaacaatctacgagaaactcctcgttcctcttttgagacgtgccacaggaaacgaaagaggcattagcattctacaaagaatcggggtcggtatggttttctccttattcgctatgatcattgctgctctgattgagaagaaaagattagattatgctaaggaacaccacatgaataagaccatgaccttgagtgctatatggttagctcctcaattcctagtcttaggagttgcggatgcttttacccttgtcggtcttcaagaatatttctacgaccaagtcccagattctatgagaagcttaggcatagcgttttacctcagcgtgcttggagcggctagctttgtcaacaatcttttgataacggttagtgatcatttagccgaggaaatttccgggaagggctggtttgggaaagaccttaatagcagccgcttggaccgcttttactggatgctagccgccttgaccgctgcaaatatatgctgctttgtgatcgtggccatgagatacacttacaagactgtgcagccgagtctggctgttgttgctgacggcggtgatgacgttgagacagccacggggacgaataacacgtccaagtttacggctggttcgggaaagaccttaatagcagctgcatggaccgcttttactggatgctag

SEQ ID NO: 28848 - protein, 620 aa, Arabidopsis thaliana
  misc_feature (1)..(620): Ceres Seq. ID no. 3083112
MEHNKVDTEPQDSYDDQQKWVLDSSTDSRGEIPLRAQTGAWRAALFIIGIEFSERLSYFGISTNLVVYLTTILHQDLKMAVKNTNYWSGVTTLMPLLGGFVADAYLGRYGTVLLATTIYLMGLILLTLSWFIPGLKACHEDMCVEPRKAHEIAFFIAIYLISIGTGGHKPSLESFGADQFEDGHPEERKMKMSYFNWWNAGLCAGILTAVTVIVYIEDRIGWGVASIILTIVMATSFFIFRIGKPFYRYRAPSGSPLTPMLQVFVAAIAKRNLPCPSDSSLLHELTNEEYTKGRLLSSSKNLKFLDKAAVIEDRNENTKAEKQSPWRLATVTKVEEVKLLINMIPIWFFTLAFGVCATQSSTLFIKQAIIMDRHITGTSFIVPPASLFSLIALSIIITVTIYEKLLVPLLRRATGNERGISILQRIGVGMVFSLFAMIIAALIEKKRLDYAKEHHMNKTMTLSAIWLAPQFLVLGVADAFTLVGLQEYFYDQVPDSMRSLGIAFYLSVLGAASFVNNLLITVSDHLAEEISGKGWFGKDLNSSRLDRFYWMLAALTAANICCFVIVAMRYTYKTVQPSLAVVADGGDDVETATGTNNTSKFTAGSGKTLIAAAWTAFTGC

SEQ ID NO: 28849 - protein, 542 aa, Arabidopsis thaliana
  misc_feature (1)..(542): Ceres Seq. ID no. 3083113
MAVKNTNYWSGVTTLMPLLGGFVADAYLGRYGTVLLATTIYLMGLILLTLSWFIPGLKACHEDMCVEPRKAHEIAFFIAIYLISIGTGGHKPSLESFGADQFEDGHPEERKMKMSYFNWWNAGLCAGILTAVTVIVYIEDRIGWGVASIILTIVMATSFFIFRIGKPFYRYRAPSGSPLTPMLQVFVAAIAKRNLPCPSDSSLLHELTNEEYTKGRLLSSSKNLKFLDKAAVIEDRNENTKAEKQSPWRLATVTKVEEVKLLINMIPIWFFTLAFGVCATQSSTLFIKQAIIMDRHITGTSFIVPPASLFSLIALSIIITVTIYEKLLVPLLRRATGNERGISILQRIGVGMVFSLFAMIIAALIEKKRLDYAKEHHMNKTMTLSAIWLAPQFLVLGVADAFTLVGLQEYFYDQVPDSMRSLGIAFYLSVLGAASFVNNLLITVSDHLAEEISGKGWFGKDLNSSRLDRFYWMLAALTAANICCFVIVAMRYTYKTVQPSLAVVADGGDDVETATGTNNTSKFTAGSGKTLIAAAWTAFTGC

SEQ ID NO: 28850 - protein, 527 aa, Arabidopsis thaliana
  misc_feature (1)..(527): Ceres Seq. ID no. 3083114
MPLLGGFVADAYLGRYGTVLLATTIYLMGLILLTLSWFIPGLKACHEDMCVEPRKAHEIAFFIAIYLISIGTGGHKPSLESFGADQFEDGHPEERKMKMSYFNWWNAGLCAGILTAVTVIVYIEDRIGWGVASIILTIVMATSFFIFRIGKPFYRYRAPSGSPLTPMLQVFVAAIAKRNLPCPSDSSLLHELTNEEYTKGRLLSSSKNLKFLDKAAVIEDRNENTKAEKQSPWRLATVTKVEEVKLLINMIPIWFFTLAFGVCATQSSTLFIKQAIIMDRHITGTSFIVPPASLFSLIALSIIITVTIYEKLLVPLLRRATGNERGISILQRIGVGMVFSLFAMIIAALIEKKRLDYAKEHHMNKTMTLSAIWLAPQFLVLGVADAFTLVGLQEYFYDQVPDSMRSLGIAFYLSVLGAASFVNNLLITVSDHLAEEISGKGWFGKDLNSSRLDRFYWMLAALTAANICCFVIVAMRYTYKTVQPSLAVVADGGDDVETATGTNNTSKFTAGSGKTLIAAAWTAFTGC

SEQ ID NO: 28851 - DNA, 1185 bp, Arabidopsis thaliana
  misc_feature (1)..(1185): Ceres Seq. ID no. 3083154
atgggtgagaaagattcagaaacagctccgatttgggggaaaactcgagagagagagaggagcaacaacaacaatatacagccaatggatttagagtcgtcctcttctgtatctgggcaacaacgatcgttgactcagagtcgaagttcttatgaagaacgaggtagaggagttaaagagtttcggagttggtttccttggctcattccttgtttcgttgttgctaacgttgccgtcttcgtgatcaccatgtatgtcaacaattgtcctaagaaatctggagattgttttgctgatttcttgggtcgtttctcgtttcagaacaccagagaaaatcctcttctgggtccttcctctctcacgttacaaacaatgggtggattagatgttaaaaaagtggttaaaggagatgaaggatggcgtctactttcttgcaattggttacatggaggagttgttcatttactgatgaacatgttgactcttttattcatcggtatacgtatggaacgtgaatttggttttattcggattggattgctttatttgatatcagggtttggaggaagcatattgtcagctcttttcctccgttcaaacatctctgttggagcatctggtgccgtgtttggtttacttggaggaatgctctctgagatctttatcaactggacaatctattctaacaaggttgtgacgattgtaactcttgtattgattgtggcggtgaacttggggctcggtgtgctccctggagtagataactttgctcatatcggagggtttgctacaggttttcttcttggatttgtgctcttaatccgtccccattacggatggatcaaccaaagaaacggtcctggagctaaaccccacaggttcaagatatatcagggcatattatggactatctctcttctcatcttggtcgctgggttcattgttggattgatctctctcttcaacaatgtcgatggaaacgaacattgttcgtggtgtcattatctttcatgtgttccaacatctaaatggagctgtaaccgagaaccagcctcttgcacgacgactcaattaggtaaccaattgagcatgacttgtttgaggaatgggaaatcagcatcttacattttggcaaatccctcggattcacggattaatagcttatgtgttcagctttgccgttga

SEQ ID NO: 28852 - protein, 394 aa, Arabidopsis thaliana
  misc_feature (1)..(394): Ceres Seq. ID no. 3083155
MGEKDSETAPIWGKTRERERSNNNNIQPMDLESSSSVSGQQRSLTQSRSSYEERGRGVKEFRSWFPWLIPCFVVANVAVFVITMYVNNCPKKSGDCFADFLGRFSFQNTRENPLLGPSSLTLQTMGGLDVKKVVKGDEGWRLLSCNWLHGGVVHLLMNMLTLLFIGIRMEREFGFIRIGLLYLISGFGGSILSALFLRSNISVGASGAVFGLLGGMLSEIFINWTIYSNKVVTIVTLVLIVAVNLGLGVLPGVDNFAHIGGFATGFLLGFVLLIRPHYGWINQRNGPGAKPHRFKIYQGILWTISLLILVAGFIVGLISLFNNVDGNEHCSWCHYLSCVPTSKWSCNREPASCTTTQLGNQLSMTCLRNGKSASYILANPSDSRINSLCVQLCR

SEQ ID NO: 28853 - protein, 366 aa, Arabidopsis thaliana
  misc_feature (1)..(366): Ceres Seq. ID no. 3083156
MDLESSSSVSGQQRSLTQSRSSYEERGRGVKEFRSWFPWLIPCFVVANVAVFVITMYVNNCPKKSGDCFADFLGRFSFQNTRENPLLGPSSLTLQTMGGLDVKKVVKGDEGWRLLSCNWLHGGVVHLLMNMLTLLFIGIRMEREFGFIRIGLLYLISGFGGSILSALFLRSNISVGASGAVFGLLGGMLSEIFINWTIYSNKVVTIVTLVLIVAVNLGLGVLPGVDNFAHIGGFATGFLLGFVLLIRPHYGWINQRNGPGAKPHRFKIYQGILWTISLLILVAGFIVGLISLFNNVDGNEHCSWCHYLSCVPTSKWSCNREPASCTTTQLGNQLSMTCLRNGKSASYILANPSDSRINSLCVQLCR

SEQ ID NO: 28854 - protein, 311 aa, Arabidopsis thaliana
  misc_feature (1)..(311): Ceres Seq. ID no. 3083157
MYVNNCPKKSGDCFADFLGRFSFQNTRENPLLGPSSLTLQTMGGLDVKKVVKGDEGWRLLSCNWLHGGVVHLLMNMLTLLFIGIRMEREFGFIRIGLLYLISGFGGSILSALFLRSNISVGASGAVFGLLGGMLSEIFINWTIYSNKVVTIVTLVLIVAVNLGLGVLPGVDNFAHIGGFATGFLLGFVLLIRPHYGWINQRNGPGAKPHRFKIYQGILWTISLLILVAGFIVGLISLFNNVDGNEHCSWCHYLSCVPTSKWSCNREPASCTTTQLGNQLSMTCLRNGKSASYILANPSDSRINSLCVQLCR

SEQ ID NO: 28855 - DNA, 894 bp, Arabidopsis thaliana
  misc_feature (1)..(894): Ceres Seq. ID no. 3083434
atgacaaagatcttctactacttcttcatcatcatttttcttcaatctccaccgcatcttcaatcccaaaccatcacaaggaacatcagcattttcatcttggccgggcaaagcaacatggcgggtcgaggcggtgtttataacgacactgccacaaacaccaccgtgtgggacggtgtaattccgccagaatgccgatcaaacccttcgatcctccgtctcacgagtaaactcgagtggaaagaggctaaagagccacttcacgttgacattgacattaataagactaatggtgttggaccggggatgccctttgctaaccgggtggttaaccggtttggtcaggtgggtttggttccgtgctctatcggtgggactaaactaagccaatggcaaaaaggtgagtttctttacgaggagacggtgaagagggctaaagcggcgatggctagtggtggtggtggctcgtaccgggcggttttgtggtatcagggtgagtctgatacggttgatatggtcgatgcttcggtatataagaagagactagtgaagtttttcagtgatcttcgaaatgatttacaacacccaaatcttcctattatccaggtggctctagcgacaggagcaggaccatatcttgacgcggtgagaaaagctcaactgaagactgatcttgagaacgtgtattgcgttgacgccagaggcctacctcttgaaccggacggtttgcatctgaccacttcctctcaggtccagctcggtcacatgatagccgagagtttcttggctattccaaattcagctcgaccatcactctacatgcattttttctccttgttctgttccctttatgtttctttaaatatttttggaactatctttcattttctttag

SEQ ID NO: 28856 - protein, 297 aa, Arabidopsis thaliana
  misc_feature (1)..(297): Ceres Seq. ID no. 3083436
MTKIFYYFFIIIFLQSPPHLQSQTITRNISIFILAGQSNMAGRGGVYNDTATNTTVWDGVIPPECRSNPSILRLTSKLEWKEAKEPLHVDIDINKTNGVGPGMPFANRVVNRFGQVGLVPCSIGGTKLSQWQKGEFLYEETVKRAKAAMASGGGGSYRAVLWYQGESDTVDMVDASVYKKRLVKFFSDLRNDLQHPNLPIIQVALATGAGPYLDAVRKAQLKTDLENVYCVDARGLPLEPDGLHLTTSSQVQLGHMIAESFLAIPNSARPSLYMHFFSLFCSLYVSLNIFGTIFHFL

SEQ ID NO: 28857 - protein, 258 aa, Arabidopsis thaliana
  misc_feature (1)..(258): Ceres Seq. ID no. 3083437
MAGRGGVYNDTATNTTVWDGVIPPECRSNPSILRLTSKLEWKEAKEPLHVDIDINKTNGVGPGMPFANRVVNRFGQVGLVPCSIGGTKLSQWQKGEFLYEETVKRAKAAMASGGGGSYRAVLWYQGESDTVDMVDASVYKKRLVKFFSDLRNDLQHPNLPIIQVALATGAGPYLDAVRKAQLKTDLENVYCVDARGLPLEPDGLHLTTSSQVQLGHMIAESFLAIPNSARPSLYMHFFSLFCSLYVSLNIFGTIFHFL

SEQ ID NO: 28858 - protein, 195 aa, Arabidopsis thaliana
  misc_feature (1)..(195): Ceres Seq. ID no. 3083438
MPFANRVVNRFGQVGLVPCSIGGTKLSQWQKGEFLYEETVKRAKAAMASGGGGSYRAVLWYQGESDTVDMVDASVYKKRLVKFFSDLRNDLQHPNLPIIQVALATGAGPYLDAVRKAQLKTDLENVYCVDARGLPLEPDGLHLTTSSQVQLGHMIAESFLAIPNSARPSLYMHFFSLFCSLYVSLNIFGTIFHFL

SEQ ID NO: 28859 - DNA, 2676 bp, Arabidopsis thaliana
  misc_feature (1)..(2676): Ceres Seq. ID no. 3083884
atggatgatttcaatcttcgtagcgaaaaccctaattcatcatccaccacttcctcatcctcttcctctttccaccgtcacaagagcgaaaccggaaacacaaaacggtcaaggtcaacgtccacgttatcgacggaccctcagagcgtggcggctcgcgacagacggcaccgaattagcgaccgtttcaagattttacaaagcatggtccctggtggtgcgaagatggacactgtatctatgcttgacgaagccattagctacgtcaagttcttgaaggctcagatctggtatcaccaaaacatgcttctcttcataaacgaccacgaaactacatcatcttgtacttactctcccggcgctggagaatttggaccgaaactctttggttatgatgacgattatgcccctataatggacacatattcacaaggcgtgccacttacggttgcggactcgaagcgtgccacacgacacgcattacgagggcactgcaattgtataatcggagaaacagaggaattcgccgatcaacgagagaagatggaagtgcaaattgaagaatctggtaaaaatcaaacctctccggaatcaattgaagcagacaaagcgaagcagatagtggtgcttctgattggtccaccaggaagcggcaaatcgacgttttgtgacaccgcaatgcgttcctctcaccgcccttggtctcgtatctgccaggacattgttaacaatggcaaagctggaacaaaggctcagtgtttaaagatggctacagattctcttagggaaggcaagagcgtctttatagacagatgcaatcttgacagggagcaacgttcagagtttattaagcttggtggtcctgagttcgaagttcatgcagtggttctggagcttcctgctcaggtttgtatatctagatcagttaaaagaactggtcatgaaggaaatctacaaggtggaagagctgcagctgttgtgaataagatgcttcagagtaaggaacttcccaaagtgaatgaagggttttctcggattatgttttgttacagtgacgctgatgttgataatgctgttaacatgtataacaagcttggtccaatggatacccttccttctggctgttttggcgaaaaaaaattagatactaaaagccaacccggtataatgaagttctttaagaaagtcagtgctctgcctgcttcatcttctaatgaagctactaacacaactcggaaagctgatgaaatgacagcaaatgtccgagtttcgccagtcaagcttggttctgctgatattgtacctacactggcattcccatcaatttcgactgcggattttcagtttgatcttgaaaaggcttctgatatcattgtggagaaagcagaggagttcttgtctaaacttgggactgcgcgtctcgtcttggtggacttgagccgcgggtcaaagattctatctctggtcaaggctaaggcttctcagaagaacattgattcagcgaaattcttcacatttgttggggacataactaagcttcgttctgaaggtggtctacactgtaatgtcatagctaatgctactaactggcggcttaaacctggaggtggaggtgtgaatgcagcaatattcaaagctgctggtccagatcttgagactgcgacaagagtacgagcaaacactcttcttcctggaaaagccgtggtagttcctcttccttctacttgtccattacacaatgcagaaggaattacacatgtcatacatgttctaggaccaaacatgaacccaaaccgaccagacaaccttaacaacgactacaccaaggggtgcaaaactctccgggaagcttacacatctctatttgaaggttttctatcagtagtacaggatcaatcgaagttgcccaaacgaagcagtcaaacagctgtgtcagattctggtgaggatattaaggaagactctgagagaaacaaaaagtacaaaggatcacaagataaggccgtaactaataatttggaatcagagtctctggaggacacaagaggcagtggaaagaagatgagtaaaggatggaacacatgggcattggctctccacagcatcgcgatgcacccagagagacacgagaatgtcgtgcttgaatatttagacaacatcgttgtcataaacgaccagtacccaaaggcgcggaaacacgtgctagtactggcgagacaggagagtctagatgggctagaagatgttcgcaaagagaatcttcaacttctgcaggaaatgcacaatgttggtctgaaatgggttgatagattccagaacgaggatgcatctcttatcttccgccttggatatcactcggttccctcgatgcgacaactacacttacacgttataagccaagactttaattcagatagtttgaagaacaagaaacactggaactctttcacgacctcgttcttccgtgactcagttgatgtacttgaagaggtcaacagccaaggcaaggccaatgtggcgagcgaagatctgttgaaaggtgagctgcgttgcaatcggtgtagaagcgcacacccaaatattccaaaacttaaatcacatgtcagaagctgccattctcaatttccagaccatttactccaaaacaatcgccttgtggctagagcagagacgtag

SEQ ID NO: 28860 - protein, 891 aa, Arabidopsis thaliana
  misc_feature (1)..(891): Ceres Seq. ID no. 3083885
MDDFNLRSENPNSSSTTSSSSSSFHRHKSETGNTKRSRSTSTLSTDPQSVAARDRRHRISDRFKILQSMVPGGAKMDTVSMLDEAISYVKFLKAQIWYHQNMLLFINDHETTSSCTYSPGAGEFGPKLFGYDDDYAPIMDTYSQGVPLTVADSKRATRHALRGHCNCIIGETEEFADQREKMEVQIEESGKNQTSPESIEADKAKQIVVLLIGPPGSGKSTFCDTAMRSSHRPWSRICQDIVNNGKAGTKAQCLKMATDSLREGKSVFIDRCNLDREQRSEFIKLGGPEFEVHAVVLELPAQVCISRSVKRTGHEGNLQGGRAAAVVNKMLQSKELPKVNEGFSRIMFCYSDADVDNAVNMYNKLGPMDTLPSGCFGEKKLDTKSQPGIMKFFKKVSALPASSSNEATNTTRKADEMTANVRVSPVKLGSADIVPTLAFPSISTADFQFDLEKASDIIVEKAEEFLSKLGTARLVLVDLSRGSKILSLVKAKASQKNIDSAKFFTFVGDITKLRSEGGLHCNVIANATNWRLKPGGGGVNAAIFKAAGPDLETATRVRANTLLPGKAVVVPLPSTCPLHNAEGITHVIHVLGPNMNPNRPDNLNNDYTKGCKTLREAYTSLFEGFLSVVQDQSKLPKRSSQTAVSDSGEDIKEDSERNKKYKGSQDKAVTNNLESESLEDTRGSGKKMSKGWNTWALALHSIAMHPERHENVVLEYLDNIVVINDQYPKARKHVLVLARQESLDGLEDVRKENLQLLQEMHNVGLKWVDRFQNEDASLIFRLGYHSVPSMRQLHLHVISQDFNSDSLKNKKHWNSFTTSFFRDSVDVLEEVNSQGKANVASEDLLKGELRCNRCRSAHPNIPKLKSHVRSCHSQFPDHLLQNNRLVARAET

SEQ ID NO: 28861 - protein, 823 aa, Arabidopsis thaliana
  misc_feature (1)..(823): Ceres Seq. ID no. 3083886
MVPGGAKMDTVSMLDEAISYVKFLKAQIWYHQNMLLFINDHETTSSCTYSPGAGEFGPKLFGYDDDYAPIMDTYSQGVPLTVADSKRATRHALRGHCNCIIGETEEFADQREKMEVQIEESGKNQTSPESIEADKAKQIVVLLIGPPGSGKSTFCDTAMRSSHRPWSRICQDIVNNGKAGTKAQCLKMATDSLREGKSVFIDRCNLDREQRSEFIKLGGPEFEVHAVVLELPAQVCISRSVKRTGHEGNLQGGRAAAVVNKMLQSKELPKVNEGFSRIMFCYSDADVDNAVNMYNKLGPMDTLPSGCFGEKKLDTKSQPGIMKFFKKVSALPASSSNEATNTTRKADEMTANVRVSPVKLGSADIVPTLAFPSISTADFQFDLEKASDIIVEKAEEFLSKLGTARLVLVDLSRGSKILSLVKAKASQKNIDSAKFFTFVGDITKLRSEGGLHCNVIANATNWRLKPGGGGVNAAIFKAAGPDLETATRVRANTLLPGKAVVVPLPSTCPLHNAEGITHVIHVLGPNMNPNRPDNLNNDYTKGCKTLREAYTSLFEGFLSVVQDQSKLPKRSSQTAVSDSGEDIKEDSERNKKYKGSQDKAVTNNLESESLEDTRGSGKKMSKGWNTWALALHSIAMHPERHENVVLEYLDNIVVINDQYPKARKHVLVLARQESLDGLEDVRKENLQLLQEMHNVGLKWVDRFQNEDASLIFRLGYHSVPSMRQLHLHVISQDFNSDSLKNKKHWNSFTTSFFRDSVDVLEEVNSQGKANVASEDLLKGELRCNRCRSAHPNIPKLKSHVRSCHSQFPDHLLQNNRLVARAET

SEQ ID NO: 28862 - protein, 816 aa, Arabidopsis thaliana
  misc_feature (1)..(816): Ceres Seq. ID no. 3083887
MDTVSMLDEAISYVKFLKAQIWYHQNMLLFINDHETTSSCTYSPGAGEFGPKLFGYDDDYAPIMDTYSQGVPLTVADSKRATRHALRGHCNCIIGETEEFADQREKMEVQIEESGKNQTSPESIEADKAKQIVVLLIGPPGSGKSTFCDTAMRSSHRPWSRICQDIVNNGKAGTKAQCLKMATDSLREGKSVFIDRCNLDREQRSEFIKLGGPEFEVHAVVLELPAQVCISRSVKRTGHEGNLQGGRAAAVVNKMLQSKELPKVNEGFSRIMFCYSDADVDNAVNMYNKLGPMDTLPSGCFGEKKLDTKSQPGIMKFFKKVSALPASSSNEATNTTRKADEMTANVRVSPVKLGSADIVPTLAFPSISTADFQFDLEKASDIIVEKAEEFLSKLGTARLVLVDLSRGSKILSLVKAKASQKNIDSAKFFTFVGDITKLRSEGGLHCNVIANATNWRLKPGGGGVNAAIFKAAGPDLETATRVRANTLLPGKAVVVPLPSTCPLHNAEGITHVIHVLGPNMNPNRPDNLNNDYTKGCKTLREAYTSLFEGFLSVVQDQSKLPKRSSQTAVSDSGEDIKEDSERNKKYKGSQDKAVTNNLESESLEDTRGSGKKMSKGWNTWALALHSIAMHPERHENVVLEYLDNIVVINDQYPKARKHVLVLARQESLDGLEDVRKENLQLLQEMHNVGLKWVDRFQNEDASLIFRLGYHSVPSMRQLHLHVISQDFNSDSLKNKKHWNSFTTSFFRDSVDVLEEVNSQGKANVASEDLLKGELRCNRCRSAHPNIPKLKSHVRSCHSQFPDHLLQNNRLVARAET

SEQ ID NO: 28863 - DNA, 1284 bp, Arabidopsis thaliana
  misc_feature (1)..(1284): Ceres Seq. ID no. 3084009
atgaagaagcgcttaaccacttccacttgttcttcttctccatcttcctctgtttcttcttctactactacttcctctcctattcagtcggaggctccaaggcctaaacgagccaaaagggctaagaaatcttctccttctggtgataaatctcataacccgacaagccctgcttctacccgacgcagctctatctacagaggagtcactagacatagatggactgggagattcgaggctcatctttgggacaaaagctcttggaattcgattcagaacaagaaaggcaaacaaggagcatatgacagtgaagaagcagcagcacatacgtacgatctggctgctctcaagtactggggacccgacaccatcttgaattttccggcagagacgtacacaaaggaattggaagaaatgcagagagtgacaaaggaagaatatttggcttctctccgccgccagagcagtggtttctccagaggcgtctctaaatatcgcggcgtcgctaggcatcaccacaacggaagatgggaggctcggatcggaagagtgtttgggaacaagtacttgtacctcggcacctataatacgcaggaggaagctgctgcagcatatgacatggctgcgattgagtatcgaggcgcaaacgcggttactaatttcgacattagtaattacattgaccggttaaagaagaaaggtgttttcccgttccctgtgaaccaagctaaccatcaagagggtattcttgttgaagccaaacaagaagttgaaacgagagaagcgaaggaagagcctagagaagaagtgaaacaacagtacgtggaagaaccaccgcaagaagaagaagagaaggaagaagagaaagcagagcaacaagaagcagagattgtaggatattcagaagaagcagcagtggtcaattgctgcatagactcttcaaccataatggaaatggatcgttgtggggacaacaatgagctggcttggaacttctgtatgatggatacagggttttctccgtttttgactgatcagaatctcgcgaatgagaatcccatagagtatccggagctattcaatgagttagcatttgaggacaacatcgacttcatgttcgatgatgggaagcacgagtgcttgaacttggaaaatctggattgttgcgtggtgggaagagagagcccaccctcttcttcttcaccattgtcttgcttatctactgactctgcttcatcaacaacaacaacaacaacctcggtttcttgtaactatttggtctga

SEQ ID NO: 28864 - protein, 427 aa, Arabidopsis thaliana
  misc_feature (1)..(427): Ceres Seq. ID no. 3084010
MKKRLTTSTCSSSPSSSVSSSTTTSSPIQSEAPRPKRAKRAKKSSPSGDKSHNPTSPASTRRSSIYRGVTRHRWTGRFEAHLWDKSSWNSIQNKKGKQGAYDSEEAAAHTYDLAALKYWGPDTILNFPAETYTKELEEMQRVTKEEYLASLRRQSSGFSRGVSKYRGVARHHHNGRWEARIGRVFGNKYLYLGTYNTQEEAAAAYDMAAIEYRGANAVTNFDISNYIDRLKKKGVFPFPVNQANHQEGILVEAKQEVETREAKEEPREEVKQQYVEEPPQEEEEKEEEKAEQQEAEIVGYSEEAAVVNCCIDSSTIMEMDRCGDNNELAWNFCMMDTGFSPFLTDQNLANENPIEYPELFNELAFEDNIDFMFDDGKHECLNLENLDCCVVGRESPPSSSSPLSCLSTDSASSTTTTTTSVSCNYLV

SEQ ID NO: 28865 - protein, 289 aa, Arabidopsis thaliana
  misc_feature (1)..(289): Ceres Seq. ID no. 3084011
MQRVTKEEYLASLRRQSSGFSRGVSKYRGVARHHHNGRWEARIGRVFGNKYLYLGTYNTQEEAAAAYDMAAIEYRGANAVTNFDISNYIDRLKKKGVFPFPVNQANHQEGILVEAKQEVETREAKEEPREEVKQQYVEEPPQEEEEKEEEKAEQQEAEIVGYSEEAAVVNCCIDSSTIMEMDRCGDNNELAWNFCMMDTGFSPFLTDQNLANENPIEYPELFNELAFEDNIDFMFDDGKHECLNLENLDCCVVGRESPPSSSSPLSCLSTDSASSTTTTTTSVSCNYLV

SEQ ID NO: 28866 - protein, 221 aa, Arabidopsis thaliana
  misc_feature (1)..(221): Ceres Seq. ID no. 3084012
MAAIEYRGANAVTNFDISNYIDRLKKKGVFPFPVNQANHQEGILVEAKQEVETREAKEEPREEVKQQYVEEPPQEEEEKEEEKAEQQEAEIVGYSEEAAVVNCCIDSSTIMEMDRCGDNNELAWNFCMMDTGFSPFLTDQNLANENPIEYPELFNELAFEDNIDFMFDDGKHECLNLENLDCCVVGRESPPSSSSPLSCLSTDSASSTTTTTTSVSCNYLV

SEQ ID NO: 28867 - DNA, 1161 bp, Arabidopsis thaliana
  misc_feature (1)..(1161): Ceres Seq. ID no. 3084650
atggagacagacgaagcataccaaaagaaagagcgagctgcattagtagccatcgttgtccttgcttgtcttgctttatcttctttgttcgtcgcctttagctactactgctatattcgtaacaaggaaaaaggcgattgtcagaaagtacaagatgttactgaaaatgggttgcaaattttcacctttaagcaattgcattcagcaactggtggatttagcaagtctaatgtggttgggaatggtgggtttggcttggtttatcgtggtgtgcttaacgatggcagaaaagttgctatcaagctcatggatcatgcaggaaagcaaggggaagaagaattcaagatggaggttgagttactgagccgtctgcgttcaccatacttgttggcacttcttggttattgctcagacaatagtcataagctgcttgtgtatgagttcatggcaaatggtggtctgcaggaacacctgtatcttcccaacaggtctggttctgtcccaccaagattagattgggaaactaggatgagaatagctgtggaagctgcaaaaggcttggaatatctccatgaacaagtatcacccccggtgattcatagagactttaagagcagcaatattctgctggacagaaacttcaatgccaaagtttcagattttggattggctaaagtcggatcagataaagctggtggacacgtttctacccgtgtattaggcacacaaggatatgtagctcctgagtacgctttaactggtcacttgacaacaaagtcggatgtctatagctacggtgttgtcctgttagagttactaaccggtagagttccagtagatatgaagagagctacaggagaaggtgttcttgtctcttgggctttgcctcaattggctgatagagacaaagtagtagacataatggatccaacactcgaaggacaatactctacgaaagaagttgttcaagttgcagcaatagcagcaatgtgtgttcaagcagaagctgactacagacccttaatggcagatgtggtgcagtcactggttccattagtgagaaaccgtaggtcagcttcaaagcttagtggctgctctagtagctttagcttggctcggtctcctaactctccgggtaaagcaagcataggttctcaatga

SEQ ID NO: 28868 - protein, 386 aa, Arabidopsis thaliana
  misc_feature (1)..(386): Ceres Seq. ID no. 3084651
METDEAYQKKERAALVAIVVLACLALSSLFVAFSYYCYIRNKEKGDCQKVQDVTENGLQIFTFKQLHSATGGFSKSNVVGNGGFGLVYRGVLNDGRKVAIKLMDHAGKQGEEEFKMEVELLSRLRSPYLLALLGYCSDNSHKLLVYEFMANGGLQEHLYLPNRSGSVPPRLDWETRMRIAVEAAKGLEYLHEQVSPPVIHRDFKSSNILLDRNFNAKVSDFGLAKVGSDKAGGHVSTRVLGTQGYVAPEYALTGHLTTKSDVYSYGVVLLELLTGRVPVDMKRATGEGVLVSWALPQLADRDKVVDIMDPTLEGQYSTKEVVQVAAIAAMCVQAEADYRPLMADVVQSLVPLVRNRRSASKLSGCSSSFSLARSPNSPGKASIGSQ

SEQ ID NO: 28869 - protein, 284 aa, Arabidopsis thaliana
  misc_feature (1)..(284): Ceres Seq. ID no. 3084652
MDHAGKQGEEEFKMEVELLSRLRSPYLLALLGYCSDNSHKLLVYEFMANGGLQEHLYLPNRSGSVPPRLDWETRMRIAVEAAKGLEYLHEQVSPPVIHRDFKSSNILLDRNFNAKVSDFGLAKVGSDKAGGHVSTRVLGTQGYVAPEYALTGHLTTKSDVYSYGVVLLELLTGRVPVDMKRATGEGVLVSWALPQLADRDKVVDIMDPTLEGQYSTKEVVQVAAIAAMCVQAEADYRPLMADVVQSLVPLVRNRRSASKLSGCSSSFSLARSPNSPGKASIGSQ

SEQ ID NO: 28870 - protein, 271 aa, Arabidopsis thaliana
  misc_feature (1)..(271): Ceres Seq. ID no. 3084653
MEVELLSRLRSPYLLALLGYCSDNSHKLLVYEFMANGGLQEHLYLPNRSGSVPPRLDWETRMRIAVEAAKGLEYLHEQVSPPVIHRDFKSSNILLDRNFNAKVSDFGLAKVGSDKAGGHVSTRVLGTQGYVAPEYALTGHLTTKSDVYSYGVVLLELLTGRVPVDMKRATGEGVLVSWALPQLADRDKVVDIMDPTLEGQYSTKEVVQVAAIAAMCVQAEADYRPLMADVVQSLVPLVRNRRSASKLSGCSSSFSLARSPNSPGKASIGSQ

SEQ ID NO: 28871 - DNA, 1245 bp, Arabidopsis thaliana
  misc_feature (1)..(1245): Ceres Seq. ID no. 3085045
atggattaccgaccttctgatagtagtggtacagatgatgacctgcctccatctcatcaaggtagatatcaaagaaacgccagacctaccgggaatggaaggccttcagttctcaattctgctcctttatcacgggtgcacaatgaaatggaaactcaaattcatctcattgagcaagaagcttatagctcgatactccgcgcatttaaagcccagtccgatgctattacctgggagaaagaaagtttgatcactgaactcagaaaagaacttcgagtgtctgatgaggaacacagagagctgttatcaagggttaacgctgatgaaatgatcaggcgaataagggaatggagaaaggcaaacagccttcagtctagtgttcctcagctggttcatgatgctccgagtccggctgtatcaggatcacgtaagaagcaaaagacatcacaatcaatcgcctcattagcgatgggcccaccatctccttctttgcacccttcaatgcaaccatcgtcatctgcactaagaaggggaggtcctccaccaggtccaaagaccaagaagccaaagacatcgatgcagtacccatctacaggcattgctggaaggccccaggctggcgctttaacaaatgaaccaggtgaatcgggatcatatgacccgttggttggaaggaaggtatggacgaagtggcctgatgacaaccaatactacgaagctgttataactgactacaaccctgttgaggggcgtcatgctttagtgtatgatattaactctgcgaatgaaacctgggaatgggtaaatcttaaagagatatctccgggagatatcagatgggaaggtgaagatcctgggatttctcgtaaaggaggacatcctgggcaaggccgtggaacaaaaaccatggctcgtggtggtcctgcaagcaatgcgggtggtagaggtaggggaagcatgaggatgcagcaacctaagacacagaatggcatcggaaagaaagctttaggcgaaatcgaaattctccacactgagacattgttaaaagaggtggaaaaagtttttgggtcagttaaccccaacccagcagaggtagagaaggcaaagagagtgctgagagatcatgaactagctcttatggatgccatcgcaaagcttgaagaaatatcagatggagaaagcgatgatggagccggagcattagagttgcaaaaaggtgttgtagatggtggtggcaaaatgtga

SEQ ID NO: 28872 - protein, 414 aa, Arabidopsis thaliana
  misc_feature (1)..(414): Ceres Seq. ID no. 3085046
MDYRPSDSSGTDDDLPPSHQGRYQRNARPTGNGRPSVLNSAPLSRVHNEMETQIHLIEQEAYSSILRAFKAQSDAITWEKESLITELRKELRVSDEEHRELLSRVNADEMIRRIREWRKANSLQSSVPQLVHDAPSPAVSGSRKKQKTSQSIASLAMGPPSPSLHPSMQPSSSALRRGGPPPGPKTKKPKTSMQYPSTGIAGRPQAGALTNEPGESGSYDPLVGRKVWTKWPDDNQYYEAVITDYNPVEGRHALVYDINSANETWEWVNLKEISPGDIRWEGEDPGISRKGGHPGQGRGTKTMARGGPASNAGGRGRGSMRMQQPKTQNGIGKKALGEIEILHTETLLKEVEKVFGSVNPNPAEVEKAKRVLRDHELALMDAIAKLEEISDGESDDGAGALELQKGVVDGGGKM

SEQ ID NO: 28873 - protein, 365 aa, Arabidopsis thaliana
  misc_feature (1)..(365): Ceres Seq. ID no. 3085047
METQIHLIEQEAYSSILRAFKAQSDAITWEKESLITELRKELRVSDEEHRELLSRVNADEMIRRIREWRKANSLQSSVPQLVHDAPSPAVSGSRKKQKTSQSIASLAMGPPSPSLHPSMQPSSSALRRGGPPPGPKTKKPKTSMQYPSTGIAGRPQAGALTNEPGESGSYDPLVGRKVWTKWPDDNQYYEAVITDYNPVEGRHALVYDINSANETWEWVNLKEISPGDIRWEGEDPGISRKGGHPGQGRGTKTMARGGPASNAGGRGRGSMRMQQPKTQNGIGKKALGEIEILHTETLLKEVEKVFGSVNPNPAEVEKAKRVLRDHELALMDAIAKLEEISDGESDDGAGALELQKGVVDGGGKM

SEQ ID NO: 28874 - protein, 305 aa, Arabidopsis thaliana
  misc_feature (1)..(305): Ceres Seq. ID no. 3085048
MIRRIREWRKANSLQSSVPQLVHDAPSPAVSGSRKKQKTSQSIASLAMGPPSPSLHPSMQPSSSALRRGGPPPGPKTKKPKTSMQYPSTGIAGRPQAGALTNEPGESGSYDPLVGRKVWTKWPDDNQYYEAVITDYNPVEGRHALVYDINSANETWEWVNLKEISPGDIRWEGEDPGISRKGGHPGQGRGTKTMARGGPASNAGGRGRGSMRMQQPKTQNGIGKKALGEIEILHTETLLKEVEKVFGSVNPNPAEVEKAKRVLRDHELALMDAIAKLEEISDGESDDGAGALELQKGVVDGGGKM

SEQ ID NO: 28875 - DNA, 1341 bp, Arabidopsis thaliana
  misc_feature (1)..(1341): Ceres Seq. ID no. 3085140
atgatccgttcttcgattgtaattttatctctgttactaatttcacacttggtttctgcaaaagttctgttgatcggtaacagcacatctctctccttcgacgacgtcgaagccactttcactccgatgattaagagatcggatcaaggcggtgtgttgtatgtagcagagccactcgatgcttgttcggatttggtgaatacggtgaatgtgaaaaatggaactactgtgtctcctccgtatgtgttgattatccgcggtggttgtagtttcgaagataagattaggaatgctcaaaaggctggttataaagctgctattgtttatgactatgaagattttgggttcttagtatcaagaaacccctctggtgtacttatttatggtacgtttgtctccaaagcaactggggaagtacttaaagagtatgcgggtcgtaccgattttgaagtgtggctcatgccaagtttcgagacttcagcatggtcaatcatggctatttctttcatatctctcctcgccatgtcggctgtgctcgctacttgcttctttgtccgtaggcatcgagttaggcgtcggcgtattctggctcttaatggcaatgactttcatcgtatgcccaaaagcatgataatacgtatgcctactaccatatttaacggtatttgtgatgaagcaactacatctatattgtgctgcatatgccttgagaattatgagaaaggggacaagctaaggatcctaccttgccatcacaaatttcatgttgcttgtgtagacttgtggcttggccagaggaaatccttttgcccggtttgcaaacgcgatgcaagaagcatcagtaccgacaagcccccatcagagcacacaccctttctttctcggactcctagcatgaccccgacgtcatcgtttctcttatcatcatcctccacaaccccattgcagtcatctcatgagctaccaatatccatcagagtagacccttctttaccatccacctcaatgcagccacacacagttcctatgtatctctcccactctcgctcccacacaagcttccaaaatggatcaaaccgattttcccggcctataccagttagccggagttcagcagatctcaggaacgccgtttcccaaagatcttacaactcaccccaccaggtttctttgcctcgtttcctccactcaagatatacgcacatacttggcccgggaaatgcatcaagaagccaggttgttgggttgttaacaagccagcgcgagcattcacttcatcaaaatgactcgcgcaggtctttcattcactttgcatctgcgagctccttaccaggctggtaa

SEQ ID NO: 28876 - protein, 446 aa, Arabidopsis thaliana
  misc_feature (1)..(446): Ceres Seq. ID no. 3085141
MIRSSIVILSLLLISHLVSAKVLLIGNSTSLSFDDVEATFTPMIKRSDQGGVLYVAEPLDACSDLVNTVNVKNGTTVSPPYVLIIRGGCSFEDKIRNAQKAGYKAAIVYDYEDFGFLVSRNPSGVLIYGTFVSKATGEVLKEYAGRTDFEVWLMPSFETSAWSIMAISFISLLAMSAVLATCFFVRRHRVRRRRILALNGNDFHRMPKSMIIRMPTTIFNGICDEATTSILCCICLENYEKGDKLRILPCHHKFHVACVDLWLGQRKSFCPVCKRDARSISTDKPPSEHTPFLSRTPSMTPTSSFLLSSSSTTPLQSSHELPISIRVDPSLPSTSMQPHTVPMYLSHSRSHTSFQNGSNRFSRPIPVSRSSADLRNAVSQRSYNSPHQVSLPRFLHSRYTHILGPGNASRSQVVGLLTSQREHSLHQNDSRRSFIHFASASSLPGW

SEQ ID NO: 28877 - protein, 404 aa, Arabidopsis thaliana
  misc_feature (1)..(404): Ceres Seq. ID no. 3085142
MIKRSDQGGVLYVAEPLDACSDLVNTVNVKNGTTVSPPYVLIIRGGCSFEDKIRNAQKAGYKAAIVYDYEDFGFLVSRNPSGVLIYGTFVSKATGEVLKEYAGRTDFEVWLMPSFETSAWSIMAISFISLLAMSAVLATCFFVRRHRVRRRRILALNGNDFHRMPKSMIIRMPTTIFNGICDEATTSILCCICLENYEKGDKLRILPCHHKFHVACVDLWLGQRKSFCPVCKRDARSISTDKPPSEHTPFLSRTPSMTPTSSFLLSSSSTTPLQSSHELPISIRVDPSLPSTSMQPHTVPMYLSHSRSHTSFQNGSNRFSRPIPVSRSSADLRNAVSQRSYNSPHQVSLPRFLHSRYTHILGPGNASRSQVVGLLTSQREHSLHQNDSRRSFIHFASASSLPGW

SEQ ID NO: 28878 - protein, 293 aa, Arabidopsis thaliana; identical to SEQ ID NO: 28494
  misc_feature (1)..(293): Ceres Seq. ID no. 3085143

SEQ ID NO: 28879 - DNA, 1086 bp, Arabidopsis thaliana
  misc_feature (1)..(1086): Ceres Seq. ID no. 3085402
atgaagaaacttcttttgatatttctcttttctcttgtcattctccaaactgcttgtggattcgattacgacgacaaggaaatagaaagcgaagagggcttatcaacgctttatgatagatggaggagccaccactccgttcctaggagtctaaatgaaagggagaagagattcaacgttttcagacacaatgtcatgcatgtccacaataccaacaagaagaaccgatcctacaaacttaagctcaacaagtttgcagatttaacaattaatgagttcaagaatgcatacaccggttccaacatcaagcatcacagaatgttgcaaggaccaaaacgcggctcaaaacagttcatgtatgatcatgagaatttatccaaattaccgtcctccgttgattggagaaagaaaggtgctgtcactgaaatcaagaatcaaggaaaatgtggaagttgttgggcattctctaccgtagcagctgttgagggaatcaacaagatcaagactaacaaactggtctcactgtctgaacaagaactagtggattgtgatactaagcagaatgaaggttgtaacggaggtcttatggagattgcatttgaattcatcaagaagaacggtggtatcaccactgaagatagctatccttatgaaggtatcgatggaaaatgcgacgcttcaaaggataacggcgtgcttgtgacgatagatgggcatgaagatgtacccgaaaacgacgaaaatgctcttcttaaggctgttgcaaaccaacctgtatctgttgcaattgatgctggaagttcagatttccagttttattcagagggagtgtttacgggatcttgtggaacagagctgaaccatggtgtggcagcggtcgggtatggatctgagagggggaaaaagtattggatagtgagaaactcatggggagctgaatggggagagggaggctatataaagattgaaagagagattgatgaaccggaagggcgttgcggtattgcgatggaggcatcgtatccgatcaagctatcgtcgtctaatcctaccccgaaagacggtgatgtcaaagatgagctctag

SEQ ID NO: 28880 - protein, 361 aa, Arabidopsis thaliana
  misc_feature (1)..(361): Ceres Seq. ID no. 3085403
MKKLLLIFLFSLVILQTACGFDYDDKEIESEEGLSTLYDRWRSHHSVPRSLNEREKRFNVFRHNVMHVHNTNKKNRSYKLKLNKFADLTINEFKNAYTGSNIKHHRMLQGPKRGSKQFMYDHENLSKLPSSVDWRKKGAVTEIKNQGKCGSCWAFSTVAAVEGINKIKTNKLVSLSEQELVDCDTKQNEGCNGGLMEIAFEFIKKNGGITTEDSYPYEGIDGKCDASKDNGVLVTIDGHEDVPENDENALLKAVANQPVSVAIDAGSSDFQFYSEGVFTGSCGTELNHGVAAVGYGSERGKKYWIVRNSWGAEWGEGGYIKIEREIDEPEGRCGIAMEASYPIKLSSSNPTPKDGDVKDEL

SEQ ID NO: 28881 - protein, 296 aa, Arabidopsis thaliana
  misc_feature (1)..(296): Ceres Seq. ID no. 3085404
MHVHNTNKKNRSYKLKLNKFADLTINEFKNAYTGSNIKHHRMLQGPKRGSKQFMYDHENLSKLPSSVDWRKKGAVTEIKNQGKCGSCWAFSTVAAVEGINKIKTNKLVSLSEQELVDCDTKQNEGCNGGLMEIAFEFIKKNGGITTEDSYPYEGIDGKCDASKDNGVLVTIDGHEDVPENDENALLKAVANQPVSVAIDAGSSDFQFYSEGVFTGSCGTELNHGVAAVGYGSERGKKYWIVRNSWGAEWGEGGYIKIEREIDEPEGRCGIAMEASYPIKLSSSNPTPKDGDVKDEL

SEQ ID NO: 28882 - protein, 255 aa, Arabidopsis thaliana
  misc_feature (1)..(255): Ceres Seq. ID no. 3085405
MLQGPKRGSKQFMYDHENLSKLPSSVDWRKKGAVTEIKNQGKCGSCWAFSTVAAVEGINKIKTNKLVSLSEQELVDCDTKQNEGCNGGLMEIAFEFIKKNGGITTEDSYPYEGIDGKCDASKDNGVLVTIDGHEDVPENDENALLKAVANQPVSVAIDAGSSDFQFYSEGVFTGSCGTELNHGVAAVGYGSERGKKYWIVRNSWGAEWGEGGYIKIEREIDEPEGRCGIAMEASYPIKLSSSNPTPKDGDVKDEL

SEQ ID NO: 28883 - DNA, 2259 bp, Arabidopsis thaliana
  misc_feature (1)..(2259): Ceres Seq. ID no. 3085597
atgacgattctcactgtacagtcttcgtttagctcttctcgagttccggttataaagaacgcgaatttcgatcaaattccgtcgtgggtttctctgaagtcgagcacttcttctccgtctgttaaaatctcgcataagcaaggacaagtagagaatcttcatttggtttcgttgtcgaagcataggaagctcaacgaagcatttgagtttttgcaagaaatggataaggctggtgtctccgttagctcgtattcttaccaatgtctctttgaggcttgcagagaattgaggtctttatctcatgggagactcttgcacgatcgcatgcggatgggtatcgagaatccttctgtgcttcttcagaactgtgtgcttcaaatgtactgtgagtgtcggagcttggaagatgcagataagctgttcgatgaaatgtctgagttaaatgcagtttctcgtacaacgatgatatctgcttacgccgaacaaggaattttggataaagctgttggtttgttctcgggaatgctagcgtcaggcgacaagcctccttcttccatgtatacgacactcttgaaatctttggtaaaccccagggctttagactttggtagacagattcatgctcatgttatacgtgctgggttatgtagcaacacatctatagagaccgggatcgtgaacatgtacgtgaaatgtggttggttagtgggtgctaagcgagtgttcgatcagatggcagtgaagaaaccagtggcttgtacgggattgatggtaggttatactcaagctggaagagcaagagatgctttgaaactatttgtggatttggtaacggaaggtgttgaatgggacagttttgtgttttcagttgttcttaaagcgtgtgcttctcttgaagagcttaatcttggcaagcaaattcatgcctgtgtcgctaagcttggattggaatctgaagtctcggttggaactccacttgttgatttttacatcaaatgttccagcttcgagtctgcttgtcgtgcatttcaagaaatccgtgagccaaacgatgtttcctggagcgcaatcatctccggatactgtcaaatgagtcaatttgaggaggctgttaaaaccttcaagtctttgagaagcaaaaacgcatcgattctaaattcattcacatatactagcatattccaagcatgctcggtacttgcagattgcaacattggtggccaagtccatgcagatgctataaaaagaagtctgattggatctcagtatggagaaagcgctcttattacgatgtattcaaaatgtggatgcttagatgatgcaaatgaagtctttgagtccatggacaaccccgatattgttgcatggactgcttttatatcaggtcatgcttactatggaaatgcctctgaagctttgagattgtttgagaaaatggtgagttgtggtatgaagccaaactcagttacatttattgcggttttaaccgcgtgcagccatgcaggcctagttgaacagggaaagcattgcttggacacgatgcttcgaaaatataatgtggctccgactattgatcattatgattgtatgatcgacatttatgcccgttcgggactattagacgaagctctcaaatttatgaagaatatgccttttgaacctgatgcaatgagctggaaatgctttctaagtggatgttggactcataagaatcttgaactgggcgaaattgctggtgaggaacttcgccaactcgatccagaagatacagctggatatgtgctaccgtttaatctgtacacctgggctggaaaatgggaagaagctgctgaaatgatgaaactaatgaatgagaggatgttaaagaaggaactgagctgcagctggatccaagaaaagggtaagattcatcggtttatagtgggtgataaacaccatccacaaactcaggagatctatgagaagcttaaggagtttgatggtttcatggaaggtgatatgtttcagtgtaatatgacagagagaagagaacagcttcttgatcatagtgagagacttgccattgcatttgggctgatatcggtgcatggcaatgcccctgcacctattaaggtgttcaagaatcttcgggcatgcccagattgtcatgagtttgcaaagcatgtatctttggttacaggacatgaaatcgtcatccgagattccaggaggtttcaccatttcaaggagggaaagtgttcttgcaacgattactggtga

SEQ ID NO: 28884 - protein, 752 aa, Arabidopsis thaliana
  misc_feature (1)..(752): Ceres Seq. ID no. 3085598
MTILTVQSSFSSSRVPVIKNANFDQIPSWVSLKSSTSSPSVKISHKQGQVENLHLVSLSKHRKLNEAFEFLQEMDKAGVSVSSYSYQCLFEACRELRSLSHGRLLHDRMRMGIENPSVLLQNCVLQMYCECRSLEDADKLFDEMSELNAVSRTTMISAYAEQGILDKAVGLFSGMLASGDKPPSSMYTTLLKSLVNPRALDFGRQIHAHVIRAGLCSNTSIETGIVNMYVKCGWLVGAKRVFDQMAVKKPVACTGLMVGYTQAGRARDALKLFVDLVTEGVEWDSFVFSVVLKACASLEELNLGKQIHACVAKLGLESEVSVGTPLVDFYIKCSSFESACRAFQEIREPNDVSWSAIISGYCQMSQFEEAVKTFKSLRSKNASILNSFTYTSIFQACSVLADCNIGGQVHADAIKRSLIGSQYGESALITMYSKCGCLDDANEVFESMDNPDIVAWTAFISGHAYYGNASEALRLFEKMVSCGMKPNSVTFIAVLTACSHAGLVEQGKHCLDTMLRKYNVAPTIDHYDCMIDIYARSGLLDEALKFMKNMPFEPDAMSWKCFLSGCWTHKNLELGEIAGEELRQLDPEDTAGYVLPFNLYTWAGKWEEAAEMMKLMNERMLKKELSCSWIQEKGKIHRFIVGDKHHPQTQEIYEKLKEFDGFMEGDMFQCNMTERREQLLDHSERLAIAFGLISVHGNAPAPIKVFKNLRACPDCHEFAKHVSLVTGHEIVIRDSRRFHHFKEGKCSCNDYW

SEQ ID NO: 28885 - protein, 679 aa, Arabidopsis thaliana
  misc_feature (1)..(679): Ceres Seq. ID no. 3085599
MDKAGVSVSSYSYQCLFEACRELRSLSHGRLLHDRMRMGIENPSVLLQNCVLQMYCECRSLEDADKLFDEMSELNAVSRTTMISAYAEQGILDKAVGLFSGMLASGDKPPSSMYTTLLKSLVNPRALDFGRQIHAHVIRAGLCSNTSIETGIVNMYVKCGWLVGAKRVFDQMAVKKPVACTGLMVGYTQAGRARDALKLFVDLVTEGVEWDSFVFSVVLKACASLEELNLGKQIHACVAKLGLESEVSVGTPLVDFYIKCSSFESACRAFQEIREPNDVSWSAIISGYCQMSQFEEAVKTFKSLRSKNASILNSFTYTSIFQACSVLADCNIGGQVHADAIKRSLIGSQYGESALITMYSKCGCLDDANEVFESMDNPDIVAWTAFISGHAYYGNASEALRLFEKMVSCGMKPNSVTFIAVLTACSHAGLVEQGKHCLDTMLRKYNVAPTIDHYDCMIDIYARSGLLDEALKFMKNMPFEPDAMSWKCFLSGCWTHKNLELGEIAGEELRQLDPEDTAGYVLPFNLYTWAGKWEEAAEMMKLMNERMLKKELSCSWIQEKGKIHRFIVGDKHHPQTQEIYEKLKEFDGFMEGDMFQCNMTERREQLLDHSERLAIAFGLISVHGNAPAPIKVFKNLRACPDCHEFAKHVSLVTGHEIVIRDSRRFHHFKEGKCSCNDYW

SEQ ID NO: 28886 - protein, 644 aa, Arabidopsis thaliana
  misc_feature (1)..(644): Ceres Seq. ID no. 3085600
MRMGIENPSVLLQNCVLQMYCECRSLEDADKLFDEMSELNAVSRTTMISAYAEQGILDKAVGLFSGMLASGDKPPSSMYTTLLKSLVNPRALDFGRQIHAHVIRAGLCSNTSIETGIVNMYVKCGWLVGAKRVFDQMAVKKPVACTGLMVGYTQAGRARDALKLFVDLVTEGVEWDSFVFSVVLKACASLEELNLGKQIHACVAKLGLESEVSVGTPLVDFYIKCSSFESACRAFQEIREPNDVSWSAIISGYCQMSQFEEAVKTFKSLRSKNASILNSFTYTSIFQACSVLADCNIGGQVHADAIKRSLIGSQYGESALITMYSKCGCLDDANEVFESMDNPDIVAWTAFISGHAYYGNASEALRLFEKMVSCGMKPNSVTFIAVLTACSHAGLVEQGKHCLDTMLRKYNVAPTIDHYDCMIDIYARSGLLDEALKFMKNMPFEPDAMSWKCFLSGCWTHKNLELGEIAGEELRQLDPEDTAGYVLPFNLYTWAGKWEEAAEMMKLMNERMLKKELSCSWIQEKGKIHRFIVGDKHHPQTQEIYEKLKEFDGFMEGDMFQCNMTERREQLLDHSERLAIAFGLISVHGNAPAPIKVFKNLRACPDCHEFAKHVSLVTGHEIVIRDSRRFHHFKEGKCSCNDYW

SEQ ID NO: 28887 - DNA, 1947 bp, Arabidopsis thaliana
  misc_feature (1)..(1947): Ceres Seq. ID no. 3085829
atgggagagactgaggatgaaaaagatgcttctttggctgatatcgagaaggagtgtctctcggtttataagcgaaaggtcgaggaggctagtcggggtaaagcgaatttgctgaaagaaatcgctgttggcagagcagaaattgcagctattggctcttctatgggtggacaagagattcattctaacagcaggttaggagaaaacttgaaagaggagcttgagaatgttaatgtgcaattggatggactgcgcaaaaggaaagctgagagaatgattcggtttaatgaagttatcgatcagttactgaagttgtcactgcaacttggaaatccaacagattatctgaagaagtttgctgctgaagagaccgatctttcgcttcagaggttggaggaattgcgtagccagttgggtgagctccaaaatgaaaagagcaaaagattggaagaggtagagtgtttgctgaaaacgcttaactcgttgtgctcggttcttggtgaagatttcaaaggcatgataagagggatacattcatctctggttgattccaacactagggatgtgagcagaagtactcttgataagttggatatgatgattgtgaatttacgagaggccaagttacagcgaatgcagaaggttcaagatcttgcagtgtccttgttggagctctggaatctgctggacacgcctgcggaagagcaaaagatatttcacaatgtcacatgtagcatcgctttgactgagtctgaaataactgaggccaacatactttctgttgcttccattaaacgcgttgaggatgaagtcattaggcttagcaagatcaaaataactaagatcaaagaggtgatactgaggaagaggcttgagcttgaggaaatatcaaggaagatgcacatggccaccgaagttcttaaatcagaaaacttttcagttgaagctatagaatctggtgtcaaggatcctgagcagttgttagagcaaattgattccgagattgcaaaggtcaaagaggaagcttcaagcaggaaggagattcttgaaaaagtggagaaatggatgtcagcttgtgaagaagagtcttggctggaagagtacaatcgggatgataaccggtacaacgctggaagaggagctcatcttacattgaagcgtgcagaaaaagcccgtttacttgtcaataaacttcctgggatggtggaagctttgaccgccaaagtcactgcttgggagaatgaaagaggaaatgaattcttatatgatggggtccgagtcttatcgatgcttggtcagtacaagactgtatgggaagagaaagagcatgaaaaacagagacagagagatatgaagaaacttcatggacaactcataacagagcaagaagctctttatgggtctaaaccaagcccaaataaaagcggaaagaaaccactgagaacaccagtaaatgctgccatgaacagaaaactctcccttggtggtgccatgcttcatcaaagcttaaagcatgagaaggcaacactcaatagcaaaaggacgaagtactatgaccagaacgctactagtagaagagattcagctcttccaactctttcagggaggagaaactcagagcttcctggtcgtatcagatcaaagaacgttccggttgcaggaaaagctgcgagatctccaatgcttaggaagcctctttcacctgtcacttccaatatcttgaattccccagaagatcatcacaaggatgcttacacaacaaaggagagaatcttgacacctaaaaccaacgaagaaaagaaaagagctgttccaacaactcctgcagcttcagtcgctatgacagaggcaacaacgccgttcactcctgctgtggagaagagaatggatgaggaagacgttattgttgagtattcgtttgaagaggttagggccggtttttgctaa

SEQ ID NO: 28888 - protein, 648 aa, Arabidopsis thaliana
  misc_feature (1)..(648): Ceres Seq. ID no. 3085830
MGETEDEKDASLADIEKECLSVYKRKVEEASRGKANLLKEIAVGRAEIAAIGSSMGGQEIHSNSRLGENLKEELENVNVQLDGLRKRKAERMIRFNEVIDQLLKLSLQLGNPTDYLKKFAAEETDLSLQRLEELRSQLGELQNEKSKRLEEVECLLKTLNSLCSVLGEDFKGMIRGIHSSLVDSNTRDVSRSTLDKLDMMIVNLREAKLQRMQKVQDLAVSLLELWNLLDTPAEEQKIFHNVTCSIALTESEITEANILSVASIKRVEDEVIRLSKIKITKIKEVILRKRLELEEISRKMHMATEVLKSENFSVEAIESGVKDPEQLLEQIDSEIAKVKEEASSRKEILEKVEKWMSACEEESWLEEYNRDDNRYNAGRGAHLTLKRAEKARLLVNKLPGMVEALTAKVTAWENERGNEFLYDGVRVLSMLGQYKTVWEEKEHEKQRQRDMKKLHGQLITEQEALYGSKPSPNKSGKKPLRTPVNAAMNRKLSLGGAMLHQSLKHEKATLNSKRTKYYDQNATSRRDSALPTLSGRRNSELPGRIRSKNVPVAGKAARSPMLRKPLSPVTSNILNSPEDHHKDAYTTKERILTPKTNEEKKRAVPTTPAASVAMTEATTPFTPAVEKRMDEEDVIVEYSFEEVRAGFC

SEQ ID NO: 28889 - protein, 594 aa, Arabidopsis thaliana
  misc_feature (1)..(594): Ceres Seq. ID no. 3085831
MGGQEIHSNSRLGENLKEELENVNVQLDGLRKRKAERMIRFNEVIDQLLKLSLQLGNPTDYLKKFAAEETDLSLQRLEELRSQLGELQNEKSKRLEEVECLLKTLNSLCSVLGEDFKGMIRGIHSSLVDSNTRDVSRSTLDKLDMMIVNLREAKLQRMQKVQDLAVSLLELWNLLDTPAEEQKIFHNVTCSIALTESEITEANILSVASIKRVEDEVIRLSKIKITKIKEVILRKRLELEEISRKMHMATEVLKSENFSVEAIESGVKDPEQLLEQIDSEIAKVKEEASSRKEILEKVEKWMSACEEESWLEEYNRDDNRYNAGRGAHLTLKRAEKARLLVNKLPGMVEALTAKVTAWENERGNEFLYDGVRVLSMLGQYKTVWEEKEHEKQRQRDMKKLHGQLITEQEALYGSKPSPNKSGKKPLRTPVNAAMNRKLSLGGAMLHQSLKHEKATLNSKRTKYYDQNATSRRDSALPTLSGRRNSELPGRIRSKNVPVAGKAARSPMLRKPLSPVTSNILNSPEDHHKDAYTTKERILTPKTNEEKKRAVPTTPAASVAMTEATTPFTPAVEKRMDEEDVIVEYSFEEVRAGFC

SEQ ID NO: 28890 - protein, 557 aa, Arabidopsis thaliana
  misc_feature (1)..(557): Ceres Seq. ID no. 3085832
MIRFNEVIDQLLKLSLQLGNPTDYLKKFAAEETDLSLQRLEELRSQLGELQNEKSKRLEEVECLLKTLNSLCSVLGEDFKGMIRGIHSSLVDSNTRDVSRSTLDKLDMMIVNLREAKLQRMQKVQDLAVSLLELWNLLDTPAEEQKIFHNVTCSIALTESEITEANILSVASIKRVEDEVIRLSKIKITKIKEVILRKRLELEEISRKMHMATEVLKSENFSVEAIESGVKDPEQLLEQIDSEIAKVKEEASSRKEILEKVEKWMSACEEESWLEEYNRDDNRYNAGRGAHLTLKRAEKARLLVNKLPGMVEALTAKVTAWENERGNEFLYDGVRVLSMLGQYKTVWEEKEHEKQRQRDMKKLHGQLITEQEALYGSKPSPNKSGKKPLRTPVNAAMNRKLSLGGAMLHQSLKHEKATLNSKRTKYYDQNATSRRDSALPTLSGRRNSELPGRIRSKNVPVAGKAARSPMLRKPLSPVTSNILNSPEDHHKDAYTTKERILTPKTNEEKKRAVPTTPAASVAMTEATTPFTPAVEKRMDEEDVIVEYSFEEVRAGFC

SEQ ID NO: 28891 - DNA, 795 bp, Arabidopsis thaliana
  misc_feature (1)..(795): Ceres Seq. ID no. 3086207
atggcttcctcatctctcaaatgtttttcttttatcgttgttcttacaactttctttgcaatctcattgaagccatgttattgccacaataaaacccactggaacaccgccggcatcacgtggtatggcgaccgagaaggtcctggcaccacaggaggagcttgtggatatggtgatgcagtggcaaaacacccgtacagatgtatggtttcagccggaggaccttcattgttcaaagacggaaagggttgtggggcttgttacaggcttaaatgcgaccatccgttgtgcacgaaaaagccgatcaaggtgatgatatcggatgagtgtcccggctgcacgaaggagtctgtccattttgatcttagcggtaaggcctttggtgcattggccaaacgtggcaagggagatcaactacgcaaccttggagaactaaaagttagttacaaacgtgcatgttgcaaacacccgaagactatgatcgctatccatgtcgacgccggagcaaatccttactacatgtcattcgcggttaagtttgcaaacggtgatgggaacttcgcctgcattgaggtccaaccggccggaggacagtatatgaaaatggaggaaatgagatccgctgtttggagactaagccctggtgttcctttgaaaggtccgttcaacatcaggcttacctccgccgtgtccggtaagaagatcattgcgaaaggcgttatcccggaaaagtggagtcctggtgctatttaccattctaaggttaacttccccgttcaaaggaagcagaaatga

SEQ ID NO: 28892 - protein, 264 aa, Arabidopsis thaliana
  misc_feature (1)..(264): Ceres Seq. ID no. 3086208
MASSSLKCFSFIVVLTTFFAISLKPCYCHNKTHWNTAGITWYGDREGPGTTGGACGYGDAVAKHPYRCMVSAGGPSLFKDGKGCGACYRLKCDHPLCTKKPIKVMISDECPGCTKESVHFDLSGKAFGALAKRGKGDQLRNLGELKVSYKRACCKHPKTMIAIHVDAGANPYYMSFAVKFANGDGNFACIEVQPAGGQYMKMEEMRSAVWRLSPGVPLKGPFNIRLTSAVSGKKIIAKGVIPEKWSPGAIYHSKVNFPVQRKQK

SEQ ID NO: 28893 - protein, 196 aa, Arabidopsis thaliana
  misc_feature (1)..(196): Ceres Seq. ID no. 3086209
MVSAGGPSLFKDGKGCGACYRLKCDHPLCTKKPIKVMISDECPGCTKESVHFDLSGKAFGALAKRGKGDQLRNLGELKVSYKRACCKHPKTMIAIHVDAGANPYYMSFAVKFANGDGNFACIEVQPAGGQYMKMEEMRSAVWRLSPGVPLKGPFNIRLTSAVSGKKIIAKGVIPEKWSPGAIYHSKVNFPVQRKQK

SEQ ID NO: 28894 - protein, 160 aa, Arabidopsis thaliana
  misc_feature (1)..(160): Ceres Seq. ID no. 3086210
MISDECPGCTKESVHFDLSGKAFGALAKRGKGDQLRNLGELKVSYKRACCKHPKTMIAIHVDAGANPYYMSFAVKFANGDGNFACIEVQPAGGQYMKMEEMRSAVWRLSPGVPLKGPFNIRLTSAVSGKKIIAKGVIPEKWSPGAIYHSKVNFPVQRKQK

SEQ ID NO: 28895 - DNA, 852 bp, Arabidopsis thaliana
  misc_feature (1)..(852): Ceres Seq. ID no. 3086941
atggtaggatcatttttaccacctggtttcagattttatccaacagatgaagaacttgtaggttattacctgcacagaagaaacgaagggcttgagatcgagctcgaaataatcccattaatggacttatacaagtttgatccttgggaacttccagagaaatccttcttgccaaatcgagatatggaatggtttttcttctgtcatcgcgacagaaaataccagaacggatctcgaataaacagagcaactaaatctggttattggaaagccactggcaaagatcgaaaaatcgtttgccactcttcttcttcttcatcatcttcctctatcaccggctgccgaaaaaccctagttttttatatgggtcgagctccttttggtggtagaaccgagtgggtaatgcatgagtatcgcctcttcgacaacgatacttcacaaggatcactaaacttcaagggagacttcgcgctgtgtcgtgtgataaagaggaatgagcatacgcttaagaaatgtgaaattatctcaccagaggtttcagatgagtcattaagcaataatgttaacaatttttgtcaagcaagtgacctagaaaagggttcttgtgatgcaagtaacacacgtttgtcttctcctgatttcatccttgaatcatcttttcagggaaattcacattcaaaaacagaagaagattccggtttccaagtatttacattacccgaattcgaatatccgctagaggtttttgcagatttgaatttcgatttggaaatggaggatccattcatgttcgattatcatccagagcctcatatgaacaatgaagtcatgagccatcacattcgtgggtaa

SEQ ID NO: 28896 - protein, 283 aa, Arabidopsis thaliana
  misc_feature (1)..(283): Ceres Seq. ID no. 3086942
MVGSFLPPGFRFYPTDEELVGYYLHRRNEGLEIELEIIPLMDLYKFDPWELPEKSFLPNRDMEWFFFCHRDRKYQNGSRINRATKSGYWKATGKDRKIVCHSSSSSSSSSITGCRKTLVFYMGRAPFGGRTEWVMHEYRLFDNDTSQGSLNFKGDFALCRVIKRNEHTLKKCEIISPEVSDESLSNNVNNFCQASDLEKGSCDASNTRLSSPDFILESSFQGNSHSKTEEDSGFQVFTLPEFEYPLEVFADLNFDLEMEDPFMFDYHPEPHMNNEVMSHHIRG

SEQ ID NO: 28897 - protein, 243 aa, Arabidopsis thaliana
  misc_feature (1)..(243): Ceres Seq. ID no. 3086943
MDLYKFDPWELPEKSFLPNRDMEWFFFCHRDRKYQNGSRINRATKSGYWKATGKDRKIVCHSSSSSSSSSITGCRKTLVFYMGRAPFGGRTEWVMHEYRLFDNDTSQGSLNFKGDFALCRVIKRNEHTLKKCEIISPEVSDESLSNNVNNFCQASDLEKGSCDASNTRLSSPDFILESSFQGNSHSKTEEDSGFQVFTLPEFEYPLEVFADLNFDLEMEDPFMFDYHPEPHMNNEVMSHHIRG

SEQ ID NO: 28898 - protein, 222 aa, Arabidopsis thaliana
  misc_feature (1)..(222): Ceres Seq. ID no. 3086944
MEWFFFCHRDRKYQNGSRINRATKSGYWKATGKDRKIVCHSSSSSSSSSITGCRKTLVFYMGRAPFGGRTEWVMHEYRLFDNDTSQGSLNFKGDFALCRVIKRNEHTLKKCEIISPEVSDESLSNNVNNFCQASDLEKGSCDASNTRLSSPDFILESSFQGNSHSKTEEDSGFQVFTLPEFEYPLEVFADLNFDLEMEDPFMFDYHPEPHMNNEVMSHHIRG

SEQ ID NO: 28899 - DNA, 1791 bp, Arabidopsis thaliana
  misc_feature (1)..(1791): Ceres Seq. ID no. 3087891
atggcgctcgcgctctcgctgtcggcatgttctcctccactccgccgcactcgtcgtgccggttttcgaacaagctgctcgatcttcgcgaatccagcacagcgagccaagaggaagctgcttgagctgatctccgaggaggatcgaggtctgagaacccagaaagaccccaagaagcgagatgaaatcgtgaacgccatcgaatccatgacggttatcgggcgcagctccatcaccacagacgactctctatctgccacgtggcggctcttgtggacgacggagaaggaacagttgttcatcatagaaaaggcaggcttgtttgggacgaccgccggagacgttttgcaggtgatcgatgtgaataaacggatcctcaataacgtcatcactttcccgccggacggggttttcttcgtacgctccgatatcgatatcgcttccccgcagagagtcaatttcagattcaatagtgcggtattgagagggaagaactgggagctcccactgccaccatttgggaagggctggtttgagaatgtgtatatggacggtgagatcagagtggccaaggacatcagaggagactacttaattgttgatcgtgctccttataactggactgaatcatttatgttggtgtccgcaagggtagagaaacaaaagcgtgttgcttatcaggggaaggcgacagtgcttgctctcggtaaggccttgccgagcaatgttgtttcccaggagaatctcgtggaggagtatctccgtgaaatcaaatgcgataacctttctatcaaagacaagctgcaacacttgtgcaaaagcacaactgtcaagacacgctacacagtcatgtcacgggagacgctgcacaaataccctgaactagcaaccgagggttccccaaccatcaaacagaggcttgagattgcaaacgatgcggttgtgcagatggcatatgaagcgagcttggtttgcatcaaggaatggggaagggcagtggaagatatcactcatcttgtctacgtttcctccagtgagttccgtttgcccggaggtgatctttacctctcggcacagctgggccttagcaacgaggttcagagagtgatgctgtattttcttggatgctatggaggtttgagtgggctgcgcgtggccaaagacattgctgagaacaacccagggagccgtgtgttgctcaccacctctgagactaccgttctggggttccgcccacccaacaaagctcgtccttacaacttagtcggggctgcactctttggagatggagcagctgccctgatcatcggagcagaccctacagagtcggaatctcctttcatggagcttcactgtgctatgcagcagttcctgccccaaacacagggggtgatcgacgggcggctgtcagaagagggcataaccttcaagctaggaagagacctccctcagaagatcgaagacaacgtggaggagttctgcaagaagctagtggcaaaggctggctctggtgcgttggagttgaatgaccttttctgggcagttcatcctggtggaccagccatcctgagcgggctggagacaaagctgaagctgaagccggaaaagctggaatgcagcagaagggcgttgatggattatgggaacgtaagcagcaacaccatcttctacataatggacaaagtcagagatgagcttgagaagaaaggcacagagggagaagagtggggtctgggcttagctttcggaccgggaatcactttcgaaggctttctcatgaggaacctctaa

SEQ ID NO: 28900 - protein, 596 aa, Arabidopsis thaliana
  misc_feature (1)..(596): Ceres Seq. ID no. 3087892
MALALSLSACSPPLRRTRRAGFRTSCSIFANPAQRAKRKLLELISEEDRGLRTQKDPKKRDEIVNAIESMTVIGRSSITTDDSLSATWRLLWTTEKEQLFIIEKAGLFGTTAGDVLQVIDVNKRILNNVITFPPDGVFFVRSDIDIASPQRVNFRFNSAVLRGKNWELPLPPFGKGWFENVYMDGEIRVAKDIRGDYLIVDRAPYNWTESFMLVSARVEKQKRVAYQGKATVLALGKALPSNVVSQENLVEEYLREIKCDNLSIKDKLQHLCKSTTVKTRYTVMSRETLHKYPELATEGSPTIKQRLEIANDAVVQMAYEASLVCIKEWGRAVEDITHLVYVSSSEFRLPGGDLYLSAQLGLSNEVQRVMLYFLGCYGGLSGLRVAKDIAENNPGSRVLLTTSETTVLGFRPPNKARPYNLVGAALFGDGAAALIIGADPTESESPFMELHCAMQQFLPQTQGVIDGRLSEEGITFKLGRDLPQKIEDNVEEFCKKLVAKAGSGALELNDLFWAVHPGGPAILSGLETKLKLKPEKLECSRRALMDYGNVSSNTIFYIMDKVRDELEKKGTEGEEWGLGLAFGPGITFEGFLMRNL

SEQ ID NO: 28901 - protein, 527 aa, Arabidopsis thaliana
  misc_feature (1)..(527): Ceres Seq. ID no. 3087893
MTVIGRSSITTDDSLSATWRLLWTTEKEQLFIIEKAGLFGTTAGDVLQVIDVNKRILNNVITFPPDGVFFVRSDIDIASPQRVNFRFNSAVLRGKNWELPLPPFGKGWFENVYMDGEIRVAKDIRGDYLIVDRAPYNWTESFMLVSARVEKQKRVAYQGKATVLALGKALPSNVVSQENLVEEYLREIKCDNLSIKDKLQHLCKSTTVKTRYTVMSRETLHKYPELATEGSPTIKQRLEIANDAVVQMAYEASLVCIKEWGRAVEDITHLVYVSSSEFRLPGGDLYLSAQLGLSNEVQRVMLYFLGCYGGLSGLRVAKDIAENNPGSRVLLTTSETTVLGFRPPNKARPYNLVGAALFGDGAAALIIGADPTESESPFMELHCAMQQFLPQTQGVIDGRLSEEGITFKLGRDLPQKIEDNVEEFCKKLVAKAGSGALELNDLFWAVHPGGPAILSGLETKLKLKPEKLECSRRALMDYGNVSSNTIFYIMDKVRDELEKKGTEGEEWGLGLAFGPGITFEGFLMRNL

SEQ ID NO: 28902 - protein, 414 aa, Arabidopsis thaliana
  misc_feature (1)..(414): Ceres Seq. ID no. 3087894
MDGEIRVAKDIRGDYLIVDRAPYNWTESFMLVSARVEKQKRVAYQGKATVLALGKALPSNVVSQENLVEEYLREIKCDNLSIKDKLQHLCKSTTVKTRYTVMSRETLHKYPELATEGSPTIKQRLEIANDAVVQMAYEASLVCIKEWGRAVEDITHLVYVSSSEFRLPGGDLYLSAQLGLSNEVQRVMLYFLGCYGGLSGLRVAKDIAENNPGSRVLLTTSETTVLGFRPPNKARPYNLVGAALFGDGAAALIIGADPTESESPFMELHCAMQQFLPQTQGVIDGRLSEEGITFKLGRDLPQKIEDNVEEFCKKLVAKAGSGALELNDLFWAVHPGGPAILSGLETKLKLKPEKLECSRRALMDYGNVSSNTIFYIMDKVRDELEKKGTEGEEWGLGLAFGPGITFEGFLMRNL

SEQ ID NO: 28903 - DNA, 1026 bp, Arabidopsis thaliana
  misc_feature (1)..(1026): Ceres Seq. ID no. 3088712
atggctcttgtacccaagattcgcaatcgcaccatctcggacaaaccagtctcttcgtcttgtactagaacatcgagtttcagacaaagacttctcgccagttgcaaacgatttctcaggttcaaattgttggttcgtgcttcttcagtgtcattaaaaaagaaagcagcaaggtgttcacaatctcaacaagttgttaaacataatgatgataggattgaggaacattcttctagtaatcggggttttaaagatggcaacaatttcttagtatcatcaacagaaacgaagaagcttgttgcgttttgtggtgaacctttccaaccactcaacgaggaggaagtagctctagtcaatagtgccttgtctaagagaaacagaaagaagattttggtttcgcataaaaactccaatattgacatctctggagaaactttacaatgcctaaggccgaatcaatggcttaacgatgatgtcactaatctctatctggagttgctgaaagagagacaaactagagatccgcaaaagtacttcaagtgtcatttcttcaataccttcttttacgttaagctcgtaagcggctccggttacaattacaaagctgtcagtagatggactaccaagagaaagcttggatatgatcttattgactgtgacataatatttgttccaatccacatagatatacattggaccctgggagtgattaacaatagggaacgcaagttcgtgtatcttgattcattatttactggagttggtcatacaattttgaatgctatggcaaagtacttggtggatgaagtaaaacaaaagagtcaaaagaatattgacgttagttcatggggaatggaatacgttgaagaacgtcctcagcaacagaacgggtacgactgtgggatgtttatgcttaaatacattgatttttacagtagaggattgagtctacaatttagccagaaagacatgccgtacttcaggttaagaacagctaaggagatactgagactgcgagctgactaa

SEQ ID NO: 28904 - protein, 341 aa, Arabidopsis thaliana
  misc_feature (1)..(341): Ceres Seq. ID no. 3088713
MALVPKIRNRTISDKPVSSSCTRTSSFRQRLLASCKRFLRFKLLVRASSVSLKKKAARCSQSQQVVKHNDDRIEEHSSSNRGFKDGNNFLVSSTETKKLVAFCGEPFQPLNEEEVALVNSALSKRNRKKILVSHKNSNIDISGETLQCLRPNQWLNDDVTNLYLELLKERQTRDPQKYFKCHFFNTFFYVKLVSGSGYNYKAVSRWTTKRKLGYDLIDCDIIFVPIHIDIHWTLGVINNRERKFVYLDSLFTGVGHTILNAMAKYLVDEVKQKSQKNIDVSSWGMEYVEERPQQQNGYDCGMFMLKYIDFYSRGLSLQFSQKDMPYFRLRTAKEILRLRAD

SEQ ID NO: 28905 - DNA, 1413 bp, Arabidopsis thaliana
  misc_feature (1)..(1413): Ceres Seq. ID no. 3090318
atggcggcgacttccccgcggccaccaccgtcaacatccctaacatctcagcagccaccatcacccccctcacagcttcccctccgtacaatgccgggatcattccaaggacccgataagtttttccggacaagagctgagaagtataagagcactgtgttccgtacaaatattcctccgacgtttcctttcttcggcaacgttaaccctaacatcgtcgccgttcttgacgtcaagtcttttagccatctttttgacatggatctagttgataaaagagatgttctcatcggagacttccggcctagccttgggttctacggcggcgttcgtgttggagtttatctcgacactactgagccaaagcacgccaagataaaaggtttcgctatggaaacactaaaacgaagctcaaaagtatggctacaagagcttcgttcaaacctaaacattttctggggaacaatcgaatccgaaatctccaaaaacggtgccgcttcatatatcttccctctccaacgttgcatcttcagtttcctctgcgcctctctcgccggcgttgacgcttccgtatcgccggacatcgctgagaacggttggaaaacaatcaatacttggcttgcgttgcaagttattcccactgctaaacttggcgtagttcctcagcctcttgaagagattttacttcatacttggccttatccttctctcttaatcgccggaaattacaaaaagctttacaatttcatcgacgagaacgccggagattgtctccggttaggtcaagaagaattcgggttgacccgagatgaggctattcaaaatcttctctttgttttaggttttaatgcctacgggggcttttccgtcttcttaccttctttgatcgggagaataaccggcgacaattccggtttacaggagaggattagaaccgaagtcaggagagtttgcggatccgggtcggatcttaatttcaagacggttaacgaaatggagctggttaaatccgtggtttacgaaacgctgcgttttagtcctccggttccgctgcaattcgcacgtgcgaggaaagattttcagataagttcacacgatgctgtttttgaggtcaagaaaggtgagcttctttgtggttatcagccgcttgtgatgagagacgctaatgtttttgacgaaccggaggaatttaaaccggaccggtatgtaggtgagaccgggtctgaattgctgaattatctctactggtctaacggtccacaaaccggtaccccgagcgcgtcgaacaaacagtgtgcagctaaggacattgtcactctcacggcttccttgctcgttgccgatttatttctccggtatgatacgattactggtgactccggttcaattaaagctgttgttaaagctaaataa

SEQ ID NO: 28906 - protein, 470 aa, Arabidopsis thaliana
  misc_feature (1)..(470): Ceres Seq. ID no. 3090319
MAATSPRPPPSTSLTSQQPPSPPSQLPLRTMPGSFQGPDKFFRTRAEKYKSTVFRTNIPPTFPFFGNVNPNIVAVLDVKSFSHLFDMDLVDKRDVLIGDFRPSLGFYGGVRVGVYLDTTEPKHAKIKGFAMETLKRSSKVWLQELRSNLNIFWGTIESEISKNGAASYIFPLQRCIFSFLCASLAGVDASVSPDIAENGWKTINTWLALQVIPTAKLGVVPQPLEEILLHTWPYPSLLIAGNYKKLYNFIDENAGDCLRLGQEEFGLTRDEAIQNLLFVLGFNAYGGFSVFLPSLIGRITGDNSGLQERIRTEVRRVCGSGSDLNFKTVNEMELVKSVVYETLRFSPPVPLQFARARKDFQISSHDAVFEVKKGELLCGYQPLVMRDANVFDEPEEFKPDRYVGETGSELLNYLYWSNGPQTGTPSASNKQCAAKDIVTLTASLLVADLFLRYDTITGDSGSIKAVVKAK

SEQ ID NO: 28907 - protein, 440 aa, Arabidopsis thaliana
  misc_feature (1)..(440): Ceres Seq. ID no. 3090320
MPGSFQGPDKFFRTRAEKYKSTVFRTNIPPTFPFFGNVNPNIVAVLDVKSFSHLFDMDLVDKRDVLIGDFRPSLGFYGGVRVGVYLDTTEPKHAKIKGFAMETLKRSSKVWLQELRSNLNIFWGTIESEISKNGAASYIFPLQRCIFSFLCASLAGVDASVSPDIAENGWKTINTWLALQVIPTAKLGVVPQPLEEILLHTWPYPSLLIAGNYKKLYNFIDENAGDCLRLGQEEFGLTRDEAIQNLLFVLGFNAYGGFSVFLPSLIGRITGDNSGLQERIRTEVRRVCGSGSDLNFKTVNEMELVKSVVYETLRFSPPVPLQFARARKDFQISSHDAVFEVKKGELLCGYQPLVMRDANVFDEPEEFKPDRYVGETGSELLNYLYWSNGPQTGTPSASNKQCAAKDIVTLTASLLVADLFLRYDTITGDSGSIKAVVKAK

SEQ ID NO: 28908 - protein, 384 aa, Arabidopsis thaliana
  misc_feature (1)..(384): Ceres Seq. ID no. 3090321
MDLVDKRDVLIGDFRPSLGFYGGVRVGVYLDTTEPKHAKIKGFAMETLKRSSKVWLQELRSNLNIFWGTIESEISKNGAASYIFPLQRCIFSFLCASLAGVDASVSPDIAENGWKTINTWLALQVIPTAKLGVVPQPLEEILLHTWPYPSLLIAGNYKKLYNFIDENAGDCLRLGQEEFGLTRDEAIQNLLFVLGFNAYGGFSVFLPSLIGRITGDNSGLQERIRTEVRRVCGSGSDLNFKTVNEMELVKSVVYETLRFSPPVPLQFARARKDFQISSHDAVFEVKKGELLCGYQPLVMRDANVFDEPEEFKPDRYVGETGSELLNYLYWSNGPQTGTPSASNKQCAAKDIVTLTASLLVADLFLRYDTITGDSGSIKAVVKAK

SEQ ID NO: 28909 - DNA, 1446 bp, Arabidopsis thaliana
  misc_feature (1)..(1446): Ceres Seq. ID no. 3091091
atggagatgatattaatctctttgtgcttaaccaccttattagcatttctcttcctaaaaccactcctcaaacgaatcaccaccaccaaacctaagttaccaccgtctccatggcggcttccggtgattggaaacctccaccagctcggtcccaaccctcaccgctatctccattccctcagcctccggtatgggccactcatgctccttcatttcggccgtgtacctgtgcttgtggtttcttgtcctgacgtgactaatgacatcatgaaaacacacgaccttaagttcgcaaaccgcccgaaatcaaaagctattaatatatttatggaaggtggccgtgatataatctttggcccctacggagaagattggaagagtatgaagagtctgggtgtggtacatctgctcaataacaaaatggttaggtcctttgagaacctaagagaagaagagatcaaagtaatgacagagaagctggaagaagcatcttcatcttcttcatcagtaaatctaagcaaactccttatgactcttaccaacgatatcatatgcagaatcaccttgggaagaaaatataacgaagaggaaggtggaatcgatatcaagaacttagtgatgacatcctctgagttttttggcaaattcttttttggagattttattcctagtttggcatggatagactggatcagtggcatagatgataaaatgaaggacataaataacaagttagattgttttttagacagcatggtgcaagaacatgttgatgccgatcacaaagagccatcagattttattgatatgttgctactgattcaaaaggataaaaccaaacggtttaagtttgacagaagtgacttaatactcatactcaaggatatgtttttctctggaacagcaacaactgcctcacaattagaatggacaatgacagagcttatgagacatccagagtgtatgaaaaaacttcaagatgagattaattcattttcgacacataatttgaatgtaacggagaaagaagttgagaaaatgaactatttacattgcgtgattaaggaggggctacggttgcatccctctggtccactattgttcagactaccaagtgaagatgtccaattaaagggatatgacatttctgcagggacacatgtcataatcaatgcttgggcactccaacgaaaccctgcgatatgggggcttgatgccaatgaatatagaccggagagacattttgggagaagactttgccctggaatcggattttctttggttttgtccaaattggcactagccaaccttgtgaaacgattcaactggagactcaaggtcggaccagtaggagatgataagcctgatctagctgaagcatctggtattgatgtttgtcgtaagtttcctctcattgtctttccatcaattgcgcacacacattga

SEQ ID NO: 28910 - protein, 481 aa, Arabidopsis thaliana
  misc_feature (1)..(481): Ceres Seq. ID no. 3091092
MEMILISLCLTTLLAFLFLKPLLKRITTTKPKLPPSPWRLPVIGNLHQLGPNPHRYLHSLSLRYGPLMLLHFGRVPVLVVSCPDVTNDIMKTHDLKFANRPKSKAINIFMEGGRDIIFGPYGEDWKSMKSLGVVHLLNNKMVRSFENLREEEIKVMTEKLEEASSSSSSVNLSKLLMTLTNDIICRITLGRKYNEEEGGIDIKNLVMTSSEFFGKFFFGDFIPSLAWIDWISGIDDKMKDINNKLDCFLDSMVQEHVDADHKEPSDFIDMLLLIQKDKTKRFKFDRSDLILILKDMFFSGTATTASQLEWTMTELMRHPECMKKLQDEINSFSTHNLNVTEKEVEKMNYLHCVIKEGLRLHPSGPLLFRLPSEDVQLKGYDISAGTHVIINAWALQRNPAIWGLDANEYRPERHFGRRLCPGIGFSLVLSKLALANLVKRFNWRLKVGPVGDDKPDLAEASGIDVCRKFPLIVFPSIAHTH

SEQ ID NO: 28911 - protein, 479 aa, Arabidopsis thaliana
  misc_feature (1)..(479): Ceres Seq. ID no. 3091093
MILISLCLTTLLAFLFLKPLLKRITTTKPKLPPSPWRLPVIGNLHQLGPNPHRYLHSLSLRYGPLMLLHFGRVPVLVVSCPDVTNDIMKTHDLKFANRPKSKAINIFMEGGRDIIFGPYGEDWKSMKSLGVVHLLNNKMVRSFENLREEEIKVMTEKLEEASSSSSSVNLSKLLMTLTNDIICRITLGRKYNEEEGGIDIKNLVMTSSEFFGKFFFGDFIPSLAWIDWISGIDDKMKDINNKLDCFLDSMVQEHVDADHKEPSDFIDMLLLIQKDKTKRFKFDRSDLILILKDMFFSGTATTASQLEWTMTELMRHPECMKKLQDEINSFSTHNLNVTEKEVEKMNYLHCVIKEGLRLHPSGPLLFRLPSEDVQLKGYDISAGTHVIINAWALQRNPAIWGLDANEYRPERHFGRRLCPGIGFSLVLSKLALANLVKRFNWRLKVGPVGDDKPDLAEASGIDVCRKFPLIVFPSIAHTH

SEQ ID NO: 28912 - protein, 414 aa, Arabidopsis thaliana
  misc_feature (1)..(414): Ceres Seq. ID no. 3091094
MLLHFGRVPVLVVSCPDVTNDIMKTHDLKFANRPKSKAINIFMEGGRDIIFGPYGEDWKSMKSLGVVHLLNNKMVRSFENLREEEIKVMTEKLEEASSSSSSVNLSKLLMTLTNDIICRITLGRKYNEEEGGIDIKNLVMTSSEFFGKFFFGDFIPSLAWIDWISGIDDKMKDINNKLDCFLDSMVQEHVDADHKEPSDFIDMLLLIQKDKTKRFKFDRSDLILILKDMFFSGTATTASQLEWTMTELMRHPECMKKLQDEINSFSTHNLNVTEKEVEKMNYLHCVIKEGLRLHPSGPLLFRLPSEDVQLKGYDISAGTHVIINAWALQRNPAIWGLDANEYRPERHFGRRLCPGIGFSLVLSKLALANLVKRFNWRLKVGPVGDDKPDLAEASGIDVCRKFPLIVFPSIAHTH

SEQ ID NO: 28913 - DNA, 1065 bp, Arabidopsis thaliana
  misc_feature (1)..(1065): Ceres Seq. ID no. 3091129
atgaactcttctccttcttcttcttcttccccttcaagttttcttgattatggatctgcgatcggacaaaaagaagtaaagaaaatcctggttttggttctaggtttagctgcttgtcttcttctttacaaaacagcttatcctcttcatcaagagctcgatgttaacaatctcagctctcgtcctttgctcgatcacacctcttcgtcttctccactaacaagatcaaaatcgatcagttttagggaagttctggagaatgcatcaacagagaatcgaacagttattgtaacaacgttgaaccaagcatgggcagagccaaactctctgttcgatctatttcttgagagttttcgtatcggacaaggaacaaagaagttacttcaacatgtggttgtggtttgcttggattccaaggcatttgctcgctgctcacaacttcaccctaattgctactatttgaaaaccacagggactgatttctccggcgagaaactctttgctactcctgattacctcaaaatgatgtggcgaagaatcgagcttctcacacaagtgctagaaatgggatacaacttcatcttcacggatgcggatataatgtggcttcgagatccatttcctcggctgtatcctgatggagattttcaaatggcatgtgatcgattcttcggtgatcctcatgactcagacaattgggtaaacggaggattcacttacgtgaaatcaaaccacagaagcatcgagttctacaaattttggtacaattctcgtcttgattatccgaagatgcatgaccaagatgtgttcaaccaaatcaaacacaaggctttagtctcagagattggaatccaaatgagattctttgatacggtttactttggtgggttttgtcaaacgagcagagacataaacttggtgtgtaccatgcatgctaattgttgtgtaggattagcgaagaagcttcatgatcttaatcttgttcttgatgactggagaaactatttgtctttgtctgaaccagttaaaaacacaacttggagtgttcctatgaagtgtacatga

SEQ ID NO: 28914 - protein, 354 aa, Arabidopsis thaliana
  misc_feature (1)..(354): Ceres Seq. ID no. 3091130
MNSSPSSSSSPSSFLDYGSAIGQKEVKKILVLVLGLAACLLLYKTAYPLHQELDVNNLSSRPLLDHTSSSSPLTRSKSISFREVLENASTENRTVIVTTLNQAWAEPNSLFDLFLESFRIGQGTKKLLQHVVVVCLDSKAFARCSQLHPNCYYLKTTGTDFSGEKLFATPDYLKMMWRRIELLTQVLEMGYNFIFTDADIMWLRDPFPRLYPDGDFQMACDRFFGDPHDSDNWVNGGFTYVKSNHRSIEFYKFWYNSRLDYPKMHDQDVFNQIKHKALVSEIGIQMRFFDTVYFGGFCQTSRDINLVCTMHANCCVGLAKKLHDLNLVLDDWRNYLSLSEPVKNTTWSVPMKCT

SEQ ID NO: 28915 - protein, 180 aa, Arabidopsis thaliana
  misc_feature (1)..(180): Ceres Seq. ID no. 3091131
MMWRRIELLTQVLEMGYNFIFTDADIMWLRDPFPRLYPDGDFQMACDRFFGDPHDSDNWVNGGFTYVKSNHRSIEFYKFWYNSRLDYPKMHDQDVFNQIKHKALVSEIGIQMRFFDTVYFGGFCQTSRDINLVCTMHANCCVGLAKKLHDLNLVLDDWRNYLSLSEPVKNTTWSVPMKCT

SEQ ID NO: 28916 - protein, 179 aa, Arabidopsis thaliana
  misc_feature (1)..(179): Ceres Seq. ID no. 3091132
MWRRIELLTQVLEMGYNFIFTDADIMWLRDPFPRLYPDGDFQMACDRFFGDPHDSDNWVNGGFTYVKSNHRSIEFYKFWYNSRLDYPKMHDQDVFNQIKHKALVSEIGIQMRFFDTVYFGGFCQTSRDINLVCTMHANCCVGLAKKLHDLNLVLDDWRNYLSLSEPVKNTTWSVPMKCT

SEQ ID NO: 28917 - DNA, 966 bp, Arabidopsis thaliana
  misc_feature (1)..(966): Ceres Seq. ID no. 3091140
atggatcttgccccagaggagcttcaatttctcaacaaaagaggaattctacgtgaatcaacatcaatcccacaatattctctaaaaaccttttacctcataaccctaaccctaattttccctctctccttcgcaatcctagcccattctctcttcacacaaccaatcttagctcagatcgatacatacccacaagccgatcaatctcaactccaacatgaatggaccgtcctcctcgttttccaattctgctacatcatcttcctcttcgccttctctcttctctccacagccgccgttgtcttcaccgtcgcttctctttacaccggaaagcctgtttctttctcctccacaatgtcagcgatacctctcgtcctcaaaagattgttcataacattcctctgggtctctcttttgatgcttgcgtacaacaccgtgttcttgatcttcttggtcacgttaatcgtagctgttgatttacagaacgtggttttagctgtgttttcgttggtagtgatctttgttctgtttcttgtagttcatgtttatatgacagctttgtggcatttagctagtgtagtctctgttcttgaaccgatttacggtttggctgcgatgaagaagagttatgagttgcttaaagggaagactcttatggcttgttcgatggttttcatctatcttgttcattgtggattcattgctggagtttttggagcagtggtggttcgtggtggtgatgattacggaattttcgctagaatcgtcgctggtggattcttggttggtgttcttgtgatagtgaatctaattggactgcttgtgcagagtgtgttttactatgtttgcaagagttttcatcatcaggagattgataaatccgctttgcacgatcatctcggtgggtatctcggtgaatatgtgcctcttaagagcaacattcaaatggagaactttgaagtttga

SEQ ID NO: 28918 - protein, 321 aa, Arabidopsis thaliana
  misc_feature (1)..(321): Ceres Seq. ID no. 3091141
MDLAPEELQFLNKRGILRESTSIPQYSLKTFYLITLTLIFPLSFAILAHSLFTQPILAQIDTYPQADQSQLQHEWTVLLVFQFCYIIFLFAFSLLSTAAVVFTVASLYTGKPVSFSSTMSAIPLVLKRLFITFLWVSLLMLAYNTVFLIFLVTLIVAVDLQNVVLAVFSLVVIFVLFLVVHVYMTALWHLASVVSVLEPIYGLAAMKKSYELLKGKTLMACSMVFIYLVHCGFIAGVFGAVVVRGGDDYGIFARIVAGGFLVGVLVIVNLIGLLVQSVFYYVCKSFHHQEIDKSALHDHLGGYLGEYVPLKSNIQMENFEV

SEQ ID NO: 28919 - protein, 203 aa, Arabidopsis thaliana
  misc_feature (1)..(203): Ceres Seq. ID no. 3091142
MSAIPLVLKRLFITFLWVSLLMLAYNTVFLIFLVTLIVAVDLQNVVLAVFSLVVIFVLFLVVHVYMTALWHLASVVSVLEPIYGLAAMKKSYELLKGKTLMACSMVFIYLVHCGFIAGVFGAVVVRGGDDYGIFARIVAGGFLVGVLVIVNLIGLLVQSVFYYVCKSFHHQEIDKSALHDHLGGYLGEYVPLKSNIQMENFEV

SEQ ID NO: 28920 - protein, 182 aa, Arabidopsis thaliana
  misc_feature (1)..(182): Ceres Seq. ID no. 3091143
MLAYNTVFLIFLVTLIVAVDLQNVVLAVFSLVVIFVLFLVVHVYMTALWHLASVVSVLEPIYGLAAMKKSYELLKGKTLMACSMVFIYLVHCGFIAGVFGAVVVRGGDDYGIFARIVAGGFLVGVLVIVNLIGLLVQSVFYYVCKSFHHQEIDKSALHDHLGGYLGEYVPLKSNIQMENFEV

SEQ ID NO: 28921 - DNA, 1428 bp, Arabidopsis thaliana
  misc_feature (1)..(1428): Ceres Seq. ID no. 3091938
atggcaatggagaaagatctcagtccaaattctccacggattagaaagctaagggatactagttaccctactacaccaacgtctcgaatgaatactaataaccagagagataaccattatcccaacattcctaattcaccaagggattacaattatactcctagctctccaacagctcgcattcgacaccgcaggcgatcaagcgagaatttagctgaggtgaacagaagcaatgtaagcagagtaagcaatttgttacttggtgataagaacaagtacagatcaatgtggataaggacatgctcatctctctggatgctcggtggagttgtgtttataatctacatgggtcatctctacatttgggctatggttgtggttatacagatattcatggccaaagagctcttctttcttcgcagaagagctcatgaagaacgtcgcttacccggtttctggctcttgaattggcacttcttcttcacggctatgttgtttgtctatggacgcatcattcaacagcagctagtcaacacggtttcttcagatagattcatatacaagcttgtgagtggtcttatcaagtaccagatggttatttgctacttcttgtacatcgcaggtctcatatggtttatccttacattgaagaataagatgtataagtatcagtttgggcaatacgcttggacacatatgatccttatcgttgtctttactcaatcttctttcaccgtcgccaatatttttgaagggatcttctggtttcttctaccagcagcactgattgctatgaacgatgtagcagcttacttcttcggtttctatttcgggaaaactccgctcatcaagttgtctccaaagaaaacatgggaaggtttcatcggagcatcagttgcaactataatctctgcatttatttttgctaatgtcttaggccagttccaatggcttacatgtccaaggaaggatttttcaactggttggcttcattgtgatccaggccctctcttcaggccagagtattacccatttccctcttggattactccattttctccatggaaagggatctcgaccctgcctgtccaatggcatgctttttctctcggtctattcgcatccattatggcgccttttggtggcttcttcgcaagcggtttcaaaagagctttcaagatcaaggatttcggagacagcataccaggacatggaggatttactgacagaatggattgccaaatggttatggcggttttcgcatacatctacatccaatctttcattgttaatcgggactacagtgtcgagatgatcctagaccagatatcgaggagcctgggacacgaggagcagaaaatgctttatgaaaagctcggagacattcttcaacataagttgcaagggagcttctttctctatggttag

SEQ ID NO: 28922 - protein, 475 aa, Arabidopsis thaliana
  misc_feature (1)..(475): Ceres Seq. ID no. 3091939
MAMEKDLSPNSPRIRKLRDTSYPTTPTSRMNTNNQRDNHYPNIPNSPRDYNYTPSSPTARIRHRRRSSENLAEVNRSNVSRVSNLLLGDKNKYRSMWIRTCSSLWMLGGVVFIIYMGHLYIWAMVVVIQIFMAKELFFLRRRAHEERRLPGFWLLNWHFFFTAMLFVYGRIIQQQLVNTVSSDRFIYKLVSGLIKYQMVICYFLYIAGLIWFILTLKNKMYKYQFGQYAWTHMILIVVFTQSSFTVANIFEGIFWFLLPAALIAMNDVAAYFFGFYFGKTPLIKLSPKKTWEGFIGASVATIISAFIFANVLGQFQWLTCPRKDFSTGWLHCDPGPLFRPEYYPFPSWITPFSPWKGISTLPVQWHAFSLGLFASIMAPFGGFFASGFKRAFKIKDFGDSIPGHGGFTDRMDCQMVMAVFAYIYIQSFIVNRDYSVEMILDQISRSLGHEEQKMLYEKLGDILQHKLQGSFFLYG

SEQ ID NO: 28923 - protein, 473 aa, Arabidopsis thaliana
  misc_feature (1)..(473): Ceres Seq. ID no. 3091940
MEKDLSPNSPRIRKLRDTSYPTTPTSRMNTNNQRDNHYPNIPNSPRDYNYTPSSPTARIRHRRRSSENLAEVNRSNVSRVSNLLLGDKNKYRSMWIRTCSSLWMLGGVVFIIYMGHLYIWAMVVVIQIFMAKELFFLRRRAHEERRLPGFWLLNWHFFFTAMLFVYGRIIQQQLVNTVSSDRFIYKLVSGLIKYQMVICYFLYIAGLIWFILTLKNKMYKYQFGQYAWTHMILIVVFTQSSFTVANIFEGIFWFLLPAALIAMNDVAAYFFGFYFGKTPLIKLSPKKTWEGFIGASVATIISAFIFANVLGQFQWLTCPRKDFSTGWLHCDPGPLFRPEYYPFPSWITPFSPWKGISTLPVQWHAFSLGLFASIMAPFGGFFASGFKRAFKIKDFGDSIPGHGGFTDRMDCQMVMAVFAYIYIQSFIVNRDYSVEMILDQISRSLGHEEQKMLYEKLGDILQHKLQGSFFLYG

SEQ ID NO: 28924 - protein, 446 aa, Arabidopsis thaliana
  misc_feature (1)..(446): Ceres Seq. ID no. 3091941
MNTNNQRDNHYPNIPNSPRDYNYTPSSPTARIRHRRRSSENLAEVNRSNVSRVSNLLLGDKNKYRSMWIRTCSSLWMLGGVVFIIYMGHLYIWAMVVVIQIFMAKELFFLRRRAHEERRLPGFWLLNWHFFFTAMLFVYGRIIQQQLVNTVSSDRFIYKLVSGLIKYQMVICYFLYIAGLIWFILTLKNKMYKYQFGQYAWTHMILIVVFTQSSFTVANIFEGIFWFLLPAALIAMNDVAAYFFGFYFGKTPLIKLSPKKTWEGFIGASVATIISAFIFANVLGQFQWLTCPRKDFSTGWLHCDPGPLFRPEYYPFPSWITPFSPWKGISTLPVQWHAFSLGLFASIMAPFGGFFASGFKRAFKIKDFGDSIPGHGGFTDRMDCQMVMAVFAYIYIQSFIVNRDYSVEMILDQISRSLGHEEQKMLYEKLGDILQHKLQGSFFLYG

SEQ ID NO: 28925 - DNA, 1344 bp, Arabidopsis thaliana
  misc_feature (1)..(1344): Ceres Seq. ID no. 3092078
atgagtcaacacatgaaccttctcctgccttcatttgaaacggacaaagaggaatacgatgaacgcaagacaacagaccacggaggcatcggtggcagcgtctggaggttcaaaggcaacaaagcggccaaggaagcggctagtgtctcaatgaaaggtacacttgctaggttattcgactgctgcagcaaagacgtcaaaaagactattttgcctctgggtcacggcgacccctccgtctacccttgcttccaaacgtccgttgacgctgaggaagcggtggttgaatccttacggtctggagctgcaaactcttacgcccccggggtcggtattttaccggccagaagggcggttgcaaattatctgaaccgggaccttccacataagatacattcagatgatatatttatgacggtggggtgttgccaagggatagagacaatgattcatgccctcgccggaccaaaggccaatatcttgctaccgactctaatttatcccctctacaacagtcacgcaatccatagcctagtcgagattcgcaagtacaatctccttcccgatctagactgggagatagatcttcaaggtgttgaggccatggcagacgaaaataccattgctgtggtgataatgaatcctcacaacccgtgtggaaatgtctatacatatgaacatctaaagaaagtggctgaggtggcgagaaagctaggaataatggtgatttctgatgaagtttataaccaaactatttatggagagaataaatttgtcccgatggggatattttcatccattactcctgtggttacactcgggtccatatccaagggatggctcgttcccggctggcgaataggttggatcgcaatgaacgatcccaaaaacgttttcaaaacaactagggtcgttgaatccatcaaggaacatctcgacataagtccagatccatcaacaatcctacagtttgcacttccaaacatcttggagaagacgaagaaagaattcttcgagaagaataactcgatcctgagtcaaaacgtagattttgcgttcgatgccctcaaggacattccttgcctcacctgccccaagaaaccggagtcgtgtacttacttagtgacaaaattggatctgtccctcttggaggacatcacgaatgattttgatttctgcatgaagctggcccaagaggaaaatctcgtctttctacctggagaggtactaggactgaagaattgggtgagattctctatcggagtggagaggtctatgctggaagatgcattcatgaggctcaaaggcttcttcgctcgccatactaaaacacaactcacttaa

SEQ ID NO: 28926 - protein, 447 aa, Arabidopsis thaliana
  misc_feature (1)..(447): Ceres Seq. ID no. 3092079
MSQHMNLLLPSFETDKEEYDERKTTDHGGIGGSVWRFKGNKAAKEAASVSMKGTLARLFDCCSKDVKKTILPLGHGDPSVYPCFQTSVDAEEAVVESLRSGAANSYAPGVGILPARRAVANYLNRDLPHKIHSDDIFMTVGCCQGIETMIHALAGPKANILLPTLIYPLYNSHAIHSLVEIRKYNLLPDLDWEIDLQGVEAMADENTIAVVIMNPHNPCGNVYTYEHLKKVAEVARKLGIMVISDEVYNQTIYGENKFVPMGIFSSITPVVTLGSISKGWLVPGWRIGWIAMNDPKNVFKTTRVVESIKEHLDISPDPSTILQFALPNILEKTKKEFFEKNNSILSQNVDFAFDALKDIPCLTCPKKPESCTYLVTKLDLSLLEDITNDFDFCMKLAQEENLVFLPGEVLGLKNWVRFSIGVERSMLEDAFMRLKGFFARHTKTQLT

SEQ ID NO: 28927 - protein, 443 aa, Arabidopsis thaliana
  misc_feature (1)..(443): Ceres Seq. ID no. 3092080
MNLLLPSFETDKEEYDERKTTDHGGIGGSVWRFKGNKAAKEAASVSMKGTLARLFDCCSKDVKKTILPLGHGDPSVYPCFQTSVDAEEAVVESLRSGAANSYAPGVGILPARRAVANYLNRDLPHKIHSDDIFMTVGCCQGIETMIHALAGPKANILLPTLIYPLYNSHAIHSLVEIRKYNLLPDLDWEIDLQGVEAMADENTIAVVIMNPHNPCGNVYTYEHLKKVAEVARKLGIMVISDEVYNQTIYGENKFVPMGIFSSITPVVTLGSISKGWLVPGWRIGWIAMNDPKNVFKTTRVVESIKEHLDISPDPSTILQFALPNILEKTKKEFFEKNNSILSQNVDFAFDALKDIPCLTCPKKPESCTYLVTKLDLSLLEDITNDFDFCMKLAQEENLVFLPGEVLGLKNWVRFSIGVERSMLEDAFMRLKGFFARHTKTQLT

SEQ ID NO: 28928 - protein, 397 aa, Arabidopsis thaliana
  misc_feature (1)..(397): Ceres Seq. ID no. 3092081
MKGTLARLFDCCSKDVKKTILPLGHGDPSVYPCFQTSVDAEEAVVESLRSGAANSYAPGVGILPARRAVANYLNRDLPHKIHSDDIFMTVGCCQGIETMIHALAGPKANILLPTLIYPLYNSHAIHSLVEIRKYNLLPDLDWEIDLQGVEAMADENTIAVVIMNPHNPCGNVYTYEHLKKVAEVARKLGIMVISDEVYNQTIYGENKFVPMGIFSSITPVVTLGSISKGWLVPGWRIGWIAMNDPKNVFKTTRVVESIKEHLDISPDPSTILQFALPNILEKTKKEFFEKNNSILSQNVDFAFDALKDIPCLTCPKKPESCTYLVTKLDLSLLEDITNDFDFCMKLAQEENLVFLPGEVLGLKNWVRFSIGVERSMLEDAFMRLKGFFARHTKTQLT

SEQ ID NO: 28929 - DNA, 1497 bp, Arabidopsis thaliana
  misc_feature (1)..(1497): Ceres Seq. ID no. 3092344
atgaacaagagtaatcctgctggttcggtgactggttcggatataatagacgccaagatcgaagaacatcaactttgtggatccaagaagtgtcctagctgcggccacaagctcgaaggcaaaccacaggattgggttggtttaccagcaggagtgaaatttgacccaacggatcaagaattgatagaacatttagaagcgaaagtgttagctaaagacttcaaatctcaccctctcattgacgaattcatcccaaccattgaaggcgaagacggcatttgctacactcatcccgagaaacttcctggagtgactagagatggtttaagccgacacttctttcatagaccatcaaaggcgtacacgacgggaacaagaaagcgaagaaagattcaaacagaatgtgacaataatttgcaaggaagtagtagctccggtgagacgaggtggcataagaccggtaagacaagaccggttatggtaaacggtaagcaaaaaggttgtaagaagattttggttttgtataccaattttggtaagaatcgaaaaccggagaaaaccaattgggtaatgcatcaatatcatttggggacacatgaggaagagaaagaaggagaacttgttgtgtctaagatcttttatcaaactcagcctaggcaatgcaactggtcgtcttctacatcgagcttgaacgctataggtggtggcggcggtgaagcgagtagcggcggaggcggcggagagtatcatatgaggagagatagtgggactactagtggtgggagttgttcttcgtctagagaaattattaatgttaatcctccgaatcgatccgatgaaataggcggcgttggtggtggcgttatggccgtagcagctgcggctgcggcggttgcagctgggcttccgagttatgcaatggatcagctcagctttgttccgtttatgaaaagctttgatgaggtggcgaggagggaaactcctcagactgggcacgctacatgtgaggatgtaatggcagaacaacatcgtcatcgtcatcaaccatcatcatcaacatcacatcatatggctcatgatcatcaccatcatcatcatcaacaacaacaacaacggcatcatgcattcaacataagccagcctacacatccgatatcaaccattatttctccatctacttcgcttcaccatgcctccattaatattcttgacgataatccttatcatgttcatagaatcttgctccccaatgaaaattaccagacacaacagcaactacgtcaagaaggagaagaagaacataatgatgggaagatgggaggaaggtcagcttccggattggaagaactcataatgggctgcacttcttctaccactcatcatgatgtaaaagatgggtcatcatcaatggggaaccaacaagaagcagaatggttgaagtactcaacgttttggccagcccctgactcttctgacaaccaagatcatcatgggtaa

SEQ ID NO: 28930 - protein, 498 aa, Arabidopsis thaliana
  misc_feature (1)..(498): Ceres Seq. ID no. 3092345
MNKSNPAGSVTGSDIIDAKIEEHQLCGSKKCPSCGHKLEGKPQDWVGLPAGVKFDPTDQELIEHLEAKVLAKDFKSHPLIDEFIPTIEGEDGICYTHPEKLPGVTRDGLSRHFFHRPSKAYTTGTRKRRKIQTECDNNLQGSSSSGETRWHKTGKTRPVMVNGKQKGCKKILVLYTNFGKNRKPEKTNWVMHQYHLGTHEEEKEGELVVSKIFYQTQPRQCNWSSSTSSLNAIGGGGGEASSGGGGGEYHMRRDSGTTSGGSCSSSREIINVNPPNRSDEIGGVGGGVMAVAAAAAAVAAGLPSYAMDQLSFVPFMKSFDEVARRETPQTGHATCEDVMAEQHRHRHQPSSSTSHHMAHDHHHHHHQQQQQRHHAFNISQPTHPISTIISPSTSLHHASINILDDNPYHVHRILLPNENYQTQQQLRQEGEEEHNDGKMGGRSASGLEELIMGCTSSTTHHDVKDGSSSMGNQQEAEWLKYSTFWPAPDSSDNQDHHG

SEQ ID NO: 28931 - protein, 339 aa, Arabidopsis thaliana
  misc_feature (1)..(339): Ceres Seq. ID no. 3092346
MVNGKQKGCKKILVLYTNFGKNRKPEKTNWVMHQYHLGTHEEEKEGELVVSKIFYQTQPRQCNWSSSTSSLNAIGGGGGEASSGGGGGEYHMRRDSGTTSGGSCSSSREIINVNPPNRSDEIGGVGGGVMAVAAAAAAVAAGLPSYAMDQLSFVPFMKSFDEVARRETPQTGHATCEDVMAEQHRHRHQPSSSTSHHMAHDHHHHHHQQQQQRHHAFNISQPTHPISTIISPSTSLHHASINILDDNPYHVHRILLPNENYQTQQQLRQEGEEEHNDGKMGGRSASGLEELIMGCTSSTTHHDVKDGSSSMGNQQEAEWLKYSTFWPAPDSSDNQDHHG

SEQ ID NO: 28932 - protein, 308 aa, Arabidopsis thaliana
  misc_feature (1)..(308): Ceres Seq. ID no. 3092347
MHQYHLGTHEEEKEGELVVSKIFYQTQPRQCNWSSSTSSLNAIGGGGGEASSGGGGGEYHMRRDSGTTSGGSCSSSREIINVNPPNRSDEIGGVGGGVMAVAAAAAAVAAGLPSYAMDQLSFVPFMKSFDEVARRETPQTGHATCEDVMAEQHRHRHQPSSSTSHHMAHDHHHHHHQQQQQRHHAFNISQPTHPISTIISPSTSLHHASINILDDNPYHVHRILLPNENYQTQQQLRQEGEEEHNDGKMGGRSASGLEELIMGCTSSTTHHDVKDGSSSMGNQQEAEWLKYSTFWPAPDSSDNQDHHG

SEQ ID NO: 28933 - DNA, 1260 bp, Arabidopsis thaliana
  misc_feature (1)..(1260): Ceres Seq. ID no. 3092832
atgggaaagattcttcatcttcttcttcttcttcttaaggtctctgttcttgaattcatcattagtgtttctgcttttacttcacctgcttcacagccttctctttctcctgtttacacttccatggcttccttttctccagggatccacatgggcaaaggccaagaacacaagttagatgcacacaagaaacttctaatcgctctcataatcacctcatcttctctaggactaatacttgtatcttgtttatgcttttgggtttattggtctaagaaatctcccaaaaacaccaagaactcaggtgagagtaggatttcattatccaagaagggctttgtgcagtccttcgattacaagacactagagaaagcaacaggcggtttcaaagacggtaatcttataggacgaggcgggttcggagatgtttacaaggcctgtttaggcaacaacactctagcagcagtcaaaaagatcgaaaacgttagtcaagaagcaaaacgagaatttcagaatgaagttgatttgttgagcaagattcaccacccgaacatcatctcattgtttggatatggaaatgaactcagttcgagttttatcgtctacgagctgatggaaagcggatcattggatacacagttacacggaccttctcggggatcggctttaacatggcacatgcggatgaagattgctcttgatacagcaagagctgttgagtatctccacgagcgttgtcgtcctccggttatccacagagatcttaaatcgtcaaatattctccttgattcttccttcaacgccaagatttcggattttggtcttgcggtaatggtgggggctcacggcaaaaacaacattaaactatcaggaacacttggttatgttgctccagaatatctcctagatggaaaattgacggataagagtgatgtttatgcgtttggtgtggttttacttgaactcttgttaggaagacggccggttgagaaattgagttcggttcagtgtcaatctcttgtcacttgggcaatgccccaacttacggatagatcaaagcttccgaaaatcgtggatccggttatcaaagatacaatggatcataagcacttataccaggtggcagccgtggcagtgctttgtgtacaaccagaaccgagttatcgaccgttgataaccgatgttcttcactcactagttccattggttccggtagagctaggagggactctccgtttgatctctgattgctttgagtaa

SEQ ID NO: 28934 - protein, 419 aa, Arabidopsis thaliana
  misc_feature (1)..(419): Ceres Seq. ID no. 3092833
MGKILHLLLLLLKVSVLEFIISVSAFTSPASQPSLSPVYTSMASFSPGIHMGKGQEHKLDAHKKLLIALIITSSSLGLILVSCLCFWVYWSKKSPKNTKNSGESRISLSKKGFVQSFDYKTLEKATGGFKDGNLIGRGGFGDVYKACLGNNTLAAVKKIENVSQEAKREFQNEVDLLSKIHHPNIISLFGYGNELSSSFIVYELMESGSLDTQLHGPSRGSALTWHMRMKIALDTARAVEYLHERCRPPVIHRDLKSSNILLDSSFNAKISDFGLAVMVGAHGKNNIKLSGTLGYVAPEYLLDGKLTDKSDVYAFGVVLLELLLGRRPVEKLSSVQCQSLVTWAMPQLTDRSKLPKIVDPVIKDTMDHKHLYQVAAVAVLCVQPEPSYRPLITDVLHSLVPLVPVELGGTLRLISDCFE

SEQ ID NO: 28935 - protein, 378 aa, Arabidopsis thaliana
  misc_feature (1)..(378): Ceres Seq. ID no. 3092834
MASFSPGIHMGKGQEHKLDAHKKLLIALIITSSSLGLILVSCLCFWVYWSKKSPKNTKNSGESRISLSKKGFVQSFDYKTLEKATGGFKDGNLIGRGGFGDVYKACLGNNTLAAVKKIENVSQEAKREFQNEVDLLSKIHHPNIISLFGYGNELSSSFIVYELMESGSLDTQLHGPSRGSALTWHMRMKIALDTARAVEYLHERCRPPVIHRDLKSSNILLDSSFNAKISDFGLAVMVGAHGKNNIKLSGTLGYVAPEYLLDGKLTDKSDVYAFGVVLLELLLGRRPVEKLSSVQCQSLVTWAMPQLTDRSKLPKIVDPVIKDTMDHKHLYQVAAVAVLCVQPEPSYRPLITDVLHSLVPLVPVELGGTLRLISDCFE

SEQ ID NO: 28936 - protein, 369 aa, Arabidopsis thaliana
  misc_feature (1)..(369): Ceres Seq. ID no. 3092835
MGKGQEHKLDAHKKLLIALIITSSSLGLILVSCLCFWVYWSKKSPKNTKNSGESRISLSKKGFVQSFDYKTLEKATGGFKDGNLIGRGGFGDVYKACLGNNTLAAVKKIENVSQEAKREFQNEVDLLSKIHHPNIISLFGYGNELSSSFIVYELMESGSLDTQLHGPSRGSALTWHMRMKIALDTARAVEYLHERCRPPVIHRDLKSSNILLDSSFNAKISDFGLAVMVGAHGKNNIKLSGTLGYVAPEYLLDGKLTDKSDVYAFGVVLLELLLGRRPVEKLSSVQCQSLVTWAMPQLTDRSKLPKIVDPVIKDTMDHKHLYQVAAVAVLCVQPEPSYRPLITDVLHSLVPLVPVELGGTLRLISDCFE

SEQ ID NO: 28937 - DNA, 1254 bp, Arabidopsis thaliana
  misc_feature (1)..(1254): Ceres Seq. ID no. 3093503
atgcctgtggtgagaacgagagcgaaatgttcgattcccgtcacaaaccctaatccaacagtcggaggaggaaactcaaacgtctcgatctacgagaaatgcagagaagacaggatcaaggagaatcttcagaggatgaagaatctcggaatcatggatctctctctcaaactcaaatccgagatccgacccgccaaaaggcgttacggtaactctaatgccaatccgggtcgagaaacatctcctattcagctttccgtctcctctagacgatcctcaagattgaagcaggagccgccagtttctcggagatcctcgagattgaagaacgctacaccagtttcctacgcagaggaacctgaactgaagaagggtaaagtgtctaaagaagagattgttttgtgggtaggagaaggcgtaaggccagagatttacactgaggagcatgagaaactgttaggtaacacagaacgaacttgggagctttttgttgatggttgtgacaaaaatgggaaacggatttatgaccctgttagaggaaagtgttgccaccagtgcaggcagaagacgctaggttatcatacccaatgcagccagtgtaaccattctgttcgaggtcaattctgtggagattgtttatacatgagatatggagaacatgttcttgaagctctggaaaatccggactggatttgtccagtctgtcgcgatatctgcaactgcagtttctgtcgtacaaaaaaagggtggctcccaactggtgcagcttacaggaagatacataaactcgggtataagtctgttgcacattatctgattcaaaccaaccaacagtcagaaacaagtgaggatgatgaaactgatgctcctgcagatagtcaagcttcagaaggagatcatctccttctcataactgatgggattcaggacaatcaaattgacgaaaatctcgatgatgatgatggctcaaacaagaatccggattcagctagaaagtcattatgcttcttgtcgtctgggaacaaccaaacttcagtgactgatggtgatctcaagccattagatgtgaaagaggtggatccagcaactcctgtgatcatcgatcttgaggctcagtgcagtgaaactgagaggatggctaactctgcaaacaaagagaaccgagaaacaagaagcaagcgaaagatgtctgctgaaccaaacccaaatagtattggtggaagactgagacagcgtcgtaagattcaagcttga

SEQ ID NO: 28938 - protein, 417 aa, Arabidopsis thaliana
  misc_feature (1)..(417): Ceres Seq. ID no. 3093504
MPVVRTRAKCSIPVTNPNPTVGGGNSNVSIYEKCREDRIKENLQRMKNLGIMDLSLKLKSEIRPAKRRYGNSNANPGRETSPIQLSVSSRRSSRLKQEPPVSRRSSRLKNATPVSYAEEPELKKGKVSKEEIVLWVGEGVRPEIYTEEHEKLLGNTERTWELFVDGCDKNGKRIYDPVRGKCCHQCRQKTLGYHTQCSQCNHSVRGQFCGDCLYMRYGEHVLEALENPDWICPVCRDICNCSFCRTKKGWLPTGAAYRKIHKLGYKSVAHYLIQTNQQSETSEDDETDAPADSQASEGDHLLLITDGIQDNQIDENLDDDDGSNKNPDSARKSLCFLSSGNNQTSVTDGDLKPLDVKEVDPATPVIIDLEAQCSETERMANSANKENRETRSKRKMSAEPNPNSIGGRLRQRRKIQA

SEQ ID NO: 28939 - protein, 372 aa, Arabidopsis thaliana
  misc_feature (1)..(372): Ceres Seq. ID no. 3093505
MKNLGIMDLSLKLKSEIRPAKRRYGNSNANPGRETSPIQLSVSSRRSSRLKQEPPVSRRSSRLKNATPVSYAEEPELKKGKVSKEEIVLWVGEGVRPEIYTEEHEKLLGNTERTWELFVDGCDKNGKRIYDPVRGKCCHQCRQKTLGYHTQCSQCNHSVRGQFCGDCLYMRYGEHVLEALENPDWICPVCRDICNCSFCRTKKGWLPTGAAYRKIHKLGYKSVAHYLIQTNQQSETSEDDETDAPADSQASEGDHLLLITDGIQDNQIDENLDDDDGSNKNPDSARKSLCFLSSGNNQTSVTDGDLKPLDVKEVDPATPVIIDLEAQCSETERMANSANKENRETRSKRKMSAEPNPNSIGGRLRQRRKIQA

SEQ ID NO: 28940 - protein, 366 aa, Arabidopsis thaliana
  misc_feature (1)..(366): Ceres Seq. ID no. 3093506
MDLSLKLKSEIRPAKRRYGNSNANPGRETSPIQLSVSSRRSSRLKQEPPVSRRSSRLKNATPVSYAEEPELKKGKVSKEEIVLWVGEGVRPEIYTEEHEKLLGNTERTWELFVDGCDKNGKRIYDPVRGKCCHQCRQKTLGYHTQCSQCNHSVRGQFCGDCLYMRYGEHVLEALENPDWICPVCRDICNCSFCRTKKGWLPTGAAYRKIHKLGYKSVAHYLIQTNQQSETSEDDETDAPADSQASEGDHLLLITDGIQDNQIDENLDDDDGSNKNPDSARKSLCFLSSGNNQTSVTDGDLKPLDVKEVDPATPVIIDLEAQCSETERMANSANKENRETRSKRKMSAEPNPNSIGGRLRQRRKIQA

SEQ ID NO: 28941 - DNA, 1227 bp, Arabidopsis thaliana
  misc_feature (1)..(1227): Ceres Seq. ID no. 3094514
atggcttctctttggctgaagttaatctccataagtctaatatacctcaatgttatcgctaaatcaactccgcatcaagaaagcgaattcgaatgtgtctctatagacaaacaatctgcactacaacatcctctaatgaagaatcatcgcatacagactagaccaagtcgagagcttctatcaatactctctacgtccaatggtaacatactcagagagattgatttgaagggatcagaagaatgtccaaagggacaagtaccgattcataaacaaaaaaccaacttaaccaatagtcttattcatccccaacaaattcatagagcaggccgtatcctgaaacaaagtcgcagggataaaaagaagaaaaagaacaatcgacgtaaaaaaaataaaaataaactcatgatcccttctgcattgttgtctcaaaaaaataagattcctcaccaccagccaaaattatttacagagacacatctacattatgcaattgttaggacatttgaaaacacgacaaagaaatggcgtggagcacaagcattgttcaatattaacaagccccgagtggtgcaaaatcaatttagtaaggcttggatttggcttaattacattcaaggaagcttaatgagcagcatccagtttggttgggctgtgcatacgaatttatattcagacgatcgtccaagactaactacgttttggatgtcagatcagcatccaaaaggatgttacaatgcgttatgtccaggaggttatgttcaaattcataaatcaatctaccccggtttggtgtatgataaagttaatgctctaggaggaaaacagaacactgtccatctttctgttgctgaggatccagtgaccaaaaattgggtattgacgataggatccataatgataggctattggccacgtcaaagtcagatggtagatggagcttctgaagtatacttcggtggatttgcaggaaacactgcatcgtctcaaccgacgacaagcccaccaatgggaactggagagtttccgacaaaagatttgagtcggtcttgtttcatgaaacagcttaaatatgttctttcggattattcagttgtggatattaatgccaacgaggtagaacagtatgtggatagtcgtaagtgttatggtgtaatgtttctcaagtatgtagattatgattccagagagactcttacgtttggaggacctggtggacaatgttga

SEQ ID NO: 28942 - protein, 408 aa, Arabidopsis thaliana
  misc_feature (1)..(408): Ceres Seq. ID no. 3094515
MASLWLKLISISLIYLNVIAKSTPHQESEFECVSIDKQSALQHPLMKNHRIQTRPSRELLSILSTSNGNILREIDLKGSEECPKGQVPIHKQKTNLTNSLIHPQQIHRAGRILKQSRRDKKKKKNNRRKKNKNKLMIPSALLSQKNKIPHHQPKLFTETHLHYAIVRTFENTTKKWRGAQALFNINKPRVVQNQFSKAWIWLNYIQGSLMSSIQFGWAVHTNLYSDDRPRLTTFWMSDQHPKGCYNALCPGGYVQIHKSIYPGLVYDKVNALGGKQNTVHLSVAEDPVTKNWVLTIGSIMIGYWPRQSQMVDGASEVYFGGFAGNTASSQPTTSPPMGTGEFPTKDLSRSCFMKQLKYVLSDYSVVDINANEVEQYVDSRKCYGVMFLKYVDYDSRETLTFGGPGGQC

SEQ ID NO: 28943 - protein, 363 aa, Arabidopsis thaliana
  misc_feature (1)..(363): Ceres Seq. ID no. 3094516
MKNHRIQTRPSRELLSILSTSNGNILREIDLKGSEECPKGQVPIHKQKTNLTNSLIHPQQIHRAGRILKQSRRDKKKKKNNRRKKNKNKLMIPSALLSQKNKIPHHQPKLFTETHLHYAIVRTFENTTKKWRGAQALFNINKPRVVQNQFSKAWIWLNYIQGSLMSSIQFGWAVHTNLYSDDRPRLTTFWMSDQHPKGCYNALCPGGYVQIHKSIYPGLVYDKVNALGGKQNTVHLSVAEDPVTKNWVLTIGSIMIGYWPRQSQMVDGASEVYFGGFAGNTASSQPTTSPPMGTGEFPTKDLSRSCFMKQLKYVLSDYSVVDINANEVEQYVDSRKCYGVMFLKYVDYDSRETLTFGGPGGQC

SEQ ID NO: 28944 - protein, 273 aa, Arabidopsis thaliana
  misc_feature (1)..(273): Ceres Seq. ID no. 3094517
MIPSALLSQKNKIPHHQPKLFTETHLHYAIVRTFENTTKKWRGAQALFNINKPRVVQNQFSKAWIWLNYIQGSLMSSIQFGWAVHTNLYSDDRPRLTTFWMSDQHPKGCYNALCPGGYVQIHKSIYPGLVYDKVNALGGKQNTVHLSVAEDPVTKNWVLTIGSIMIGYWPRQSQMVDGASEVYFGGFAGNTASSQPTTSPPMGTGEFPTKDLSRSCFMKQLKYVLSDYSVVDINANEVEQYVDSRKCYGVMFLKYVDYDSRETLTFGGPGGQC

SEQ ID NO: 28945 - DNA, 1080 bp, Arabidopsis thaliana
  misc_feature (1)..(1080): Ceres Seq. ID no. 3094823
atgtataagaatcagttgcaagagcttgcacagaggagttgtttcagtctcccatcatatacatgcacaagagaaggaccagatcatgctccaagattcaaagctagtgtaaacttcaatggtgagatatttgaaagcccaacttactgttctactctcagacaagctgagcattcagctgctgaagttgctcttagtgctctctcttccaaaggtccttcaaagtctctaactgctagagttctagatgagactgggatctacaagaatctgcttcaagagacagcacacagagctggtcttgatctaccggtttacacaagtgtgagatcaggacctggtcacatcccaacattctcttgtactgtggagcttgctggaatgagttttaatggagaatcagcaaagactaagaaacaagctgagaagaatgcagccattgcagcttggttctccttgagaaaaatgccaagattggacccattgagaggtgaagagaaggaacaagagatagttgcaagagtcctctcaagatttagacccaaagaagtgaaaagaagagaaccaaaccagtcaagaagaagaacagtcatcagaacaattcgccaaaacacaacaacaacaacaacaaccacaggagacttgttgtgtgagaaactcagatccatcaatctatataccaatgaagcttcatcatcatcaccaccaccacagagattctggccttcaagaacaaatctcacacaagaacaatccaaagtcaaatcattgctagagaaatgtcaagaatatgcagagaagaaacagagcctagatgatcctaagccagagatgagaatcaaaacatcatcaccatcaccattatcatcatcagtggagagaaactgttatagtaagctcttaccctttccaagttttgtgttaaaccatcagaaactagctccagcagttcacatcagatcagtgatcccagtttgttcagctcctccaccaaaacctaaccctaaccctaattcatcaccgttcatcacaagggagctgggaaatggaagccaagagaagaagtcattaccaaattag

SEQ ID NO: 28946 - protein, 359 aa, Arabidopsis thaliana
  misc_feature (1)..(359): Ceres Seq. ID no. 3094824
MYKNQLQELAQRSCFSLPSYTCTREGPDHAPRFKASVNFNGEIFESPTYCSTLRQAEHSAAEVALSALSSKGPSKSLTARVLDETGIYKNLLQETAHRAGLDLPVYTSVRSGPGHIPTFSCTVELAGMSFNGESAKTKKQAEKNAAIAAWFSLRKMPRLDPLRGEEKEQEIVARVLSRFRPKEVKRREPNQSRRRTVIRTIRQNTTTTTTTTGDLLCEKLRSINLYTNEASSSSPPPQRFWPSRTNLTQEQSKVKSLLEKCQEYAEKKQSLDDPKPEMRIKTSSPSPLSSSVERNCYSKLLPFPSFVLNHQKLAPAVHIRSVIPVCSAPPPKPNPNPNSSPFITRELGNGSQEKKSLPN

SEQ ID NO: 28947 - protein, 232 aa, Arabidopsis thaliana
  misc_feature (1)..(232): Ceres Seq. ID no. 3094825
MSFNGESAKTKKQAEKNAAIAAWFSLRKMPRLDPLRGEEKEQEIVARVLSRFRPKEVKRREPNQSRRRTVIRTIRQNTTTTTTTTGDLLCEKLRSINLYTNEASSSSPPPQRFWPSRTNLTQEQSKVKSLLEKCQEYAEKKQSLDDPKPEMRIKTSSPSPLSSSVERNCYSKLLPFPSFVLNHQKLAPAVHIRSVIPVCSAPPPKPNPNPNSSPFITRELGNGSQEKKSLPN

SEQ ID NO: 28948 - protein, 204 aa, Arabidopsis thaliana
  misc_feature (1)..(204): Ceres Seq. ID no. 3094826
MPRLDPLRGEEKEQEIVARVLSRFRPKEVKRREPNQSRRRTVIRTIRQNTTTTTTTTGDLLCEKLRSINLYTNEASSSSPPPQRFWPSRTNLTQEQSKVKSLLEKCQEYAEKKQSLDDPKPEMRIKTSSPSPLSSSVERNCYSKLLPFPSFVLNHQKLAPAVHIRSVIPVCSAPPPKPNPNPNSSPFITRELGNGSQEKKSLPN

SEQ ID NO: 28949 - DNA, 1533 bp, Arabidopsis thaliana
  misc_feature (1)..(1533): Ceres Seq. ID no. 3095119
atggctactatttggtttctcccacttctctttctctcttgtcttcttcttgccgctttaagactcaagaagcggcggcaacatcaacggaaaccaccgtctccaccgggctttccgatcatcggaaacttgcatcagcttggggagctaccacatcaatctctatggagtctctccaaaaaatatggtcctgtaatgcttttgaagtttggaagtatcccaacggttgttgtctcttcttctgaaacagcaaagcaagctctgaaaatccatgacctcaattgttgtagccgtccaagcttagcaggattaaaacaaaagtcatatgattatttaggaccaagagcgctctcttacaactacttggacatagttttctctccttttaatgattactggaaagaattgaggaggatgtgtgtgcaagagcttttcagtcctaaacaagttcatttgattcaacccatcagggaagaggaagtcaagaaactgatgaattcattctcggaatcagctgctcagaaaactccggttaacttgagcgagaagttagcttctttaactgttggcgtgatatgcaaggcagcatttggtgtgagtttccaaggaactgtgcttaatagtgacaacttcgacaagttaatccatgatgcatttttgttcttggggagcttctctgcctcggattattttccaaatgtcggctggatcatcgactggctcacggggttacaagggcagagagagagaagtgtgagaggtcttgacgcattctatgaacaaatgtttgatctacataaacaggggaacaaagaaggagttgaggattttgtggacttgctcttgaagttggagaaagaagaaactgttcttggatatggcaagctcacaagaaaccatatcaaagcagtcttaatgaatgttcttcttggaggcattggaacttcggctataacaatgacatgggcaatgacagaacttatgagaaacccgcgagtaatgaagaaagttcaatccgaaatcagaaatcaaattgggggcaagtcaatgatctgcttggatgacatagaccaactccattacctgaaaatggtgatcaatgaaacatggaggctacatcctccagcaccacttctagttccaagagaagtaatgtctgaatttgaaatcaacggctacacgattccagccaagacaagactttatgtgaatgtatggggtatcgggcgtgatccagatacttggaaagatccagaggagtttcttccagagagatttgttaacagtaacattgatgcaaaaggacaaaactttgagctgttaccatttggaagtggtaggagaatgtgtcctgccatgtacatggggacaacaatggtggagtttggtctagccaatctcttgtaccattttgactggaaattaccagaaggcatggtggtcgaagacattgacatggaagaatctcctggactcaatgccagcaagaaaaatgagcttgtacttgttcctaggaagtatttaaatctgtaa

SEQ ID NO: 28950 - protein, 510 aa, Arabidopsis thaliana
  misc_feature (1)..(510): Ceres Seq. ID no. 3095120
MATIWFLPLLFLSCLLLAALRLKKRRQHQRKPPSPPGFPIIGNLHQLGELPHQSLWSLSKKYGPVMLLKFGSIPTVVVSSSETAKQALKIHDLNCCSRPSLAGLKQKSYDYLGPRALSYNYLDIVFSPFNDYWKELRRMCVQELFSPKQVHLIQPIREEEVKKLMNSFSESAAQKTPVNLSEKLASLTVGVICKAAFGVSFQGTVLNSDNFDKLIHDAFLFLGSFSASDYFPNVGWIIDWLTGLQGQRERSVRGLDAFYEQMFDLHKQGNKEGVEDFVDLLLKLEKEETVLGYGKLTRNHIKAVLMNVLLGGIGTSAITMTWAMTELMRNPRVMKKVQSEIRNQIGGKSMICLDDIDQLHYLKMVINETWRLHPPAPLLVPREVMSEFEINGYTIPAKTRLYVNVWGIGRDPDTWKDPEEFLPERFVNSNIDAKGQNFELLPFGSGRRMCPAMYMGTTMVEFGLANLLYHFDWKLPEGMVVEDIDMEESPGLNASKKNELVLVPRKYLNL

SEQ ID NO: 28951 - protein, 445 aa, Arabidopsis thaliana
  misc_feature (1)..(445): Ceres Seq. ID no. 3095121
MLLKFGSIPTVVVSSSETAKQALKIHDLNCCSRPSLAGLKQKSYDYLGPRALSYNYLDIVFSPFNDYWKELRRMCVQELFSPKQVHLIQPIREEEVKKLMNSFSESAAQKTPVNLSEKLASLTVGVICKAAFGVSFQGTVLNSDNFDKLIHDAFLFLGSFSASDYFPNVGWIIDWLTGLQGQRERSVRGLDAFYEQMFDLHKQGNKEGVEDFVDLLLKLEKEETVLGYGKLTRNHIKAVLMNVLLGGIGTSAITMTWAMTELMRNPRVMKKVQSEIRNQIGGKSMICLDDIDQLHYLKMVINETWRLHPPAPLLVPREVMSEFEINGYTIPAKTRLYVNVWGIGRDPDTWKDPEEFLPERFVNSNIDAKGQNFELLPFGSGRRMCPAMYMGTTMVEFGLANLLYHFDWKLPEGMVVEDIDMEESPGLNASKKNELVLVPRKYLNL

SEQ ID NO: 28952 - protein, 372 aa, Arabidopsis thaliana
  misc_feature (1)..(372): Ceres Seq. ID no. 3095122
MCVQELFSPKQVHLIQPIREEEVKKLMNSFSESAAQKTPVNLSEKLASLTVGVICKAAFGVSFQGTVLNSDNFDKLIHDAFLFLGSFSASDYFPNVGWIIDWLTGLQGQRERSVRGLDAFYEQMFDLHKQGNKEGVEDFVDLLLKLEKEETVLGYGKLTRNHIKAVLMNVLLGGIGTSAITMTWAMTELMRNPRVMKKVQSEIRNQIGGKSMICLDDIDQLHYLKMVINETWRLHPPAPLLVPREVMSEFEINGYTIPAKTRLYVNVWGIGRDPDTWKDPEEFLPERFVNSNIDAKGQNFELLPFGSGRRMCPAMYMGTTMVEFGLANLLYHFDWKLPEGMVVEDIDMEESPGLNASKKNELVLVPRKYLNL

SEQ ID NO: 28953 - DNA, 2700 bp, Arabidopsis thaliana
  misc_feature (1)..(2700): Ceres Seq. ID no. 3095595
atggagtaccatcctcaagcaattaggttatgtgcgttgatcttcatctctttctatgctcttttacacctcgttgaagcacaagaccaaaaaggattcattagtttggattgcgggtcattgccaaatgagcctccttacaacgatccttcaaccggattaacatactcgacggacgatggtttcgtgcagagtggcaaaactggaagaatccagaaagcgttcgagtcgatcttcagtaaaccgtctttgaagcttagatacttcccggacggattccgaaactgctataccttgaatgtcacgcaagacacaaactatctgatcaaagctgtatttgtgtatggtaactacgatggtcttaacaatcccccgagtttcgatctttaccttggtccgaatctatgggtaacggttgatatgaatggacggaccaatggtactatccaggagattatccacaagaccatatctaagtctctccaggtctgtcttgttaagacaggaacaagctcacctatgattaatacgttagagctacgaccacttaaaaacaatacttacaatactcagagtggctctctgaagtatttcttccgatattatttcagcggttcaggccaaaacatacggtaccctgatgatgtcaatgatcgtaaatggtatccattctttgatgcaaaagagtggacagagttaacaaccaatctgaatataaacagttctaatggttatgcaccaccagaagttgtgatggcgtcagcctcaacgcctataagtacttttggaacatggaacttctcatggttattgccatcttccacaacccaattttatgtgtacatgcattttgccgagattcaaactctacggtccctcgatacccgagaattcaaagtgacgttgaatggaaaacttgcttatgaacgctacagccctaaaacgttagccaccgaaaccattttctattcgacaccacaacaatgtgaagatgggacatgcctcttggagttgacgaaaacacctaagtctactcttcctcctctcatgaacgctcttgaggttttcaccgtgatcgattttccacagatggaaacaaatccagatgatgttgctgctatcaagagtatccaaagcacttatggattaagtaaaatcagctggcaaggagatccatgcgttcctaaacagtttttgtgggagggtttaaactgcaataatctagataactccacgccgcctattgtcacttccttaaacttatcgtcaagtcatttaacggggatcatcgcgcaaggcattcagaatctgacacacctacaagaactagacttgtcaaataacaatttgacgggaggaatacccgaatttcttgctgacataaaatcactcttagtaataaatttaagtgggaacaattttaatggctctattcctcaaatccttttacagaagaaaggactaaagctaattcttgaaggaaacgccaatctgatttgtccggatggattatgtgtaaacaaagctggcaatggtggtgccaagaaaatgaatgttgtaataccgattgttgcatcagttgcgtttgtggttgttcttggatctgcattggcgttcttttttattttcaaaaagaaaaagacatcaaacagtcaagatttaggtccatcttcatatactcaagtatcagaagttagaacaatcagatcttcagagtcggcaataatgactaagaacagaagatttacatattcggaggttgtaacaatgacaaataactttgaaagagttcttggtaaaggaggatttggaatggtttatcatggaactgtaaataatactgaacaagtagccgttaaaatgctttcacactcatcttctcaaggatataaagaattcaaagcagaggtggaacttcttctcagagttcaccacaaaaatttggttggcctcgttggatattgtgatgaaggagaaaacttggctcttatctacgagtacatggctaacggagacttgagagaacatatgtcaggaaagcgaggtggatctattctaaattgggaaactagactaaaaatagttgtcgagtctgcccaaggtttggaatacttgcataatggatgcaaaccaccaatggttcatagggatgttaaaaccacaaatatattgttgaatgaacacctccatgctaagctagctgattttgggctttcgagatcttttccaattgaaggagaaactcatgtgtcaacagttgttgctggaactcctggataccttgatccagaatattaccgaacaaattggttgaacgagaaaagtgatgtttatagctttggaattgtactattagagatcatcacaaaccaacttgtgatcaatcaaagtcgtgaaaaaccacatatagcagaatgggtggggttaatgcttacaaaaggagacattcaaaacattatggatccaaaactttatggtgattatgactctggttctgtctggagagcagttgaactagcaatgtcatgtctaaatccttcttcagctagaagaccaacaatgtctcaagttgttatcgaattaaacgaatgtttgtcatatgaaaacgcaagaggaggaacgagtcaaaacatgaactcagagagttcaatagaagtcagcatgaactttgatattggagctacccctgatgctcgttag

SEQ ID NO: 28954 - protein, 899 aa, Arabidopsis thaliana
  misc_feature (1)..(899): Ceres Seq. ID no. 3095596
MEYHPQAIRLCALIFISFYALLHLVEAQDQKGFISLDCGSLPNEPPYNDPSTGLTYSTDDGFVQSGKTGRIQKAFESIFSKPSLKLRYFPDGFRNCYTLNVTQDTNYLIKAVFVYGNYDGLNNPPSFDLYLGPNLWVTVDMNGRTNGTIQEIIHKTISKSLQVCLVKTGTSSPMINTLELRPLKNNTYNTQSGSLKYFFRYYFSGSGQNIRYPDDVNDRKWYPFFDAKEWTELTTNLNINSSNGYAPPEVVMASASTPISTFGTWNFSWLLPSSTTQFYVYMHFAEIQTLRSLDTREFKVTLNGKLAYERYSPKTLATETIFYSTPQQCEDGTCLLELTKTPKSTLPPLMNALEVFTVIDFPQMETNPDDVAAIKSIQSTYGLSKISWQGDPCVPKQFLWEGLNCNNLDNSTPPIVTSLNLSSSHLTGIIAQGIQNLTHLQELDLSNNNLTGGIPEFLADIKSLLVINLSGNNFNGSIPQILLQKKGLKLILEGNANLICPDGLCVNKAGNGGAKKMNVVIPIVASVAFVVVLGSALAFFFIFKKKKTSNSQDLGPSSYTQVSEVRTIRSSESAIMTKNRRFTYSEVVTMTNNFERVLGKGGFGMVYHGTVNNTEQVAVKMLSHSSSQGYKEFKAEVELLLRVHHKNLVGLVGYCDEGENLALIYEYMANGDLREHMSGKRGGSILNWETRLKIVVESAQGLEYLHNGCKPPMVHRDVKTTNILLNEHLHAKLADFGLSRSFPIEGETHVSTVVAGTPGYLDPEYYRTNWLNEKSDVYSFGIVLLEIITNQLVINQSREKPHIAEWVGLMLTKGDIQNIMDPKLYGDYDSGSVWRAVELAMSCLNPSSARRPTMSQVVIELNECLSYENARGGTSQNMNSESSIEVSMNFDIGATPDAR

SEQ ID NO: 28955 - protein, 759 aa, Arabidopsis thaliana
  misc_feature (1)..(759): Ceres Seq. ID no. 3095598
MNGRTNGTIQEIIHKTISKSLQVCLVKTGTSSPMINTLELRPLKNNTYNTQSGSLKYFFRYYFSGSGQNIRYPDDVNDRKWYPFFDAKEWTELTTNLNINSSNGYAPPEVVMASASTPISTFGTWNFSWLLPSSTTQFYVYMHFAEIQTLRSLDTREFKVTLNGKLAYERYSPKTLATETIFYSTPQQCEDGTCLLELTKTPKSTLPPLMNALEVFTVIDFPQMETNPDDVAAIKSIQSTYGLSKISWQGDPCVPKQFLWEGLNCNNLDNSTPPIVTSLNLSSSHLTGIIAQGIQNLTHLQELDLSNNNLTGGIPEFLADIKSLLVINLSGNNFNGSIPQILLQKKGLKLILEGNANLICPDGLCVNKAGNGGAKKMNVVIPIVASVAFVVVLGSALAFFFIFKKKKTSNSQDLGPSSYTQVSEVRTIRSSESAIMTKNRRFTYSEVVTMTNNFERVLGKGGFGMVYHGTVNNTEQVAVKMLSHSSSQGYKEFKAEVELLLRVHHKNLVGLVGYCDEGENLALIYEYMANGDLREHMSGKRGGSILNWETRLKIVVESAQGLEYLHNGCKPPMVHRDVKTTNILLNEHLHAKLADFGLSRSFPIEGETHVSTVVAGTPGYLDPEYYRTNWLNEKSDVYSFGIVLLEIITNQLVINQSREKPHIAEWVGLMLTKGDIQNIMDPKLYGDYDSGSVWRAVELAMSCLNPSSARRPTMSQVVIELNECLSYENARGGTSQNMNSESSIEVSMNFDIGATPDAR

SEQ ID NO: 28956 - protein, 726 aa, Arabidopsis thaliana
  misc_feature (1)..(726): Ceres Seq. ID no. 3095599
MINTLELRPLKNNTYNTQSGSLKYFFRYYFSGSGQNIRYPDDVNDRKWYPFFDAKEWTELTTNLNINSSNGYAPPEVVMASASTPISTFGTWNFSWLLPSSTTQFYVYMHFAEIQTLRSLDTREFKVTLNGKLAYERYSPKTLATETIFYSTPQQCEDGTCLLELTKTPKSTLPPLMNALEVFTVIDFPQMETNPDDVAAIKSIQSTYGLSKISWQGDPCVPKQFLWEGLNCNNLDNSTPPIVTSLNLSSSHLTGIIAQGIQNLTHLQELDLSNNNLTGGIPEFLADIKSLLVINLSGNNFNGSIPQILLQKKGLKLILEGNANLICPDGLCVNKAGNGGAKKMNVVIPIVASVAFVVVLGSALAFFFIFKKKKTSNSQDLGPSSYTQVSEVRTIRSSESAIMTKNRRFTYSEVVTMTNNFERVLGKGGFGMVYHGTVNNTEQVAVKMLSHSSSQGYKEFKAEVELLLRVHHKNLVGLVGYCDEGENLALIYEYMANGDLREHMSGKRGGSILNWETRLKIVVESAQGLEYLHNGCKPPMVHRDVKTTNILLNEHLHAKLADFGLSRSFPIEGETHVSTVVAGTPGYLDPEYYRTNWLNEKSDVYSFGIVLLEIITNQLVINQSREKPHIAEWVGLMLTKGDIQNIMDPKLYGDYDSGSVWRAVELAMSCLNPSSARRPTMSQVVIELNECLSYENARGGTSQNMNSESSIEVSMNFDIGATPDAR

SEQ ID NO: 28957 - DNA, 4443 bp, Arabidopsis thaliana
  misc_feature (1)..(4443): Ceres Seq. ID no. 3095665
atggggtttcgcaccagaaacctctcctttctcattctcctccttcttaacttctttgctgccacatacgctcgtgaatgtagccctccaaaaccatcacctaagcctcacaaaccaccaaaacattctgtcgtcccacctaaaccaccggcggttaaaccacatccccacccgaaacctcccactataaaacctcctccgcctaaacgacacccccaccctaaaccacccaccgtcaaaccacaccctcaccctaaaccccctaccaaacctcatccccaccctaaaccacctaccaaacctcatccccaccctaaaccacccaccatcaaaccacctcctcaccctaaacctcgtccccaccctaaaccacccaacgtcaaaccacaccctcaccctaaacccccgacaaaacctcatccccaccctaaaccccccaccaaacatcatccccacccaaaacctcccaccataaaacctcctccgaaaccaccctccgtcaaacctccaccatcaactcctaaacctcctacgaccaaccctcctccgtctactccccaaccccctacccacaagcctccaccgtgcacaccaacaccacccgttgcctcaccaccaatggcaactcctcccactcaaatgcctcctatcgcaacacctcccatcgccaaatcgcccgtcgcaacaccgcctattgcaaccccacctactgcaacaccgcccattacaattccacctgttgcaacacctcctatcacaacacctcccatcgcaaacccacctatcataatgccacctatagcaactcctccagtagcagctcctcctataacaaatcctccaatatcaaagccgcctgttactacaccgcctactaccactcctcccattgcaaaaccacctatcgcaactcctcctatttcaacaccaccagccgcaacaccaccagccgcaacaccaccaataacaactctaccacccgcaaaaccgcctgttgcaatttcaccaatagtaactccacccgtcactccaattgcacagccaccagttgcaacaccgcccaccgcaactccacctgttgcaacaccaccaatagcaactccacctacctcaaaatcacctatctcaactcctcctatttcagaatcaccagttgcaacaccaccaaccgcaacatcaccaataaaaactccaccacccgcaaaaccacctgttgcaactccacccatcgcaaaatcgccaattgcaacaccgcccactgcgactccaccagttgcaactcctcctattgaaaaaccaccggttgcaacaccacccactacaacaccgcccaccgcaactccacctgttgcaaaaccaccagttgaaacaccaccaatagcaactccacctaccgcaaagccaccaatctcaactcctcctatttcaaaaccaccagttgcaacaccaccagccgcaacaccacctataacaactccaacaccagtaaaaccacctgttgcaactccaccgttagcaattccacccgtcgcaaaacccccagttgtaacaccgcccaccgcaacaccacctattgcaactcctcctattgcaaaatcaccggttgcaacaccgcccaccgcgacaccaccagttgcaactcctcctattgcaaaaccaccagttgtaacaccaccaactacaacaccgcccaccgcaactccacctgttgcaaaaccaccggttgcaacaccaccaatagcaactccacctaccgcaaagccaccaatctcaactcctcctatttcaaaatcaccagttgcaacaccaccagccgcaacaccacctatcacaactccaccacccgcaaaacctcctgttgcaactccaccaatagcaactccacccatcgcaaaaccgccagttgcaacaccgcccaccgcaacaccaccaattgcaacttctcctgttgcaaaaccaccagttgcaacaccacctataaaaactccaccacctgcaaaaccgcctgttgcaattccaccaatagcaactccacccgtcgcaaaaccgccagttgcaacaccgcccaccgcaactccacctattgcaactcctcctattgcaacaccaccggttgtaacaccgcccaccgcaactccaccagttgcaactcctcctattgcaaaacctccaacgacaataccgcctactgcaactccacctgttgcaatgccaccaatagcaactccacctaccgcaaaaccgcctattgcaactccaccgatagcaattccacccgtcgcaaaacccccagttgtaacaccgcccaccgcaacaccacctattgcaactcctcctattgcaaaatcaccggttgcaacaccgcccaccgcgacaccaccagttgcaactcctcctattgcaaaaccaccagttgcaacaccacccactacagcaccgcccaccgcaactccacctgttgcaaaaccaccggttgcaacaccaccaatagcaactccacctaccgcaaagccaccaatcttaactcctcctatttcaaaaccaccagttgcaacaccaccagccgcaacaccacctatcacaactccaccacccgcaaaacctcctgttgcaactccaccaatagcaactccacccatcgcaaaaccgccagttgcaacaccgcccaccgcaacaccaccaattgcaacttctcctgttgcaaaaccaccagttgcaataccacctataaaaactccaccacccgcaaaaccgcctgttgcaattccaccaatagcaactccacccgtcgcaaaaccgccagttgcaacaccgcccaccgcaactccacctattgcaacttctcctattgcaacaccaccggttgtaacaccgcccaccgcaacttcaccagttgcaactcctcctattgcaaaacctccaacgacaacaccgcccaccgcaactccacctgttgcaatgccaccaatagcaactccacctaccgcaaaaccgcctgttgcaactccacctatagcaaatccacctgtagaaaaaccgccggttgcaacaccgccaatcgcaaaaccgcccactgtactgccacctattgcaaaaccaccagttgaaacatcgcccaccgcaacacctccaaccgcaactccacctgttgcaattcctcctgttgtaaaaccaccggttgctatacctcccattacaaaaccaccggttgcaacaccaccagtaacaaatccacctaccgcaatgccaccaatcgttacgccgcctcctatcgtaactcctcctattgcaaaatcaccgatcgcaactccacctgtttctactcctcctatcgcaaagccacctatcgcaacaccgcctgttgcaactacgcccattgcaaaaccaccaattgcaacaccacccaccgcaaatccacctgttgcaaatcctcctatcgcaaagtcacctattgcaaagccaccaattgcaacaccccccaccgcaatgccatcaatagcaactccacctatcggtaagccgcctgttgcaaccccgcccatggcaaagccaccagttgcaagtccaccaattgcaacacctccaatcataaaaccaccagtcgcaactcctccaatcacaaaaccgccggttgcaactccaccagtagcaactcctcctatcgcaaagccaccagtcgcaacgtcgcctattgaaactccgcccgtggcaaaaccaccagttacaactccacctgtagcaactcctcccatcgtaaaaccacctattgtgacaccgcctattgcaactccacccatcgcaaagtcaccaatcgcgccgccgcctattggtactcctcctattgcaaaaccaccagttgcgacaccaccaaccgcaactccacctgttgctacttctcctatagcaaaaccacctgttgcaacgccgccacctgcaactccgcctgttgcaaaaccaccggttgcaacaccacccaccgtaactccacctgttgcaactcctccaatcgcaaagccacccggcgcacggccacccgttgccacaccacccgtagcaactccacctatcgctaagtcgcctgttgcaaccccacctatgacaaagccacctgttgcaagttcaccaattgcaactcctccaatcgcaaaaacacccatcgcaacgccacctacaactatgccgaaaacttgcccaattgacacgttgaagctaggctcgtgtgttgaccttcttggaggtttggttcacattggaattgggaaaagcgccaaggaaaagtgttgtccagttgttgaaggtttagttgatctagacgcagccgtttgtttatgtaccactattaaagctaaacttctcaacatagacgtcattctccccatagctcttgaagttctccttaattgtggaaaaaatccaccacctggattcaaatgtcccgcctga

SEQ ID NO: 28958 - protein, 1480 aa, Arabidopsis thaliana
  misc_feature (1)..(1480): Ceres Seq. ID no. 3095666
MGFRTRNLSFLILLLLNFFAATYARECSPPKPSPKPHKPPKHSVVPPKPPAVKPHPHPKPPTIKPPPPKRHPHPKPPTVKPHPHPKPPTKPHPHPKPPTKPHPHPKPPTIKPPPHPKPRPHPKPPNVKPHPHPKPPTKPHPHPKPPTKHHPHPKPPTIKPPPKPPSVKPPPSTPKPPTTNPPPSTPQPPTHKPPPCTPTPPVASPPMATPPTQMPPIATPPIAKSPVATPPIATPPTATPPITIPPVATPPITTPPIANPPIIMPPIATPPVAAPPITNPPISKPPVTTPPTTTPPIAKPPIATPPISTPPAATPPAATPPITTLPPAKPPVAISPIVTPPVTPIAQPPVATPPTATPPVATPPIATPPTSKSPISTPPISESPVATPPTATSPIKTPPPAKPPVATPPIAKSPIATPPTATPPVATPPIEKPPVATPPTTTPPTATPPVAKPPVETPPIATPPTAKPPISTPPISKPPVATPPAATPPITTPTPVKPPVATPPLAIPPVAKPPVVTPPTATPPIATPPIAKSPVATPPTATPPVATPPIAKPPVVTPPTTTPPTATPPVAKPPVATPPIATPPTAKPPISTPPISKSPVATPPAATPPITTPPPAKPPVATPPIATPPIAKPPVATPPTATPPIATSPVAKPPVATPPIKTPPPAKPPVAIPPIATPPVAKPPVATPPTATPPIATPPIATPPVVTPPTATPPVATPPIAKPPTTIPPTATPPVAMPPIATPPTAKPPIATPPIAIPPVAKPPVVTPPTATPPIATPPIAKSPVATPPTATPPVATPPIAKPPVATPPTTAPPTATPPVAKPPVATPPIATPPTAKPPILTPPISKPPVATPPAATPPITTPPPAKPPVATPPIATPPIAKPPVATPPTATPPIATSPVAKPPVAIPPIKTPPPAKPPVAIPPIATPPVAKPPVATPPTATPPIATSPIATPPVVTPPTATSPVATPPIAKPPTTTPPTATPPVAMPPIATPPTAKPPVATPPIANPPVEKPPVATPPIAKPPTVLPPIAKPPVETSPTATPPTATPPVAIPPVVKPPVAIPPITKPPVATPPVTNPPTAMPPIVTPPPIVTPPIAKSPIATPPVSTPPIAKPPIATPPVATTPIAKPPIATPPTANPPVANPPIAKSPIAKPPIATPPTAMPSIATPPIGKPPVATPPMAKPPVASPPIATPPIIKPPVATPPITKPPVATPPVATPPIAKPPVATSPIETPPVAKPPVTTPPVATPPIVKPPIVTPPIATPPIAKSPIAPPPIGTPPIAKPPVATPPTATPPVATSPIAKPPVATPPPATPPVAKPPVATPPTVTPPVATPPIAKPPGARPPVATPPVATPPIAKSPVATPPMTKPPVASSPIATPPIAKTPIATPPTTMPKTCPIDTLKLGSCVDLLGGLVHIGIGKSAKEKCCPVVEGLVDLDAAVCLCTTIKAKLLNIDVILPIALEVLLNCGKNPPPGFKCPA

SEQ ID NO: 28959 - protein, 1274 aa, Arabidopsis thaliana
  misc_feature (1)..(1274): Ceres Seq. ID no. 3095668
MATPPTQMPPIATPPIAKSPVATPPIATPPTATPPITIPPVATPPITTPPIANPPIIMPPIATPPVAAPPITNPPISKPPVTTPPTTTPPIAKPPIATPPISTPPAATPPAATPPITTLPPAKPPVAISPIVTPPVTPIAQPPVATPPTATPPVATPPIATPPTSKSPISTPPISESPVATPPTATSPIKTPPPAKPPVATPPIAKSPIATPPTATPPVATPPIEKPPVATPPTTTPPTATPPVAKPPVETPPIATPPTAKPPISTPPISKPPVATPPAATPPITTPTPVKPPVATPPLAIPPVAKPPVVTPPTATPPIATPPIAKSPVATPPTATPPVATPPIAKPPVVTPPTTTPPTATPPVAKPPVATPPIATPPTAKPPISTPPISKSPVATPPAATPPITTPPPAKPPVATPPIATPPIAKPPVATPPTATPPIATSPVAKPPVATPPIKTPPPAKPPVAIPPIATPPVAKPPVATPPTATPPIATPPIATPPVVTPPTATPPVATPPIAKPPTTIPPTATPPVAMPPIATPPTAKPPIATPPIAIPPVAKPPVVTPPTATPPIATPPIAKSPVATPPTATPPVATPPIAKPPVATPPTTAPPTATPPVAKPPVATPPIATPPTAKPPILTPPISKPPVATPPAATPPITTPPPAKPPVATPPIATPPIAKPPVATPPTATPPIATSPVAKPPVAIPPIKTPPPAKPPVAIPPIATPPVAKPPVATPPTATPPIATSPIATPPVVTPPTATSPVATPPIAKPPTTTPPTATPPVAMPPIATPPTAKPPVATPPIANPPVEKPPVATPPIAKPPTVLPPIAKPPVETSPTATPPTATPPVAIPPVVKPPVAIPPITKPPVATPPVTNPPTAMPPIVTPPPIVTPPIAKSPIATPPVSTPPIAKPPIATPPVATTPIAKPPIATPPTANPPVANPPIAKSPIAKPPIATPPTAMPSIATPPIGKPPVATPPMAKPPVASPPIATPPIIKPPVATPPITKPPVATPPVATPPIAKPPVATSPIETPPVAKPPVTTPPVATPPIVKPPIVTPPIATPPIAKSPIAPPPIGTPPIAKPPVATPPTATPPVATSPIAKPPVATPPPATPPVAKPPVATPPTVTPPVATPPIAKPPGARPPVATPPVATPPIAKSPVATPPMTKPPVASSPIATPPIAKTPIATPPTTMPKTCPIDTLKLGSCVDLLGGLVHIGIGKSAKEKCCPVVEGLVDLDAAVCLCTTIKAKLLNIDVILPIALEVLLNCGKNPPPGFKCPA

SEQ ID NO: 28960 - protein, 1267 aa, Arabidopsis thaliana
  misc_feature (1)..(1267): Ceres Seq. ID no. 3095669
MPPIATPPIAKSPVATPPIATPPTATPPITIPPVATPPITTPPIANPPIIMPPIATPPVAAPPITNPPISKPPVTTPPTTTPPIAKPPIATPPISTPPAATPPAATPPITTLPPAKPPVAISPIVTPPVTPIAQPPVATPPTATPPVATPPIATPPTSKSPISTPPISESPVATPPTATSPIKTPPPAKPPVATPPIAKSPIATPPTATPPVATPPIEKPPVATPPTTTPPTATPPVAKPPVETPPIATPPTAKPPISTPPISKPPVATPPAATPPITTPTPVKPPVATPPLAIPPVAKPPVVTPPTATPPIATPPIAKSPVATPPTATPPVATPPIAKPPVVTPPTTTPPTATPPVAKPPVATPPIATPPTAKPPISTPPISKSPVATPPAATPPITTPPPAKPPVATPPIATPPIAKPPVATPPTATPPIATSPVAKPPVATPPIKTPPPAKPPVAIPPIATPPVAKPPVATPPTATPPIATPPIATPPVVTPPTATPPVATPPIAKPPTTIPPTATPPVAMPPIATPPTAKPPIATPPIAIPPVAKPPVVTPPTATPPIATPPIAKSPVATPPTATPPVATPPIAKPPVATPPTTAPPTATPPVAKPPVATPPIATPPTAKPPILTPPISKPPVATPPAATPPITTPPPAKPPVATPPIATPPIAKPPVATPPTATPPIATSPVAKPPVAIPPIKTPPPAKPPVAIPPIATPPVAKPPVATPPTATPPIATSPIATPPVVTPPTATSPVATPPIAKPPTTTPPTATPPVAMPPIATPPTAKPPVATPPIANPPVEKPPVATPPIAKPPTVLPPIAKPPVETSPTATPPTATPPVAIPPVVKPPVAIPPITKPPVATPPVTNPPTAMPPIVTPPPIVTPPIAKSPIATPPVSTPPIAKPPIATPPVATTPIAKPPIATPPTANPPVANPPIAKSPIAKPPIATPPTAMPSIATPPIGKPPVATPPMAKPPVASPPIATPPIIKPPVATPPITKPPVATPPVATPPIAKPPVATSPIETPPVAKPPVTTPPVATPPIVKPPIVTPPIATPPIAKSPIAPPPIGTPPIAKPPVATPPTATPPVATSPIAKPPVATPPPATPPVAKPPVATPPTVTPPVATPPIAKPPGARPPVATPPVATPPIAKSPVATPPMTKPPVASSPIATPPIAKTPIATPPTTMPKTCPIDTLKLGSCVDLLGGLVHIGIGKSAKEKCCPVVEGLVDLDAAVCLCTTIKAKLLNIDVILPIALEVLLNCGKNPPPGFKCPA

SEQ ID NO: 28961 - DNA, 1134 bp, Arabidopsis thaliana
  misc_feature (1)..(1134): Ceres Seq. ID no. 3096143
atgggagcggtgacgtcatcaatggcggcgaagtttgcgtttttcccgccaaatccgccgtcgtacggcgtagaagtggtggaaggaaagctgaggctgattggtgtagagaacgtgaaggagaatgttgaagtattgaagctgaagacgaagagaggtaatcaggtggttgcggcgtatattaagaatcctacagcttcacttacgcttctttattctcatggtaacgccgcggatcttggtcagatgttcgagcttttctccgagcttagcctccatcttcgtgttaacttaattgggtatgattattcgggttatgggagatcttcagggaagcctagtgagcagaacacgtatagcgatatagaagcagtgtatagatgcttggaagagaagtatggtgtgaaggaacaagatgttatcttatatggacaatctgtaggaagcggcccgactttagaattggcttctcggttacctaacctacgagccgtggttcttcatagcgctattgcttccggacttagagtcatgtaccctgttaaacgaacttactggttcgacatttacaagaatgtcgagaagatatcgtttgtcaaatgtccggttttagtaatacacggaacatcagatgatgttgttaattggtctcatgggaagcaattatttgagctatgtaaagaaaaatatgaaccgctttggatcaaaggagggaaccattgtgatttagagttatatccgcaatacataaagcatctaagaaaatttgtatcggcgattgaaaagtcgccgatacttagaaatggaccggtgccactaacagagaaggcaaggagtagtacggatattagagaacctgcaagaccaagcacagatcagagagataaatcaagaacaagcacggatcaaagagagatgccgaagctgagtacagatatagcgagagcaagcgttgataagagggagagaacgagaagaagcgttgatgggactgagaaaccgagtaattccgcggaacagcaactagtacaaccagagaaaggaaggaatagcattgacaggtttggggagatgataagatcagtaggattttgcaacatagattgtttcaagcctacagcaacagctaagtga

SEQ ID NO: 28962 - protein, 377 aa, Arabidopsis thaliana
  misc_feature (1)..(377): Ceres Seq. ID no. 3096144
MGAVTSSMAAKFAFFPPNPPSYGVEVVEGKLRLIGVENVKENVEVLKLKTKRGNQVVAAYIKNPTASLTLLYSHGNAADLGQMFELFSELSLHLRVNLIGYDYSGYGRSSGKPSEQNTYSDIEAVYRCLEEKYGVKEQDVILYGQSVGSGPTLELASRLPNLRAVVLHSAIASGLRVMYPVKRTYWFDIYKNVEKISFVKCPVLVIHGTSDDVVNWSHGKQLFELCKEKYEPLWIKGGNHCDLELYPQYIKHLRKFVSAIEKSPILRNGPVPLTEKARSSTDIREPARPSTDQRDKSRTSTDQREMPKLSTDIARASVDKRERTRRSVDGTEKPSNSAEQQLVQPEKGRNSIDRFGEMIRSVGFCNIDCFKPTATAK

SEQ ID NO: 28963 - protein, 370 aa, Arabidopsis thaliana
  misc_feature (1)..(370): Ceres Seq. ID no. 3096145
MAAKFAFFPPNPPSYGVEVVEGKLRLIGVENVKENVEVLKLKTKRGNQVVAAYIKNPTASLTLLYSHGNAADLGQMFELFSELSLHLRVNLIGYDYSGYGRSSGKPSEQNTYSDIEAVYRCLEEKYGVKEQDVILYGQSVGSGPTLELASRLPNLRAVVLHSAIASGLRVMYPVKRTYWFDIYKNVEKISFVKCPVLVIHGTSDDVVNWSHGKQLFELCKEKYEPLWIKGGNHCDLELYPQYIKHLRKFVSAIEKSPILRNGPVPLTEKARSSTDIREPARPSTDQRDKSRTSTDQREMPKLSTDIARASVDKRERTRRSVDGTEKPSNSAEQQLVQPEKGRNSIDRFGEMIRSVGFCNIDCFKPTATAK

SEQ ID NO: 28964 - protein, 295 aa, Arabidopsis thaliana
  misc_feature (1)..(295): Ceres Seq. ID no. 3096146
MFELFSELSLHLRVNLIGYDYSGYGRSSGKPSEQNTYSDIEAVYRCLEEKYGVKEQDVILYGQSVGSGPTLELASRLPNLRAVVLHSAIASGLRVMYPVKRTYWFDIYKNVEKISFVKCPVLVIHGTSDDVVNWSHGKQLFELCKEKYEPLWIKGGNHCDLELYPQYIKHLRKFVSAIEKSPILRNGPVPLTEKARSSTDIREPARPSTDQRDKSRTSTDQREMPKLSTDIARASVDKRERTRRSVDGTEKPSNSAEQQLVQPEKGRNSIDRFGEMIRSVGFCNIDCFKPTATAK

SEQ ID NO: 28965 - DNA, 2340 bp, Arabidopsis thaliana
  misc_feature (1)..(2340): Ceres Seq. ID no. 3097868
atggagctatctctagtcagattatggaacacttgttttcctagtttcttctacatttcgactgtgctttttctgctcaccggtggaggagtttactctcactctgaatatttgattggattgggaagctatgacattactggcccggctgctgatgttaatatgatgggttatgctaacatggagcaagtagcatctggtattcacttcaggctccgtgctaggactttcattgtctctgagccccaagggaagcgggttgtgtttgttaacctcgatgcttgcatggcttcacaaattgtaaaactaaaagtgatcgagagactcaaggcacgatatggggacttatatactgaacagaatgttggcatcagtggtattcatacccatgctggtccaggggggtatcttcagtatgtggtgtatatcgtaacatcacttggatttgttcgtcagtcgtttgatgcccttgtcgatggaattgagaacagtatcatacaagctcacgaaaatcttcgtcctggatcaatttttctcaataatggggaactcttggatgctggtgtaaaccgcagtccaagtgcatatcttaataatccttcaaaagaaaggagtaaacacaagtacaacgttgataaggaaatgactctcttaaagtttgtggatgatcaatggggtccagtaggtagtttcaattggtttgctacccatggaacttccatgagtcgtacaaactctttgatcagtggggacaacaagggcgctgcatcacgatttatggaggattggtatgaacagaatactgctgaaagatcttactctgaagagtttatttcagatgagatacctagaagagtttcaagcctaatcgagaatcatcaggacagtcatcacgagttgctagagcttgcatcttactttgagtcacaacctggtaagcctgtaactagaatttcaagttctgcaaggcgggtgaggagtgctctgaggaaggcggataagcctggcttcgtttctgctttctgtcaaacgaactgtggagatgttagcccaaatgtgcttggagccttttgcctggacactggtcttccttgtgatttcaatcacagtacatgtggtgggaaaaatgagatgtgctatgggcgtggaccaggctatcctgatgaatttgaaagtacacgtataattggtgagagacaattcaagatggctttggaacttttcaacaaagcatctgaacagctacaagggaaggttgattaccgccatgtttatgttgacttttcacagctcaatgtgacacttcctaaaaaagatgggaaatcagaagttgtaaaaacatgtcctgcggcaatgggctttgctttcgctgctgggaccacagatggaccaggagcatttgattttacacaaggagatgataaggggaaccctttctggagattggtgagaaatgttcttaaaacaccggacaagaaacaaatcgattgtcactatccaaaacctatcttgcttgacactggagaaatgacaaagccatatgactgggctccgtcaattctttcattgcaagttctacgtattggacaacttttcattctcagcgttcctggagaatttacaactatggctggaaggcgtctccgctatgcagtgaaaacacaacttaaaaacagtggtaataaagatttgagcggtgagattcacgttgtgatagctggattggctaatggttactcacagtatgtgactacttttgaggagtatcaagtgcagagatacgagggtgcatctacgttatatgggccacacaccctcagtggctacattcaagagttcaagaaactctccaaatctctcgtccttgatatgcctgttcaaccggggcctcaaccgccggatctccttgacaagcaactaagcttcctcacaccagtcatgatggacacaactcctagcggagacagtttcggggatgttatttcggatgttcctaaaaacttgtctttgaagagaggaaacggccaggtgaccgttgtattccggtcagcctgccctagaaacgatctactgacagaagggacgtttacactggtggagagactagagcagaaggacaagacttggaccccggtttatgacgacgatgatctatgtctgaggttcaagtggtcgaggcataaaaagctgagctcccggagtcaggccactgtggaatggagaattcccgagtctgcatcaccaggggtttataggatcacccattttggtgctgcaaagaagctttttgggtcagtccatcatttcacaggctcttctagtgctttcgttgtaacataa

SEQ ID NO: 28966 - protein, 779 aa, Arabidopsis thaliana
  misc_feature (1)..(779): Ceres Seq. ID no. 3097869
MELSLVRLWNTCFPSFFYISTVLFLLTGGGVYSHSEYLIGLGSYDITGPAADVNMMGYANMEQVASGIHFRLRARTFIVSEPQGKRVVFVNLDACMASQIVKLKVIERLKARYGDLYTEQNVGISGIHTHAGPGGYLQYVVYIVTSLGFVRQSFDALVDGIENSIIQAHENLRPGSIFLNNGELLDAGVNRSPSAYLNNPSKERSKHKYNVDKEMTLLKFVDDQWGPVGSFNWFATHGTSMSRTNSLISGDNKGAASRFMEDWYEQNTAERSYSEEFISDEIPRRVSSLIENHQDSHHELLELASYFESQPGKPVTRISSSARRVRSALRKADKPGFVSAFCQTNCGDVSPNVLGAFCLDTGLPCDFNHSTCGGKNEMCYGRGPGYPDEFESTRIIGERQFKMALELFNKASEQLQGKVDYRHVYVDFSQLNVTLPKKDGKSEVVKTCPAAMGFAFAAGTTDGPGAFDFTQGDDKGNPFWRLVRNVLKTPDKKQIDCHYPKPILLDTGEMTKPYDWAPSILSLQVLRIGQLFILSVPGEFTTMAGRRLRYAVKTQLKNSGNKDLSGEIHVVIAGLANGYSQYVTTFEEYQVQRYEGASTLYGPHTLSGYIQEFKKLSKSLVLDMPVQPGPQPPDLLDKQLSFLTPVMMDTTPSGDSFGDVISDVPKNLSLKRGNGQVTVVFRSACPRNDLLTEGTFTLVERLEQKDKTWTPVYDDDDLCLRFKWSRHKKLSSRSQATVEWRIPESASPGVYRITHFGAAKKLFGSVHHFTGSSSAFVVT

SEQ ID NO: 28967 - protein, 725 aa, Arabidopsis thaliana
  misc_feature (1)..(725): Ceres Seq. ID no. 3097870
MMGYANMEQVASGIHFRLRARTFIVSEPQGKRVVFVNLDACMASQIVKLKVIERLKARYGDLYTEQNVGISGIHTHAGPGGYLQYVVYIVTSLGFVRQSFDALVDGIENSIIQAHENLRPGSIFLNNGELLDAGVNRSPSAYLNNPSKERSKHKYNVDKEMTLLKFVDDQWGPVGSFNWFATHGTSMSRTNSLISGDNKGAASRFMEDWYEQNTAERSYSEEFISDEIPRRVSSLIENHQDSHHELLELASYFESQPGKPVTRISSSARRVRSALRKADKPGFVSAFCQTNCGDVSPNVLGAFCLDTGLPCDFNHSTCGGKNEMCYGRGPGYPDEFESTRIIGERQFKMALELFNKASEQLQGKVDYRHVYVDFSQLNVTLPKKDGKSEVVKTCPAAMGFAFAAGTTDGPGAFDFTQGDDKGNPFWRLVRNVLKTPDKKQIDCHYPKPILLDTGEMTKPYDWAPSILSLQVLRIGQLFILSVPGEFTTMAGRRLRYAVKTQLKNSGNKDLSGEIHVVIAGLANGYSQYVTTFEEYQVQRYEGASTLYGPHTLSGYIQEFKKLSKSLVLDMPVQPGPQPPDLLDKQLSFLTPVMMDTTPSGDSFGDVISDVPKNLSLKRGNGQVTVVFRSACPRNDLLTEGTFTLVERLEQKDKTWTPVYDDDDLCLRFKWSRHKKLSSRSQATVEWRIPESASPGVYRITHFGAAKKLFGSVHHFTGSSSAFVVT

SEQ ID NO: 28968 - protein, 724 aa, Arabidopsis thaliana
  misc_feature (1)..(724): Ceres Seq. ID no. 3097871
MGYANMEQVASGIHFRLRARTFIVSEPQGKRVVFVNLDACMASQIVKLKVIERLKARYGDLYTEQNVGISGIHTHAGPGGYLQYVVYIVTSLGFVRQSFDALVDGIENSIIQAHENLRPGSIFLNNGELLDAGVNRSPSAYLNNPSKERSKHKYNVDKEMTLLKFVDDQWGPVGSFNWFATHGTSMSRTNSLISGDNKGAASRFMEDWYEQNTAERSYSEEFISDEIPRRVSSLIENHQDSHHELLELASYFESQPGKPVTRISSSARRVRSALRKADKPGFVSAFCQTNCGDVSPNVLGAFCLDTGLPCDFNHSTCGGKNEMCYGRGPGYPDEFESTRIIGERQFKMALELFNKASEQLQGKVDYRHVYVDFSQLNVTLPKKDGKSEVVKTCPAAMGFAFAAGTTDGPGAFDFTQGDDKGNPFWRLVRNVLKTPDKKQIDCHYPKPILLDTGEMTKPYDWAPSILSLQVLRIGQLFILSVPGEFTTMAGRRLRYAVKTQLKNSGNKDLSGEIHVVIAGLANGYSQYVTTFEEYQVQRYEGASTLYGPHTLSGYIQEFKKLSKSLVLDMPVQPGPQPPDLLDKQLSFLTPVMMDTTPSGDSFGDVISDVPKNLSLKRGNGQVTVVFRSACPRNDLLTEGTFTLVERLEQKDKTWTPVYDDDDLCLRFKWSRHKKLSSRSQATVEWRIPESASPGVYRITHFGAAKKLFGSVHHFTGSSSAFVVT

SEQ ID NO: 28969 - DNA, 3651 bp, Arabidopsis thaliana
  misc_feature (1)..(3651): Ceres Seq. ID no. 3097953
atggcaagaggtagaataaggtcaaagctgagacttagccatatatacacatttggatgtcttaggccaagtgcagatgaaggtcaagatcctcacccaatccaaggtccaggatttagcaggactgtgtactgtaaccagcctcatatgcacaagaagaagcctttgaaataccgttctaactatgtttctaccactaggtacaatttgatcaccttctttccaaagtgcctctacgaacagtttcaccgtgctgccaatttctacttcttggtagctgccattctttccgtgttccctctttccccgttcaacaaatggagtatgattgctccactggtgtttgttgttgggctcagtatgttaaaggaggctcttgaagattggagtaggtttatgcaagatgtgaagatcaatgcgagtaaagtttatgttcataaaagcgatggcgagtttcgtcgcagaaagtggaaaaagattagtgttggagatattgtaaaagtggagaaagacggctttttccctgctgatttgctcttgttgtcgtccagttatgaggatgggatttgttatgtagagactatgaatttagatggcgagacaaacttgaaagtgaaaaggtccttggaagtaacattatcgttggatgactacgactctttcaaggatttcacggggataataagatgcgaagatccaaaccccagcctttacacatttgttggcaatcttgagtatgagcgccagatatttccactggatccaagtcagattctgctgagagattcaaagcttaggaatacaccttatgtttatggagtggtggtattcacagggcatgatactaaggtgatgcagaactcaacaaaatcgccttcaaaaaggagcagaatcgaaaagacgatggactatataatctacacgcttcttgtcctacttattttgatctcttgcataagttcatcgggatttgcttgggagacaaagtttcacatgccgaaatggtggtacttaagacctgaggagcctgagaacttaaccaatccaagtaatcctgtttatgctggatttgtccatctgatcactgctctgctgctgtacggatatttgataccgatctctctttatgtctccattgaggttgtgaaagtgttgcaagcatctttcatcaataaagatctacacatgtatgatagtgagagtggggttccagcccacgcacgcacatcgaatctaaacgaagagctaggacaagtggatactatcctttctgataaaacgggaactttgacttgtaatcagatggattttctgaaatgttcaattgctggcacttcttatggtgtacgttcaagcgaagtcgaagttgctgctgcacagcaaatggctgttgatcttgatgagcatggagaagtatccagtaggacaagtactccaagggctcaggctcgagatattgaggtagaaagtagcattactccaagaattcctataaaggggtttggtttcgaggatattaggctaatggatgggaattggttgagagagccacatacagatgacattttgctgttctttcgcatattagctatatgtcacacagctattcccgagcttaacgaggagactggcaagtacacttatgaagcagagtcaccagatgaagcttcttttcttactgctgctagtgagtttggttttgtgttcttcaagagaacccaatcaagcgtttatgttcatgaaaggctatctcattcagggcaaactattgaaagggagtataaagttctgaatttgttggacttcactagcaaacgaaagcgaatgtcagtagttgtacgtgacgaggaagggcagattcttctgctatgcaaaggagctgacagtatcatttttgagcgactggctaaaaatgggaaagtatacttgggacctaccactaagcatttaaatgaatatggagaagcaggactccgtactcttgcactttcatacagaaagcttgacgaggaagaatattcagcttggaacgctgagtttcacaaggccaaaacttctataggttcggatagagatgagttgcttgagaggatatcggatatgatcgaaaaagaccttattcttgtaggtgcaactgctgtggaggacaaactccagaaaggggtgccccaatgcattgataaacttgcccaagctggcctcaaattatgggttttaactggggataagatggaaacagcaatcaacatcggatactcgtgtagtttacttcggcaaggcatgaaacagatatgcataactgtggtgaactcagaaggagcatctcaagatgcaaaagctgtgaaggacaatattttgaatcaaatcacaaaagctgtgcaaatggtgaagctggagaaagatccacacgcggcatttgctttgatcattgacgggaaaaccctaacgtatgcattggaggatgagatgaagtatcagtttcttgctttggcggtcgattgtgcctcagtcatttgctgtcgtgtgtctccaaagcagaaagctttggtaacgaggttagttaaagagggaaccgggaaaatcacattggcaataggtgatggtgcgaatgatgttggaatgattcaagaagctgacattggtgttggaattagtggggttgaaggaatgcaggctgtaatggcaagtgatttttctatcgcccagttccggtttcttgaaagattgctcgtcgttcatggacactggtgctacaaaagaatagctcaaatgatctgctatttcttttacaagaacatagcatttggtctcactctcttctattttgaggctttcaccgggttttctgggcaatcagtatataatgactactacctattactcttcaacgtcgtccttacttcattgccagtgattgcccttggagtctttgaacaagatgtttcctctgagatctgtttacagtttccagcgttgtaccaacaagggaagaaaaatctcttctttgactggtatagaatacttgggtggatgggaaatggtgtgtactcctcccttgtaatattcttcctcaacattggaatcatttatgagcaagctttcagagtcagtggccaaactgctgacatggatgctgttggtactaccatgtttacctgcattatttgggctgtgaatgtgcaaatcgcattgacggtgagtcacttcacttggatccaacacgtcttgatctggggaagcattggtttatggtatctgtttgttgcgctctacgggatgatgcctccaagtctttcaggcaacatctatagaattctagtagagatacttgctcctgcacccatttattggatagccacatttttggtcacagtgactacagttctcccttactttgcccacatatcattccaaaggttcttacatccgttggatcatcacatcattcaagagataaaatactacaagagagatgtggaggatagaagaatgtggacacgagagcgtacaaaagcacgggagaagactaagattggattcacagctagagttgacgcgaaaatcagacacctacgatcaaagctcaataagaaacagtcaaatatgtcacaattttcaactcaagatacaatgtccccaagatcagtatag

SEQ ID NO: 28970 - protein, 1216 aa, Arabidopsis thaliana
  misc_feature (1)..(1216): Ceres Seq. ID no. 3097954
MARGRIRSKLRLSHIYTFGCLRPSADEGQDPHPIQGPGFSRTVYCNQPHMHKKKPLKYRSNYVSTTRYNLITFFPKCLYEQFHRAANFYFLVAAILSVFPLSPFNKWSMIAPLVFVVGLSMLKEALEDWSRFMQDVKINASKVYVHKSDGEFRRRKWKKISVGDIVKVEKDGFFPADLLLLSSSYEDGICYVETMNLDGETNLKVKRSLEVTLSLDDYDSFKDFTGIIRCEDPNPSLYTFVGNLEYERQIFPLDPSQILLRDSKLRNTPYVYGVVVFTGHDTKVMQNSTKSPSKRSRIEKTMDYIIYTLLVLLILISCISSSGFAWETKFHMPKWWYLRPEEPENLTNPSNPVYAGFVHLITALLLYGYLIPISLYVSIEVVKVLQASFINKDLHMYDSESGVPAHARTSNLNEELGQVDTILSDKTGTLTCNQMDFLKCSIAGTSYGVRSSEVEVAAAQQMAVDLDEHGEVSSRTSTPRAQARDIEVESSITPRIPIKGFGFEDIRLMDGNWLREPHTDDILLFFRILAICHTAIPELNEETGKYTYEAESPDEASFLTAASEFGFVFFKRTQSSVYVHERLSHSGQTIEREYKVLNLLDFTSKRKRMSVVVRDEEGQILLLCKGADSIIFERLAKNGKVYLGPTTKHLNEYGEAGLRTLALSYRKLDEEEYSAWNAEFHKAKTSIGSDRDELLERISDMIEKDLILVGATAVEDKLQKGVPQCIDKLAQAGLKLWVLTGDKMETAINIGYSCSLLRQGMKQICITVVNSEGASQDAKAVKDNILNQITKAVQMVKLEKDPHAAFALIIDGKTLTYALEDEMKYQFLALAVDCASVICCRVSPKQKALVTRLVKEGTGKITLAIGDGANDVGMIQEADIGVGISGVEGMQAVMASDFSIAQFRFLERLLVVHGHWCYKRIAQMICYFFYKNIAFGLTLFYFEAFTGFSGQSVYNDYYLLLFNVVLTSLPVIALGVFEQDVSSEICLQFPALYQQGKKNLFFDWYRILGWMGNGVYSSLVIFFLNIGIIYEQAFRVSGQTADMDAVGTTMFTCIIWAVNVQIALTVSHFTWIQHVLIWGSIGLWYLFVALYGMMPPSLSGNIYRILVEILAPAPIYWIATFLVTVTTVLPYFAHISFQRFLHPLDHHIIQEIKYYKRDVEDRRMWTRERTKAREKTKIGFTARVDAKIRHLRSKLNKKQSNMSQFSTQDTMSPRSV

SEQ ID NO: 28971 - protein, 1167 aa, Arabidopsis thaliana
  misc_feature (1)..(1167): Ceres Seq. ID no. 3097956
MHKKKPLKYRSNYVSTTRYNLITFFPKCLYEQFHRAANFYFLVAAILSVFPLSPFNKWSMIAPLVFVVGLSMLKEALEDWSRFMQDVKINASKVYVHKSDGEFRRRKWKKISVGDIVKVEKDGFFPADLLLLSSSYEDGICYVETMNLDGETNLKVKRSLEVTLSLDDYDSFKDFTGIIRCEDPNPSLYTFVGNLEYERQIFPLDPSQILLRDSKLRNTPYVYGVVVFTGHDTKVMQNSTKSPSKRSRIEKTMDYIIYTLLVLLILISCISSSGFAWETKFHMPKWWYLRPEEPENLTNPSNPVYAGFVHLITALLLYGYLIPISLYVSIEVVKVLQASFINKDLHMYDSESGVPAHARTSNLNEELGQVDTILSDKTGTLTCNQMDFLKCSIAGTSYGVRSSEVEVAAAQQMAVDLDEHGEVSSRTSTPRAQARDIEVESSITPRIPIKGFGFEDIRLMDGNWLREPHTDDILLFFRILAICHTAIPELNEETGKYTYEAESPDEASFLTAASEFGFVFFKRTQSSVYVHERLSHSGQTIEREYKVLNLLDFTSKRKRMSVVVRDEEGQILLLCKGADSIIFERLAKNGKVYLGPTTKHLNEYGEAGLRTLALSYRKLDEEEYSAWNAEFHKAKTSIGSDRDELLERISDMIEKDLILVGATAVEDKLQKGVPQCIDKLAQAGLKLWVLTGDKMETAINIGYSCSLLRQGMKQICITVVNSEGASQDAKAVKDNILNQITKAVQMVKLEKDPHAAFALIIDGKTLTYALEDEMKYQFLALAVDCASVICCRVSPKQKALVTRLVKEGTGKITLAIGDGANDVGMIQEADIGVGISGVEGMQAVMASDFSIAQFRFLERLLVVHGHWCYKRIAQMICYFFYKNIAFGLTLFYFEAFTGFSGQSVYNDYYLLLFNVVLTSLPVIALGVFEQDVSSEICLQFPALYQQGKKNLFFDWYRILGWMGNGVYSSLVIFFLNIGIIYEQAFRVSGQTADMDAVGTTMFTCIIWAVNVQIALTVSHFTWIQHVLIWGSIGLWYLFVALYGMMPPSLSGNIYRILVEILAPAPIYWIATFLVTVTTVLPYFAHISFQRFLHPLDHHIIQEIKYYKRDVEDRRMWTRERTKAREKTKIGFTARVDAKIRHLRSKLNKKQSNMSQFSTQDTMSPRSV

SEQ ID NO: 28972 - protein, 1108 aa, Arabidopsis thaliana
  misc_feature (1)..(1108): Ceres Seq. ID no. 3097957
MIAPLVFVVGLSMLKEALEDWSRFMQDVKINASKVYVHKSDGEFRRRKWKKISVGDIVKVEKDGFFPADLLLLSSSYEDGICYVETMNLDGETNLKVKRSLEVTLSLDDYDSFKDFTGIIRCEDPNPSLYTFVGNLEYERQIFPLDPSQILLRDSKLRNTPYVYGVVVFTGHDTKVMQNSTKSPSKRSRIEKTMDYIIYTLLVLLILISCISSSGFAWETKFHMPKWWYLRPEEPENLTNPSNPVYAGFVHLITALLLYGYLIPISLYVSIEVVKVLQASFINKDLHMYDSESGVPAHARTSNLNEELGQVDTILSDKTGTLTCNQMDFLKCSIAGTSYGVRSSEVEVAAAQQMAVDLDEHGEVSSRTSTPRAQARDIEVESSITPRIPIKGFGFEDIRLMDGNWLREPHTDDILLFFRILAICHTAIPELNEETGKYTYEAESPDEASFLTAASEFGFVFFKRTQSSVYVHERLSHSGQTIEREYKVLNLLDFTSKRKRMSVVVRDEEGQILLLCKGADSIIFERLAKNGKVYLGPTTKHLNEYGEAGLRTLALSYRKLDEEEYSAWNAEFHKAKTSIGSDRDELLERISDMIEKDLILVGATAVEDKLQKGVPQCIDKLAQAGLKLWVLTGDKMETAINIGYSCSLLRQGMKQICITVVNSEGASQDAKAVKDNILNQITKAVQMVKLEKDPHAAFALIIDGKTLTYALEDEMKYQFLALAVDCASVICCRVSPKQKALVTRLVKEGTGKITLAIGDGANDVGMIQEADIGVGISGVEGMQAVMASDFSIAQFRFLERLLVVHGHWCYKRIAQMICYFFYKNIAFGLTLFYFEAFTGFSGQSVYNDYYLLLFNVVLTSLPVIALGVFEQDVSSEICLQFPALYQQGKKNLFFDWYRILGWMGNGVYSSLVIFFLNIGIIYEQAFRVSGQTADMDAVGTTMFTCIIWAVNVQIALTVSHFTWIQHVLIWGSIGLWYLFVALYGMMPPSLSGNIYRILVEILAPAPIYWIATFLVTVTTVLPYFAHISFQRFLHPLDHHIIQEIKYYKRDVEDRRMWTRERTKAREKTKIGFTARVDAKIRHLRSKLNKKQSNMSQFSTQDTMSPRSV

SEQ ID NO: 28973 - DNA, 1593 bp, Arabidopsis thaliana
  misc_feature (1)..(1593): Ceres Seq. ID no. 3098117
atggcttactcaaaccttgagcttttgagtctgcattatcttcttcttgtttcttcacaatgctcacttctaattctaaagagaaggaaaggtctctctccttcttatgttgctgagagcaatagtccaaatattcatcagagtattgagacgatggattttggaagcaaccaaacaccgataagtagagaattgacttctttctatacaaaggagtctgataatgatcatgttagagatccttttttgtggaatggcattggaggaagtgatgtagacgtcaaccatcctcctccattcttaccttcatggcatcaccatccgtgtgatagtttttcttttcctcctcctccaccacctggaatgagaaggcctggtccacgcccttgtccggtatgctacctacctccagaagaggccttagcacatatgccaaagtatccatttgaatctcccttgctcaagaatttgacatatatacgtgaagagagtcctgtaaaacctgaagaaagtgaaggaggctctgaattcggaggttatccttctctcgagcataggactaactcttttgacataaaagagtccatgacagtgcattgcgggtttattaaaggaacaaaaccgggccaccaaactggatttgacatcgatgaggatatccttcatgagttggaccagtcccatgatgtgattgtcgcgtcagcgatatttggaaagtatgacataattcaagaaccggtgaacatcagtgaaatggcgaggaagaacatcccattctacatgtttgttgatgaagaaacacatttataccttaagaacacgtcgagttatacagacgataacaagagagtgggattgtggaggatcattgttgtacataatgtcccttataccgatgcacggcgtaatggaaaggttccgaagcttttattgcatagattattcccaaatgtccggtactctatatgggttgatgcaaagctccagcttgttgtagatccatatcaaatccttgaaaggttcttgtggagaacgaattctagttttgcaatctcgagacattaccgacgttttgatgtgtttgtagaggctgaagcgaataaggccgcaagaaagtacgacaatgcctcaatagattaccaagtagagttctacaagaaggaaggtttaacaccttatacggaggctaagcttccaataacaagtgatgtccctgaaggttgtaccatcataagagaacacataccgatcacaaaccttttcacatgtgtatggttcaacgaggtagatcggtttacttcaagagatcagctaagctttgcaattgcgagagacaaaataagagagaaagttgattggagcatcaatatgttcttggactgtgaaagacgcaactttgtgaaacaggtatatcatagagacgttttgctgaccatgaaacctcctcgagcttcttctagagttcttcccgagccactggttttaccacgtggaagattagccggtggtagagccacgccgggtaagaagactccgggacaacgcgggaaaaggcgtcaccggaaagtttcagccggtggcagaaacatgtga

SEQ ID NO: 28974 - protein, 530 aa, Arabidopsis thaliana
  misc_feature (1)..(530): Ceres Seq. ID no. 3098118
MAYSNLELLSLHYLLLVSSQCSLLILKRRKGLSPSYVAESNSPNIHQSIETMDFGSNQTPISRELTSFYTKESDNDHVRDPFLWNGIGGSDVDVNHPPPFLPSWHHHPCDSFSFPPPPPPGMRRPGPRPCPVCYLPPEEALAHMPKYPFESPLLKNLTYIREESPVKPEESEGGSEFGGYPSLEHRTNSFDIKESMTVHCGFIKGTKPGHQTGFDIDEDILHELDQSHDVIVASAIFGKYDIIQEPVNISEMARKNIPFYMFVDEETHLYLKNTSSYTDDNKRVGLWRIIVVHNVPYTDARRNGKVPKLLLHRLFPNVRYSIWVDAKLQLVVDPYQILERFLWRTNSSFAISRHYRRFDVFVEAEANKAARKYDNASIDYQVEFYKKEGLTPYTEAKLPITSDVPEGCTIIREHIPITNLFTCVWFNEVDRFTSRDQLSFAIARDKIREKVDWSINMFLDCERRNFVKQVYHRDVLLTMKPPRASSRVLPEPLVLPRGRLAGGRATPGKKTPGQRGKRRHRKVSAGGRNM

SEQ ID NO: 28975 - protein, 479 aa, Arabidopsis thaliana
  misc_feature (1)..(479): Ceres Seq. ID no. 3098119
MDFGSNQTPISRELTSFYTKESDNDHVRDPFLWNGIGGSDVDVNHPPPFLPSWHHHPCDSFSFPPPPPPGMRRPGPRPCPVCYLPPEEALAHMPKYPFESPLLKNLTYIREESPVKPEESEGGSEFGGYPSLEHRTNSFDIKESMTVHCGFIKGTKPGHQTGFDIDEDILHELDQSHDVIVASAIFGKYDIIQEPVNISEMARKNIPFYMFVDEETHLYLKNTSSYTDDNKRVGLWRIIVVHNVPYTDARRNGKVPKLLLHRLFPNVRYSIWVDAKLQLVVDPYQILERFLWRTNSSFAISRHYRRFDVFVEAEANKAARKYDNASIDYQVEFYKKEGLTPYTEAKLPITSDVPEGCTIIREHIPITNLFTCVWFNEVDRFTSRDQLSFAIARDKIREKVDWSINMFLDCERRNFVKQVYHRDVLLTMKPPRASSRVLPEPLVLPRGRLAGGRATPGKKTPGQRGKRRHRKVSAGGRNM

SEQ ID NO: 28976 - protein, 409 aa, Arabidopsis thaliana
  misc_feature (1)..(409): Ceres Seq. ID no. 3098120
MRRPGPRPCPVCYLPPEEALAHMPKYPFESPLLKNLTYIREESPVKPEESEGGSEFGGYPSLEHRTNSFDIKESMTVHCGFIKGTKPGHQTGFDIDEDILHELDQSHDVIVASAIFGKYDIIQEPVNISEMARKNIPFYMFVDEETHLYLKNTSSYTDDNKRVGLWRIIVVHNVPYTDARRNGKVPKLLLHRLFPNVRYSIWVDAKLQLVVDPYQILERFLWRTNSSFAISRHYRRFDVFVEAEANKAARKYDNASIDYQVEFYKKEGLTPYTEAKLPITSDVPEGCTIIREHIPITNLFTCVWFNEVDRFTSRDQLSFAIARDKIREKVDWSINMFLDCERRNFVKQVYHRDVLLTMKPPRASSRVLPEPLVLPRGRLAGGRATPGKKTPGQRGKRRHRKVSAGGRNM

SEQ ID NO: 28977 - DNA, 714 bp, Arabidopsis thaliana
  misc_feature (1)..(714): Ceres Seq. ID no. 3098647
atgaacgaagagatgagcggtgagtcgccggagaataacaaacacgtaaagaaaccgacgatgccggaaaagatcgattacgtgttcaaggtggtggtcattggagattctgctgtcgggaaaacgcagctcctctcacgttttacacacaacgagttctgttatgattcaaaatcaaccattggtgtcgagtttcagacacggaccatcactcttcggggcaaactcgtcaaagctcagatctgggacaccgccggtcaagagagatacagagcggtgactagcgcctactacagaggtgcgttaggtgcgatggtggtttacgacattaccaaacgcctctcattcgaccacgttgcacgttgggtcgaggaattacgtgctcacgccgatgattccgccgtgatcatgctcgtcggaaacaaagccgatctctccgttggtaaacgtgccgttcctacggaggatgcagtcgaattcgccgagactcaacggctttttttctcggaagtctcggctctaagcggcggaaacgtcgacgaagcttttttccgtttactcgaggagattttcagccgcgttgttgtttcgagaaaagctatggaatccgacggtggagccaccgtgaaacttgacggttcgagaattgatgtcatctctggttcggatcttgagactagtaatatcaaggaacaagcttcgtgctcgtgttga

SEQ ID NO: 28978 - protein, 237 aa, Arabidopsis thaliana
  misc_feature (1)..(237): Ceres Seq. ID no. 3098648
MNEEMSGESPENNKHVKKPTMPEKIDYVFKVVVIGDSAVGKTQLLSRFTHNEFCYDSKSTIGVEFQTRTITLRGKLVKAQIWDTAGQERYRAVTSAYYRGALGAMVVYDITKRLSFDHVARWVEELRAHADDSAVIMLVGNKADLSVGKRAVPTEDAVEFAETQRLFFSEVSALSGGNVDEAFFRLLEEIFSRVVVSRKAMESDGGATVKLDGSRIDVISGSDLETSNIKEQASCSC

SEQ ID NO: 28979 - protein, 233 aa, Arabidopsis thaliana
  misc_feature (1)..(233): Ceres Seq. ID no. 3098649
MSGESPENNKHVKKPTMPEKIDYVFKVVVIGDSAVGKTQLLSRFTHNEFCYDSKSTIGVEFQTRTITLRGKLVKAQIWDTAGQERYRAVTSAYYRGALGAMVVYDITKRLSFDHVARWVEELRAHADDSAVIMLVGNKADLSVGKRAVPTEDAVEFAETQRLFFSEVSALSGGNVDEAFFRLLEEIFSRVVVSRKAMESDGGATVKLDGSRIDVISGSDLETSNIKEQASCSC

SEQ ID NO: 28980 - protein, 217 aa, Arabidopsis thaliana
  misc_feature (1)..(217): Ceres Seq. ID no. 3098650
MPEKIDYVFKVVVIGDSAVGKTQLLSRFTHNEFCYDSKSTIGVEFQTRTITLRGKLVKAQIWDTAGQERYRAVTSAYYRGALGAMVVYDITKRLSFDHVARWVEELRAHADDSAVIMLVGNKADLSVGKRAVPTEDAVEFAETQRLFFSEVSALSGGNVDEAFFRLLEEIFSRVVVSRKAMESDGGATVKLDGSRIDVISGSDLETSNIKEQASCSC

SEQ ID NO: 28981 - DNA, 759 bp, Arabidopsis thaliana
  misc_feature (1)..(759): Ceres Seq. ID no. 3440684
atgacgtttgactttagactaaaccgaaggaaaaggtatagtggagttgttgttcttcttacgtactacaattctgataagaatccggtgttacatgaattgaagaagcaagcttctttcttcatcaaggaaaagatcaagactgctcgtcttgctgtaaccgatgttactgcagaagaactattgacagaagaagttacgggcagcgatcactcatccatagactcacgctccatggcggccataacaagagtttcttttgaggttgatcaattccaaagaatcgtgaagattctacgtcaaagaatggtagtgtttgatagaaaggaatggcgcggcatgtgcaacacgttgtcaatgttgaaccacttgttgctcaatggcccactaagtgtattcagtgagtttcaacatgagagagctattattgaagatgctataaagatggagtggattgatgagagagggttcgattgtggtctaaaggttcgaaacatagccgagaaagtactaagattgcttgaagacgacatgtttcttaaagatgagcgagaaagaaaccgtaagcaaagcattggtcggatcacaggatttggaaactcgagttttgtcatacattctgaaacgaacaacggacgagacggctcgttaatgttgagtaaccatcaaacttgtgaaaatgattgtatcgcggatgatcatccattcgtcgaaaatgagcacaagactgctcaactcttgctttcttcttcgacttag

SEQ ID NO: 28982 - protein, 252 aa, Arabidopsis thaliana
  misc_feature (1)..(252): Ceres Seq. ID no. 3440685
MTFDFRLNRRKRYSGVVVLLTYYNSDKNPVLHELKKQASFFIKEKIKTARLAVTDVTAEELLTEEVTGSDHSSIDSRSMAAITRVSFEVDQFQRIVKILRQRMVVFDRKEWRGMCNTLSMLNHLLLNGPLSVFSEFQHERAIIEDAIKMEWIDERGFDCGLKVRNIAEKVLRLLEDDMFLKDERERNRKQSIGRITGFGNSSFVIHSETNNGRDGSLMLSNHQTCENDCIADDHPFVENEHKTAQLLLSSST

SEQ ID NO: 28983 - protein, 174 aa, Arabidopsis thaliana
  misc_feature (1)..(174): Ceres Seq. ID no. 3440686
MAAITRVSFEVDQFQRIVKILRQRMVVFDRKEWRGMCNTLSMLNHLLLNGPLSVFSEFQHERAIIEDAIKMEWIDERGFDCGLKVRNIAEKVLRLLEDDMFLKDERERNRKQSIGRITGFGNSSFVIHSETNNGRDGSLMLSNHQTCENDCIADDHPFVENEHKTAQLLLSSST

SEQ ID NO: 28984 - protein, 150 aa, Arabidopsis thaliana
  misc_feature (1)..(150): Ceres Seq. ID no. 3440687
MVVFDRKEWRGMCNTLSMLNHLLLNGPLSVFSEFQHERAIIEDAIKMEWIDERGFDCGLKVRNIAEKVLRLLEDDMFLKDERERNRKQSIGRITGFGNSSFVIHSETNNGRDGSLMLSNHQTCENDCIADDHPFVENEHKTAQLLLSSST

SEQ ID NO: 28985 - DNA, 1467 bp, Arabidopsis thaliana
  misc_feature (1)..(1467): Ceres Seq. ID no. 3441581
atgggatcccgttttgtttctaacgaacaaaaaccacacgtagtttgcgtgccttacccagctcaaggccacattaaccctatgatgaaagtggctaaactcctccacgtcaaaggcttccacgtcaccttcgtcaacaccgtctacaaccacaaccgtctactccgatcccgtggggccaacgcactcgatggacttccttccttccagttcgagtcaatacctgacggtcttccggagactggcgtggacgccacgcaggacatccctgccctttccgagtccacaacgaaaaactgtctcgttccgttcaagaagcttctccagcggattgtcacgagagaggatgtccctccggtgagctgtattgtatcagatggttcgatgagctttactcttgacgtagcggaagagcttggtgttccggagattcatttttggaccactagtgcttgtggcttcatggcttatctacacttttatctcttcatcgagaagggtttatgtccagtaaaagatgcgagttgcttgacgaaggaatacttggacacagttatagattggataccgtcaatgaacaatgtaaaactaaaagacattcctagttttatacgtaccactaatcctaacgacataatgctcaacttcgttgtccgtgaggcatgtcgaaccaaacgtgcctctgctatcattctgaacacgtttgatgaccttgaacatgacataatccagtctatgcaatccattttaccaccggtttatccaatcggaccgcttcatctcttagtaaacagggagattgaagaagatagtgagattggaaggatgggatcaaatctatggaaagaggagactgagtgcttgggatggcttaatactaagtctcgaaatagcgttgtttatgttaactttgggagcataacaataatgaccacggcacagcttttggagtttgcttggggtttggcggcaacgggaaaggagtttctatgggtgatgcggccggattcagtagccggagaggaggcagtgattccaaaagagtttttagcggagacagctgatcgaagaatgctgacaagttggtgtcctcaggagaaagttctttctcatccggcggtcggagggttcttgacccattgcgggtggaattcgacgttagaaagtctttcatgcggagttccaatggtatgttggccattttttgctgagcaacaaacaaattgtaagttttcttgtgatgaatgggaggttggtattgagatcggtggagatgtcaagaggggagaggttgaggcggtggttagagagctcatggatggagagaaaggaaagaaaatgagagagaaggctgtagagtggcggcgcttggccgagaaagctacaaagcttccgtgtggttcgtcggtgataaattttgagacgattgtcaacaaggttctcttgggaaagatccctaacacgtaa

SEQ ID NO: 28986 - protein, 488 aa, Arabidopsis thaliana
  misc_feature (1)..(488): Ceres Seq. ID no. 3441582
MGSRFVSNEQKPHVVCVPYPAQGHINPMMKVAKLLHVKGFHVTFVNTVYNHNRLLRSRGANALDGLPSFQFESIPDGLPETGVDATQDIPALSESTTKNCLVPFKKLLQRIVTREDVPPVSCIVSDGSMSFTLDVAEELGVPEIHFWTTSACGFMAYLHFYLFIEKGLCPVKDASCLTKEYLDTVIDWIPSMNNVKLKDIPSFIRTTNPNDIMLNFVVREACRTKRASAIILNTFDDLEHDIIQSMQSILPPVYPIGPLHLLVNREIEEDSEIGRMGSNLWKEETECLGWLNTKSRNSVVYVNFGSITIMTTAQLLEFAWGLAATGKEFLWVMRPDSVAGEEAVIPKEFLAETADRRMLTSWCPQEKVLSHPAVGGFLTHCGWNSTLESLSCGVPMVCWPFFAEQQTNCKFSCDEWEVGIEIGGDVKRGEVEAVVRELMDGEKGKKMREKAVEWRRLAEKATKLPCGSSVINFETIVNKVLLGKIPNT

SEQ ID NO: 28987 - protein, 461 aa, Arabidopsis thaliana
  misc_feature (1)..(461): Ceres Seq. ID no. 3441583
MMKVAKLLHVKGFHVTFVNTVYNHNRLLRSRGANALDGLPSFQFESIPDGLPETGVDATQDIPALSESTTKNCLVPFKKLLQRIVTREDVPPVSCIVSDGSMSFTLDVAEELGVPEIHFWTTSACGFMAYLHFYLFIEKGLCPVKDASCLTKEYLDTVIDWIPSMNNVKLKDIPSFIRTTNPNDIMLNFVVREACRTKRASAIILNTFDDLEHDIIQSMQSILPPVYPIGPLHLLVNREIEEDSEIGRMGSNLWKEETECLGWLNTKSRNSVVYVNFGSITIMTTAQLLEFAWGLAATGKEFLWVMRPDSVAGEEAVIPKEFLAETADRRMLTSWCPQEKVLSHPAVGGFLTHCGWNSTLESLSCGVPMVCWPFFAEQQTNCKFSCDEWEVGIEIGGDVKRGEVEAVVRELMDGEKGKKMREKAVEWRRLAEKATKLPCGSSVINFETIVNKVLLGKIPNT

SEQ ID NO: 28988 - protein, 460 aa, Arabidopsis thaliana
  misc_feature (1)..(460): Ceres Seq. ID no. 3441584
MKVAKLLHVKGFHVTFVNTVYNHNRLLRSRGANALDGLPSFQFESIPDGLPETGVDATQDIPALSESTTKNCLVPFKKLLQRIVTREDVPPVSCIVSDGSMSFTLDVAEELGVPEIHFWTTSACGFMAYLHFYLFIEKGLCPVKDASCLTKEYLDTVIDWIPSMNNVKLKDIPSFIRTTNPNDIMLNFVVREACRTKRASAIILNTFDDLEHDIIQSMQSILPPVYPIGPLHLLVNREIEEDSEIGRMGSNLWKEETECLGWLNTKSRNSVVYVNFGSITIMTTAQLLEFAWGLAATGKEFLWVMRPDSVAGEEAVIPKEFLAETADRRMLTSWCPQEKVLSHPAVGGFLTHCGWNSTLESLSCGVPMVCWPFFAEQQTNCKFSCDEWEVGIEIGGDVKRGEVEAVVRELMDGEKGKKMREKAVEWRRLAEKATKLPCGSSVINFETIVNKVLLGKIPNT

SEQ ID NO: 28989 - DNA, 876 bp, Arabidopsis thaliana
  misc_feature (1)..(876): Ceres Seq. ID no. 3441601
atgtctaatacaagctattaccgatcaccgttcggagacacgactcacaccaaagtgtttgtaggaggtttagcatgggagactcccaccgatgaaatgcgccgttactttgatcagttcggagagattcttgaagccgtcatcattaccgataaggctaccggaaaatctaaaggctacggttttgtcacgtttcgagactcggattcagcgacgagagccgtcgctgatccgaatccggtgatcgatggacgaaaggcaaattgcaatattgcgtcttttggacggccccgaccatcgacgcctcgaggacgaggacaaggaggaagccctagtcagtatcaaggcggaggacaatcaagctataccggaatggctgctccggtgcagcaggctgcggctgcccagctcatgtatccgtcatacgggtacacctacaattctgaatatgggtaccaccaagccctatacaacgcacagctccaacaggcacaatactatcaacagcaaatgtacggaggaggaggagcaacatcaccatcatcatccaacatcatgccttccccttattactacctccaagctccaagccctagaccatatcttcatcatcaacaacattatcaatatcaccatcatcagcagcagcagcaacaacaacaacaacgtttaccttctgcttcatcttacctaatttacccatccaatgtcgaggctcctactccatctaatgtccctacttcccaagggccactatcttcttccactgaatcacacgcaccacaacaagtatcagaagaaggtggagaattcgatccaacggatgcacctgaaagtacgactacgaacatcagagacttaacgtcatcttcttga

SEQ ID NO: 28990 - protein, 291 aa, Arabidopsis thaliana
  misc_feature (1)..(291): Ceres Seq. ID no. 3441602
MSNTSYYRSPFGDTTHTKVFVGGLAWETPTDEMRRYFDQFGEILEAVIITDKATGKSKGYGFVTFRDSDSATRAVADPNPVIDGRKANCNIASFGRPRPSTPRGRGQGGSPSQYQGGGQSSYTGMAAPVQQAAAAQLMYPSYGYTYNSEYGYHQALYNAQLQQAQYYQQQMYGGGGATSPSSSNIMPSPYYYLQAPSPRPYLHHQQHYQYHHHQQQQQQQQQRLPSASSYLIYPSNVEAPTPSNVPTSQGPLSSSTESHAPQQVSEEGGEFDPTDAPESTTTNIRDLTSSS

SEQ ID NO: 28991 - protein, 259 aa, Arabidopsis thaliana
  misc_feature (1)..(259): Ceres Seq. ID no. 3441603
MRRYFDQFGEILEAVIITDKATGKSKGYGFVTFRDSDSATRAVADPNPVIDGRKANCNIASFGRPRPSTPRGRGQGGSPSQYQGGGQSSYTGMAAPVQQAAAAQLMYPSYGYTYNSEYGYHQALYNAQLQQAQYYQQQMYGGGGATSPSSSNIMPSPYYYLQAPSPRPYLHHQQHYQYHHHQQQQQQQQQRLPSASSYLIYPSNVEAPTPSNVPTSQGPLSSSTESHAPQQVSEEGGEFDPTDAPESTTTNIRDLTSSS

SEQ ID NO: 28992 - protein, 167 aa, Arabidopsis thaliana
  misc_feature (1)..(167): Ceres Seq. ID no. 3441604
MAAPVQQAAAAQLMYPSYGYTYNSEYGYHQALYNAQLQQAQYYQQQMYGGGGATSPSSSNIMPSPYYYLQAPSPRPYLHHQQHYQYHHHQQQQQQQQQRLPSASSYLIYPSNVEAPTPSNVPTSQGPLSSSTESHAPQQVSEEGGEFDPTDAPESTTTNIRDLTSSS

SEQ ID NO: 28993 - DNA, 798 bp, Arabidopsis thaliana
  misc_feature (1)..(798): Ceres Seq. ID no. 3442135
atgaagcgtgggaaaggcgagaaaaaggcaacaaagagccgcgatggcagcggtcaagtagttccgctcactgaaccagtggttacagctacgggtatggttggaacaagatcatggataggagggctcttcacacgctccaatagacgtcaagacaaggcagtcgactacactttgtctcctcttcaggaggaaagacttcaaaggctgcaagatcgtatggttgtacctttcgacgagacacgtcctgatcatcaggaatcacttaaagcattgtggaacgtcgcgtttccgaatgttcatctcacgggtttagtaacagaacaatggaaagaaatgggatggcaaggtcccaatccatctaccgatttcaggggttgcggatttatcgctctagaaaatttactattttctgcaagaacttatccggtttgtttccggaggctattgttaaaacaaagaggcgaccgggcaaagtgggagtacccttttgcagtggccggaatcaacatctccttcatgttgatccaaatgctcgatttacaaaataatccaaagccaaaatgtcttccaggaatgaatttcctcaaactcttagaagaagacgagagggcattcgatgtactatactgtatagctttcgcgatgatggatgctcaatggcttgcaatgcacgcttcttacatggaattcaatgaagtattacaagcaactcggaatcagctggagagagagctttctttggatgatattcatcggattcaagatcttcctgcctacaatctcttgttccaatag

SEQ ID NO: 28994 - protein, 265 aa, Arabidopsis thaliana
  misc_feature (1)..(265): Ceres Seq. ID no. 3442136
MKRGKGEKKATKSRDGSGQVVPLTEPVVTATGMVGTRSWIGGLFTRSNRRQDKAVDYTLSPLQEERLQRLQDRMVVPFDETRPDHQESLKALWNVAFPNVHLTGLVTEQWKEMGWQGPNPSTDFRGCGFIALENLLFSARTYPVCFRRLLLKQRGDRAKWEYPFAVAGINISFMLIQMLDLQNNPKPKCLPGMNFLKLLEEDERAFDVLYCIAFAMMDAQWLAMHASYMEFNEVLQATRNQLERELSLDDIHRIQDLPAYNLLFQ

SEQ ID NO: 28995 - protein, 233 aa, Arabidopsis thaliana
  misc_feature (1)..(233): Ceres Seq. ID no. 3442137
MVGTRSWIGGLFTRSNRRQDKAVDYTLSPLQEERLQRLQDRMVVPFDETRPDHQESLKALWNVAFPNVHLTGLVTEQWKEMGWQGPNPSTDFRGCGFIALENLLFSARTYPVCFRRLLLKQRGDRAKWEYPFAVAGINISFMLIQMLDLQNNPKPKCLPGMNFLKLLEEDERAFDVLYCIAFAMMDAQWLAMHASYMEFNEVLQATRNQLERELSLDDIHRIQDLPAYNLLFQ

SEQ ID NO: 28996 - protein, 192 aa, Arabidopsis thaliana
  misc_feature (1)..(192): Ceres Seq. ID no. 3442138
MVVPFDETRPDHQESLKALWNVAFPNVHLTGLVTEQWKEMGWQGPNPSTDFRGCGFIALENLLFSARTYPVCFRRLLLKQRGDRAKWEYPFAVAGINISFMLIQMLDLQNNPKPKCLPGMNFLKLLEEDERAFDVLYCIAFAMMDAQWLAMHASYMEFNEVLQATRNQLERELSLDDIHRIQDLPAYNLLFQ

SEQ ID NO: 28997 - DNA, 1233 bp, Arabidopsis thaliana
  misc_feature (1)..(1233): Ceres Seq. ID no. 3443382
atgggcaactgcggtactagagacgaggctgccgtcttcactcctcaagctcaagcccaacagctccagaagaagcactcccgatccgtctcagatctgagcgatccatccactcctcgcttccgagacgactctcgcactcctatttcgtatgcccaagtcatcccctttactttgtttgagcttgagaccatcaccaagagcttccgcccagattatatactcggagaaggtggtttcggtaccgtctacaagggttacattgatgacaatctccgcgtcggcctcaagtctctccctgttgccgtcaaggtccttaacaaggagggactccagggtcaccgtgaatggcttacagaggtcaacttcctcggccaactccgtcatcccaacctcgtcaagcttattggttactgctgcgaggacgatcaccgattacttgtttatgagttcatgctgcgaggcagtcttgagaatcacctatttcgaagtaatccccgcacccttctccattttttgaagatgatgattgctcttggagctgcgaaaggccttgctttcctccacaatgctgaaagaccggttatttatagggatttcaagacttccaatatactgcttgactccgactacaccgccaagctttcagattttggcttagctaaagctggaccccagggtgatgaaacccatgtatcaactcgagttatgggtacttatggctatgctgccccagaatatgtgatgactggacacttgacggccagaagtgatgtatacagctttggagttgttcttctagagatgttgacaggaagaaaatcagtggataagacaagacctagcaaagagcagaacttggttgattgggctcggccaaagctgaatgataaaagaaaactgctgcagataattgacccaagactggagaaccaatactctgtcagggcagctcagaaggcatgcagcttggcgtattattgtcttagccagaacccgaaagctaggccattgatgagcgatgtggttgagactttggaacctttgcagtgtactggtgatgccctgatcccttgtgcaactactacagctggagctgcatttgcaatgggaggggtgcctgattacagaatgcaccggaggtttgcaaagaacgttgggccaggtgcaatttgccggtcacccaatccaaattattcaccgggtggacctgcagcatgcagagttcggtga

SEQ ID NO: 28998 - protein, 410 aa, Arabidopsis thaliana
  misc_feature (1)..(410): Ceres Seq. ID no. 3443383
MGNCGTRDEAAVFTPQAQAQQLQKKHSRSVSDLSDPSTPRFRDDSRTPISYAQVIPFTLFELETITKSFRPDYILGEGGFGTVYKGYIDDNLRVGLKSLPVAVKVLNKEGLQGHREWLTEVNFLGQLRHPNLVKLIGYCCEDDHRLLVYEFMLRGSLENHLFRSNPRTLLHFLKMMIALGAAKGLAFLHNAERPVIYRDFKTSNILLDSDYTAKLSDFGLAKAGPQGDETHVSTRVMGTYGYAAPEYVMTGHLTARSDVYSFGVVLLEMLTGRKSVDKTRPSKEQNLVDWARPKLNDKRKLLQIIDPRLENQYSVRAAQKACSLAYYCLSQNPKARPLMSDVVETLEPLQCTGDALIPCATTTAGAAFAMGGVPDYRMHRRFAKNVGPGAICRSPNPNYSPGGPAACRVR

SEQ ID NO: 28999 - protein, 259 aa, Arabidopsis thaliana
  misc_feature (1)..(259): Ceres Seq. ID no. 3443384
MLRGSLENHLFRSNPRTLLHFLKMMIALGAAKGLAFLHNAERPVIYRDFKTSNILLDSDYTAKLSDFGLAKAGPQGDETHVSTRVMGTYGYAAPEYVMTGHLTARSDVYSFGVVLLEMLTGRKSVDKTRPSKEQNLVDWARPKLNDKRKLLQIIDPRLENQYSVRAAQKACSLAYYCLSQNPKARPLMSDVVETLEPLQCTGDALIPCATTTAGAAFAMGGVPDYRMHRRFAKNVGPGAICRSPNPNYSPGGPAACRVR

SEQ ID NO: 29000 - protein, 236 aa, Arabidopsis thaliana
  misc_feature (1)..(236): Ceres Seq. ID no. 3443385
MMIALGAAKGLAFLHNAERPVIYRDFKTSNILLDSDYTAKLSDFGLAKAGPQGDETHVSTRVMGTYGYAAPEYVMTGHLTARSDVYSFGVVLLEMLTGRKSVDKTRPSKEQNLVDWARPKLNDKRKLLQIIDPRLENQYSVRAAQKACSLAYYCLSQNPKARPLMSDVVETLEPLQCTGDALIPCATTTAGAAFAMGGVPDYRMHRRFAKNVGPGAICRSPNPNYSPGGPAACRVR

SEQ ID NO: 29001 - DNA, 1146 bp, Arabidopsis thaliana
  misc_feature (1)..(1146): Ceres Seq. ID no. 3447026
atgagttgtttctcgtgcttctcttcaaaagttctggacaatgaaggttcttcgatgcctgctccttataagcaaccaaactcacctaagagaacaacaggagaagtggtggctaagaacgcaaacggaccatcaaacaatatgggggcacgtattttcacgttccgtgagctagccaccgcgacaaagaattttagacaagagtgcctcattggtgaaggtgggttcgggagggtttacaaaggaaagcttgaaaatccagctcaggtcgtggcagtgaaacaacttgataggaatggattacaaggacaaagagagttcttggtcgaggtcttaatgcttagtcttctacatcataggaatcttgtgaatcttatcggttattgcgctgatggagaccaaagacttcttgtttacgagtatatgcctcttggatctctagaagatcatctcctcgatcttgaaccgggacaaaaaccactagactggaacactcgtattaagattgctttaggagcagcaaaaggaattgagtatctccatgatgaggctgatcctccagtgatttaccgagatcttaaatcgtcaaatatattacttgacccagaatacgttgcgaaattatcggatttcggtttagcaaagctaggtcctgttggagacacactacatgtgtcttcccgagttatgggaacttatggttattgtgctcctgaatatcaaagaactggctatctaacaaataaatcagatgtctacagctttggagttgtgttgttggaacttatatccggaagacgagtcatcgacacaatgagacctagtcatgaacaaaatctcgttacttgggcactaccgatttttagagatccgactagatattggcagctagctgatccattgcttcgaggcgactatccggaaaagagtttgaaccaagctatagctgtagcggcaatgtgcctgcatgaagaaccaacggttagaccactaatgagtgacgttattacagccttgagctttcttggtgcatcctcaaattcctccaataccggctctaaccatttgcaacaaaatcgatccaacaaatatcaggatgcagttcagtgggactcaagtcctagatatgctaattcgcaaatgtag

SEQ ID NO: 29002 - protein, 381 aa, Arabidopsis thaliana
  misc_feature (1)..(381): Ceres Seq. ID no. 3447027
MSCFSCFSSKVLDNEGSSMPAPYKQPNSPKRTTGEVVAKNANGPSNNMGARIFTFRELATATKNFRQECLIGEGGFGRVYKGKLENPAQVVAVKQLDRNGLQGQREFLVEVLMLSLLHHRNLVNLIGYCADGDQRLLVYEYMPLGSLEDHLLDLEPGQKPLDWNTRIKIALGAAKGIEYLHDEADPPVIYRDLKSSNILLDPEYVAKLSDFGLAKLGPVGDTLHVSSRVMGTYGYCAPEYQRTGYLTNKSDVYSFGVVLLELISGRRVIDTMRPSHEQNLVTWALPIFRDPTRYWQLADPLLRGDYPEKSLNQAIAVAAMCLHEEPTVRPLMSDVITALSFLGASSNSSNTGSNHLQQNRSNKYQDAVQWDSSPRYANSQM

SEQ ID NO: 29003 - protein, 363 aa, Arabidopsis thaliana
  misc_feature (1)..(363): Ceres Seq. ID no. 3447028
MPAPYKQPNSPKRTTGEVVAKNANGPSNNMGARIFTFRELATATKNFRQECLIGEGGFGRVYKGKLENPAQVVAVKQLDRNGLQGQREFLVEVLMLSLLHHRNLVNLIGYCADGDQRLLVYEYMPLGSLEDHLLDLEPGQKPLDWNTRIKIALGAAKGIEYLHDEADPPVIYRDLKSSNILLDPEYVAKLSDFGLAKLGPVGDTLHVSSRVMGTYGYCAPEYQRTGYLTNKSDVYSFGVVLLELISGRRVIDTMRPSHEQNLVTWALPIFRDPTRYWQLADPLLRGDYPEKSLNQAIAVAAMCLHEEPTVRPLMSDVITALSFLGASSNSSNTGSNHLQQNRSNKYQDAVQWDSSPRYANSQM

SEQ ID NO: 29004 - protein, 334 aa, Arabidopsis thaliana
  misc_feature (1)..(334): Ceres Seq. ID no. 3447029
MGARIFTFRELATATKNFRQECLIGEGGFGRVYKGKLENPAQVVAVKQLDRNGLQGQREFLVEVLMLSLLHHRNLVNLIGYCADGDQRLLVYEYMPLGSLEDHLLDLEPGQKPLDWNTRIKIALGAAKGIEYLHDEADPPVIYRDLKSSNILLDPEYVAKLSDFGLAKLGPVGDTLHVSSRVMGTYGYCAPEYQRTGYLTNKSDVYSFGVVLLELISGRRVIDTMRPSHEQNLVTWALPIFRDPTRYWQLADPLLRGDYPEKSLNQAIAVAAMCLHEEPTVRPLMSDVITALSFLGASSNSSNTGSNHLQQNRSNKYQDAVQWDSSPRYANSQM

SEQ ID NO: 29005 - DNA, 3330 bp, Arabidopsis thaliana
  misc_feature (1)..(3330): Ceres Seq. ID no. 3447874
atgccaaagtgcaagaatctgttgctaacctcgaagcgacgtaaatccaaatccaaaagactaaagctccatcagcatgaacctgagtctctgtttccagagaaggaggtagaagaggaagatgaagatgaaggaggcttcaagctgaaaattgcagctccttctcaagagcatggagttcaacctctgggaaacctatatttcaatcctggtgcggtcaatgtgcgaaacactggattaggtaatctccagatactctcagatgagctcgttttggatattctaggtcttcttggcgccaatcatttgggtgttttggctactgtaactaagtcattctatatatttgctaatcatgagcctctctggagaaatcttgtgttagaggagttaaaaggagattttttgtttaatgggtcgtggagatctacctatgtagctgcttaccatccgaaattcaagtttgctggagatggtgaatcgaatttgaagattatagatttctattctgattatctgtttcagagctggttatgtgcgaatcttgaaatgaaaccgaaatggcttagaagagataatatcacacgggtgagaggcatttctgttgaagacttcattacaaagtttgaggagccgaataagccagttttgttggagggatgtttggatggttggcctgctattgagaaatggtcaagagattatctgactaaggtggttggtgatgtcgaattcgcggtaggtccagtggaaatgaagctcgagaagtattttaggtattctgatggagctagggaagaaaggcctttgtacttgtttgatccaaagtttgcagagaaagttccggttttggattcggagtatgatgttcctgtctatttcagagaggacttgtttggtgttttaggaaacgagcgacctgattatagatggatcataattggtccagccggatcaggatcgtctttccatattgatcctaactcaacatcagcttggaatgcggtgatcacagggtcgaagaaatgggttttgttcccacctgatgtggttcctccgggtgtgcatccaagtcctgatggagcagaagtggcctgtcctgtttccataatagaatggttcatgaacttttatgatgatactaaggattgggagaagaaacctattgagtgtatatgcaaagccggggaggtgatgtttgtacctaatggatggtggcatctggtgattaacctggaggaatcgattgctattactcagaattatgctagcaggagtaatttgttgaatgtgttagaatttctgaagaaaccaaatgctaaagaacttgtctccgggacaactgacagagagaatttgcatgacaaattcaagaaagccattgaagaagcttacccggggactatccaagagttagaaaagaaagcagaagaagcaaaaagagccgaagaacaaagaagaatgagtaacattgtgctcaacacacttcgattcaaacacccgaagcttgccttgctccaatcctgctcttccttttccgacctcaagatcatacatggctttctcttacgaacccatctcatctccgacgtcttcgttgccagtcgtctcctcgctctctgcgttgacgactccaccttcaacaaaccaaccaatctcttgggatatgcatacggaatcttctctcagattcaaaaccctaatcttttcgtcttcaatctactcattcgctgcttctccactggtgcagagcctagtaaggcttttgggttctatacccagatgttgaaatctcggatttggccagataacatcacgtttccgtttctgattaaggcgtctagtgagatggagtgtgttctagtgggagagcaaacgcattcacagattgttagattcggatttcagaatgatgtttatgtagagaattcgcttgttcatatgtacgctaattgtgggttcatcgctgctgctggtagaatctttgggcaaatggggtttcgagatgttgtttcatggacttctatggtggctgggtattgtaaatgcgggatggttgagaatgcacgagagatgttcgatgaaatgcctcacagaaatttgtttacttggagtattatgattaatgggtatgcgaagaacaactgttttgagaaagccattgacttgtttgaattcatgaaaagggaaggagttgtcgcgaatgagacggttatggtgagtgtgatttcgtcttgtgctcatttgggtgcacttgagtttggagaaagagcatatgagtatgtggttaagagtcacatgactgtgaatcttattcttgggacagctcttgtggatatgttttggaggtgtggggatatcgagaaagcaattcatgtatttgagggattgcctgagacggatagcttgagctggagttcaataatcaaaggtcttgcagtgcatgggcatgctcacaaggcaatgcattacttctcccaaatgattagtttagggtttattccaagggatgttacattcacagcggttctttcagcttgcagccacggtggattagttgaaaaagggttagagatatatgagaacatgaaaaaggatcatgggatcgagcctagactcgagcattatggttgcattgttgatatgcttggtcgtgctgggaaattagccgaagcggagaactttatccttaaaatgcatgtgaagccaaacgctcctatattgggagcattgcttggagcatgtaagatttataagaacaccgaggttgcagagagagtaggaaacatgttgataaaggtgaaaccagaacatagcggttactatgtcttactgtcaaatatatacgcgtgtgcaggacaatgggataagatagagagcttgagagacatgatgaaggagaagcttgttaagaaaccaccagggtggagcttaatagagattgatgggaaaataaacaagttcacaatgggagatgatcagaagcatcctgaaatgggtaagatcagaaggaagtgggaagagatcttggggaagataagattgatagggtataaagggaacacaggtgatgcgtttttcgatgtagacgaggaggagaaggagagttcgattcatatgcatagtgagaaacttgcaattgcatatggtatgatgaagactaagcctggtacaaccattaggatagtgaagaacttgagggtatgtgaagattgtcatacagtaacaaagcttatctctgaggtttatggtagagagttaattgtaagagaccgcaacagatttcatcattttagaaatggagtatgttcctgcagagattattggtga

SEQ ID NO: 29006 - protein, 1109 aa, Arabidopsis thaliana
  misc_feature (1)..(1109): Ceres Seq. ID no. 3447875
MPKCKNLLLTSKRRKSKSKRLKLHQHEPESLFPEKEVEEEDEDEGGFKLKIAAPSQEHGVQPLGNLYFNPGAVNVRNTGLGNLQILSDELVLDILGLLGANHLGVLATVTKSFYIFANHEPLWRNLVLEELKGDFLFNGSWRSTYVAAYHPKFKFAGDGESNLKIIDFYSDYLFQSWLCANLEMKPKWLRRDNITRVRGISVEDFITKFEEPNKPVLLEGCLDGWPAIEKWSRDYLTKVVGDVEFAVGPVEMKLEKYFRYSDGAREERPLYLFDPKFAEKVPVLDSEYDVPVYFREDLFGVLGNERPDYRWIIIGPAGSGSSFHIDPNSTSAWNAVITGSKKWVLFPPDVVPPGVHPSPDGAEVACPVSIIEWFMNFYDDTKDWEKKPIECICKAGEVMFVPNGWWHLVINLEESIAITQNYASRSNLLNVLEFLKKPNAKELVSGTTDRENLHDKFKKAIEEAYPGTIQELEKKAEEAKRAEEQRRMSNIVLNTLRFKHPKLALLQSCSSFSDLKIIHGFLLRTHLISDVFVASRLLALCVDDSTFNKPTNLLGYAYGIFSQIQNPNLFVFNLLIRCFSTGAEPSKAFGFYTQMLKSRIWPDNITFPFLIKASSEMECVLVGEQTHSQIVRFGFQNDVYVENSLVHMYANCGFIAAAGRIFGQMGFRDVVSWTSMVAGYCKCGMVENAREMFDEMPHRNLFTWSIMINGYAKNNCFEKAIDLFEFMKREGVVANETVMVSVISSCAHLGALEFGERAYEYVVKSHMTVNLILGTALVDMFWRCGDIEKAIHVFEGLPETDSLSWSSIIKGLAVHGHAHKAMHYFSQMISLGFIPRDVTFTAVLSACSHGGLVEKGLEIYENMKKDHGIEPRLEHYGCIVDMLGRAGKLAEAENFILKMHVKPNAPILGALLGACKIYKNTEVAERVGNMLIKVKPEHSGYYVLLSNIYACAGQWDKIESLRDMMKEKLVKKPPGWSLIEIDGKINKFTMGDDQKHPEMGKIRRKWEEILGKIRLIGYKGNTGDAFFDVDEEEKESSIHMHSEKLAIAYGMMKTKPGTTIRIVKNLRVCEDCHTVTKLISEVYGRELIVRDRNRFHHFRNGVCSCRDYW

SEQ ID NO: 29007 - protein, 926 aa, Arabidopsis thaliana
  misc_feature (1)..(926): Ceres Seq. ID no. 3447876
MKPKWLRRDNITRVRGISVEDFITKFEEPNKPVLLEGCLDGWPAIEKWSRDYLTKVVGDVEFAVGPVEMKLEKYFRYSDGAREERPLYLFDPKFAEKVPVLDSEYDVPVYFREDLFGVLGNERPDYRWIIIGPAGSGSSFHIDPNSTSAWNAVITGSKKWVLFPPDVVPPGVHPSPDGAEVACPVSIIEWFMNFYDDTKDWEKKPIECICKAGEVMFVPNGWWHLVINLEESIAITQNYASRSNLLNVLEFLKKPNAKELVSGTTDRENLHDKFKKAIEEAYPGTIQELEKKAEEAKRAEEQRRMSNIVLNTLRFKHPKLALLQSCSSFSDLKIIHGFLLRTHLISDVFVASRLLALCVDDSTFNKPTNLLGYAYGIFSQIQNPNLFVFNLLIRCFSTGAEPSKAFGFYTQMLKSRIWPDNITFPFLIKASSEMECVLVGEQTHSQIVRFGFQNDVYVENSLVHMYANCGFIAAAGRIFGQMGFRDVVSWTSMVAGYCKCGMVENAREMFDEMPHRNLFTWSIMINGYAKNNCFEKAIDLFEFMKREGVVANETVMVSVISSCAHLGALEFGERAYEYVVKSHMTVNLILGTALVDMFWRCGDIEKAIHVFEGLPETDSLSWSSIIKGLAVHGHAHKAMHYFSQMISLGFIPRDVTFTAVLSACSHGGLVEKGLEIYENMKKDHGIEPRLEHYGCIVDMLGRAGKLAEAENFILKMHVKPNAPILGALLGACKIYKNTEVAERVGNMLIKVKPEHSGYYVLLSNIYACAGQWDKIESLRDMMKEKLVKKPPGWSLIEIDGKINKFTMGDDQKHPEMGKIRRKWEEILGKIRLIGYKGNTGDAFFDVDEEEKESSIHMHSEKLAIAYGMMKTKPGTTIRIVKNLRVCEDCHTVTKLISEVYGRELIVRDRNRFHHFRNGVCSCRDYW

SEQ ID NO: 29008 - protein, 858 aa, Arabidopsis thaliana
  misc_feature (1)..(858): Ceres Seq. ID no. 3447877
MKLEKYFRYSDGAREERPLYLFDPKFAEKVPVLDSEYDVPVYFREDLFGVLGNERPDYRWIIIGPAGSGSSFHIDPNSTSAWNAVITGSKKWVLFPPDVVPPGVHPSPDGAEVACPVSIIEWFMNFYDDTKDWEKKPIECICKAGEVMFVPNGWWHLVINLEESIAITQNYASRSNLLNVLEFLKKPNAKELVSGTTDRENLHDKFKKAIEEAYPGTIQELEKKAEEAKRAEEQRRMSNIVLNTLRFKHPKLALLQSCSSFSDLKIIHGFLLRTHLISDVFVASRLLALCVDDSTFNKPTNLLGYAYGIFSQIQNPNLFVFNLLIRCFSTGAEPSKAFGFYTQMLKSRIWPDNITFPFLIKASSEMECVLVGEQTHSQIVRFGFQNDVYVENSLVHMYANCGFIAAAGRIFGQMGFRDVVSWTSMVAGYCKCGMVENAREMFDEMPHRNLFTWSIMINGYAKNNCFEKAIDLFEFMKREGVVANETVMVSVISSCAHLGALEFGERAYEYVVKSHMTVNLILGTALVDMFWRCGDIEKAIHVFEGLPETDSLSWSSIIKGLAVHGHAHKAMHYFSQMISLGFIPRDVTFTAVLSACSHGGLVEKGLEIYENMKKDHGIEPRLEHYGCIVDMLGRAGKLAEAENFILKMHVKPNAPILGALLGACKIYKNTEVAERVGNMLIKVKPEHSGYYVLLSNIYACAGQWDKIESLRDMMKEKLVKKPPGWSLIEIDGKINKFTMGDDQKHPEMGKIRRKWEEILGKIRLIGYKGNTGDAFFDVDEEEKESSIHMHSEKLAIAYGMMKTKPGTTIRIVKNLRVCEDCHTVTKLISEVYGRELIVRDRNRFHHFRNGVCSCRDYW

SEQ ID NO: 29009 - DNA, 2598 bp, Arabidopsis thaliana
  misc_feature (1)..(2598): Ceres Seq. ID no. 3598385
atggagagacattgtgtgttagttgccacttttttgctgatgcttcatatcgttcatgctcaggatcaaattggattcattagtgtggattgtggtttggcacctcgtgagtctccttacaatgaagccaaaactggtttaacatatacatcagatgacggtctagtcaacgttgggaaacccggtagaatcgccaaggaattcgaaccgctcgccgataagccgactttgacactgagatattttccagagggagtacgaaactgctacaatctaaatgtcaccagcgacaccaactatctgatcaaggccacattcgtatatggaaattacgatggtcttaatgttgggccaaacttcgacctttacttcggtccgaatttgtggactacggtatgtcttattaagactggaataagtataccttttataaatgttttggagctacgaccgatgaagaaaaacatgtacgttactcaaggcgaatcactgaattacttattcagggtgtatattagcaattcaagtactcgtataaggttcccggatgatgtctatgatcgtaaatggtacccgtacttcgacaactcatggacacaagtaactacgactctcgatgtaaacacaagtcttacttatgaactaccacaaagtgtaatggcaaaagccgcaacgccaattaaggctaacgacaccttgaacattacatggacagtagagcctcctactacaaagttttactcctacatgcactttgcagagcttcagactttaagagccaacgatgcaagggaattcaatgtgacgatgaatggaatatatacatatggaccttatagtcctaaaccactaaaaaccgaaaccatatacgacaaaatccctgagcaatgcgatggaggtgcatgccttttgcaggttgtgaagacacttaaatctacccttccacctttacttaatgctatcgaggctttcaccgtgattgatttcccgcagatggagactaatggagatgacgttgatgcaatcaagaatgttcaagatacgtatggaattagtagaattagttggcaaggagatccatgtgtccccaaactgtttttgtgggatggtctaaattgcaacaactccgataattcgacatcaccaatcatcacttccttagacttatcttcaagtggactaactgggagcatcacccaagccattcagaatctaactaacctgcaagaactggacttgtcagataacaatttgactggagaaatacctgatttcttaggggacattaaatcactcttggtcataaacttaagtggtaataatctaagtggctcagttcctccctcacttcttcagaagaaaggaatgaagttaaatgtcgaaggaaaccctcatcttctttgcacagctgattcatgtgtgaaaaaaggagaggatggacacaagaaaaagagtgtcatagtgccagttgttgcatcaattgcttcaatagctgttcttataggtgcattggttctgtttttcattcttagaaagaaaaagtcaccaaaagttgaaggaccaccaccatcttatatgcaagcatcagatggtagatcgccaagatcatctgaaccggcaatagtgacaaagaatagaaggtttacttactcacaagttgcgataatgacaaataacttccaaagaatccttggaaaaggagggtttggaatggtttatcatggttttgtgaacggtacagaacaagtagctgttaagatactctcccattcatcgtctcaaggatataaagaatttaaagcggaggtagaacttcttcttagagttcatcacaagaacttggtcggtcttgttgggtactgcgacgaaggagagaacatggctcttatctatgaatacatggccaatggagatctaaaagaacatatgtcaggaacacgtaaccggtttactttgaattggggaactagactgaaaatagtcgtcgagtctgcacaaggacttgagtacttgcataatggatgcaaaccaccaatggttcatagagatgtcaaaaccacaaatatattgctgaacgaacacttccaagccaaactagctgattttgggctttcaaggtcatttccaattgaaggtgaaactcatgtgtcaacagttgttgctggaacgcctggatatcttgatcccgaatactataaaacaaattggttgacagaaaagagtgatgtttatagttttgggattgtattgttggagcttatcacaaatcgacccgtgatcgacaaaagccgtgaaaagccacatatagcagaatgggtaggagtaatgcttacaaaaggagacatcaacagtatcatggatcctaatttaaatgaagattatgattctggttctgtttggaaagctgttgagctagccatgagttgtctcaatccttcttcagcaagaagaccgaccatgtcccaagttgttattgaactaaacgagtgtatagcatcagaaaattcaaggggaggagcgagtcgggatatggactcgaagagttccatagaagtgagcttgacctttgataccgaactgagcccaacggctcggtag

SEQ ID NO: 29010 - protein, 865 aa, Arabidopsis thaliana
  misc_feature (1)..(865): Ceres Seq. ID no. 3598386
MERHCVLVATFLLMLHIVHAQDQIGFISVDCGLAPRESPYNEAKTGLTYTSDDGLVNVGKPGRIAKEFEPLADKPTLTLRYFPEGVRNCYNLNVTSDTNYLIKATFVYGNYDGLNVGPNFDLYFGPNLWTTVCLIKTGISIPFINVLELRPMKKNMYVTQGESLNYLFRVYISNSSTRIRFPDDVYDRKWYPYFDNSWTQVTTTLDVNTSLTYELPQSVMAKAATPIKANDTLNITWTVEPPTTKFYSYMHFAELQTLRANDAREFNVTMNGIYTYGPYSPKPLKTETIYDKIPEQCDGGACLLQVVKTLKSTLPPLLNAIEAFTVIDFPQMETNGDDVDAIKNVQDTYGISRISWQGDPCVPKLFLWDGLNCNNSDNSTSPIITSLDLSSSGLTGSITQAIQNLTNLQELDLSDNNLTGEIPDFLGDIKSLLVINLSGNNLSGSVPPSLLQKKGMKLNVEGNPHLLCTADSCVKKGEDGHKKKSVIVPVVASIASIAVLIGALVLFFILRKKKSPKVEGPPPSYMQASDGRSPRSSEPAIVTKNRRFTYSQVAIMTNNFQRILGKGGFGMVYHGFVNGTEQVAVKILSHSSSQGYKEFKAEVELLLRVHHKNLVGLVGYCDEGENMALIYEYMANGDLKEHMSGTRNRFTLNWGTRLKIVVESAQGLEYLHNGCKPPMVHRDVKTTNILLNEHFQAKLADFGLSRSFPIEGETHVSTVVAGTPGYLDPEYYKTNWLTEKSDVYSFGIVLLELITNRPVIDKSREKPHIAEWVGVMLTKGDINSIMDPNLNEDYDSGSVWKAVELAMSCLNPSSARRPTMSQVVIELNECIASENSRGGASRDMDSKSSIEVSLTFDTELSPTAR

SEQ ID NO: 29011 - protein, 852 aa, Arabidopsis thaliana
  misc_feature (1)..(852): Ceres Seq. ID no. 3598387
MLHIVHAQDQIGFISVDCGLAPRESPYNEAKTGLTYTSDDGLVNVGKPGRIAKEFEPLADKPTLTLRYFPEGVRNCYNLNVTSDTNYLIKATFVYGNYDGLNVGPNFDLYFGPNLWTTVCLIKTGISIPFINVLELRPMKKNMYVTQGESLNYLFRVYISNSSTRIRFPDDVYDRKWYPYFDNSWTQVTTTLDVNTSLTYELPQSVMAKAATPIKANDTLNITWTVEPPTTKFYSYMHFAELQTLRANDAREFNVTMNGIYTYGPYSPKPLKTETIYDKIPEQCDGGACLLQVVKTLKSTLPPLLNAIEAFTVIDFPQMETNGDDVDAIKNVQDTYGISRISWQGDPCVPKLFLWDGLNCNNSDNSTSPIITSLDLSSSGLTGSITQAIQNLTNLQELDLSDNNLTGEIPDFLGDIKSLLVINLSGNNLSGSVPPSLLQKKGMKLNVEGNPHLLCTADSCVKKGEDGHKKKSVIVPVVASIASIAVLIGALVLFFILRKKKSPKVEGPPPSYMQASDGRSPRSSEPAIVTKNRRFTYSQVAIMTNNFQRILGKGGFGMVYHGFVNGTEQVAVKILSHSSSQGYKEFKAEVELLLRVHHKNLVGLVGYCDEGENMALIYEYMANGDLKEHMSGTRNRFTLNWGTRLKIVVESAQGLEYLHNGCKPPMVHRDVKTTNILLNEHFQAKLADFGLSRSFPIEGETHVSTVVAGTPGYLDPEYYKTNWLTEKSDVYSFGIVLLELITNRPVIDKSREKPHIAEWVGVMLTKGDINSIMDPNLNEDYDSGSVWKAVELAMSCLNPSSARRPTMSQVVIELNECIASENSRGGASRDMDSKSSIEVSLTFDTELSPTAR

SEQ ID NO: 29012 - protein, 714 aa, Arabidopsis thaliana
  misc_feature (1)..(714): Ceres Seq. ID no. 3598388
MKKNMYVTQGESLNYLFRVYISNSSTRIRFPDDVYDRKWYPYFDNSWTQVTTTLDVNTSLTYELPQSVMAKAATPIKANDTLNITWTVEPPTTKFYSYMHFAELQTLRANDAREFNVTMNGIYTYGPYSPKPLKTETIYDKIPEQCDGGACLLQVVKTLKSTLPPLLNAIEAFTVIDFPQMETNGDDVDAIKNVQDTYGISRISWQGDPCVPKLFLWDGLNCNNSDNSTSPIITSLDLSSSGLTGSITQAIQNLTNLQELDLSDNNLTGEIPDFLGDIKSLLVINLSGNNLSGSVPPSLLQKKGMKLNVEGNPHLLCTADSCVKKGEDGHKKKSVIVPVVASIASIAVLIGALVLFFILRKKKSPKVEGPPPSYMQASDGRSPRSSEPAIVTKNRRFTYSQVAIMTNNFQRILGKGGFGMVYHGFVNGTEQVAVKILSHSSSQGYKEFKAEVELLLRVHHKNLVGLVGYCDEGENMALIYEYMANGDLKEHMSGTRNRFTLNWGTRLKIVVESAQGLEYLHNGCKPPMVHRDVKTTNILLNEHFQAKLADFGLSRSFPIEGETHVSTVVAGTPGYLDPEYYKTNWLTEKSDVYSFGIVLLELITNRPVIDKSREKPHIAEWVGVMLTKGDINSIMDPNLNEDYDSGSVWKAVELAMSCLNPSSARRPTMSQVVIELNECIASENSRGGASRDMDSKSSIEVSLTFDTELSPTAR

SEQ ID NO: 29013 - DNA, 2682 bp, Arabidopsis thaliana
  misc_feature (1)..(2682): Ceres Seq. ID no. 3598389
atgaaatctcttcactggtttttgcatcttttgatcatagcttttaccgttttgagatcagtggaagctcaaaatcaagcaggatttattagtttggattgtgggttggtgcctaaggaaactacttatacagagaagtcgacgaatataacatacaaatcagacgtggattacatcgacagtggattggtcggaaagatcaatgatgcatacaaaactcagtttcagcaacaggtttgggccgtgagaagcttccctgtaggtcaaagaaactgttacaatgtcaacctcacggcaaacaacaaatatttgatcagaggaacctttgtgtatgggaattatgatggcctgaatcagttcccaagttttgatcttcatatcggtcctaacaaatggtcgtctgttaaaatactaggagtaacaaatacttctatgcatgagataatccatgtcgtaccacaagatagtcttgaagtttgtcttgttaagactggaccgacgacaccattcatttcgtcgctggaggttcgtccattgaacaatgaaagttatctcacgcaaagtggatcattgatgttgttcgccagagtatactttccatccagttcatcatctttcattaggtatgatgaggacatacatgaccgtgtttggaattcattcacagatgatgaaaccgtctggataagtacagacctcccgatcgatacaagtaactcctatgacatgcctcaatccgtgatgaagacagctgctgtccctaaaaatgctagtgagccatggctcttatggtggactcttgatgagaacaccgcacaatcatatgtatatatgcatttcgccgaagtccagaatcttacagcaaatgaaaccagagaattcaacattacttacaatggtggtctacgttggttcagctatttgaggcctcctaatctcagcatttcaacgatctttaatccaagggcagtgagttcttcaaatgggatatttaatttcacattcgcaatgacgggtaactcaactctgcctccccttctcaacgccctcgagatttatacagtcgtagacattctacagctagagacaaacaaagatgaaggcaagtgtgtttctgctatgatgaacatcaaagaaacatatggtttaagcaaaaagataagctggcaaggagatccgtgtgctcctcagctttatcggtgggaaggtttaaattgtagttatccggactccgagggatcaagaatcatatccttgaacttgaatgggagcgagttgacaggttctataacatctgacatatccaagctaacactgttgacagtattagatttatcaaataatgatttatcaggagatattccaacattttttgctgagatgaagtcgttgaaactcataaacttaagtggaaacccgaaccttaatctcacagcaattccagactctcttcagcaaagggtaaacagcaaatctttaacactaattttgggtgaaaacctgactctgactcccaaaaaagagagtaaaaaggttcccatggttgctatcgcagcgtcagtggctggcgtgttcgctctgctcgttatcttagccatattttttgtcattaaaaggaaaaatgtgaaagctcataagtctccaggaccacccccattagtcactcccggtatagttaaaagtgagacaagatcatccaatccatcaatcataacaagggaacgcaagatcacgtatccagaggtactgaagatgactaataacttcgagagagttcttggcaaaggaggctttggaacagtgtatcatggaaacttggatggtgctgaagtggcagtgaaaatgctttctcattcatcagctcaaggttataaagagttcaaagcagaggttgaacttcttttaagagttcaccatagacatttggtgggacttgtgggttactgtgatgatggagacaacttggctctgatttatgaatatatggcaaatggagacctgagggagaatatgtcaggaaaacgtggaggcaatgtccttacctgggaaaacaggatgcaaatagctgtagaggctgcacaagggctggagtatctgcacaatggatgtaggcctcctatggtacatagagatgttaaaactactaacattttattgaatgagcggtgtggagcaaaactagccgactttgggctctcgagatctttcccaatcgatggcgaatgtcatgtttcgacagtggttgcgggtacacctggttacctagacccggagtactacagaacaaactggctaagcgagaagagtgacgtgtacagcttcggtgtagtgctattagagatagtcacaaaccagcctgtgatagataaaacccgggagagacctcacatcaatgactgggttgggttcatgctcactaaaggagacatcaagagcatcgttgacccgaaactgatgggggactatgatacaaacggtgcatggaagattgtggagctagctctggcctgtgtgaacccatcttcgaaccggagaccaacaatggcacacgttgtgatggagctaaacgactgtgtggccttagaaaatgcaaggcggcaaggtagtgaagagatgtactcaatgggttctgttgactatagtctctcttctacttctgactttgctcctggagccagataa

SEQ ID NO: 29014 - protein, 893 aa, Arabidopsis thaliana
  misc_feature (1)..(893): Ceres Seq. ID no. 3598390
MKSLHWFLHLLIIAFTVLRSVEAQNQAGFISLDCGLVPKETTYTEKSTNITYKSDVDYIDSGLVGKINDAYKTQFQQQVWAVRSFPVGQRNCYNVNLTANNKYLIRGTFVYGNYDGLNQFPSFDLHIGPNKWSSVKILGVTNTSMHEIIHVVPQDSLEVCLVKTGPTTPFISSLEVRPLNNESYLTQSGSLMLFARVYFPSSSSSFIRYDEDIHDRVWNSFTDDETVWISTDLPIDTSNSYDMPQSVMKTAAVPKNASEPWLLWWTLDENTAQSYVYMHFAEVQNLTANETREFNITYNGGLRWFSYLRPPNLSISTIFNPRAVSSSNGIFNFTFAMTGNSTLPPLLNALEIYTVVDILQLETNKDEGKCVSAMMNIKETYGLSKKISWQGDPCAPQLYRWEGLNCSYPDSEGSRIISLNLNGSELTGSITSDISKLTLLTVLDLSNNDLSGDIPTFFAEMKSLKLINLSGNPNLNLTAIPDSLQQRVNSKSLTLILGENLTLTPKKESKKVPMVAIAASVAGVFALLVILAIFFVIKRKNVKAHKSPGPPPLVTPGIVKSETRSSNPSIITRERKITYPEVLKMTNNFERVLGKGGFGTVYHGNLDGAEVAVKMLSHSSAQGYKEFKAEVELLLRVHHRHLVGLVGYCDDGDNLALIYEYMANGDLRENMSGKRGGNVLTWENRMQIAVEAAQGLEYLHNGCRPPMVHRDVKTTNILLNERCGAKLADFGLSRSFPIDGECHVSTVVAGTPGYLDPEYYRTNWLSEKSDVYSFGVVLLEIVTNQPVIDKTRERPHINDWVGFMLTKGDIKSIVDPKLMGDYDTNGAWKIVELALACVNPSSNRRPTMAHVVMELNDCVALENARRQGSEEMYSMGSVDYSLSSTSDFAPGAR

SEQ ID NO: 29015 - protein, 749 aa, Arabidopsis thaliana
  misc_feature (1)..(749): Ceres Seq. ID no. 3598391
MHEIIHVVPQDSLEVCLVKTGPTTPFISSLEVRPLNNESYLTQSGSLMLFARVYFPSSSSSFIRYDEDIHDRVWNSFTDDETVWISTDLPIDTSNSYDMPQSVMKTAAVPKNASEPWLLWWTLDENTAQSYVYMHFAEVQNLTANETREFNITYNGGLRWFSYLRPPNLSISTIFNPRAVSSSNGIFNFTFAMTGNSTLPPLLNALEIYTVVDILQLETNKDEGKCVSAMMNIKETYGLSKKISWQGDPCAPQLYRWEGLNCSYPDSEGSRIISLNLNGSELTGSITSDISKLTLLTVLDLSNNDLSGDIPTFFAEMKSLKLINLSGNPNLNLTAIPDSLQQRVNSKSLTLILGENLTLTPKKESKKVPMVAIAASVAGVFALLVILAIFFVIKRKNVKAHKSPGPPPLVTPGIVKSETRSSNPSIITRERKITYPEVLKMTNNFERVLGKGGFGTVYHGNLDGAEVAVKMLSHSSAQGYKEFKAEVELLLRVHHRHLVGLVGYCDDGDNLALIYEYMANGDLRENMSGKRGGNVLTWENRMQIAVEAAQGLEYLHNGCRPPMVHRDVKTTNILLNERCGAKLADFGLSRSFPIDGECHVSTVVAGTPGYLDPEYYRTNWLSEKSDVYSFGVVLLEIVTNQPVIDKTRERPHINDWVGFMLTKGDIKSIVDPKLMGDYDTNGAWKIVELALACVNPSSNRRPTMAHVVMELNDCVALENARRQGSEEMYSMGSVDYSLSSTSDFAPGAR

SEQ ID NO: 29016 - protein, 702 aa, Arabidopsis thaliana
  misc_feature (1)..(702): Ceres Seq. ID no. 3598392
MLFARVYFPSSSSSFIRYDEDIHDRVWNSFTDDETVWISTDLPIDTSNSYDMPQSVMKTAAVPKNASEPWLLWWTLDENTAQSYVYMHFAEVQNLTANETREFNITYNGGLRWFSYLRPPNLSISTIFNPRAVSSSNGIFNFTFAMTGNSTLPPLLNALEIYTVVDILQLETNKDEGKCVSAMMNIKETYGLSKKISWQGDPCAPQLYRWEGLNCSYPDSEGSRIISLNLNGSELTGSITSDISKLTLLTVLDLSNNDLSGDIPTFFAEMKSLKLINLSGNPNLNLTAIPDSLQQRVNSKSLTLILGENLTLTPKKESKKVPMVAIAASVAGVFALLVILAIFFVIKRKNVKAHKSPGPPPLVTPGIVKSETRSSNPSIITRERKITYPEVLKMTNNFERVLGKGGFGTVYHGNLDGAEVAVKMLSHSSAQGYKEFKAEVELLLRVHHRHLVGLVGYCDDGDNLALIYEYMANGDLRENMSGKRGGNVLTWENRMQIAVEAAQGLEYLHNGCRPPMVHRDVKTTNILLNERCGAKLADFGLSRSFPIDGECHVSTVVAGTPGYLDPEYYRTNWLSEKSDVYSFGVVLLEIVTNQPVIDKTRERPHINDWVGFMLTKGDIKSIVDPKLMGDYDTNGAWKIVELALACVNPSSNRRPTMAHVVMELNDCVALENARRQGSEEMYSMGSVDYSLSSTSDFAPGAR

SEQ ID NO: 29017 - DNA, 2568 bp, Arabidopsis thaliana
  misc_feature (1)..(2568): Ceres Seq. ID no. 3598409
atgaagactatgaatgggtttttgcttctctcgactatagcttttgccgtttttcacttagtccaagctcaatctcaatcaggttttatcagcttggattgtggactaattcctaaggacacaacctataccgagcagataacgaacataacatacatatcagacgcggattacatcgatagtggattaaccgaaaggatcagtgattcatacaagtcacagcttcagcaacagacttggaccttaagaagcttccctgaaggtcaaagaaattgttacaacttcaatctcaaagcgaatctcaaatatctgattagaggaacgtttgtgtatgggaattatgatggtttgaatcaaatgcctaagtttgatcttcatattggtcctaataaatggacttctgttatattggaaggagtagcaaatgctaccatcttcgagataattcatgtcttaacacaagaccgtctccaagtttgtcttgtcaaaacaggacaaacgacaccgtttatatcgtcgttggaacttcgtccgttgaacaatgatacttacgtcactcaaggtgggtcgttgatgtcctttgccagaatctactttccaaagactgcatacttcctcaggtattctgatgacttgtatgaccgagtttgggttccattcagccagaatgaaacagtgtcgttaagtaccaatctaccggttgatacaagtagcaattcctacaatgtgcctcaaaatgtggcgaattccgcaattattccggcggaagctactcatcctctcaacatatggtgggatctccaaaacatcaatgcaccgtcatatgtatacatgcattttgcagaaatccaaaatcttaaagctaatgacatcagagaattcaacattacatacaatggtggtcaggtttgggaaagttccattagacctcacaatctcagcatcactacaatctctagtccaacagctttaaattcttcagatgggtttttcaatttcacttttacaatgaccacaacctctactcttcctccacttatcaatgccctcgaggtttatacacttgtagaaaatttactgctcgagacatatcaagatgaagtttctgctatgatgaacatcaagaaaacatatggattgagtaaaaagataagttggcaaggagatccatgttctcctcaaatatatagatgggaaggtctgaattgcctttatttggactctgatcaacctctgatcacatcattagatttatcagataatgatttatccggagagattccagattttcttgctgatatgaagatgttgacactagtaaacttaaaaggaaacccgaagctcaacctcacagttccagattctattaagcataggataaacaacaaatctttaaaactaattatagatgaaaaccagagtagtgaaaaacacggtataaagtttcctttggttgctatcttagcatcagtggctggtgtgatcgcattactagctatctttaccatatgtgtcatttttaaaagagaaaaacagggaagtggtgaagctccaactagggttaatactgagatcagatcatcctatcaatcaatcgaaacaaaggatcgaaaatttacgtattccgagatactaaagatgacgaataactttgagagagttcttggtaaaggaggatatggaagagtgtattatggaaaattggatgatactgaagtagctgtgaaaatgctctttcattcctcagctgaacaagattataaacatttcaaagcagaggttgaactacttttaagagtccaccatagacatttggtgggacttgttggttactgtgatgatggagataactttgccttgatttatgaatacatggcaaatggagacttgaaggagaatatgtctggaaaccgcagtggacatgttctaagttgggaaaacagaatgcaaatagctatggaggcagcacaaggattggagtatctacataatggaagtagaccacctatggtccatagagatgtgaaaactactaacattttattgaatgagctgtatcaagcgaaactagctgattttgggctctctagatcttccccggtggatggtgaatcttatgtatcaacaatcgttgccggaacacctggttacttagaccctgagtactatagaacaaacttgttaagcgagaagactgatgtgtacagctttggggtagttttattagaaatcatcacaaaccagcctgtgattgatacaacccgcgagaaagcgcatattacagattgggttggatttaagctcatggaaggagacattaggaatattattgacccgaaactgattaaggaatttgatacaaacggtgtgtggaaggctgtggagttggctttgtcttgtgtaaaccctacgtcaaaccatagaccgacgatgccacatgttgtgatggagctaaaagagtgtctggactctgagattgccaggaaacaaggtagtcaagacatgttttctagagattctattgaattaaccttctctcctactggattctcacctggaccgaggtga

SEQ ID NO: 29018 - protein, 855 aa, Arabidopsis thaliana
  misc_feature (1)..(855): Ceres Seq. ID no. 3598410
MKTMNGFLLLSTIAFAVFHLVQAQSQSGFISLDCGLIPKDTTYTEQITNITYISDADYIDSGLTERISDSYKSQLQQQTWTLRSFPEGQRNCYNFNLKANLKYLIRGTFVYGNYDGLNQMPKFDLHIGPNKWTSVILEGVANATIFEIIHVLTQDRLQVCLVKTGQTTPFISSLELRPLNNDTYVTQGGSLMSFARIYFPKTAYFLRYSDDLYDRVWVPFSQNETVSLSTNLPVDTSSNSYNVPQNVANSAIIPAEATHPLNIWWDLQNINAPSYVYMHFAEIQNLKANDIREFNITYNGGQVWESSIRPHNLSITTISSPTALNSSDGFFNFTFTMTTTSTLPPLINALEVYTLVENLLLETYQDEVSAMMNIKKTYGLSKKISWQGDPCSPQIYRWEGLNCLYLDSDQPLITSLDLSDNDLSGEIPDFLADMKMLTLVNLKGNPKLNLTVPDSIKHRINNKSLKLIIDENQSSEKHGIKFPLVAILASVAGVIALLAIFTICVIFKREKQGSGEAPTRVNTEIRSSYQSIETKDRKFTYSEILKMTNNFERVLGKGGYGRVYYGKLDDTEVAVKMLFHSSAEQDYKHFKAEVELLLRVHHRHLVGLVGYCDDGDNFALIYEYMANGDLKENMSGNRSGHVLSWENRMQIAMEAAQGLEYLHNGSRPPMVHRDVKTTNILLNELYQAKLADFGLSRSSPVDGESYVSTIVAGTPGYLDPEYYRTNLLSEKTDVYSFGVVLLEIITNQPVIDTTREKAHITDWVGFKLMEGDIRNIIDPKLIKEFDTNGVWKAVELALSCVNPTSNHRPTMPHVVMELKECLDSEIARKQGSQDMFSRDSIELTFSPTGFSPGPR

SEQ ID NO: 29019 - protein, 852 aa, Arabidopsis thaliana
  misc_feature (1)..(852): Ceres Seq. ID no. 3598411
MNGFLLLSTIAFAVFHLVQAQSQSGFISLDCGLIPKDTTYTEQITNITYISDADYIDSGLTERISDSYKSQLQQQTWTLRSFPEGQRNCYNFNLKANLKYLIRGTFVYGNYDGLNQMPKFDLHIGPNKWTSVILEGVANATIFEIIHVLTQDRLQVCLVKTGQTTPFISSLELRPLNNDTYVTQGGSLMSFARIYFPKTAYFLRYSDDLYDRVWVPFSQNETVSLSTNLPVDTSSNSYNVPQNVANSAIIPAEATHPLNIWWDLQNINAPSYVYMHFAEIQNLKANDIREFNITYNGGQVWESSIRPHNLSITTISSPTALNSSDGFFNFTFTMTTTSTLPPLINALEVYTLVENLLLETYQDEVSAMMNIKKTYGLSKKISWQGDPCSPQIYRWEGLNCLYLDSDQPLITSLDLSDNDLSGEIPDFLADMKMLTLVNLKGNPKLNLTVPDSIKHRINNKSLKLIIDENQSSEKHGIKFPLVAILASVAGVIALLAIFTICVIFKREKQGSGEAPTRVNTEIRSSYQSIETKDRKFTYSEILKMTNNFERVLGKGGYGRVYYGKLDDTEVAVKMLFHSSAEQDYKHFKAEVELLLRVHHRHLVGLVGYCDDGDNFALIYEYMANGDLKENMSGNRSGHVLSWENRMQIAMEAAQGLEYLHNGSRPPMVHRDVKTTNILLNELYQAKLADFGLSRSSPVDGESYVSTIVAGTPGYLDPEYYRTNLLSEKTDVYSFGVVLLEIITNQPVIDTTREKAHITDWVGFKLMEGDIRNIIDPKLIKEFDTNGVWKAVELALSCVNPTSNHRPTMPHVVMELKECLDSEIARKQGSQDMFSRDSIELTFSPTGFSPGPR

SEQ ID NO: 29020 - protein, 736 aa, Arabidopsis thaliana
  misc_feature (1)..(736): Ceres Seq. ID no. 3598412
MPKFDLHIGPNKWTSVILEGVANATIFEIIHVLTQDRLQVCLVKTGQTTPFISSLELRPLNNDTYVTQGGSLMSFARIYFPKTAYFLRYSDDLYDRVWVPFSQNETVSLSTNLPVDTSSNSYNVPQNVANSAIIPAEATHPLNIWWDLQNINAPSYVYMHFAEIQNLKANDIREFNITYNGGQVWESSIRPHNLSITTISSPTALNSSDGFFNFTFTMTTTSTLPPLINALEVYTLVENLLLETYQDEVSAMMNIKKTYGLSKKISWQGDPCSPQIYRWEGLNCLYLDSDQPLITSLDLSDNDLSGEIPDFLADMKMLTLVNLKGNPKLNLTVPDSIKHRINNKSLKLIIDENQSSEKHGIKFPLVAILASVAGVIALLAIFTICVIFKREKQGSGEAPTRVNTEIRSSYQSIETKDRKFTYSEILKMTNNFERVLGKGGYGRVYYGKLDDTEVAVKMLFHSSAEQDYKHFKAEVELLLRVHHRHLVGLVGYCDDGDNFALIYEYMANGDLKENMSGNRSGHVLSWENRMQIAMEAAQGLEYLHNGSRPPMVHRDVKTTNILLNELYQAKLADFGLSRSSPVDGESYVSTIVAGTPGYLDPEYYRTNLLSEKTDVYSFGVVLLEIITNQPVIDTTREKAHITDWVGFKLMEGDIRNIIDPKLIKEFDTNGVWKAVELALSCVNPTSNHRPTMPHVVMELKECLDSEIARKQGSQDMFSRDSIELTFSPTGFSPGPR

SEQ ID NO: 29021 - DNA, 1479 bp, Arabidopsis thaliana
  misc_feature (1)..(1479): Ceres Seq. ID no. 3598783
atggccgtttcatcgtcgcatcatgcggttctcttcccttacatgtcaaaaggccacacgattcctctcctccaattcgcccgtctcctcctccgtcaccgccgtatcgtctccgtagacgacgaagaaccaaccatttccgtcaccgtcttcaccaccccaaaaaaccaaccattcgtctcaaacttcctctctgacgtcgcatcatctatcaaagtaatctccctccctttccctgaaaacatcgccggaatccctcccggcgtcgagagcaccgacatgctcccttccatatcactttacgtgcccttcacgcgcgcaaccaaatctctccagcctttcttcgaagcagaactcaagaatcttgagaaagtttctttcatggtctccgatggattcttatggtggacatcggaatccgccgctaaatttgagatcccgagacttgccttctacggcatgaactcctacgcatcggctatgtgctccgccatttcggtacacgagctctttaccaaaccggaaagtgttaaatctgatactgaaccggttactgtaccggattttccatggatatgtgttaagaagtgtgagttcgatccggttttgaccgaaccggatcaatcggatccagcgttcgagctactcattgaccatcttatgtccaccaagaaaagccgtggagttatagtgaacagcttttacgagctcgagtcaacgttcgttgactaccggctccgtgataacgatgaaccaaaaccgtggtgtgttgggcctttgtgtttggtaaatcctccaaaaccggagagtgataaaccggattggattcattggttggaccggaaactagaggaaagatgtccggttatgtatgtggcgtttggaacgcaggctgagatatcgaacgagcagctcaaggaaatagcattagggttggaagattccaaggtcaatttcttgtgggtcacgagaaaggacttggaagaagtaactggaggattagggttcgaaaagagagtgaaagagcatgggatgattgtgagagattgggtagaccaatgggagatattgtcacataaaagtgtcaaagggtttttgagtcattgtggatggaactcggcgcaagagagtatttgcgctggggttccactactcgcttggccaatgatggcagagcagccactcaatgcgaagttggtagtggaggagctaaagatcggagtaagaatcgaaacagaagatgtaagtgtgaaaggattcgtgacaagagaagaacttagtcgaaaggttaaacaattgatggagggagagatggggaagacaacgatgaagaatgtaaaagagtatgcgaaaatggcgaaaaaagctatggctcaagggactggttcgtcttggaagagtttggattcgcttctggaagagctttgtaagagtagagagccagacggtgttaataagttgtcaagttctgatgcttag

SEQ ID NO: 29022 - protein, 492 aa, Arabidopsis thaliana
  misc_feature (1)..(492): Ceres Seq. ID no. 3598784
MAVSSSHHAVLFPYMSKGHTIPLLQFARLLLRHRRIVSVDDEEPTISVTVFTTPKNQPFVSNFLSDVASSIKVISLPFPENIAGIPPGVESTDMLPSISLYVPFTRATKSLQPFFEAELKNLEKVSFMVSDGFLWWTSESAAKFEIPRLAFYGMNSYASAMCSAISVHELFTKPESVKSDTEPVTVPDFPWICVKKCEFDPVLTEPDQSDPAFELLIDHLMSTKKSRGVIVNSFYELESTFVDYRLRDNDEPKPWCVGPLCLVNPPKPESDKPDWIHWLDRKLEERCPVMYVAFGTQAEISNEQLKEIALGLEDSKVNFLWVTRKDLEEVTGGLGFEKRVKEHGMIVRDWVDQWEILSHKSVKGFLSHCGWNSAQESICAGVPLLAWPMMAEQPLNAKLVVEELKIGVRIETEDVSVKGFVTREELSRKVKQLMEGEMGKTTMKNVKEYAKMAKKAMAQGTGSSWKSLDSLLEELCKSREPDGVNKLSSSDA

SEQ ID NO: 29023 - protein, 478 aa, Arabidopsis thaliana
  misc_feature (1)..(478): Ceres Seq. ID no. 3598785
MSKGHTIPLLQFARLLLRHRRIVSVDDEEPTISVTVFTTPKNQPFVSNFLSDVASSIKVISLPFPENIAGIPPGVESTDMLPSISLYVPFTRATKSLQPFFEAELKNLEKVSFMVSDGFLWWTSESAAKFEIPRLAFYGMNSYASAMCSAISVHELFTKPESVKSDTEPVTVPDFPWICVKKCEFDPVLTEPDQSDPAFELLIDHLMSTKKSRGVIVNSFYELESTFVDYRLRDNDEPKPWCVGPLCLVNPPKPESDKPDWIHWLDRKLEERCPVMYVAFGTQAEISNEQLKEIALGLEDSKVNFLWVTRKDLEEVTGGLGFEKRVKEHGMIVRDWVDQWEILSHKSVKGFLSHCGWNSAQESICAGVPLLAWPMMAEQPLNAKLVVEELKIGVRIETEDVSVKGFVTREELSRKVKQLMEGEMGKTTMKNVKEYAKMAKKAMAQGTGSSWKSLDSLLEELCKSREPDGVNKLSSSDA

SEQ ID NO: 29024 - protein, 399 aa, Arabidopsis thaliana
  misc_feature (1)..(399): Ceres Seq. ID no. 3598786
MLPSISLYVPFTRATKSLQPFFEAELKNLEKVSFMVSDGFLWWTSESAAKFEIPRLAFYGMNSYASAMCSAISVHELFTKPESVKSDTEPVTVPDFPWICVKKCEFDPVLTEPDQSDPAFELLIDHLMSTKKSRGVIVNSFYELESTFVDYRLRDNDEPKPWCVGPLCLVNPPKPESDKPDWIHWLDRKLEERCPVMYVAFGTQAEISNEQLKEIALGLEDSKVNFLWVTRKDLEEVTGGLGFEKRVKEHGMIVRDWVDQWEILSHKSVKGFLSHCGWNSAQESICAGVPLLAWPMMAEQPLNAKLVVEELKIGVRIETEDVSVKGFVTREELSRKVKQLMEGEMGKTTMKNVKEYAKMAKKAMAQGTGSSWKSLDSLLEELCKSREPDGVNKLSSSDA

SEQ ID NO: 29025 - DNA, 2055 bp, Arabidopsis thaliana
  misc_feature (1)..(2055): Ceres Seq. ID no. 3599481
atgaatttctccaaacgatttgtagggtttaaacaacttagtatactccgttactcgcttccaaacccgtacggcctctttagagtttcacctttgtgtctctctgaaactgcaacaaagcttgaagcgatagggtttattcaagcttcactcaaaccagtcgctaaatttcgacatctttattcacatatctatagattcaagctttgtgatttgccattcgggtttcagattcgtgttggtaattcaatttctgaatcctctgctcctaaagagaagaatctgagatcagcaatggaaacggatctcaatgattatactgtcattaaggaaggagaagctgaggttcttatgcacaagaagaaccaagtcttcttcaacaaagctcaggttaacaatagggacatgtctattgctgtgctaagggcatttataatcaaacgcaagcaagagcatgaggctatgttatctaaaagagctagatcatctgggaaagtggttgagaaggatgtctctgaaacttccaaggaagaaactcctactgaaaacggtgacgataatggaaaaaccaatggagaacacgaagtaacaactcaggatggaccaaaggaagctgctaagaccgcatatgaatctgcacgaagggaactcaaaccaccaagagtgcttgaggccctgtcagcttcagggctacgggctttgaggtatgctcgtgaagttgaaggaattggtcaagttgtggctttagataatgacccagcatcggttgaagcctgccagagaaacattaagttcaatggtttgatgtctacttcaaaggtggagtcacatcttactgatgctcgtgttcacatgctcagccacccaaaagattttgatgtggttgatcttgacccatatggtgcgccgtctattttccttgactcagctgttcaatcagttgccgatggtggtttgctgatgtgtacagcaactgacatggcagtgttatgtggagctaacggcgaggtctgctattccaaatatggctcttatccactgaaagggaaatattgtcatgagatggctttgaggatcctcctcgccagcatcgagagccatgcaaatcgctacaagcggtatattgttcctgttctatcggtccaaatggatttctacgttcgtgtttttgtccgcgtctacacttcggcgagtgcaatgaagaatactccactaaagctctcatatgtctaccaatgcattggttgtgattcctttcatcttcagtctgttggaagatctctccctaagaataacagtgtgagatatctacctggagttggtcctgttgttcctcaggattgcactcattgtggaaagaaatataatatgggtggaccaatatggtctgctccaatccacgatcaagaatgggtgaattcgatactaaacggtgttaaatccatgaaagacagatatcctgcttacgaccgaatttgcgctgaattgccagatgttcctctctttttgagcctgcatagtctctctgcaacgctaaaatgtacttcaccatcagctgctttgtttcgatcagcggtaatcaatgcaaagtaccgtgtctctgggtcccatgtgaacccgcttgggattaaaactgatgctccaatggagattatctgggacatcatgcggtgctgggtgaaaaatcatcccataaagccgcaatcacctgaacatcctggaagtgtgattctatctaaagaaccatctcatcaggctgacttttcgcgccacgtcggttcgcttagtaaagcacaggcgaagaaagtagcccggtttctaccaaacccagagaagcattggggtcccaagataagggcaggtcgtacaatcacaagcaaacatgtatcgcttcttggtcatgaagcagtaaacggtcatctcaataacaatcataaagaagcaggagacgaagaagaagaagaagaagaagaagagcccgaagaagatatcatcgagggtgagccagagctcaaacgccaaaagacaacagaagattttgcctcaacatcatag

SEQ ID NO: 29026 - protein, 684 aa, Arabidopsis thaliana
  misc_feature (1)..(684): Ceres Seq. ID no. 3599482
MNFSKRFVGFKQLSILRYSLPNPYGLFRVSPLCLSETATKLEAIGFIQASLKPVAKFRHLYSHIYRFKLCDLPFGFQIRVGNSISESSAPKEKNLRSAMETDLNDYTVIKEGEAEVLMHKKNQVFFNKAQVNNRDMSIAVLRAFIIKRKQEHEAMLSKRARSSGKVVEKDVSETSKEETPTENGDDNGKTNGEHEVTTQDGPKEAAKTAYESARRELKPPRVLEALSASGLRALRYAREVEGIGQVVALDNDPASVEACQRNIKFNGLMSTSKVESHLTDARVHMLSHPKDFDVVDLDPYGAPSIFLDSAVQSVADGGLLMCTATDMAVLCGANGEVCYSKYGSYPLKGKYCHEMALRILLASIESHANRYKRYIVPVLSVQMDFYVRVFVRVYTSASAMKNTPLKLSYVYQCIGCDSFHLQSVGRSLPKNNSVRYLPGVGPVVPQDCTHCGKKYNMGGPIWSAPIHDQEWVNSILNGVKSMKDRYPAYDRICAELPDVPLFLSLHSLSATLKCTSPSAALFRSAVINAKYRVSGSHVNPLGIKTDAPMEIIWDIMRCWVKNHPIKPQSPEHPGSVILSKEPSHQADFSRHVGSLSKAQAKKVARFLPNPEKHWGPKIRAGRTITSKHVSLLGHEAVNGHLNNNHKEAGDEEEEEEEEEPEEDIIEGEPELKRQKTTEDFASTS

SEQ ID NO: 29027 - protein, 586 aa, Arabidopsis thaliana
  misc_feature (1)..(586): Ceres Seq. ID no. 3599483
METDLNDYTVIKEGEAEVLMHKKNQVFFNKAQVNNRDMSIAVLRAFIIKRKQEHEAMLSKRARSSGKVVEKDVSETSKEETPTENGDDNGKTNGEHEVTTQDGPKEAAKTAYESARRELKPPRVLEALSASGLRALRYAREVEGIGQVVALDNDPASVEACQRNIKFNGLMSTSKVESHLTDARVHMLSHPKDFDVVDLDPYGAPSIFLDSAVQSVADGGLLMCTATDMAVLCGANGEVCYSKYGSYPLKGKYCHEMALRILLASIESHANRYKRYIVPVLSVQMDFYVRVFVRVYTSASAMKNTPLKLSYVYQCIGCDSFHLQSVGRSLPKNNSVRYLPGVGPVVPQDCTHCGKKYNMGGPIWSAPIHDQEWVNSILNGVKSMKDRYPAYDRICAELPDVPLFLSLHSLSATLKCTSPSAALFRSAVINAKYRVSGSHVNPLGIKTDAPMEIIWDIMRCWVKNHPIKPQSPEHPGSVILSKEPSHQADFSRHVGSLSKAQAKKVARFLPNPEKHWGPKIRAGRTITSKHVSLLGHEAVNGHLNNNHKEAGDEEEEEEEEEPEEDIIEGEPELKRQKTTEDFASTS

SEQ ID NO: 29028 - protein, 567 aa, Arabidopsis thaliana
  misc_feature (1)..(567): Ceres Seq. ID no. 3599484
MHKKNQVFFNKAQVNNRDMSIAVLRAFIIKRKQEHEAMLSKRARSSGKVVEKDVSETSKEETPTENGDDNGKTNGEHEVTTQDGPKEAAKTAYESARRELKPPRVLEALSASGLRALRYAREVEGIGQVVALDNDPASVEACQRNIKFNGLMSTSKVESHLTDARVHMLSHPKDFDVVDLDPYGAPSIFLDSAVQSVADGGLLMCTATDMAVLCGANGEVCYSKYGSYPLKGKYCHEMALRILLASIESHANRYKRYIVPVLSVQMDFYVRVFVRVYTSASAMKNTPLKLSYVYQCIGCDSFHLQSVGRSLPKNNSVRYLPGVGPVVPQDCTHCGKKYNMGGPIWSAPIHDQEWVNSILNGVKSMKDRYPAYDRICAELPDVPLFLSLHSLSATLKCTSPSAALFRSAVINAKYRVSGSHVNPLGIKTDAPMEIIWDIMRCWVKNHPIKPQSPEHPGSVILSKEPSHQADFSRHVGSLSKAQAKKVARFLPNPEKHWGPKIRAGRTITSKHVSLLGHEAVNGHLNNNHKEAGDEEEEEEEEEPEEDIIEGEPELKRQKTTEDFASTS

SEQ ID NO: 29029 - DNA, 2556 bp, Arabidopsis thaliana
  misc_feature (1)..(2556): Ceres Seq. ID no. 3599601
atggaggatcgtcatcgttatctttttttcatatttgccattatacattatgttcaggctcaacaaggattcatcagtttggattgcgggttgccgagtaacgagcctccatatattgaaccggtaaccggattagtattctcatcggatgcggatcacatccctagtggaataagcggtagaatccagaagaatctggaagcagtacacataaagccgtatttgtttctgagatactttccagatgggctacgaaattgctatactctagatgtccttcagaaccgaagatacatgatcaaagctgtgtttgtgtatggaaattacgatggttataatgattatccgagttttgatctgtatctaggtcctaataagtgggtaagagttgacttggaaggaaaggtcaatggcagtgttgaagagattattcacataccaagttcaaactctctgcagatttgtcttgtcaagacaggtaattctttgccgttcatatccgccctggaactgaggcttttgagaaacgatacttatgttgtccaagacgtttccttgaagcatttatttcggaggtactatagacagtcagatcggttaatccggtatcctgacgatgtctatgatcgtgtttggtccccattcttcttaccggaatggacgcagataactaccagtttagatgtgaataactctaacaactacgagccaccaaaagcagcattaacatcagctgccacacctggagacaatggaacgcgattgaccattatttggactttggataaccctgatgagcaaattcacctgtatgttcactttgccgagcttgaacctgttggggaaaacactgacgaggccttgagaactttatttacaaggaccttttactttgtggtgaatggaaagattagttatgatgagagtattactcctttagacttggctgtaagtactgtagagactgtggtgaacaaatgcgatggcggtaactgcagtttgcagctggtacgcagcgaagcgtctccgggagtacgtgtacctctggttaatgctatggaggcattcactgcaatcaagtttccacattctgaaacaaatcctgatgatgtatggtatatctttaactctatgacagttatatctatcaaggttatccaagctacctatgaactgagcagagtcgactggcaaggagatccgtgtcttccccagcagtttttgtggactggcctaaactgcagctacatgaacatgtctacgtcaccaagaatcatttccttggacttgtcgaataacaagttgaccggaggtgtgcctgagtttctagccaacatgaagtcactgttgttcataaacctaagcaataacaatcttgttggttccattcctcaagcgcttcttgaccgaaaaaatctgaagttggagtttgaaggaaatccaaagctttgcgccacaggtccgtgtaacagttcaagtggaaataaagaaaccacagtcatagcacctgttgctgctgcaatagccatttttatagctgttttggttctcattattgttttcataaagaaaaggccatcaagtataagagctctacatccgtcacgggctaatttatctctggaaaataaaaaacgaaggatcacatattcagagatattgttgatgacaaataactttgaaagagttattggtgaaggagggtttggggtcgtctatcatggttatttgaatgatagtgagcaagtggctgttaaagtgctctctccgtcctcatctcaaggctataaagaattcaaagcagaggttgaacttctccttagagttcaccacataaatttggtaagccttgttggatattgtgatgaacaagcacacttagccctcatctacgagtacatggctaatggagacttaaaatcgcatctttcaggaaaacatggggactgtgttttaaaatgggaaaacagattaagcatagctgttgaaaccgcactaggattggagtacttgcatagtggatgcaaaccactaatggttcacagagatgtcaaaagcatgaatatactgttggatgagcacttccaagctaaactagcggatttcggactgtctagatctttttctgttggagaggaaagccatgtgtcgactggtgttgtaggcactcctggatacttagatcctgagtattacagaacatatcgcttgaccgaaaagagtgatgtctatagttttgggatcgtgttattggagataatcacaaatcaacccgtacttgagcaagctaacgaaaatcgacacatcgcagaacgtgtaaggactatgcttacaagaagtgatattagcaccattgttgatcctaacctcattggcgagtatgattctggttctgtgcggaaagctcttaaactagcgatgtcgtgtgtggatccatctccggttgcaagaccagacatgtcacatgttgttcaggagcttaaacagtgtatcaaatctgaaaacctgagactgaggacaggattgaaccaagtcatagactcgaaaagttcctag

SEQ ID NO: 29030 - protein, 851 aa, Arabidopsis thaliana
  misc_feature (1)..(851): Ceres Seq. ID no. 3599602
MEDRHRYLFFIFAIIHYVQAQQGFISLDCGLPSNEPPYIEPVTGLVFSSDADHIPSGISGRIQKNLEAVHIKPYLFLRYFPDGLRNCYTLDVLQNRRYMIKAVFVYGNYDGYNDYPSFDLYLGPNKWVRVDLEGKVNGSVEEIIHIPSSNSLQICLVKTGNSLPFISALELRLLRNDTYVVQDVSLKHLFRRYYRQSDRLIRYPDDVYDRVWSPFFLPEWTQITTSLDVNNSNNYEPPKAALTSAATPGDNGTRLTIIWTLDNPDEQIHLYVHFAELEPVGENTDEALRTLFTRTFYFVVNGKISYDESITPLDLAVSTVETVVNKCDGGNCSLQLVRSEASPGVRVPLVNAMEAFTAIKFPHSETNPDDVWYIFNSMTVISIKVIQATYELSRVDWQGDPCLPQQFLWTGLNCSYMNMSTSPRIISLDLSNNKLTGGVPEFLANMKSLLFINLSNNNLVGSIPQALLDRKNLKLEFEGNPKLCATGPCNSSSGNKETTVIAPVAAAIAIFIAVLVLIIVFIKKRPSSIRALHPSRANLSLENKKRRITYSEILLMTNNFERVIGEGGFGVVYHGYLNDSEQVAVKVLSPSSSQGYKEFKAEVELLLRVHHINLVSLVGYCDEQAHLALIYEYMANGDLKSHLSGKHGDCVLKWENRLSIAVETALGLEYLHSGCKPLMVHRDVKSMNILLDEHFQAKLADFGLSRSFSVGEESHVSTGVVGTPGYLDPEYYRTYRLTEKSDVYSFGIVLLEIITNQPVLEQANENRHIAERVRTMLTRSDISTIVDPNLIGEYDSGSVRKALKLAMSCVDPSPVARPDMSHVVQELKQCIKSENLRLRTGLNQVIDSKSS

SEQ ID NO: 29031 - protein, 753 aa, Arabidopsis thaliana
  misc_feature (1)..(753): Ceres Seq. ID no. 3599603
MIKAVFVYGNYDGYNDYPSFDLYLGPNKWVRVDLEGKVNGSVEEIIHIPSSNSLQICLVKTGNSLPFISALELRLLRNDTYVVQDVSLKHLFRRYYRQSDRLIRYPDDVYDRVWSPFFLPEWTQITTSLDVNNSNNYEPPKAALTSAATPGDNGTRLTIIWTLDNPDEQIHLYVHFAELEPVGENTDEALRTLFTRTFYFVVNGKISYDESITPLDLAVSTVETVVNKCDGGNCSLQLVRSEASPGVRVPLVNAMEAFTAIKFPHSETNPDDVWYIFNSMTVISIKVIQATYELSRVDWQGDPCLPQQFLWTGLNCSYMNMSTSPRIISLDLSNNKLTGGVPEFLANMKSLLFINLSNNNLVGSIPQALLDRKNLKLEFEGNPKLCATGPCNSSSGNKETTVIAPVAAAIAIFIAVLVLIIVFIKKRPSSIRALHPSRANLSLENKKRRITYSEILLMTNNFERVIGEGGFGVVYHGYLNDSEQVAVKVLSPSSSQGYKEFKAEVELLLRVHHINLVSLVGYCDEQAHLALIYEYMANGDLKSHLSGKHGDCVLKWENRLSIAVETALGLEYLHSGCKPLMVHRDVKSMNILLDEHFQAKLADFGLSRSFSVGEESHVSTGVVGTPGYLDPEYYRTYRLTEKSDVYSFGIVLLEIITNQPVLEQANENRHIAERVRTMLTRSDISTIVDPNLIGEYDSGSVRKALKLAMSCVDPSPVARPDMSHVVQELKQCIKSENLRLRTGLNQVIDSKSS

SEQ ID NO: 29032 - protein, 499 aa, Arabidopsis thaliana
  misc_feature (1)..(499): Ceres Seq. ID no. 3599604
MEAFTAIKFPHSETNPDDVWYIFNSMTVISIKVIQATYELSRVDWQGDPCLPQQFLWTGLNCSYMNMSTSPRIISLDLSNNKLTGGVPEFLANMKSLLFINLSNNNLVGSIPQALLDRKNLKLEFEGNPKLCATGPCNSSSGNKETTVIAPVAAAIAIFIAVLVLIIVFIKKRPSSIRALHPSRANLSLENKKRRITYSEILLMTNNFERVIGEGGFGVVYHGYLNDSEQVAVKVLSPSSSQGYKEFKAEVELLLRVHHINLVSLVGYCDEQAHLALIYEYMANGDLKSHLSGKHGDCVLKWENRLSIAVETALGLEYLHSGCKPLMVHRDVKSMNILLDEHFQAKLADFGLSRSFSVGEESHVSTGVVGTPGYLDPEYYRTYRLTEKSDVYSFGIVLLEIITNQPVLEQANENRHIAERVRTMLTRSDISTIVDPNLIGEYDSGSVRKALKLAMSCVDPSPVARPDMSHVVQELKQCIKSENLRLRTGLNQVIDSKSS

SEQ ID NO: 29033 - DNA, 936 bp, Arabidopsis thaliana
  misc_feature (1)..(936): Ceres Seq. ID no. 3599609
atgacgacggcgacgaacaagcaagttatattgaaagactacgtgagtggtttccctacggaatccaatttcgatttcactaccaccaccgtcgaacttagggttccggaaggtactaactctgttctggtgaagaacctatacttgtcatgcgatccttacatgagaatttgcatggggaaacctaatccttccactgctgctcttgctcaagcttacactcccggccaatgttatcacttgactcacgagcatttcaagatccaacatactgatgttccattgtcttactacactggacttctcggtatgcctggtatgaccgcatatgttgggttttatgagatctgttctccaaagaaaggagagacagtttatgtgtcagctgcatctggtgctgttggtcagcttgtgggacaatttgctaagatgatgggctgttatgttgttggaagtgctggtagcaaagaaaaggttgatctcctgaagaccaagtttgggtttgattatgcatttaactacaaggaagaacctgaccttagtgctgcgctcaaaaggtgtttccctaatggcattgacatatactttgagaatgtaggaggcaaaatgctagatgcagtgcttatgaacatgaacatgcacgggcgtatcgctgtctgtggaatgatctcacagtacaatcttgagaaccaagaaggtgtacacaacctatccaacataatctacaaacgaatccgcattcaaggctttgtagtgtctgatttctacgacgaatactcaaagttcttggagtttctgcatccgcacattaaagaagggaagataacgtacgtggaagatgtagctgatgggctcgagaaaggtcctgaagctctcgtgggactcttccatggtaagaatgttgggaaacaagttgttgttattgctcgtgaatga

SEQ ID NO: 29034 - protein, 311 aa, Arabidopsis thaliana
  misc_feature (1)..(311): Ceres Seq. ID no. 3599610
MTTATNKQVILKDYVSGFPTESNFDFTTTTVELRVPEGTNSVLVKNLYLSCDPYMRICMGKPNPSTAALAQAYTPGQCYHLTHEHFKIQHTDVPLSYYTGLLGMPGMTAYVGFYEICSPKKGETVYVSAASGAVGQLVGQFAKMMGCYVVGSAGSKEKVDLLKTKFGFDYAFNYKEEPDLSAALKRCFPNGIDIYFENVGGKMLDAVLMNMNMHGRIAVCGMISQYNLENQEGVHNLSNIIYKRIRIQGFVVSDFYDEYSKFLEFLHPHIKEGKITYVEDVADGLEKGPEALVGLFHGKNVGKQVVVIARE

SEQ ID NO: 29035 - protein, 257 aa, Arabidopsis thaliana
  misc_feature (1)..(257): Ceres Seq. ID no. 3599611
MRICMGKPNPSTAALAQAYTPGQCYHLTHEHFKIQHTDVPLSYYTGLLGMPGMTAYVGFYEICSPKKGETVYVSAASGAVGQLVGQFAKMMGCYVVGSAGSKEKVDLLKTKFGFDYAFNYKEEPDLSAALKRCFPNGIDIYFENVGGKMLDAVLMNMNMHGRIAVCGMISQYNLENQEGVHNLSNIIYKRIRIQGFVVSDFYDEYSKFLEFLHPHIKEGKITYVEDVADGLEKGPEALVGLFHGKNVGKQVVVIARE

SEQ ID NO: 29036 - protein, 253 aa, Arabidopsis thaliana
  misc_feature (1)..(253): Ceres Seq. ID no. 3599612
MGKPNPSTAALAQAYTPGQCYHLTHEHFKIQHTDVPLSYYTGLLGMPGMTAYVGFYEICSPKKGETVYVSAASGAVGQLVGQFAKMMGCYVVGSAGSKEKVDLLKTKFGFDYAFNYKEEPDLSAALKRCFPNGIDIYFENVGGKMLDAVLMNMNMHGRIAVCGMISQYNLENQEGVHNLSNIIYKRIRIQGFVVSDFYDEYSKFLEFLHPHIKEGKITYVEDVADGLEKGPEALVGLFHGKNVGKQVVVIARE

SEQ ID NO: 29037 - DNA, 1323 bp, Arabidopsis thaliana
  misc_feature (1)..(1323): Ceres Seq. ID no. 3599621
atggcgcttgatcctgagcagcagcaaccaatctcctctgtttccagagagtcatctggtgagatcagcccagaaagggagcctcttattaaagagaatcatgtcccagaaaactactctgtcgttgccgccattctcccgtttttatttccagctctcggaggactgctttatggttatgaaattggtgcaacttcttgtgcaaccatttcacttcaggagcctatgactttgctatcttactatgctgttcccttttctgcagtcgccttcattaagtggaatttcatgaccagtggctcactttacggtgcattatttggctcaattgtggcttttactatcgctgacgttataggaagaagaaaggagctgattttggctgcattattgtatctcgttggagcccttgtgactgcactagccccaacctattccgttctgataattggacgggttatttatggggtctcagttggactggcaatgcatgcggctccgatgtacattgcagagactgctccaagtccgatacgtggacagctggtatcattaaaggaattcttcatagtccttgggatggttggaggttatggaatcggtagtcttacagtcaatgttcattctggttggcgatacatgtatgcaacaagtgtccctttggcagttattatgggaattgggatgtggtggctcccagcatcccctaggtggcttttgttgcgcgtcatacaggggaaagggaatgtggagaaccaacgagaggctgcaatcaaatctctctgctgccttagaggccctgcttttgttgattcagctgctgaacaagtaaatgagattttggctgaactaacttttgtgggcgaggataaagaagtcacatttggtgaattatttcaagggaagtgcttgaaagctctcatcataggaggaggtctagtcttgtttcagcagttgattatgacaggagtagctgttgtagttatcgacagacttggaaggagacctttacttcttggtggagttggtggcatgcgcctcaccagttgttgctgtagttgcactgctgctttatgtgggctgttaccagagatatttccccttaaactaagaggtcgaggtctcagtctagcagtgcttgtgaattttggtgcaaacgcacttgtgacatttgcgttttcacccctaaaggaactgctgggagctgggatactgttttgtgggtttggtgtgatatgtgtattgtctctggtattcatattcttcattgtgccagagacaaagggtctcactcttgaggaaattgaagccaaatgtctctaa

SEQ ID NO: 29038 - protein, 440 aa, Arabidopsis thaliana
  misc_feature (1)..(440): Ceres Seq. ID no. 3599622
MALDPEQQQPISSVSRESSGEISPEREPLIKENHVPENYSVVAAILPFLFPALGGLLYGYEIGATSCATISLQEPMTLLSYYAVPFSAVAFIKWNFMTSGSLYGALFGSIVAFTIADVIGRRKELILAALLYLVGALVTALAPTYSVLIIGRVIYGVSVGLAMHAAPMYIAETAPSPIRGQLVSLKEFFIVLGMVGGYGIGSLTVNVHSGWRYMYATSVPLAVIMGIGMWWLPASPRWLLLRVIQGKGNVENQREAAIKSLCCLRGPAFVDSAAEQVNEILAELTFVGEDKEVTFGELFQGKCLKALIIGGGLVLFQQLIMTGVAVVVIDRLGRRPLLLGGVGGMRLTSCCCSCTAALCGLLPEIFPLKLRGRGLSLAVLVNFGANALVTFAFSPLKELLGAGILFCGFGVICVLSLVFIFFIVPETKGLTLEEIEAKCL

SEQ ID NO: 29039 - protein, 365 aa, Arabidopsis thaliana
  misc_feature (1)..(365): Ceres Seq. ID no. 3599623
MTLLSYYAVPFSAVAFIKWNFMTSGSLYGALFGSIVAFTIADVIGRRKELILAALLYLVGALVTALAPTYSVLIIGRVIYGVSVGLAMHAAPMYIAETAPSPIRGQLVSLKEFFIVLGMVGGYGIGSLTVNVHSGWRYMYATSVPLAVIMGIGMWWLPASPRWLLLRVIQGKGNVENQREAAIKSLCCLRGPAFVDSAAEQVNEILAELTFVGEDKEVTFGELFQGKCLKALIIGGGLVLFQQLIMTGVAVVVIDRLGRRPLLLGGVGGMRLTSCCCSCTAALCGLLPEIFPLKLRGRGLSLAVLVNFGANALVTFAFSPLKELLGAGILFCGFGVICVLSLVFIFFIVPETKGLTLEEIEAKCL

SEQ ID NO: 29040 - protein, 344 aa, Arabidopsis thaliana
  misc_feature (1)..(344): Ceres Seq. ID no. 3599624
MTSGSLYGALFGSIVAFTIADVIGRRKELILAALLYLVGALVTALAPTYSVLIIGRVIYGVSVGLAMHAAPMYIAETAPSPIRGQLVSLKEFFIVLGMVGGYGIGSLTVNVHSGWRYMYATSVPLAVIMGIGMWWLPASPRWLLLRVIQGKGNVENQREAAIKSLCCLRGPAFVDSAAEQVNEILAELTFVGEDKEVTFGELFQGKCLKALIIGGGLVLFQQLIMTGVAVVVIDRLGRRPLLLGGVGGMRLTSCCCSCTAALCGLLPEIFPLKLRGRGLSLAVLVNFGANALVTFAFSPLKELLGAGILFCGFGVICVLSLVFIFFIVPETKGLTLEEIEAKCL

SEQ ID NO: 29041 - DNA, 1461 bp, Arabidopsis thaliana
  misc_feature (1)..(1461): Ceres Seq. ID no. 3599727
atggccgtttcatcgtcgcatcatgcggttctcttcccttacatgtcaaaaggccacacgattcctctcctccaattcgcccgtctcctcctccgtcaccgccgtatcgtctccgtagacgacgaagaaccaaccatttccgtcaccgtcttcaccaccccaaaaaaccaaccattcgtctcaaacttcctctctgacgtcgcatcatctatcaaagtaatctccctccctttccctgaaaacatcgccggaatccctcccggcgtcgagagcaccgacatgctcccttccatatcactttacgtgcccttcacgcgcgcaaccaaatctctccagcctttcttcgaagcagaactcaagaatcttgagaaagtttctttcatggtctccgatggattcttatggtggacatcggaatccgccgctaaatttgagatcccgagacttgccttctacggcatgaactcctacgcatcggctatgtgctccgccatttcggtacacgagctctttaccaaaccggaaagtgttaaatctgatactgaaccggttactgtaccggattttccatggatatgtgttaagaagtgtgagttcgatccggttttgaccgaaccggatcaatcggatccagcgttcgagctactcattgaccatcttatgtccaccaagaaaagccgtggagttatagtgaacagcttttacgagctcgagtcaacgttcgttgactaccggctccgtgataacgatgaaccaaaaccgtggtgtgttgggcctttgtgtttggtaaatcctccaaaaccggagagtgataaaccggattggattcattggttggaccggaaactagaggaaagatgtccggttatgtatgtggcgtttggaacgcaggctgagatatcgaacgagcagctcaaggaaatagcattagggttggaagattccaaggtcaatttcttgtgggtcacgagaaaggacttggaagaagtaactggaggattagggttcgaaaagagagtgaaagagcatgggatgattgtgagagattgggtagaccaatgggagatattgtcacataaaagtgtcaaagggtttttgagtcattgtggatggaactcggcgcaagagagtatttgcgctggggttccactactcgcttggccaatgatggcagagcagccactcaatgcgaagttggtagtggaggagctaaagatcggagtaagaatcgaaacagaagatgtaagtgtgaaaggattcgtgacaagagaagaacttagtcgaaagggagagatggggaagacaacgatgaagaatgtaaaagagtatgcgaaaatggcgaaaaaagctatggctcaagggactggttcgtcttggaagagtttggattcgcttctggaagagctttgtaagagtagagagccagacggtgttaataagttgtcaagttctgatgcttag

SEQ ID NO: 29042 - protein, 486 aa, Arabidopsis thaliana
  misc_feature (1)..(486): Ceres Seq. ID no. 3599728
MAVSSSHHAVLFPYMSKGHTIPLLQFARLLLRHRRIVSVDDEEPTISVTVFTTPKNQPFVSNFLSDVASSIKVISLPFPENIAGIPPGVESTDMLPSISLYVPFTRATKSLQPFFEAELKNLEKVSFMVSDGFLWWTSESAAKFEIPRLAFYGMNSYASAMCSAISVHELFTKPESVKSDTEPVTVPDFPWICVKKCEFDPVLTEPDQSDPAFELLIDHLMSTKKSRGVIVNSFYELESTFVDYRLRDNDEPKPWCVGPLCLVNPPKPESDKPDWIHWLDRKLEERCPVMYVAFGTQAEISNEQLKEIALGLEDSKVNFLWVTRKDLEEVTGGLGFEKRVKEHGMIVRDWVDQWEILSHKSVKGFLSHCGWNSAQESICAGVPLLAWPMMAEQPLNAKLVVEELKIGVRIETEDVSVKGFVTREELSRKGEMGKTTMKNVKEYAKMAKKAMAQGTGSSWKSLDSLLEELCKSREPDGVNKLSSSDA

SEQ ID NO: 29043 - protein, 472 aa, Arabidopsis thaliana
  misc_feature (1)..(472): Ceres Seq. ID no. 3599729
MSKGHTIPLLQFARLLLRHRRIVSVDDEEPTISVTVFTTPKNQPFVSNFLSDVASSIKVISLPFPENIAGIPPGVESTDMLPSISLYVPFTRATKSLQPFFEAELKNLEKVSFMVSDGFLWWTSESAAKFEIPRLAFYGMNSYASAMCSAISVHELFTKPESVKSDTEPVTVPDFPWICVKKCEFDPVLTEPDQSDPAFELLIDHLMSTKKSRGVIVNSFYELESTFVDYRLRDNDEPKPWCVGPLCLVNPPKPESDKPDWIHWLDRKLEERCPVMYVAFGTQAEISNEQLKEIALGLEDSKVNFLWVTRKDLEEVTGGLGFEKRVKEHGMIVRDWVDQWEILSHKSVKGFLSHCGWNSAQESICAGVPLLAWPMMAEQPLNAKLVVEELKIGVRIETEDVSVKGFVTREELSRKGEMGKTTMKNVKEYAKMAKKAMAQGTGSSWKSLDSLLEELCKSREPDGVNKLSSSDA

SEQ ID NO: 29044 - protein, 393 aa, Arabidopsis thaliana
  misc_feature (1)..(393): Ceres Seq. ID no. 3599730
MLPSISLYVPFTRATKSLQPFFEAELKNLEKVSFMVSDGFLWWTSESAAKFEIPRLAFYGMNSYASAMCSAISVHELFTKPESVKSDTEPVTVPDFPWICVKKCEFDPVLTEPDQSDPAFELLIDHLMSTKKSRGVIVNSFYELESTFVDYRLRDNDEPKPWCVGPLCLVNPPKPESDKPDWIHWLDRKLEERCPVMYVAFGTQAEISNEQLKEIALGLEDSKVNFLWVTRKDLEEVTGGLGFEKRVKEHGMIVRDWVDQWEILSHKSVKGFLSHCGWNSAQESICAGVPLLAWPMMAEQPLNAKLVVEELKIGVRIETEDVSVKGFVTREELSRKGEMGKTTMKNVKEYAKMAKKAMAQGTGSSWKSLDSLLEELCKSREPDGVNKLSSSDA

SEQ ID NO: 29045 - DNA, 522 bp, Arabidopsis thaliana
  misc_feature (1)..(522): Ceres Seq. ID no. 3599785
atgggaaatgatcaacataaccacagtgacagaggattcttccacaacttagcagggtttgcaggcggccaatacccgcctcacggtcatggttacggtcatcatggtcacggttatggatcttcttatccatacccgcctcctcctcctcctcatggctatccaccagttgcttatcctccacatggtggttaccctcctgctggttatcctcccgctggttatcctccagccggttatcctgctcacggttatccatctcacggttatccccgtccatctcactcaggacatcaccatggaggcataggagcgattatagcgggtggagtggctgcagcagctggtgctcaccatatgtctcaccaccatggacactatggtcaccaccatggtcatggctatggctacgggtatcacggtcacgggaagttcaaacacggtaagttcaagcacggaaaattcggtaaacacggcatgtttgggaagcataaagggaaattcttcaagaaatggaagtga

SEQ ID NO: 29046 - protein, 173 aa, Arabidopsis thaliana
  misc_feature (1)..(173): Ceres Seq. ID no. 3599786
MGNDQHNHSDRGFFHNLAGFAGGQYPPHGHGYGHHGHGYGSSYPYPPPPPPHGYPPVAYPPHGGYPPAGYPPAGYPPAGYPAHGYPSHGYPRPSHSGHHHGGIGAIIAGGVAAAAGAHHMSHHHGHYGHHHGHGYGYGYHGHGKFKHGKFKHGKFGKHGMFGKHKGKFFKKWK

SEQ ID NO: 29047 - DNA, 2157 bp, Arabidopsis thaliana
  misc_feature (1)..(2157): Ceres Seq. ID no. 3599872
atgagaaatggaataaatattttatcttatccacgatttttgtcgttttgtgaggtctttgttctgctcttgtgtaacttcagcgataacccaaagttgcagacttttactcaaatgctaaactctctcttcctctcggcgcgagcttttccatctttgatcactaactcttcctctcggcgcgccaaaagttcccaatttgatcagtttagggaaaacagaggagtctctgatgctgcgattaaggttcctactgctccatggatgaaaggtcctctcttgcttcgacccgatgagattctcgacactaagaagagaaacaagccacggaaagttgaagagaagacgttcaaggcgttgaatcgtagagagagtggtgtcagaggaaagaaagcgatgaagaagatcgtgcgtaacgttgaaaagctcgatgaagatagtgattctgaagaaacccagatggatgatttgagcgaattcgagtatttaggtcgaattgaggagaaagttgagtccaaggatagatttggcgggaaaatgccatgggagagagaagaagagaggtttatattaaggaggatgaagaaggagagcgttccgactactgctgagcttattcttgacgagggattgttgaatagactgagacgtgaagcttcgaagatgagaaaatgggtgaatgtgaggaaagcaggtgttactgagttagttgtgaataagattaaatcgatgtggaagttgaatgagcttgctatggtgagatttgatgttcctctgtgtcgaaacatggagcgagctcaagagattatagagactggaggcttggttgtgttaagcaagaaggagtttttagttgtttatcgaggaggaccgagttattcatcagagggacaagatgagattagctcatcattgtacgagagagaagctgataggttactggatggtttgggacctagatatatggattggtggatgagaagaccgtttcccgttgatgctgacttgcttcctgaagttgttaatggatatatgactccatctagacgttgtccaccaaacactagagctaagctaaccgatgaagagcttacctacttgagaaacattgctcaacctttaccgtttcatttcgtccttgggaggaactatgggcttcaaggtttagcttccgctatcgtgaaactatgggagaaatgtattattgcaaagattgcaatcaaatggggagctctcaatacaaacaatgaggaaatggcagatgaattgaggtatctcactggcggtgttctgattctacgcaacaaatacttgatagtactatacagaggcaaggacttcctttctgatgaggtcgcggatttggttgaggacagagagagattactcagcagataccaacattttgaagaaactaaacgcgagagcgatatagaactcttggaggtggtaacaaatggtaaacagttgaaggaaacaaacaaaagtggaactttattagagtttcaagaactgcaaagaaaattcggagaaatggacccgagaaacctagagactgaagctgagaaagcaagactagagaaggaactcaaaagccaagaacacaagctttccatactaaaatcaaagatagagaaatcaaatatggagttgtttaaattaaattctttgtggaaaccatcggagggagatgatgacatcgagatattgactaatgaagaaagagaatgcttgagaagaatagggctgaagatgaacagcagcttagttcttggtagaagaggagtcttttttggtgtaatggaaggtctacatcagcattggaagcacagggaagtagcaaaagtgatcacgatgcagaagcttttctccagagttgtctacacagcaaaagcgcttgaaacagagagcaatggagtactaatctcaatcgaaaaacttaaagaagggcacgccatactcatataccgtggcaagaactacaaacgtccttcatcgaaactgatggcacagaatcttttgacgaaaagaaaagcattgcaacgatctgttgtgatgcagcgactcggctcactgaagttctttgcttaccagagagagagagcaatagaagatttgaaggtgagtttggtaaatcttcaagactctgctttctga

SEQ ID NO: 29048 - protein, 718 aa, Arabidopsis thaliana
  misc_feature (1)..(718): Ceres Seq. ID no. 3599873
MRNGINILSYPRFLSFCEVFVLLLCNFSDNPKLQTFTQMLNSLFLSARAFPSLITNSSSRRAKSSQFDQFRENRGVSDAAIKVPTAPWMKGPLLLRPDEILDTKKRNKPRKVEEKTFKALNRRESGVRGKKAMKKIVRNVEKLDEDSDSEETQMDDLSEFEYLGRIEEKVESKDRFGGKMPWEREEERFILRRMKKESVPTTAELILDEGLLNRLRREASKMRKWVNVRKAGVTELVVNKIKSMWKLNELAMVRFDVPLCRNMERAQEIIETGGLVVLSKKEFLVVYRGGPSYSSEGQDEISSSLYEREADRLLDGLGPRYMDWWMRRPFPVDADLLPEVVNGYMTPSRRCPPNTRAKLTDEELTYLRNIAQPLPFHFVLGRNYGLQGLASAIVKLWEKCIIAKIAIKWGALNTNNEEMADELRYLTGGVLILRNKYLIVLYRGKDFLSDEVADLVEDRERLLSRYQHFEETKRESDIELLEVVTNGKQLKETNKSGTLLEFQELQRKFGEMDPRNLETEAEKARLEKELKSQEHKLSILKSKIEKSNMELFKLNSLWKPSEGDDDIEILTNEERECLRRIGLKMNSSLVLGRRGVFFGVMEGLHQHWKHREVAKVITMQKLFSRVVYTAKALETESNGVLISIEKLKEGHAILIYRGKNYKRPSSKLMAQNLLTKRKALQRSVVMQRLGSLKFFAYQRERAIEDLKVSLVNLQDSAF

SEQ ID NO: 29049 - protein, 680 aa, Arabidopsis thaliana
  misc_feature (1)..(680): Ceres Seq. ID no. 3599874
MLNSLFLSARAFPSLITNSSSRRAKSSQFDQFRENRGVSDAAIKVPTAPWMKGPLLLRPDEILDTKKRNKPRKVEEKTFKALNRRESGVRGKKAMKKIVRNVEKLDEDSDSEETQMDDLSEFEYLGRIEEKVESKDRFGGKMPWEREEERFILRRMKKESVPTTAELILDEGLLNRLRREASKMRKWVNVRKAGVTELVVNKIKSMWKLNELAMVRFDVPLCRNMERAQEIIETGGLVVLSKKEFLVVYRGGPSYSSEGQDEISSSLYEREADRLLDGLGPRYMDWWMRRPFPVDADLLPEVVNGYMTPSRRCPPNTRAKLTDEELTYLRNIAQPLPFHFVLGRNYGLQGLASAIVKLWEKCIIAKIAIKWGALNTNNEEMADELRYLTGGVLILRNKYLIVLYRGKDFLSDEVADLVEDRERLLSRYQHFEETKRESDIELLEVVTNGKQLKETNKSGTLLEFQELQRKFGEMDPRNLETEAEKARLEKELKSQEHKLSILKSKIEKSNMELFKLNSLWKPSEGDDDIEILTNEERECLRRIGLKMNSSLVLGRRGVFFGVMEGLHQHWKHREVAKVITMQKLFSRVVYTAKALETESNGVLISIEKLKEGHAILIYRGKNYKRPSSKLMAQNLLTKRKALQRSVVMQRLGSLKFFAYQRERAIEDLKVSLVNLQDSAF

SEQ ID NO: 29050 - protein, 630 aa, Arabidopsis thaliana
  misc_feature (1)..(630): Ceres Seq. ID no. 3599875
MKGPLLLRPDEILDTKKRNKPRKVEEKTFKALNRRESGVRGKKAMKKIVRNVEKLDEDSDSEETQMDDLSEFEYLGRIEEKVESKDRFGGKMPWEREEERFILRRMKKESVPTTAELILDEGLLNRLRREASKMRKWVNVRKAGVTELVVNKIKSMWKLNELAMVRFDVPLCRNMERAQEIIETGGLVVLSKKEFLVVYRGGPSYSSEGQDEISSSLYEREADRLLDGLGPRYMDWWMRRPFPVDADLLPEVVNGYMTPSRRCPPNTRAKLTDEELTYLRNIAQPLPFHFVLGRNYGLQGLASAIVKLWEKCIIAKIAIKWGALNTNNEEMADELRYLTGGVLILRNKYLIVLYRGKDFLSDEVADLVEDRERLLSRYQHFEETKRESDIELLEVVTNGKQLKETNKSGTLLEFQELQRKFGEMDPRNLETEAEKARLEKELKSQEHKLSILKSKIEKSNMELFKLNSLWKPSEGDDDIEILTNEERECLRRIGLKMNSSLVLGRRGVFFGVMEGLHQHWKHREVAKVITMQKLFSRVVYTAKALETESNGVLISIEKLKEGHAILIYRGKNYKRPSSKLMAQNLLTKRKALQRSVVMQRLGSLKFFAYQRERAIEDLKVSLVNLQDSAF

SEQ ID NO: 29051 - DNA, 1296 bp, Arabidopsis thaliana
  misc_feature (1)..(1296): Ceres Seq. ID no. 3600122
atgaggctcctcttcagcttctgcttcttcttcttcatgatcatctttaccgcaactgcttatgatccattagatcctagtggtaacattacaatcaaatgggatattatgtcctggacggcagatggctatgtggctacggtaactatgaacaacttccaaatctaccggcacatacaaaaccctggttggacattaggttggacatgggcaaagaaagaggtgatttggtcaatggttggtgcacaaacaacagaacaaggagactgttccaagtttaagggaaatgtacctcattgctgtaagaaaacccctacagttgttgatctcttgccaggtgtgccttataatcaacagttctcaaactgttgcaaaggaggtgtaattggagcttggggtcaagatccatcagccgctgtatcccagtttcaggttagtgctggtttagctggaactacaaacaagactgtcaagcttcctaagaacttcactttgcttggtcccggccctggttacacttgcggtcctgccaaaatcgtgccctctaccgtttttctcacaactgacaaacggcgaaaaacacaagctttgatgacatggaatgttacctgcacatactcacagtttttagcaagaaagcatccaagctgttgtgtctccttctcttctttctacaacgacaccataactccttgcccgtcttgtgcctgtggctgcgagaacaaaaagagctgcgtcaaggctgattctaagattctaaccaagaaaggtctcaacacaccaaaaaaggacaacactcctttgttgcaatgcacacatcacatgtgccctgttagagtccactggcacgttaaaactaactacaaagactattggcgagtgaagatagcaatcacaaatttcaattaccggatgaatcatacactctggactttagcaattcagcatccaaatctcaacaatgtgactcaagttttcagctttgactacaaaccagtctctccttacggatccataaatgatactggaatgttctatggaacgaagttttacaatgatttattaatggaagctggaccttcagggaatgtgcaatcagaggttttgctacagaaagatcaaaagacttttactttcaagcaaggttgggcttttcctagaaaagtttactttaatggtgatgaatgtatgttacctccaccagattcatacccttttctaccaaactctgcacaagggaactttgcttcgttctcactcaccattcttcttctcctattcatctcaatatggtga

SEQ ID NO: 29052 - protein, 431 aa, Arabidopsis thaliana
  misc_feature (1)..(431): Ceres Seq. ID no. 3600123
MRLLFSFCFFFFMIIFTATAYDPLDPSGNITIKWDIMSWTADGYVATVTMNNFQIYRHIQNPGWTLGWTWAKKEVIWSMVGAQTTEQGDCSKFKGNVPHCCKKTPTVVDLLPGVPYNQQFSNCCKGGVIGAWGQDPSAAVSQFQVSAGLAGTTNKTVKLPKNFTLLGPGPGYTCGPAKIVPSTVFLTTDKRRKTQALMTWNVTCTYSQFLARKHPSCCVSFSSFYNDTITPCPSCACGCENKKSCVKADSKILTKKGLNTPKKDNTPLLQCTHHMCPVRVHWHVKTNYKDYWRVKIAITNFNYRMNHTLWTLAIQHPNLNNVTQVFSFDYKPVSPYGSINDTGMFYGTKFYNDLLMEAGPSGNVQSEVLLQKDQKTFTFKQGWAFPRKVYFNGDECMLPPPDSYPFLPNSAQGNFASFSLTILLLLFISIW

SEQ ID NO: 29053 - protein, 419 aa, Arabidopsis thaliana
  misc_feature (1)..(419): Ceres Seq. ID no. 3600124
MIIFTATAYDPLDPSGNITIKWDIMSWTADGYVATVTMNNFQIYRHIQNPGWTLGWTWAKKEVIWSMVGAQTTEQGDCSKFKGNVPHCCKKTPTVVDLLPGVPYNQQFSNCCKGGVIGAWGQDPSAAVSQFQVSAGLAGTTNKTVKLPKNFTLLGPGPGYTCGPAKIVPSTVFLTTDKRRKTQALMTWNVTCTYSQFLARKHPSCCVSFSSFYNDTITPCPSCACGCENKKSCVKADSKILTKKGLNTPKKDNTPLLQCTHHMCPVRVHWHVKTNYKDYWRVKIAITNFNYRMNHTLWTLAIQHPNLNNVTQVFSFDYKPVSPYGSINDTGMFYGTKFYNDLLMEAGPSGNVQSEVLLQKDQKTFTFKQGWAFPRKVYFNGDECMLPPPDSYPFLPNSAQGNFASFSLTILLLLFISIW

SEQ ID NO: 29054 - protein, 395 aa, Arabidopsis thaliana
  misc_feature (1)..(395): Ceres Seq. ID no. 3600125
MSWTADGYVATVTMNNFQIYRHIQNPGWTLGWTWAKKEVIWSMVGAQTTEQGDCSKFKGNVPHCCKKTPTVVDLLPGVPYNQQFSNCCKGGVIGAWGQDPSAAVSQFQVSAGLAGTTNKTVKLPKNFTLLGPGPGYTCGPAKIVPSTVFLTTDKRRKTQALMTWNVTCTYSQFLARKHPSCCVSFSSFYNDTITPCPSCACGCENKKSCVKADSKILTKKGLNTPKKDNTPLLQCTHHMCPVRVHWHVKTNYKDYWRVKIAITNFNYRMNHTLWTLAIQHPNLNNVTQVFSFDYKPVSPYGSINDTGMFYGTKFYNDLLMEAGPSGNVQSEVLLQKDQKTFTFKQGWAFPRKVYFNGDECMLPPPDSYPFLPNSAQGNFASFSLTILLLLFISIW

SEQ ID NO: 29055 - DNA, 1584 bp, Arabidopsis thaliana
  misc_feature (1)..(1584): Ceres Seq. ID no. 3600558
atggctaccacaaatgtcctcgccacgagccacgccttcaaattgaatggtgtcagctacttctcctcttttccccgcaaacctaaccactacatgcctcgtcgtcgtttatcacatactactcgtagagtccaaacttcgtgtttttatggtgagacgtcttttgaagctgtaacgtcgttagttacgcctaagacagaaacaagtcgtaacagtgacggaattggaatcgtccgtttcttagaagggaaaagctatcttgttactggtgcaacagggtttcttgccaaagtgttgattgagaaactgttgagggaaagtcttgaaattgggaagatcttccttctgatgagatccaaggatcaagaatcagcaaacaagagactctacgatgagatcataagctcggatctgttcaagcttctgaagcaaatgcatgggagctcttacgaagctttcatgaagagaaagttgattccagtaattggagacattgaggaagacaatctagggatcaaatctgaaatagcaaacatgatcagtgaggagattgatgttattatcagttgtggtggtcgtacaacattcgacgacagatacgattctgccctaagtgtcaatgctcttggaccggcttacgtgactggtaagagagaggggacagtactagaaactcctctctgcattggagaaaacataacttctgacttgaacatcaaatccgagctgaaactagcttcagaagctgtaagaaagttccgtggcagagaagaaatcaagaaactcaaagaactcggttttgaaagagctcaacactatgggtgggaaaatagttacacattcacaaaagccataggtgaggctgtaattcacagcaagcgaggaaacttgcctgtagtgatcataaggcctagtattatcgaaagctcttacaatgagcctttccctggctggatccaagggacaagaatggctgatccaatcatcttggcttatgccaaaggccagatttctgacttctgggcagatcctcaatctttgatggacattatacctgttgacatggttgcaaacgcagcaatagcagccatggcaaagcatggttgtggtgtcccagagttcaaagtttacaatttaacttcttcatctcatgtgaaccccatgcgtgctggcaaattgatagacctctctcatcaacatctgtgtgactttccattggaagaaacagtgatagacttagagcatatgaaaatccacagttccttagagggtttcacttctgctttatcgaacacaataataaaacaggaaagagtgattgataatgaaggaggaggattgagcacgaagggaaagaggaagctaaactattttgtgtccttggcaaaaacatatgagccttacacattctttcaagctcggtttgacaacaccaatacaacaagtctgatacaggagatgtcaatggaagagaaaaaaacgtttgggttcgatatcaaaggcattgactgggagcattacattgtcaacgttcatcttccaggtctcaaaaaggaatttctttctaagaagaagactgagtaa

SEQ ID NO: 29056 - protein, 527 aa, Arabidopsis thaliana
  misc_feature (1)..(527): Ceres Seq. ID no. 3600559
MATTNVLATSHAFKLNGVSYFSSFPRKPNHYMPRRRLSHTTRRVQTSCFYGETSFEAVTSLVTPKTETSRNSDGIGIVRFLEGKSYLVTGATGFLAKVLIEKLLRESLEIGKIFLLMRSKDQESANKRLYDEIISSDLFKLLKQMHGSSYEAFMKRKLIPVIGDIEEDNLGIKSEIANMISEEIDVIISCGGRTTFDDRYDSALSVNALGPAYVTGKREGTVLETPLCIGENITSDLNIKSELKLASEAVRKFRGREEIKKLKELGFERAQHYGWENSYTFTKAIGEAVIHSKRGNLPVVIIRPSIIESSYNEPFPGWIQGTRMADPIILAYAKGQISDFWADPQSLMDIIPVDMVANAAIAAMAKHGCGVPEFKVYNLTSSSHVNPMRAGKLIDLSHQHLCDFPLEETVIDLEHMKIHSSLEGFTSALSNTIIKQERVIDNEGGGLSTKGKRKLNYFVSLAKTYEPYTFFQARFDNTNTTSLIQEMSMEEKKTFGFDIKGIDWEHYIVNVHLPGLKKEFLSKKKTE

SEQ ID NO: 29057 - protein, 496 aa, Arabidopsis thaliana
  misc_feature (1)..(496): Ceres Seq. ID no. 3600560
MPRRRLSHTTRRVQTSCFYGETSFEAVTSLVTPKTETSRNSDGIGIVRFLEGKSYLVTGATGFLAKVLIEKLLRESLEIGKIFLLMRSKDQESANKRLYDEIISSDLFKLLKQMHGSSYEAFMKRKLIPVIGDIEEDNLGIKSEIANMISEEIDVIISCGGRTTFDDRYDSALSVNALGPAYVTGKREGTVLETPLCIGENITSDLNIKSELKLASEAVRKFRGREEIKKLKELGFERAQHYGWENSYTFTKAIGEAVIHSKRGNLPVVIIRPSIIESSYNEPFPGWIQGTRMADPIILAYAKGQISDFWADPQSLMDIIPVDMVANAAIAAMAKHGCGVPEFKVYNLTSSSHVNPMRAGKLIDLSHQHLCDFPLEETVIDLEHMKIHSSLEGFTSALSNTIIKQERVIDNEGGGLSTKGKRKLNYFVSLAKTYEPYTFFQARFDNTNTTSLIQEMSMEEKKTFGFDIKGIDWEHYIVNVHLPGLKKEFLSKKKTE

SEQ ID NO: 29058 - protein, 411 aa, Arabidopsis thaliana
  misc_feature (1)..(411): Ceres Seq. ID no. 3600561
MRSKDQESANKRLYDEIISSDLFKLLKQMHGSSYEAFMKRKLIPVIGDIEEDNLGIKSEIANMISEEIDVIISCGGRTTFDDRYDSALSVNALGPAYVTGKREGTVLETPLCIGENITSDLNIKSELKLASEAVRKFRGREEIKKLKELGFERAQHYGWENSYTFTKAIGEAVIHSKRGNLPVVIIRPSIIESSYNEPFPGWIQGTRMADPIILAYAKGQISDFWADPQSLMDIIPVDMVANAAIAAMAKHGCGVPEFKVYNLTSSSHVNPMRAGKLIDLSHQHLCDFPLEETVIDLEHMKIHSSLEGFTSALSNTIIKQERVIDNEGGGLSTKGKRKLNYFVSLAKTYEPYTFFQARFDNTNTTSLIQEMSMEEKKTFGFDIKGIDWEHYIVNVHLPGLKKEFLSKKKTE

SEQ ID NO: 29059 - DNA, 1725 bp, Arabidopsis thaliana
  misc_feature (1)..(1725): Ceres Seq. ID no. 3605403
atgggttttctctttggtttgttcataggaatcgcggtttctttcggtttggtcgtcgcatttgctcgctactctagtgtcagatccactcgtcgagctgatttggcaaagaccattgctgcatttgcaagaatgacagttcaagattcgagaaaacttctcccgggagatttttatccttcttgggttgtgttttctcagagacaaaagttgagttattctaaatgtcttttaaattggcttaatcttgaacttgaaaagatctggccttatgtaaatgaggcagcttctgagctgattaaaagcagtgtggaaccagtacttgaacagtatacaccagctatgttagcatctctcaagttctctaaattcacacttgggactgtggctcctcagttcacaggagtttctatcttagaaagtgaaagtggacctaatggaatcacaatggaacttgaaatgcaatgggatggtaatccaaaaatcgtgttggatgtcaaaaccttacttggcgtgtctctacctattgaggtcaaaaacataggattcacaggtgttttcaggctgattttcaaacctcttgttgatgaattcccttgctttggggcactttcttattcactccgcgagaagaaagggcttgattttaccctcaaagttataggtggtgaattaacatcaattccagggatttcagatgcaatcgaagaaactattcgtgacgccattgaagacagtataacatggccagttaggaaaattatacctattttaccaggagattacagtgatctggagttgaaacctgttggaaaattggatgtgaaggttgtgcaagcaaaggacttagctaacaaagacatgattggaaaatctgatccttacgctattgtattcattcgccctttgcctgacagaaccaaaaagaccaaaactattagtaactcgttgaatccgatttggaatgaacattttgagttcattgtggaagatgtctcaactcaacatttgacagtaagagtctttgacgacgaaggagttggatcttctcagcttattggggctgctcaagtaccgttaaatgaactcgtacccgggaaagttaaagatatttggttgaagttagtcaaggatttagagatccaaagggatacaaaaaataggggtcagttggagctcttatattgtcccttaggcaaagaaggcggattgaagaacccgtttaacccggactactcattgaccattttagagaaggtactgaagccggaaagcgaggattcggatgccacggatatgaaaaaactggtgacctcgaagaaaaaagatgtgatagtgagaggagtgttgtctgtgacagtggtggcagctgaagacttaccagctgtagattttatgggaaaagcagatgcatttgtggtaatcacattgaagaaatcagaaacgaaatccaagacaagggtagtaccggatagcttgaatccggtttggaaccagacgtttgattttgtagtggaagatgctttgcatgatctattgacgcttgaagtatgggaccatgacaaatttggcaaggacaagatagggagagtgataatgacattgacgcgagtgatgttagaaggagagtttcaagagtggtttgagttagatggagctaaatcagggaagctttgtgtccatcttaaatggactcctaggcttaagctcagagacgcctcttga

SEQ ID NO: 29060 - protein, 574 aa, Arabidopsis thaliana
  misc_feature (1)..(574): Ceres Seq. ID no. 3605404
MGFLFGLFIGIAVSFGLVVAFARYSSVRSTRRADLAKTIAAFARMTVQDSRKLLPGDFYPSWVVFSQRQKLSYSKCLLNWLNLELEKIWPYVNEAASELIKSSVEPVLEQYTPAMLASLKFSKFTLGTVAPQFTGVSILESESGPNGITMELEMQWDGNPKIVLDVKTLLGVSLPIEVKNIGFTGVFRLIFKPLVDEFPCFGALSYSLREKKGLDFTLKVIGGELTSIPGISDAIEETIRDAIEDSITWPVRKIIPILPGDYSDLELKPVGKLDVKVVQAKDLANKDMIGKSDPYAIVFIRPLPDRTKKTKTISNSLNPIWNEHFEFIVEDVSTQHLTVRVFDDEGVGSSQLIGAAQVPLNELVPGKVKDIWLKLVKDLEIQRDTKNRGQLELLYCPLGKEGGLKNPFNPDYSLTILEKVLKPESEDSDATDMKKLVTSKKKDVIVRGVLSVTVVAAEDLPAVDFMGKADAFVVITLKKSETKSKTRVVPDSLNPVWNQTFDFVVEDALHDLLTLEVWDHDKFGKDKIGRVIMTLTRVMLEGEFQEWFELDGAKSGKLCVHLKWTPRLKLRDAS

SEQ ID NO: 29061 - protein, 530 aa, Arabidopsis thaliana
  misc_feature (1)..(530): Ceres Seq. ID no. 3605405
MTVQDSRKLLPGDFYPSWVVFSQRQKLSYSKCLLNWLNLELEKIWPYVNEAASELIKSSVEPVLEQYTPAMLASLKFSKFTLGTVAPQFTGVSILESESGPNGITMELEMQWDGNPKIVLDVKTLLGVSLPIEVKNIGFTGVFRLIFKPLVDEFPCFGALSYSLREKKGLDFTLKVIGGELTSIPGISDAIEETIRDAIEDSITWPVRKIIPILPGDYSDLELKPVGKLDVKVVQAKDLANKDMIGKSDPYAIVFIRPLPDRTKKTKTISNSLNPIWNEHFEFIVEDVSTQHLTVRVFDDEGVGSSQLIGAAQVPLNELVPGKVKDIWLKLVKDLEIQRDTKNRGQLELLYCPLGKEGGLKNPFNPDYSLTILEKVLKPESEDSDATDMKKLVTSKKKDVIVRGVLSVTVVAAEDLPAVDFMGKADAFVVITLKKSETKSKTRVVPDSLNPVWNQTFDFVVEDALHDLLTLEVWDHDKFGKDKIGRVIMTLTRVMLEGEFQEWFELDGAKSGKLCVHLKWTPRLKLRDAS

SEQ ID NO: 29062 - protein, 460 aa, Arabidopsis thaliana
  misc_feature (1)..(460): Ceres Seq. ID no. 3605406
MLASLKFSKFTLGTVAPQFTGVSILESESGPNGITMELEMQWDGNPKIVLDVKTLLGVSLPIEVKNIGFTGVFRLIFKPLVDEFPCFGALSYSLREKKGLDFTLKVIGGELTSIPGISDAIEETIRDAIEDSITWPVRKIIPILPGDYSDLELKPVGKLDVKVVQAKDLANKDMIGKSDPYAIVFIRPLPDRTKKTKTISNSLNPIWNEHFEFIVEDVSTQHLTVRVFDDEGVGSSQLIGAAQVPLNELVPGKVKDIWLKLVKDLEIQRDTKNRGQLELLYCPLGKEGGLKNPFNPDYSLTILEKVLKPESEDSDATDMKKLVTSKKKDVIVRGVLSVTVVAAEDLPAVDFMGKADAFVVITLKKSETKSKTRVVPDSLNPVWNQTFDFVVEDALHDLLTLEVWDHDKFGKDKIGRVIMTLTRVMLEGEFQEWFELDGAKSGKLCVHLKWTPRLKLRDAS

SEQ ID NO: 29063 - DNA, 624 bp, Arabidopsis thaliana
  misc_feature (1)..(624): Ceres Seq. ID no. 3630021
atggaatcagagagcgttaagtttggaggtcctagagaattgggtggtgcactagatcttataacacaatacaagttgttgccacaccatgaattcttttgcaagagatcacttccagagtcactgtcagatgctcattatcttcataatttggttggagacacagagattagaaaaggagaaggaatgcaattagatcagcttattcctaatgcatcacttagtagccgagatacgaatgctcgcatccaaccttttgttcttgatgaacttaaggaggcttttgagcttaatgatacagctcctgttgaattgcctccagcagagaagggagctcctaccactgtatcaaaatcaaaaagtgagtcaaaagataaggataggaaacatagaaaacataaagacaagaaggagaaagatagggaacataagaagcacaagcacaagcataaagataggatcaaagataaggataaagacaaggatcgagacaaaaagaaggaaaaaagtggacaccatgataagaaaaggaagaacaatgggactgaagatgctgatgacgttcagaggcacaaaaagagtaagcataagagctcaaagcttgatgagatgggagcgatgtag

SEQ ID NO: 29064 - protein, 207 aa, Arabidopsis thaliana
  misc_feature (1)..(207): Ceres Seq. ID no. 3630022
MESESVKFGGPRELGGALDLITQYKLLPHHEFFCKRSLPESLSDAHYLHNLVGDTEIRKGEGMQLDQLIPNASLSSRDTNARIQPFVLDELKEAFELNDTAPVELPPAEKGAPTTVSKSKSESKDKDRKHRKHKDKKEKDREHKKHKHKHKDRIKDKDKDKDRDKKKEKSGHHDKKRKNNGTEDADDVQRHKKSKHKSSKLDEMGAM

SEQ ID NO: 29065 - protein, 145 aa, Arabidopsis thaliana
  misc_feature (1)..(145): Ceres Seq. ID no. 3630023
MQLDQLIPNASLSSRDTNARIQPFVLDELKEAFELNDTAPVELPPAEKGAPTTVSKSKSESKDKDRKHRKHKDKKEKDREHKKHKHKHKDRIKDKDKDKDRDKKKEKSGHHDKKRKNNGTEDADDVQRHKKSKHKSSKLDEMGAM

SEQ ID NO: 29066 - protein, 137 aa, Arabidopsis thaliana
  misc_feature (1)..(137): Ceres Seq. ID no. 3630024
MHHLVAEIRMLASNLLFLMNLRRLLSLMIQLLLNCLQQRRELLPLYQNQKVSQKIRIGNIENIKTRRRKIGNIRSTSTSIKIGSKIRIKTRIETKRRKKVDTMIRKGRTMGLKMLMTFRGTKRVSIRAQSLMRWERC

SEQ ID NO: 29067 - DNA, 1953 bp, Arabidopsis thaliana
  misc_feature (1)..(1953): Ceres Seq. ID no. 3631006
atggtgcggacattaggacgtaaactaagctggccaagatcttttagttttagaaagatgttcgatggtcggaactctggacattcatctttctcttctcgtggggatggcatgcatacacccgagcacgaactcgccggacatgctgcaccatccactcgtagaggcaagcaaaataggagatcagacatggaagtgatgaaggaaagattcgcaaaactgcttcttggagaggacatgtcaggcggtgggacaggggagacctctgcgttagctttgtcaaacgccatcaccaaactcgctgattcgatgtttggagagcagatgaaattgcagcctatgtatccggagacaaaagagaattggaggaaagaaatgggttggttattatctgtgattgatcacattgtccagtttgttccttctagacaaatgggtaaaaatggccaattcactgagatcatggttacaaaacaaagagatgatttgctgacgaacattccagctttacgcaaacttgactcggttcttctcgaaactttggacaacttcaaggatcagaaagacttttggtatgtgccaagagatatggaggatgcagatcacaatggagattggaggagggatgagaactggtggttaccagttgttaaggttccaacagatggcttgtctgaggaatcacgtagatggttgcagaatcagaaagattctgtggctcaagtccttaaagccgccacggccatcaatgctcatgtattgtctgaaatgcacgttcctgaaaactacattgattcccttccaaagaatgggaagacaagcttgggagattttctttacaagagcataacagaggagagctttgatcctgactactttgtctctttcttggatttgtcaacggaacacaaagtacttgatctaaagaacaggattgaagcttccatggtgatctggaagaggaagatgtgccagaaagagaaagacgggaaatctcagtggggatccactgttagcttagagaagagggagcttttcgaagtccgagctgagaccattttggttatgctcaaacaacaatttcctgggatcccacaatcctcccttgaagtctccaagattaaaaacaacaaggatgttggacaggcgattttggagagctattcaagggtactagagagtcttgcttcaaagataatgtcaagaatagaggatgttcttgaagccgatcggctagttcaaagacagttgatgggagaggcagagacaagatcagaaagcgaggcagaatcagaatacgaggaaactgaaaaggtggttgcagcggaaacaccaaactcgaggaaactatcagacttcatagggtggagattgtcatctgatactaagaagcatagttcaatgagtgatatagaattcttccacaaagttgagcaggagaaggagaagcccatgatgaagtctccaagagctctaccgaagaaattttcatatctagcaaaaacaacggaaaaggcaaatcgggatcagccaccggcgatgaaggaagacatggataagatggtggcggtagggctcgtatggggagccaccaatgctctgatccgtcgtggcgctcttgcctgggataaaacaaagtcttcttcgacaacagaatctcattctcctcctcttcagatccgccgcaaaatcatgattgctctccgcgactggatcaatctcctcctcttctggcaatactcaattcctttcctcataaacctctccgcctccgccacattcttcgcccttctcagtcacgctcccatctctcttgccgttccggtgactaacgccacaacctttgccgcaaccgccgcttttgggatccttttaggggaagaaactcaaatcggacttgctttgttaggtacgagctttattgtatttggaatttggctttgtgttctgtga

SEQ ID NO: 29068 - protein, 650 aa, Arabidopsis thaliana
  misc_feature (1)..(650): Ceres Seq. ID no. 3631007
MVRTLGRKLSWPRSFSFRKMFDGRNSGHSSFSSRGDGMHTPEHELAGHAAPSTRRGKQNRRSDMEVMKERFAKLLLGEDMSGGGTGETSALALSNAITKLADSMFGEQMKLQPMYPETKENWRKEMGWLLSVIDHIVQFVPSRQMGKNGQFTEIMVTKQRDDLLTNIPALRKLDSVLLETLDNFKDQKDFWYVPRDMEDADHNGDWRRDENWWLPVVKVPTDGLSEESRRWLQNQKDSVAQVLKAATAINAHVLSEMHVPENYIDSLPKNGKTSLGDFLYKSITEESFDPDYFVSFLDLSTEHKVLDLKNRIEASMVIWKRKMCQKEKDGKSQWGSTVSLEKRELFEVRAETILVMLKQQFPGIPQSSLEVSKIKNNKDVGQAILESYSRVLESLASKIMSRIEDVLEADRLVQRQLMGEAETRSESEAESEYEETEKVVAAETPNSRKLSDFIGWRLSSDTKKHSSMSDIEFFHKVEQEKEKPMMKSPRALPKKFSYLAKTTEKANRDQPPAMKEDMDKMVAVGLVWGATNALIRRGALAWDKTKSSSTTESHSPPLQIRRKIMIALRDWINLLLFWQYSIPFLINLSASATFFALLSHAPISLAVPVTNATTFAATAAFGILLGEETQIGLALLGTSFIVFGIWLCVL

SEQ ID NO: 29069 - protein, 631 aa, Arabidopsis thaliana
  misc_feature (1)..(631): Ceres Seq. ID no. 3631008
MFDGRNSGHSSFSSRGDGMHTPEHELAGHAAPSTRRGKQNRRSDMEVMKERFAKLLLGEDMSGGGTGETSALALSNAITKLADSMFGEQMKLQPMYPETKENWRKEMGWLLSVIDHIVQFVPSRQMGKNGQFTEIMVTKQRDDLLTNIPALRKLDSVLLETLDNFKDQKDFWYVPRDMEDADHNGDWRRDENWWLPVVKVPTDGLSEESRRWLQNQKDSVAQVLKAATAINAHVLSEMHVPENYIDSLPKNGKTSLGDFLYKSITEESFDPDYFVSFLDLSTEHKVLDLKNRIEASMVIWKRKMCQKEKDGKSQWGSTVSLEKRELFEVRAETILVMLKQQFPGIPQSSLEVSKIKNNKDVGQAILESYSRVLESLASKIMSRIEDVLEADRLVQRQLMGEAETRSESEAESEYEETEKVVAAETPNSRKLSDFIGWRLSSDTKKHSSMSDIEFFHKVEQEKEKPMMKSPRALPKKFSYLAKTTEKANRDQPPAMKEDMDKMVAVGLVWGATNALIRRGALAWDKTKSSSTTESHSPPLQIRRKIMIALRDWINLLLFWQYSIPFLINLSASATFFALLSHAPISLAVPVTNATTFAATAAFGILLGEETQIGLALLGTSFIVFGIWLCVL

SEQ ID NO: 29070 - protein, 613 aa, Arabidopsis thaliana
  misc_feature (1)..(613): Ceres Seq. ID no. 3631009
MHTPEHELAGHAAPSTRRGKQNRRSDMEVMKERFAKLLLGEDMSGGGTGETSALALSNAITKLADSMFGEQMKLQPMYPETKENWRKEMGWLLSVIDHIVQFVPSRQMGKNGQFTEIMVTKQRDDLLTNIPALRKLDSVLLETLDNFKDQKDFWYVPRDMEDADHNGDWRRDENWWLPVVKVPTDGLSEESRRWLQNQKDSVAQVLKAATAINAHVLSEMHVPENYIDSLPKNGKTSLGDFLYKSITEESFDPDYFVSFLDLSTEHKVLDLKNRIEASMVIWKRKMCQKEKDGKSQWGSTVSLEKRELFEVRAETILVMLKQQFPGIPQSSLEVSKIKNNKDVGQAILESYSRVLESLASKIMSRIEDVLEADRLVQRQLMGEAETRSESEAESEYEETEKVVAAETPNSRKLSDFIGWRLSSDTKKHSSMSDIEFFHKVEQEKEKPMMKSPRALPKKFSYLAKTTEKANRDQPPAMKEDMDKMVAVGLVWGATNALIRRGALAWDKTKSSSTTESHSPPLQIRRKIMIALRDWINLLLFWQYSIPFLINLSASATFFALLSHAPISLAVPVTNATTFAATAAFGILLGEETQIGLALLGTSFIVFGIWLCVL

SEQ ID NO: 29071 - DNA, 783 bp, Arabidopsis thaliana
  misc_feature (1)..(783): Ceres Seq. ID no. 3631246
atggaaggaggaactgcgcactacagccctcgaactgtcgaagaagtctttcgagattttaagggccgtcgagctggcatcatccaagctctcaccactgatgtggaagattttttccagcaatgcgaccctgagaagcagaatctctgcttgtatggattcccaaatgaagtgtgggaagttaacttaccagctgaagaagtgcctcctgagcttcccgaacctgcactcggcattaactttgccagagatgggatgcaggaaagaaactggctttctctcgttgctgtccacagtgatgcgtggttactttctgtgtctttttactttggttcaagatttggtttcgatagagctgacaggaagcgcttgtttagtatgataaatgaggttcctactgtatatgaagttgtaactggaaatgcagagaagcaaacaaaggaaatgccctcttcagcaaatcaaaatggcaacagatccaagtcaaattcaaaaatgagaggtttagaaagtaaaagttcaaagacgatacatgccaaggatgaggaagaaggattagagttagaagaaggggaagaggaagaggatgaggatgaagacgaacacggtgaaaccctatgtggagcatgtggagataactatgcttctgatgaattctggatttgctgtgacatgtgcgagaaatggttccacggggagtgtgtgaagatcactccagctagagcggagcatatcaagcattacaagtgccctacttgcagcaacaaaagagcacgaccctag

SEQ ID NO: 29072 - protein, 260 aa, Arabidopsis thaliana
  misc_feature (1)..(260): Ceres Seq. ID no. 3631247
MEGGTAHYSPRTVEEVFRDFKGRRAGIIQALTTDVEDFFQQCDPEKQNLCLYGFPNEVWEVNLPAEEVPPELPEPALGINFARDGMQERNWLSLVAVHSDAWLLSVSFYFGSRFGFDRADRKRLFSMINEVPTVYEVVTGNAEKQTKEMPSSANQNGNRSKSNSKMRGLESKSSKTIHAKDEEEGLELEEGEEEEDEDEDEHGETLCGACGDNYASDEFWICCDMCEKWFHGECVKITPARAEHIKHYKCPTCSNKRARP

SEQ ID NO: 29073 - protein, 175 aa, Arabidopsis thaliana
  misc_feature (1)..(175): Ceres Seq. ID no. 3631248
MQERNWLSLVAVHSDAWLLSVSFYFGSRFGFDRADRKRLFSMINEVPTVYEVVTGNAEKQTKEMPSSANQNGNRSKSNSKMRGLESKSSKTIHAKDEEEGLELEEGEEEEDEDEDEHGETLCGACGDNYASDEFWICCDMCEKWFHGECVKITPARAEHIKHYKCPTCSNKRARP

SEQ ID NO: 29074 - protein, 134 aa, Arabidopsis thaliana
  misc_feature (1)..(134): Ceres Seq. ID no. 3631249
MINEVPTVYEVVTGNAEKQTKEMPSSANQNGNRSKSNSKMRGLESKSSKTIHAKDEEEGLELEEGEEEEDEDEDEHGETLCGACGDNYASDEFWICCDMCEKWFHGECVKITPARAEHIKHYKCPTCSNKRARP

SEQ ID NO: 29075 - DNA, 1035 bp, Arabidopsis thaliana
  misc_feature (1)..(1035): Ceres Seq. ID no. 3646034
atgtggggagaaatgaagagtgtagttgcaatggtggcggttcagtttatcttcgccgggatgttcattttgtttaagataacggtcgacgatggtacgaatctcaaagttcttgtagcgtatcgtctgtcctttgctactattttcatgcttccccttgccctcatcttccaaaggaagaagcggccagaatttacatggaggctgctcttactagcatttgtttcggggttgctcggagcggcgataccaaatattctctacttgccgggtatggctcgaacatcagcgacattttcagctgcaagcagcataattagcccattgatcaccttggtgttgggtttggtgtttaggatggagactctacggctgggatcgaacgaagggagggccaagctagtggggacgctgcttggtgcatgtggagccctcgtgtttgtattctacaaaggtattgagattcatatctggtcaacacacgttgacttactcaaaggctcgcatactggtcgagccactacgaaccaccacgtctcaatcttaggggttcttatggcaaaaataggcaaggaacttggaggactttattggaacacaagtttgatgaatggggtgggaagtttggtgtgcgtgattattgctctctgttcggatcatgactgggagcaatggcaattaggatgggatattaacctcttagctacgctttattcgggaatcgtggtttcgggaatggtcgtgcctcttgttgcatggtgcatcgcaacaaaaggaccattatttgttactgtctttagccctataaggctggtgatcgtagccctaataggatcatttgctttagaggaacccctgcatttgggaagtataatcggtgccatgataatggtgggaggagtatacctagtggtatggtgtaaaatgaaggaaaaaaagagtgcgtctacgacttcggaccatattgaaacaaataagaataacaaagaactggaccttggcaatctttcatcagtaaatagagatgtcccctga

SEQ ID NO: 29076 - protein, 344 aa, Arabidopsis thaliana
  misc_feature (1)..(344): Ceres Seq. ID no. 3646035
MWGEMKSVVAMVAVQFIFAGMFILFKITVDDGTNLKVLVAYRLSFATIFMLPLALIFQRKKRPEFTWRLLLLAFVSGLLGAAIPNILYLPGMARTSATFSAASSIISPLITLVLGLVFRMETLRLGSNEGRAKLVGTLLGACGALVFVFYKGIEIHIWSTHVDLLKGSHTGRATTNHHVSILGVLMAKIGKELGGLYWNTSLMNGVGSLVCVIIALCSDHDWEQWQLGWDINLLATLYSGIVVSGMVVPLVAWCIATKGPLFVTVFSPIRLVIVALIGSFALEEPLHLGSIIGAMIMVGGVYLVVWCKMKEKKSASTTSDHIETNKNNKELDLGNLSSVNRDVP

SEQ ID NO: 29077 - protein, 340 aa, Arabidopsis thaliana
  misc_feature (1)..(340): Ceres Seq. ID no. 3646036
MKSVVAMVAVQFIFAGMFILFKITVDDGTNLKVLVAYRLSFATIFMLPLALIFQRKKRPEFTWRLLLLAFVSGLLGAAIPNILYLPGMARTSATFSAASSIISPLITLVLGLVFRMETLRLGSNEGRAKLVGTLLGACGALVFVFYKGIEIHIWSTHVDLLKGSHTGRATTNHHVSILGVLMAKIGKELGGLYWNTSLMNGVGSLVCVIIALCSDHDWEQWQLGWDINLLATLYSGIVVSGMVVPLVAWCIATKGPLFVTVFSPIRLVIVALIGSFALEEPLHLGSIIGAMIMVGGVYLVVWCKMKEKKSASTTSDHIETNKNNKELDLGNLSSVNRDVP

SEQ ID NO: 29078 - protein, 334 aa, Arabidopsis thaliana
  misc_feature (1)..(334): Ceres Seq. ID no. 3646037
MVAVQFIFAGMFILFKITVDDGTNLKVLVAYRLSFATIFMLPLALIFQRKKRPEFTWRLLLLAFVSGLLGAAIPNILYLPGMARTSATFSAASSIISPLITLVLGLVFRMETLRLGSNEGRAKLVGTLLGACGALVFVFYKGIEIHIWSTHVDLLKGSHTGRATTNHHVSILGVLMAKIGKELGGLYWNTSLMNGVGSLVCVIIALCSDHDWEQWQLGWDINLLATLYSGIVVSGMVVPLVAWCIATKGPLFVTVFSPIRLVIVALIGSFALEEPLHLGSIIGAMIMVGGVYLVVWCKMKEKKSASTTSDHIETNKNNKELDLGNLSSVNRDVP

SEQ ID NO: 29079 - DNA, 1851 bp, Arabidopsis thaliana
  misc_feature (1)..(1851): Ceres Seq. ID no. 3658934
atgtcgaatacgctttctttgattcaaagcaatgcctcgaatcccaaagtttgggtagtgatcggcgtgacggtggccgggatcgtgattctggcggagacccggaagcggcggattagagcccttagagaagaagactttggtgctttcttagatcgtttcgagcttcttcctttccctccgcctcctcctcctgctgctaaacaatctctctctggtcttaccttctccatctccgacgcgttcgatgttaaggattatatcacaggatttggttgtccacaatggaagaagactcatgaggctgctgagaaaactgctgtggttgtcacgacgctcttgaaaaatggagctacttgtgttggcaagactataatggatgagctgggttttgggattattggagaaaacaagcactatggaactcctattaatccattgatgccagataatgttcctggaggatgttccagtggctcagcagtttctgttggggctgaactcgttgacttttcacttgggattgataccactggtggtgttagagtcccagcagccttttgtggtattcttggttttcgaccatctcaggggactgtttcttcagttggagttttgcccaattctcagagcctagagactgttggatggtttgcctctgatccatccgttttgtgtcaagttggacatgccttactaaatctgagtgcagtaacacatagaaggcaaagatctttaatctttgctgatgatttattcgagctctctgacattcctaagcaaaagtcggtgcaagttgtcagaaaggcaatcgagaatctatctggctacaagactccaaaacatgttaacgttggccaatatgtcgcttcaaatgtaccaagtcttgcggaattctgtgagcaatctgggaaatcccaaaattcagcatcaactttaagggctctttcatctgtgatgttggctatacaaaggcatgagttcaaaacaaatcatgaagaatggtggcaaacatgcaaatcgtttctagggccaagattttccaatgatgttgttacagctctgaagagcaaaaacgagagcattaaatccctctacagagtgaaaaatgagatgcgggccaccattcaaagccttttaaaggaagatggaattctggtaatccccacagttgctgatccccctccaaggcttaacacaaagagaaataaatctttgaatgagtttcttgatcgtacttatgcactctcctgcattgcaagcatgtctggatgttgtcaggttacaattcctttaggggaacatggtgatcgtccaatatccgtgtcgcttcttacttactatggaggtgataagttccttctcgatacaactctcgatgtatatgcatcccttcaagaccaagccaaacttgcatccaacttagctccagtgtctgacaccaatggtaacatggaggcttctgaagttatgaaagaaaagggcaatgctgcatacaaggggaaacaatggaataaggcggtaaacttttatacagaagctataaaattgaatggagcaaatgctacttattattgcaatagagctgcagctttcttggaactttgctgcttccaacaagccgaacaagattgtaccaaggccatgttgatcgataagaagaatgtgaaggcatatttgagacgagggactgctagagaatcacttgtacggtacaaggaagctgctgcagggtattggagcgtaacattatggttgatcatctctgcagatttcaggcacgcattggtccttgaaccacagaacaagacggcaaaggttgctgagaagagactccgaaaacacatatga

SEQ ID NO: 29080 - protein, 616 aa, Arabidopsis thaliana
  misc_feature (1)..(616): Ceres Seq. ID no. 3658935
MSNTLSLIQSNASNPKVWVVIGVTVAGIVILAETRKRRIRALREEDFGAFLDRFELLPFPPPPPPAAKQSLSGLTFSISDAFDVKDYITGFGCPQWKKTHEAAEKTAVVVTTLLKNGATCVGKTIMDELGFGIIGENKHYGTPINPLMPDNVPGGCSSGSAVSVGAELVDFSLGIDTTGGVRVPAAFCGILGFRPSQGTVSSVGVLPNSQSLETVGWFASDPSVLCQVGHALLNLSAVTHRRQRSLIFADDLFELSDIPKQKSVQVVRKAIENLSGYKTPKHVNVGQYVASNVPSLAEFCEQSGKSQNSASTLRALSSVMLAIQRHEFKTNHEEWWQTCKSFLGPRFSNDVVTALKSKNESIKSLYRVKNEMRATIQSLLKEDGILVIPTVADPPPRLNTKRNKSLNEFLDRTYALSCIASMSGCCQVTIPLGEHGDRPISVSLLTYYGGDKFLLDTTLDVYASLQDQAKLASNLAPVSDTNGNMEASEVMKEKGNAAYKGKQWNKAVNFYTEAIKLNGANATYYCNRAAAFLELCCFQQAEQDCTKAMLIDKKNVKAYLRRGTARESLVRYKEAAAGYWSVTLWLIISADFRHALVLEPQNKTAKVAEKRLRKHI

SEQ ID NO: 29081 - protein, 491 aa, Arabidopsis thaliana
  misc_feature (1)..(491): Ceres Seq. ID no. 3658936
MDELGFGIIGENKHYGTPINPLMPDNVPGGCSSGSAVSVGAELVDFSLGIDTTGGVRVPAAFCGILGFRPSQGTVSSVGVLPNSQSLETVGWFASDPSVLCQVGHALLNLSAVTHRRQRSLIFADDLFELSDIPKQKSVQVVRKAIENLSGYKTPKHVNVGQYVASNVPSLAEFCEQSGKSQNSASTLRALSSVMLAIQRHEFKTNHEEWWQTCKSFLGPRFSNDVVTALKSKNESIKSLYRVKNEMRATIQSLLKEDGILVIPTVADPPPRLNTKRNKSLNEFLDRTYALSCIASMSGCCQVTIPLGEHGDRPISVSLLTYYGGDKFLLDTTLDVYASLQDQAKLASNLAPVSDTNGNMEASEVMKEKGNAAYKGKQWNKAVNFYTEAIKLNGANATYYCNRAAAFLELCCFQQAEQDCTKAMLIDKKNVKAYLRRGTARESLVRYKEAAAGYWSVTLWLIISADFRHALVLEPQNKTAKVAEKRLRKHI

SEQ ID NO: 29082 - protein, 469 aa, Arabidopsis thaliana
  misc_feature (1)..(469): Ceres Seq. ID no. 3658937
MPDNVPGGCSSGSAVSVGAELVDFSLGIDTTGGVRVPAAFCGILGFRPSQGTVSSVGVLPNSQSLETVGWFASDPSVLCQVGHALLNLSAVTHRRQRSLIFADDLFELSDIPKQKSVQVVRKAIENLSGYKTPKHVNVGQYVASNVPSLAEFCEQSGKSQNSASTLRALSSVMLAIQRHEFKTNHEEWWQTCKSFLGPRFSNDVVTALKSKNESIKSLYRVKNEMRATIQSLLKEDGILVIPTVADPPPRLNTKRNKSLNEFLDRTYALSCIASMSGCCQVTIPLGEHGDRPISVSLLTYYGGDKFLLDTTLDVYASLQDQAKLASNLAPVSDTNGNMEASEVMKEKGNAAYKGKQWNKAVNFYTEAIKLNGANATYYCNRAAAFLELCCFQQAEQDCTKAMLIDKKNVKAYLRRGTARESLVRYKEAAAGYWSVTLWLIISADFRHALVLEPQNKTAKVAEKRLRKHI

SEQ ID NO: 29083 - DNA, 912 bp, Arabidopsis thaliana
  misc_feature (1)..(912): Ceres Seq. ID no. 3658938
atgtttgatcatatgaaactgctgcgatgcttcagcttcacggcgtcgcgagattggttattccggcaatcattcgcaaacgccggtctacgttccgtaacgacagatctctcccacggcaattcaatcgcatcaacagctatgcattgttggattcctaaatccccgaatcgatctaaacctaatctcctcctcctccacggattcggcgccaacgcaatgtggcaatacggagaacatctccgagctttcaccggccgattcaacgtctacgttcccgatctcctcttcttcgggttatcatccacatcggaaccaaaccgaaccgaatctttccaggctcggtgtctgatgaggttaatggaagcgcacggagtccagaggatgaacatcgtcgggattagttacggtggattcgttgggtatagtttagcggcgcagtttccggagaacgttgagaagcttgtgctgtgctgcgcaggggtttgtttggaggagaaagatatggaggacggattgtttaaggtgccgaatctagaagaagctaccggaattttgattcctcagacgccggaaaagcttaaggaactcataagattctctttcgttaaaccaatcaaaggtgttccttcgttttttctctgggattttatcgatgagaagagagatttgatcaaatcaatactcaaagataggagactttctgatcttcctaggatcaaacagaaatcgttgatcatatggggagaagaagatcaaatatttccactggaactaggttacagattaaaaagacatataggagagagtgcagagatagtggtgatcaagaaagcaggacatgctgtgaatttggagaagtccaaggaatttgtcaagcatttgaaatcttttctcattgactctttgtga

SEQ ID NO: 29084 - protein, 303 aa, Arabidopsis thaliana
  misc_feature (1)..(303): Ceres Seq. ID no. 3658939
MFDHMKLLRCFSFTASRDWLFRQSFANAGLRSVTTDLSHGNSIASTAMHCWIPKSPNRSKPNLLLLHGFGANAMWQYGEHLRAFTGRFNVYVPDLLFFGLSSTSEPNRTESFQARCLMRLMEAHGVQRMNIVGISYGGFVGYSLAAQFPENVEKLVLCCAGVCLEEKDMEDGLFKVPNLEEATGILIPQTPEKLKELIRFSFVKPIKGVPSFFLWDFIDEKRDLIKSILKDRRLSDLPRIKQKSLIIWGEEDQIFPLELGYRLKRHIGESAEIVVIKKAGHAVNLEKSKEFVKHLKSFLIDSL

SEQ ID NO: 29085 - protein, 299 aa, Arabidopsis thaliana
  misc_feature (1)..(299): Ceres Seq. ID no. 3658940
MKLLRCFSFTASRDWLFRQSFANAGLRSVTTDLSHGNSIASTAMHCWIPKSPNRSKPNLLLLHGFGANAMWQYGEHLRAFTGRFNVYVPDLLFFGLSSTSEPNRTESFQARCLMRLMEAHGVQRMNIVGISYGGFVGYSLAAQFPENVEKLVLCCAGVCLEEKDMEDGLFKVPNLEEATGILIPQTPEKLKELIRFSFVKPIKGVPSFFLWDFIDEKRDLIKSILKDRRLSDLPRIKQKSLIIWGEEDQIFPLELGYRLKRHIGESAEIVVIKKAGHAVNLEKSKEFVKHLKSFLIDSL

SEQ ID NO: 29086 - protein, 256 aa, Arabidopsis thaliana
  misc_feature (1)..(256): Ceres Seq. ID no. 3658941
MHCWIPKSPNRSKPNLLLLHGFGANAMWQYGEHLRAFTGRFNVYVPDLLFFGLSSTSEPNRTESFQARCLMRLMEAHGVQRMNIVGISYGGFVGYSLAAQFPENVEKLVLCCAGVCLEEKDMEDGLFKVPNLEEATGILIPQTPEKLKELIRFSFVKPIKGVPSFFLWDFIDEKRDLIKSILKDRRLSDLPRIKQKSLIIWGEEDQIFPLELGYRLKRHIGESAEIVVIKKAGHAVNLEKSKEFVKHLKSFLIDSL

SEQ ID NO: 29087 - DNA, 855 bp, Arabidopsis thaliana
  misc_feature (1)..(855): Ceres Seq. ID no. 3659026
atgggtttcgtgtattacgtcacactgtttgttttcatcgatgattgggttggtttacaaagctcagctgggaaattaaacgccttactcttcagcttattggcgtctctctgtctcttctcgctctcaatttgcgttcttgtagatccaggtcgtgttcctgcatcttatgctcctgatgttgaggactctggctggtccaatagtaacgtgaaagtcgatggcttttttctttggtgttacaaaaggaggtttgatgttggtgttaagcttaggaagaatggctttatcgttgatgctgttacagaaacaaggaaatgtgataagtgctttgcatataagcctcttcggactcaccattgccgggtttgcagaagatgcgtcttgaagatggaccatcattgcctctggataaataactgtgttggttatgcaaactataaggctttcttcattcttgtgttttatgcaaccgtggcttccatctactctacagtgttgctggtttgctgtgcattcaagaacggagattcctatgcgggaaatgttccgctcaaaactttcattgtttcttgtgggatcttcatgatcggactaagcataacacttgggactctcctttgttggcatatctacctcatcacacacaatatgaccaccattgagcattatgattcaaagcgggcctcatggttagctagaaaatcaggacaaagctataggcatcaattcgatgttggcttttacaaaaacctcacctcggtgttaggccctaacatgatcaaatggctatgccccacatttactaggaatcctgaagacggtattagcttttctgcatcgagagacagctag

SEQ ID NO: 29088 - protein, 284 aa, Arabidopsis thaliana
  misc_feature (1)..(284): Ceres Seq. ID no. 3659027
MGFVYYVTLFVFIDDWVGLQSSAGKLNALLFSLLASLCLFSLSICVLVDPGRVPASYAPDVEDSGWSNSNVKVDGFFLWCYKRRFDVGVKLRKNGFIVDAVTETRKCDKCFAYKPLRTHHCRVCRRCVLKMDHHCLWINNCVGYANYKAFFILVFYATVASIYSTVLLVCCAFKNGDSYAGNVPLKTFIVSCGIFMIGLSITLGTLLCWHIYLITHNMTTIEHYDSKRASWLARKSGQSYRHQFDVGFYKNLTSVLGPNMIKWLCPTFTRNPEDGISFSASRDS

SEQ ID NO: 29089 - protein, 154 aa, Arabidopsis thaliana
  misc_feature (1)..(154): Ceres Seq. ID no. 3659028
MDHHCLWINNCVGYANYKAFFILVFYATVASIYSTVLLVCCAFKNGDSYAGNVPLKTFIVSCGIFMIGLSITLGTLLCWHIYLITHNMTTIEHYDSKRASWLARKSGQSYRHQFDVGFYKNLTSVLGPNMIKWLCPTFTRNPEDGISFSASRDS

SEQ ID NO: 29090 - DNA, 1812 bp, Arabidopsis thaliana
  misc_feature (1)..(1812): Ceres Seq. ID no. 3659142
atgtcgaatacgctttctttgattcaaagcaatgcctcgaatcccaaagtttgggtagtgatcggcgtgacggtggccgggatcgtgattctggcggagacccggaagcggcggattagagcccttagagaagaagactttggtgctttcttagatcgtttcgagcttcttcctttccctccgcctcctcctcctgctgctaaacaatctctctctggtcttaccttctccatctccgacgcgttcgatgttaaggattatatcacaggatttggttgtccacaatggaagaagactcatgaggctgctgagaaaactgctgtggttgtcacgacgctcttgaaaaatggagctacttgtgttggcaagactataatggatgagctgggttttgggattattggagaaaacaagcactatggaactcctattaatccattgatgccagataatgttcctggaggatgttccagtggctcagcagtttctgttggggctgaactcgttgacttttcacttgggattgataccactggtggtgttagagtcccagcagccttttgtggtattcttggttttcgaccatctcaggggactgtttcttcagttggagttttgcccaattctcagagcctagagactgttggatggtttgcctctgatccatccgttttgtgtcaagttggacatgccttactaaatctgagtgcagtaacacatagaaggcaaagatctttaatctttgctgatgatttattcgagctctctgacattcctaagcaaaagtcggtgcaagttgtcagaaaggcaatcgagaatctatctggctacaagactccaaaacatgttaacgttggccaatatgtcgcttcaaatgtaccaagtcttgcggaattctgtgagcaatctgggaaatcccaaaattcagcatcaactttaagggctctttcatctgtgatgttggctatacaaaggcatgagttcaaaacaaatcatgaagaatggtggcaaacatgcaaatcgtttctagggccaagattttccaatgatgttgttacagctctgaagagcaaaaacgagagcattaaatccctctacagagtgaaaaatgagatgcgggccaccattcaaagccttttaaaggaagatggaattctggtaatccccacagttgctgatccccctccaaggcttaacacaaagagaaataaatctttgaatgagtttcttgatcgtacttatgcactctcctgcattgcaagcatgtctggatgttgtcaggttacaattcctttaggggaacatggtgatcgtccaatatccgtgtcgcttcttacttactatggaggtgataagttccttctcgatacaactctcgatgtatatgcatcccttcaagaccaagccaaacttgcatccaacttagctccagtgtctgacaccaatggtaacatggaggcttctgaagttatgaaagaaaagggcaatgctgcatacaaggggaaacaatggaataaggcggtaaacttttatacagaagctataaaattgaatggagcaaatgctacttattattgcaatagagctgcagctttcttggaactttgctgcttccaacaagccgaacaagattgtaccaaggccatgttgatcgataagaagaatgtgaaggcatatttgagacgagggactgctagagaatcacttgtacggtacaaggaagctgctgcagatttcaggcacgcattggtccttgaaccacagaacaagacggcaaaggttgctgagaagagactccgaaaacacatatga

SEQ ID NO: 29091 - protein, 603 aa, Arabidopsis thaliana
  misc_feature (1)..(603): Ceres Seq. ID no. 3659143
MSNTLSLIQSNASNPKVWVVIGVTVAGIVILAETRKRRIRALREEDFGAFLDRFELLPFPPPPPPAAKQSLSGLTFSISDAFDVKDYITGFGCPQWKKTHEAAEKTAVVVTTLLKNGATCVGKTIMDELGFGIIGENKHYGTPINPLMPDNVPGGCSSGSAVSVGAELVDFSLGIDTTGGVRVPAAFCGILGFRPSQGTVSSVGVLPNSQSLETVGWFASDPSVLCQVGHALLNLSAVTHRRQRSLIFADDLFELSDIPKQKSVQVVRKAIENLSGYKTPKHVNVGQYVASNVPSLAEFCEQSGKSQNSASTLRALSSVMLAIQRHEFKTNHEEWWQTCKSFLGPRFSNDVVTALKSKNESIKSLYRVKNEMRATIQSLLKEDGILVIPTVADPPPRLNTKRNKSLNEFLDRTYALSCIASMSGCCQVTIPLGEHGDRPISVSLLTYYGGDKFLLDTTLDVYASLQDQAKLASNLAPVSDTNGNMEASEVMKEKGNAAYKGKQWNKAVNFYTEAIKLNGANATYYCNRAAAFLELCCFQQAEQDCTKAMLIDKKNVKAYLRRGTARESLVRYKEAAADFRHALVLEPQNKTAKVAEKRLRKHI

SEQ ID NO: 29092 - protein, 478 aa, Arabidopsis thaliana
  misc_feature (1)..(478): Ceres Seq. ID no. 3659144
MDELGFGIIGENKHYGTPINPLMPDNVPGGCSSGSAVSVGAELVDFSLGIDTTGGVRVPAAFCGILGFRPSQGTVSSVGVLPNSQSLETVGWFASDPSVLCQVGHALLNLSAVTHRRQRSLIFADDLFELSDIPKQKSVQVVRKAIENLSGYKTPKHVNVGQYVASNVPSLAEFCEQSGKSQNSASTLRALSSVMLAIQRHEFKTNHEEWWQTCKSFLGPRFSNDVVTALKSKNESIKSLYRVKNEMRATIQSLLKEDGILVIPTVADPPPRLNTKRNKSLNEFLDRTYALSCIASMSGCCQVTIPLGEHGDRPISVSLLTYYGGDKFLLDTTLDVYASLQDQAKLASNLAPVSDTNGNMEASEVMKEKGNAAYKGKQWNKAVNFYTEAIKLNGANATYYCNRAAAFLELCCFQQAEQDCTKAMLIDKKNVKAYLRRGTARESLVRYKEAAADFRHALVLEPQNKTAKVAEKRLRKHI

SEQ ID NO: 29093 - protein, 456 aa, Arabidopsis thaliana
  misc_feature (1)..(456): Ceres Seq. ID no. 3659145
MPDNVPGGCSSGSAVSVGAELVDFSLGIDTTGGVRVPAAFCGILGFRPSQGTVSSVGVLPNSQSLETVGWFASDPSVLCQVGHALLNLSAVTHRRQRSLIFADDLFELSDIPKQKSVQVVRKAIENLSGYKTPKHVNVGQYVASNVPSLAEFCEQSGKSQNSASTLRALSSVMLAIQRHEFKTNHEEWWQTCKSFLGPRFSNDVVTALKSKNESIKSLYRVKNEMRATIQSLLKEDGILVIPTVADPPPRLNTKRNKSLNEFLDRTYALSCIASMSGCCQVTIPLGEHGDRPISVSLLTYYGGDKFLLDTTLDVYASLQDQAKLASNLAPVSDTNGNMEASEVMKEKGNAAYKGKQWNKAVNFYTEAIKLNGANATYYCNRAAAFLELCCFQQAEQDCTKAMLIDKKNVKAYLRRGTARESLVRYKEAAADFRHALVLEPQNKTAKVAEKRLRKHI

SEQ ID NO: 29094 - DNA, 936 bp, Arabidopsis thaliana
  misc_feature (1)..(936): Ceres Seq. ID no. 3659146
atgtttgatcatatgaaactgctgcgatgcttcagcttcacggcgtcgcgagattggttattccggcaatcattcgcaaacgccggtctacgttccgtaacgacagatctctcccacggcaattcaatcgcatcaacagctatgcattgttggattcctaaatccccgaatcgatctaaacctaatctcctcctcctccacggattcggcgccaacgcaatgtggcaatacggagaacatctccgagctttcaccggccgattcaacgtctacgttcccgatctcctcttcttcgggttatcatccacatcggaaccaaaccgaaccgaatctttccaggctcggtgtctgatgaggttaatggaagcgcacggagtccagaggatgaacatcgtcgggattagttacggtggattcgttgggtatagtttagcggcgcagtttccggagaacgttgagaagcttgtgctgtgctgcgcaggggtttgtttggaggagaaagatatggaggacggattgtttaaggtgccgaatctagaagaagctaccggaattttgattcctcagacgccggaaaagcttaaggaactcataagattctctttcgttaaaccaatcaaaggtgttccttcgttttttctctgggattttatcgatgtaatgtgtacggagtttgtagaggagaagagagatttgatcaaatcaatactcaaagataggagactttctgatcttcctaggatcaaacagaaatcgttgatcatatggggagaagaagatcaaatatttccactggaactaggttacagattaaaaagacatataggagagagtgcagagatagtggtgatcaagaaagcaggacatgctgtgaatttggagaagtccaaggaatttgtcaagcatttgaaatcttttctcattgactctttgtga

SEQ ID NO: 29095 - protein, 311 aa, Arabidopsis thaliana
  misc_feature (1)..(311): Ceres Seq. ID no. 3659147
MFDHMKLLRCFSFTASRDWLFRQSFANAGLRSVTTDLSHGNSIASTAMHCWIPKSPNRSKPNLLLLHGFGANAMWQYGEHLRAFTGRFNVYVPDLLFFGLSSTSEPNRTESFQARCLMRLMEAHGVQRMNIVGISYGGFVGYSLAAQFPENVEKLVLCCAGVCLEEKDMEDGLFKVPNLEEATGILIPQTPEKLKELIRFSFVKPIKGVPSFFLWDFIDVMCTEFVEEKRDLIKSILKDRRLSDLPRIKQKSLIIWGEEDQIFPLELGYRLKRHIGESAEIVVIKKAGHAVNLEKSKEFVKHLKSFLIDSL

SEQ ID NO: 29096 - protein, 307 aa, Arabidopsis thaliana
  misc_feature (1)..(307): Ceres Seq. ID no. 3659148
MKLLRCFSFTASRDWLFRQSFANAGLRSVTTDLSHGNSIASTAMHCWIPKSPNRSKPNLLLLHGFGANAMWQYGEHLRAFTGRFNVYVPDLLFFGLSSTSEPNRTESFQARCLMRLMEAHGVQRMNIVGISYGGFVGYSLAAQFPENVEKLVLCCAGVCLEEKDMEDGLFKVPNLEEATGILIPQTPEKLKELIRFSFVKPIKGVPSFFLWDFIDVMCTEFVEEKRDLIKSILKDRRLSDLPRIKQKSLIIWGEEDQIFPLELGYRLKRHIGESAEIVVIKKAGHAVNLEKSKEFVKHLKSFLIDSL

SEQ ID NO: 29097 - protein, 264 aa, Arabidopsis thaliana
  misc_feature (1)..(264): Ceres Seq. ID no. 3659149
MHCWIPKSPNRSKPNLLLLHGFGANAMWQYGEHLRAFTGRFNVYVPDLLFFGLSSTSEPNRTESFQARCLMRLMEAHGVQRMNIVGISYGGFVGYSLAAQFPENVEKLVLCCAGVCLEEKDMEDGLFKVPNLEEATGILIPQTPEKLKELIRFSFVKPIKGVPSFFLWDFIDVMCTEFVEEKRDLIKSILKDRRLSDLPRIKQKSLIIWGEEDQIFPLELGYRLKRHIGESAEIVVIKKAGHAVNLEKSKEFVKHLKSFLIDSL

SEQ ID NO: 29098 - DNA, 3984 bp, Arabidopsis thaliana
  misc_feature (1)..(3984): Ceres Seq. ID no. 3659406
atgggtaatgttgaaattccgaattggcttaaagctttgccattggcacctgtgtttagacctacagacactgaatttgcagatcccattgcttacatatcgaaaatcgaaaaggaagctagtgcctttgggatttgcaagatcattcctcctttacccaagccatcgaaaaagtatgttttctacaacttgaacaagtctcttttgaagtgtcccgaattggtttcagatgttgacatttcgaaggtgtgtaaagaggatagagctgtattcaccactaggcagcaagagttaggccaaactgtgaaaaaaaacaaaggagagaagggtaagagtaattctcaaaggagtggtgttaagcaggtttggcaaagtggaggcgtttatacattggatcagtttgaagctaagtcgaaagctttctacaaaacccaattaggaacggttaaggaactggcaccagttgtcattgaggcattgttctggaaagcggctttagagaagcctatatatatagagtatgctaatgacgtgcctggctctgctttcggtgagccagaggatcatttcaggcatttccggcagaggaagaggaggggcaggggattttatcagaggaagacagaaaataatgatccatcaggtaagaacggtgaaaagtcatcgcctgaggtagaaaaggcaccccttgcttctacaagtttatcatctcaggattcgtccaagcagaagaacatggatattgttgatgaaatggaaggtactgcaggctggaagctctccaacagttcgtggaaccttcagatgattgcacgttcacctggttctgttacacgtttcatgccagatgacattcctggtgttacatctcccatggtttatatcggtatgttgttcagttggtttgcctggcacgttgaggatcatgagcttcacagtatgaattatcttcacactggctcaccaaagacttggtacgctgtcccttgtgattatgcgcttgactttgaagaggttatccgcaaaaattcttatggcaggaacattgaccaactggctgctctcacccaactaggcgaaaagacaactcttgtatcacctgagatgatagttgcatctggcattccctgctgtaggttggtacaaaatcctggtgaatttgttgtgacttttccgaggtcttatcatgtaggattcagccacgtggctcaacgtagcaaaggaagctgctgtgcgtcgggcagccatgaattatctacccatgctgtcccatcagcagctgctatatctcttgactatgtcctttgtttcaaggcagtgccacgatcattgctaccaggtggtcgtagctcccgactaagagatcggcagagagaagaaagagagttccttgtgaaaagagcttttgtagaagatatattgaacgaaaacaagaatttatctgttcttcttcgagaaccaggctctcgtttggtgatgtgggaccctgatttacttccgcgtcatagcgcactggctcttgcagctgctggagttgctggtgcttctgctgtttcacctccagcagtggcaaaaaaagaacttgaggagggtcattctgaattgcagaataaagaaaagacttctcttttagaggaattgagcttgttcatggagaagctgaatgatgtatactacgacgatgatgatggtctgcttaacgatttccaagttgatactggaaccttgccatgtgtggcttgtggcgttcttggcttcccctttatgtctgtggtacagccttctgaaaaagcattaaaagatctctcagagagacaaggagagacagatgctcaggaaattatgacactgtcatcagaaaagtctgactgcgaatggaaaacgtcttctagatatataagacctcgcattttctgcctcgaacacactattgaacttcagagactgctgcaatcaagaggtggattgaaattccttgttatttgccataaagactttcaaaaattcaaggcacatgcggctatagtggcagaggaggtcaaagtccctttcagctatgatgatgtcctgttagagagtgcatctcaggaagagttgagtctaattgatcttgcaattgaagatgaagaaaaatacgaacacagtgtagactggacctcagaacttggcatcaatttacggtactgtgtgaaagtgaggaaaaattcccctactaagaaaattcagcatgcactgtcactaggtggcttgttctccgatacaagccagatgctagattttacaactatcagatggctgcagagaaaatcacgctcaaaagctaaacccagttctacctcaagtttcacaccttgtgaacatcttgaagtaaaagcagatggaaaattaagggataatttggattctcagaccggaaaaaaggaagaaaagatcatccagtactcgagaaagaaaaagttgaatccaaagccttcagcagaacaagttcaggagctagctaccctagctaaatcaaaagattttgataagacatgtaaaaattttagcagtaggtcacatctggatagtgcaattcgttctgagatgaacagtgagattggagactctggaagggtcattggggtatcattttccataaatccttgtagctcatctttcactgtgggacatgggcaagaacatcccgagatcactgtcaagtttggttcagatttagatgggaatgtcacaaatagtttgagtatggtgaatggagactctgctgacctaaccttaacctccatatccagagagcagcaccaaggacactctatgaccagcaataataatggctccaactcaggtagtcatgttgtggcaagccagaccatacttgtttctacaggtgataatcatgacggaccaagaaaattgtctggtgattatgtctgcagtgatgtgtctgtacgtggtattcaggaagcggttgaaatgagtgaccaagagtttggagaacctaggtctactgtcactaatattgaggatgaacagcaatcacagattgtgaaaccaacccaaagagaagctgtatttggtgatcacgaacaggtggagggagcagaagctgtgtctaccagagaaaacttgtgctctgaaataattctgcacactgagcattcttcagctcatgtgggtatggaaattcctgacataaacacggccagtgagaacttagttgttgacatgacccatgatggtgaacctttggaaagtagcgatatattaagttcgagcaatggtgatgaagcttcttcaaatggattgcaagttctaaatgatgagcttagcatggagagtgaagtttcaagctcagaaaacaccgaagttattgaggctcccaattctatgggagaagcaaagaagaagcggaaaatagaatcagagtctgagacaaatgataatccagagagtagcattggtttcataaggagtccttgtgaagggttgaggtcaaggggcaagaggaaagcaacatgtgaaacttcattaaagcacactgaaacgagtgatgaagagaagaaacccattgcgaaaaggctgaagaaaacaccaaaggcttgctcagggagtcgtcagcaagaagtccccacgacaactcaccccaaccgttgttacctagagggatgcaagatgacttttgagagtaaagcgaaattacaaactcacaagagaaaccgttgcactcacgaagggtgtggaaagaaattcagggctcacaaatatctggtgcttcatcaacgtgtgcataaggatgaaagacctttcgagtgctcttggaaaggatgttcaatgactttcaaatggcaatgggcgaggacagaacatttgcgtctgcacacgggagagcgaccatacatatgcaaggtcgatggatgtggattgtcgtttaggtttgtatctgactatagtcgccacagacgtaaaaccatgcactatgtcacatag

SEQ ID NO: 29099 - protein, 1327 aa, Arabidopsis thaliana
  misc_feature (1)..(1327): Ceres Seq. ID no. 3659407
MGNVEIPNWLKALPLAPVFRPTDTEFADPIAYISKIEKEASAFGICKIIPPLPKPSKKYVFYNLNKSLLKCPELVSDVDISKVCKEDRAVFTTRQQELGQTVKKNKGEKGKSNSQRSGVKQVWQSGGVYTLDQFEAKSKAFYKTQLGTVKELAPVVIEALFWKAALEKPIYIEYANDVPGSAFGEPEDHFRHFRQRKRRGRGFYQRKTENNDPSGKNGEKSSPEVEKAPLASTSLSSQDSSKQKNMDIVDEMEGTAGWKLSNSSWNLQMIARSPGSVTRFMPDDIPGVTSPMVYIGMLFSWFAWHVEDHELHSMNYLHTGSPKTWYAVPCDYALDFEEVIRKNSYGRNIDQLAALTQLGEKTTLVSPEMIVASGIPCCRLVQNPGEFVVTFPRSYHVGFSHVAQRSKGSCCASGSHELSTHAVPSAAAISLDYVLCFKAVPRSLLPGGRSSRLRDRQREEREFLVKRAFVEDILNENKNLSVLLREPGSRLVMWDPDLLPRHSALALAAAGVAGASAVSPPAVAKKELEEGHSELQNKEKTSLLEELSLFMEKLNDVYYDDDDGLLNDFQVDTGTLPCVACGVLGFPFMSVVQPSEKALKDLSERQGETDAQEIMTLSSEKSDCEWKTSSRYIRPRIFCLEHTIELQRLLQSRGGLKFLVICHKDFQKFKAHAAIVAEEVKVPFSYDDVLLESASQEELSLIDLAIEDEEKYEHSVDWTSELGINLRYCVKVRKNSPTKKIQHALSLGGLFSDTSQMLDFTTIRWLQRKSRSKAKPSSTSSFTPCEHLEVKADGKLRDNLDSQTGKKEEKIIQYSRKKKLNPKPSAEQVQELATLAKSKDFDKTCKNFSSRSHLDSAIRSEMNSEIGDSGRVIGVSFSINPCSSSFTVGHGQEHPEITVKFGSDLDGNVTNSLSMVNGDSADLTLTSISREQHQGHSMTSNNNGSNSGSHVVASQTILVSTGDNHDGPRKLSGDYVCSDVSVRGIQEAVEMSDQEFGEPRSTVTNIEDEQQSQIVKPTQREAVFGDHEQVEGAEAVSTRENLCSEIILHTEHSSAHVGMEIPDINTASENLVVDMTHDGEPLESSDILSSSNGDEASSNGLQVLNDELSMESEVSSSENTEVIEAPNSMGEAKKKRKIESESETNDNPESSIGFIRSPCEGLRSRGKRKATCETSLKHTETSDEEKKPIAKRLKKTPKACSGSRQQEVPTTTHPNRCYLEGCKMTFESKAKLQTHKRNRCTHEGCGKKFRAHKYLVLHQRVHKDERPFECSWKGCSMTFKWQWARTEHLRLHTGERPYICKVDGCGLSFRFVSDYSRHRRKTMHYVT

SEQ ID NO: 29100 - protein, 1082 aa, Arabidopsis thaliana
  misc_feature (1)..(1082): Ceres Seq. ID no. 3659408
MDIVDEMEGTAGWKLSNSSWNLQMIARSPGSVTRFMPDDIPGVTSPMVYIGMLFSWFAWHVEDHELHSMNYLHTGSPKTWYAVPCDYALDFEEVIRKNSYGRNIDQLAALTQLGEKTTLVSPEMIVASGIPCCRLVQNPGEFVVTFPRSYHVGFSHVAQRSKGSCCASGSHELSTHAVPSAAAISLDYVLCFKAVPRSLLPGGRSSRLRDRQREEREFLVKRAFVEDILNENKNLSVLLREPGSRLVMWDPDLLPRHSALALAAAGVAGASAVSPPAVAKKELEEGHSELQNKEKTSLLEELSLFMEKLNDVYYDDDDGLLNDFQVDTGTLPCVACGVLGFPFMSVVQPSEKALKDLSERQGETDAQEIMTLSSEKSDCEWKTSSRYIRPRIFCLEHTIELQRLLQSRGGLKFLVICHKDFQKFKAHAAIVAEEVKVPFSYDDVLLESASQEELSLIDLAIEDEEKYEHSVDWTSELGINLRYCVKVRKNSPTKKIQHALSLGGLFSDTSQMLDFTTIRWLQRKSRSKAKPSSTSSFTPCEHLEVKADGKLRDNLDSQTGKKEEKIIQYSRKKKLNPKPSAEQVQELATLAKSKDFDKTCKNFSSRSHLDSAIRSEMNSEIGDSGRVIGVSFSINPCSSSFTVGHGQEHPEITVKFGSDLDGNVTNSLSMVNGDSADLTLTSISREQHQGHSMTSNNNGSNSGSHVVASQTILVSTGDNHDGPRKLSGDYVCSDVSVRGIQEAVEMSDQEFGEPRSTVTNIEDEQQSQIVKPTQREAVFGDHEQVEGAEAVSTRENLCSEIILHTEHSSAHVGMEIPDINTASENLVVDMTHDGEPLESSDILSSSNGDEASSNGLQVLNDELSMESEVSSSENTEVIEAPNSMGEAKKKRKIESESETNDNPESSIGFIRSPCEGLRSRGKRKATCETSLKHTETSDEEKKPIAKRLKKTPKACSGSRQQEVPTTTHPNRCYLEGCKMTFESKAKLQTHKRNRCTHEGCGKKFRAHKYLVLHQRVHKDERPFECSWKGCSMTFKWQWARTEHLRLHTGERPYICKVDGCGLSFRFVSDYSRHRRKTMHYVT

SEQ ID NO: 29101 - protein, 1076 aa, Arabidopsis thaliana
  misc_feature (1)..(1076): Ceres Seq. ID no. 3659409
MEGTAGWKLSNSSWNLQMIARSPGSVTRFMPDDIPGVTSPMVYIGMLFSWFAWHVEDHELHSMNYLHTGSPKTWYAVPCDYALDFEEVIRKNSYGRNIDQLAALTQLGEKTTLVSPEMIVASGIPCCRLVQNPGEFVVTFPRSYHVGFSHVAQRSKGSCCASGSHELSTHAVPSAAAISLDYVLCFKAVPRSLLPGGRSSRLRDRQREEREFLVKRAFVEDILNENKNLSVLLREPGSRLVMWDPDLLPRHSALALAAAGVAGASAVSPPAVAKKELEEGHSELQNKEKTSLLEELSLFMEKLNDVYYDDDDGLLNDFQVDTGTLPCVACGVLGFPFMSVVQPSEKALKDLSERQGETDAQEIMTLSSEKSDCEWKTSSRYIRPRIFCLEHTIELQRLLQSRGGLKFLVICHKDFQKFKAHAAIVAEEVKVPFSYDDVLLESASQEELSLIDLAIEDEEKYEHSVDWTSELGINLRYCVKVRKNSPTKKIQHALSLGGLFSDTSQMLDFTTIRWLQRKSRSKAKPSSTSSFTPCEHLEVKADGKLRDNLDSQTGKKEEKIIQYSRKKKLNPKPSAEQVQELATLAKSKDFDKTCKNFSSRSHLDSAIRSEMNSEIGDSGRVIGVSFSINPCSSSFTVGHGQEHPEITVKFGSDLDGNVTNSLSMVNGDSADLTLTSISREQHQGHSMTSNNNGSNSGSHVVASQTILVSTGDNHDGPRKLSGDYVCSDVSVRGIQEAVEMSDQEFGEPRSTVTNIEDEQQSQIVKPTQREAVFGDHEQVEGAEAVSTRENLCSEIILHTEHSSAHVGMEIPDINTASENLVVDMTHDGEPLESSDILSSSNGDEASSNGLQVLNDELSMESEVSSSENTEVIEAPNSMGEAKKKRKIESESETNDNPESSIGFIRSPCEGLRSRGKRKATCETSLKHTETSDEEKKPIAKRLKKTPKACSGSRQQEVPTTTHPNRCYLEGCKMTFESKAKLQTHKRNRCTHEGCGKKFRAHKYLVLHQRVHKDERPFECSWKGCSMTFKWQWARTEHLRLHTGERPYICKVDGCGLSFRFVSDYSRHRRKTMHYVT

SEQ ID NO: 29102 - DNA, 2901 bp, Arabidopsis thaliana
  misc_feature (1)..(2901): Ceres Seq. ID no. 4263808
atgttcactggggtcaaaaagatgaagaagatacatgttcctccagaaacaggcaagttcatgttctgtctcttcttcagcttcttatcttgttgccatgtatgtttctctgagttgtcgttgaaccagacaaacacaatgatcgaactctctagtttccttaatatctcggattggaatcttcctggttctgagaggaatccatgttcatggaacggtgttctctgcagcttaccagacaatagctctgtgattagcctgtctctctctaactttgatctctccaattcttccttcttaccacttgtctgcaatctccagactttggagtctcttgatgtctccaacaacagattgagctcaatcccagaagggttcgttacaaattgcgaaagactcattgctctgaagcatctgaacttcagcacgaacaagttttctacttcccctggtttccgcggtttctccaaattggcggttcttgatttctctcacaacgtgttgagtgggaacgttggagactatggttttgatgggttggttcagttgaggagtttgaatcttagcttcaacagattaactggttctgttccggttcatttgaccaaaagtctagagaagcttgaggtttcagataatagtttgagcggtactattcccgaaggcatcaaagattatcaagaactaacgctgatagatctcagtgataatcagcttaacggctctatcccgagttcgttgggaaacctctccaagttagaaagtttacttctctccaacaactatcttagtggactaatcccagaatcactttcaagcatccagacattgcgtcggtttgcagcgaaccgtaaccgattcacgggagaaattccatcagggctcacaaaacacctcgagaacttagatctcagtttcaacagtttagcggggtcgattccaggtgaccttttgtcgcagcttaaactcgtctctgtggatctgtcatctaatcaacttgttggatggataccacaaagcatttcgtctagcctggttaggctaagactaggaagcaataagctaacagggtcagtaccctctgttgcgtttgaatcgctgcagctcctaacgtatctggagatggacaacaacagtttaactggcttcatacctccttcatttggaaatcttgtgagcttgaatctcctgaacttggctatgaacgagttcaccgggatcttacctcctgcatttggaaaccttagcaggcttcaagtgataaaactacagcaaaacaagcttacgggagaaataccagatacaatcgcatttttgagtaacctcttgattcttaacatcagctgcaattctctaagtggatccataccgccttcgctttctcagctaaagaggctttccaacatgaacttgcaaggcaacaatctgaatggtaccatacctgataacattcaaaatctggaggatttgatagaacttcagctgggacaaaaccagctacgagggaggatcccagtaatgccacgaaagttgcaaatttccttaaatctcagctacaacttgtttgaaggatctatccctactacattgtctgaacttgaccgcttggaagttcttgatctgtcaaataacaacttctccggcgaaatacctaatttcctgagcagattaatgtcccttacacagctcatactctccaacaatcagcttaccggaaatattccaaggttcacccataatgtttcagtcgatgtcagaggaaaccctggggttaagttgaaaactgagaacgaagtctctatccagagaaatccatcagggaaaagcaaactagttatgattgtaatatttgtctcccttggagttcttgctctgcttacagggatcataactgtcaccgtgctgaaattttcaaggcgctgcaaggggattaacaacatgcaggtcgacccagatgaagaagggtcaactgttctccctgaggtaattcatggaaagcttctcacttcaaacgctctacatagatcaaacatcaacttcgccaaagctgtggaagctgttgcgcatccagaacatggtctgcatcagacaatgttctggagttactacagagttgtcatgccctctggttcgagttacttcatcaaaaaacttaacacaagagacagggttttccagcaagcgagtagtgagcaactagaggtagagctagagatgttgggcaagctacatcacacaaacgtaatggttccactagcttatgtcctctattcagaaggatgcttactcatctatgacttttctcacacatgtacactttacgagattctacacaaccatagcagtggtgtggttgattggacaagcaggtatagtattgcggttggcatagctcagggaatctcttacttgcatggatccgaatccagcggtcgtgatccaatccttctaccagatctgtctagtaaaaaaatactactcaagtcgctcactgagcctctagtaggggacattgaactgttcaaggtaatcgatccttccaaaagcaacagcagcctctcagcagttgcaggcaccatcggctacattccaccagagtatgcttacacgatgagggtgacaatggctgggaacgtctacagctttggggtgattcttttagagttgttaactggaaggccagctgtaagtgaaggaagagatttggctaagtgggtgcagagccattcgagccatcaagagcagcagaacaacattcttgatctcagagtgagcaaaacatcaactgtagcaacaaagcagatgctccgtgccctcggtgttgctcttgcctgcataaacatctctcctggggcaagaccaaagatgaagactgttctacggatgctcacaagactctaa

SEQ ID NO: 29103 - protein, 966 aa, Arabidopsis thaliana
  misc_feature (1)..(966): Ceres Seq. ID no. 4263809
MFTGVKKMKKIHVPPETGKFMFCLFFSFLSCCHVCFSELSLNQTNTMIELSSFLNISDWNLPGSERNPCSWNGVLCSLPDNSSVISLSLSNFDLSNSSFLPLVCNLQTLESLDVSNNRLSSIPEGFVTNCERLIALKHLNFSTNKFSTSPGFRGFSKLAVLDFSHNVLSGNVGDYGFDGLVQLRSLNLSFNRLTGSVPVHLTKSLEKLEVSDNSLSGTIPEGIKDYQELTLIDLSDNQLNGSIPSSLGNLSKLESLLLSNNYLSGLIPESLSSIQTLRRFAANRNRFTGEIPSGLTKHLENLDLSFNSLAGSIPGDLLSQLKLVSVDLSSNQLVGWIPQSISSSLVRLRLGSNKLTGSVPSVAFESLQLLTYLEMDNNSLTGFIPPSFGNLVSLNLLNLAMNEFTGILPPAFGNLSRLQVIKLQQNKLTGEIPDTIAFLSNLLILNISCNSLSGSIPPSLSQLKRLSNMNLQGNNLNGTIPDNIQNLEDLIELQLGQNQLRGRIPVMPRKLQISLNLSYNLFEGSIPTTLSELDRLEVLDLSNNNFSGEIPNFLSRLMSLTQLILSNNQLTGNIPRFTHNVSVDVRGNPGVKLKTENEVSIQRNPSGKSKLVMIVIFVSLGVLALLTGIITVTVLKFSRRCKGINNMQVDPDEEGSTVLPEVIHGKLLTSNALHRSNINFAKAVEAVAHPEHGLHQTMFWSYYRVVMPSGSSYFIKKLNTRDRVFQQASSEQLEVELEMLGKLHHTNVMVPLAYVLYSEGCLLIYDFSHTCTLYEILHNHSSGVVDWTSRYSIAVGIAQGISYLHGSESSGRDPILLPDLSSKKILLKSLTEPLVGDIELFKVIDPSKSNSSLSAVAGTIGYIPPEYAYTMRVTMAGNVYSFGVILLELLTGRPAVSEGRDLAKWVQSHSSHQEQQNNILDLRVSKTSTVATKQMLRALGVALACINISPGARPKMKTVLRMLTRL

SEQ ID NO: 29104 - protein, 959 aa, Arabidopsis thaliana
  misc_feature (1)..(959): Ceres Seq. ID no. 4263810
MKKIHVPPETGKFMFCLFFSFLSCCHVCFSELSLNQTNTMIELSSFLNISDWNLPGSERNPCSWNGVLCSLPDNSSVISLSLSNFDLSNSSFLPLVCNLQTLESLDVSNNRLSSIPEGFVTNCERLIALKHLNFSTNKFSTSPGFRGFSKLAVLDFSHNVLSGNVGDYGFDGLVQLRSLNLSFNRLTGSVPVHLTKSLEKLEVSDNSLSGTIPEGIKDYQELTLIDLSDNQLNGSIPSSLGNLSKLESLLLSNNYLSGLIPESLSSIQTLRRFAANRNRFTGEIPSGLTKHLENLDLSFNSLAGSIPGDLLSQLKLVSVDLSSNQLVGWIPQSISSSLVRLRLGSNKLTGSVPSVAFESLQLLTYLEMDNNSLTGFIPPSFGNLVSLNLLNLAMNEFTGILPPAFGNLSRLQVIKLQQNKLTGEIPDTIAFLSNLLILNISCNSLSGSIPPSLSQLKRLSNMNLQGNNLNGTIPDNIQNLEDLIELQLGQNQLRGRIPVMPRKLQISLNLSYNLFEGSIPTTLSELDRLEVLDLSNNNFSGEIPNFLSRLMSLTQLILSNNQLTGNIPRFTHNVSVDVRGNPGVKLKTENEVSIQRNPSGKSKLVMIVIFVSLGVLALLTGIITVTVLKFSRRCKGINNMQVDPDEEGSTVLPEVIHGKLLTSNALHRSNINFAKAVEAVAHPEHGLHQTMFWSYYRVVMPSGSSYFIKKLNTRDRVFQQASSEQLEVELEMLGKLHHTNVMVPLAYVLYSEGCLLIYDFSHTCTLYEILHNHSSGVVDWTSRYSIAVGIAQGISYLHGSESSGRDPILLPDLSSKKILLKSLTEPLVGDIELFKVIDPSKSNSSLSAVAGTIGYIPPEYAYTMRVTMAGNVYSFGVILLELLTGRPAVSEGRDLAKWVQSHSSHQEQQNNILDLRVSKTSTVATKQMLRALGVALACINISPGARPKMKTVLRMLTRL

SEQ ID NO: 29105 - protein, 946 aa, Arabidopsis thaliana
  misc_feature (1)..(946): Ceres Seq. ID no. 4263811
MFCLFFSFLSCCHVCFSELSLNQTNTMIELSSFLNISDWNLPGSERNPCSWNGVLCSLPDNSSVISLSLSNFDLSNSSFLPLVCNLQTLESLDVSNNRLSSIPEGFVTNCERLIALKHLNFSTNKFSTSPGFRGFSKLAVLDFSHNVLSGNVGDYGFDGLVQLRSLNLSFNRLTGSVPVHLTKSLEKLEVSDNSLSGTIPEGIKDYQELTLIDLSDNQLNGSIPSSLGNLSKLESLLLSNNYLSGLIPESLSSIQTLRRFAANRNRFTGEIPSGLTKHLENLDLSFNSLAGSIPGDLLSQLKLVSVDLSSNQLVGWIPQSISSSLVRLRLGSNKLTGSVPSVAFESLQLLTYLEMDNNSLTGFIPPSFGNLVSLNLLNLAMNEFTGILPPAFGNLSRLQVIKLQQNKLTGEIPDTIAFLSNLLILNISCNSLSGSIPPSLSQLKRLSNMNLQGNNLNGTIPDNIQNLEDLIELQLGQNQLRGRIPVMPRKLQISLNLSYNLFEGSIPTTLSELDRLEVLDLSNNNFSGEIPNFLSRLMSLTQLILSNNQLTGNIPRFTHNVSVDVRGNPGVKLKTENEVSIQRNPSGKSKLVMIVIFVSLGVLALLTGIITVTVLKFSRRCKGINNMQVDPDEEGSTVLPEVIHGKLLTSNALHRSNINFAKAVEAVAHPEHGLHQTMFWSYYRVVMPSGSSYFIKKLNTRDRVFQQASSEQLEVELEMLGKLHHTNVMVPLAYVLYSEGCLLIYDFSHTCTLYEILHNHSSGVVDWTSRYSIAVGIAQGISYLHGSESSGRDPILLPDLSSKKILLKSLTEPLVGDIELFKVIDPSKSNSSLSAVAGTIGYIPPEYAYTMRVTMAGNVYSFGVILLELLTGRPAVSEGRDLAKWVQSHSSHQEQQNNILDLRVSKTSTVATKQMLRALGVALACINISPGARPKMKTVLRMLTRL

SEQ ID NO: 29106 - DNA, 1800 bp, Arabidopsis thaliana
  misc_feature (1)..(1800): Ceres Seq. ID no. 4264564
atggaaacggatctgaatgattatactgttatcaaggaaggagaagctgagattctcatgcacaagaagaatcaagtcttcttcaataaagctcaggtgaacaatagagacatgtccattgctgttctaagggaatttctatcgaaacgcaagcaagagcatgaggctaagtcatctaaaagaactagaccagcttccaaagtgattgagaaggatgcttctgaagcttccaaggaagaaactcctagcgagaacggtatgaataatggtgatcacgaagtagcatctgaagatggaccaagctctgtatcaaaagaccctgctaagacaacagaacgatttgcacctagagaacccaagccaccaaaagttcttgagataaattttgtttgcatacttatatttcaggctttgtcagcttctgggttacgggctctaagatatgcacgcgaaatagaaggaattggtcaggttgtggcgttggataatgatttagcatcggtcgaagcttgccagagaaacataaagttcaatggctcagtggctatttcaaaggtggagtcacatcataccgatgctcgtgtccatatgcttacccaccctaaagaatttgatgtggttgatcttgatccatatggatcaccatctattttccttgactcggctattcaatcagtcacggatggtggattgctaatgtgtacagcaactgacatggcagtgttatgtggtggtaacggtgaagtttgctattccaaatatggttcttacccattgagagcgaagtattgtcatgagatggctttgcggatcctccttgccagcatcgagagccatgcaaaccgctacaagcggtatattgttccggtgctatctgtgcaaatggatttctatgttcgtgtttttgtccgcgtttacacctcggcgagtgcaatgaagaacactccattgaagctctcttacgtatatcaatgcattggctgtgattcatttcatcttcaacctgttggaagatctctccctaagaacaacagtgtgaggtatctaccagcaattggtccggttgtgaagcaggattgcaaccactgtgggaagaaatataacatgggtggaccaatatggtctgctccaatgcatgatccagaatgggtgacttcgatattaaacagtgtgaaatccatgaaagacagatatcctgcttatgaccggatctctgctgtacttactacagtctccgaggaattgctggatgttcctctgtttttgagtctgcataatctttgtgcgacactaaagtgtatttcaccatcagctgcaatgtttcgatcagcggttattaatgctaattaccgtatctctgggactcatgtgaatccgctcggcatgaaaactgatgctcctatggaggttatctgggacattatgcgctgctgggtgaagaatcatcccataaaggcgcaatcgcctgaacaacccggtagtgtgatcttgtccaaagaaccatcacatgaggttgatttttcgcgtcacattggttcgctgagcaaggcacaggcaaagaaagtagctcgttttctgccaaatccagagaagcattggggtccaaagcttagggctggtcgccagattacgagcaaacatgtatctcttattggtcatgaagcagtcaatggtcatcttagccaacaccatgaagaacttaaagaagaagatgaagaagcagagccagaagataatgtccaagacaaggttgatccaaaacgccagaagacagcaacagataatattacctcaacataa

SEQ ID NO: 29107 - protein, 599 aa, Arabidopsis thaliana
  misc_feature (1)..(599): Ceres Seq. ID no. 4264565
METDLNDYTVIKEGEAEILMHKKNQVFFNKAQVNNRDMSIAVLREFLSKRKQEHEAKSSKRTRPASKVIEKDASEASKEETPSENGMNNGDHEVASEDGPSSVSKDPAKTTERFAPREPKPPKVLEINFVCILIFQALSASGLRALRYAREIEGIGQVVALDNDLASVEACQRNIKFNGSVAISKVESHHTDARVHMLTHPKEFDVVDLDPYGSPSIFLDSAIQSVTDGGLLMCTATDMAVLCGGNGEVCYSKYGSYPLRAKYCHEMALRILLASIESHANRYKRYIVPVLSVQMDFYVRVFVRVYTSASAMKNTPLKLSYVYQCIGCDSFHLQPVGRSLPKNNSVRYLPAIGPVVKQDCNHCGKKYNMGGPIWSAPMHDPEWVTSILNSVKSMKDRYPAYDRISAVLTTVSEELLDVPLFLSLHNLCATLKCISPSAAMFRSAVINANYRISGTHVNPLGMKTDAPMEVIWDIMRCWVKNHPIKAQSPEQPGSVILSKEPSHEVDFSRHIGSLSKAQAKKVARFLPNPEKHWGPKLRAGRQITSKHVSLIGHEAVNGHLSQHHEELKEEDEEAEPEDNVQDKVDPKRQKTATDNITST

SEQ ID NO: 29108 - protein, 580 aa, Arabidopsis thaliana
  misc_feature (1)..(580): Ceres Seq. ID no. 4264566
MHKKNQVFFNKAQVNNRDMSIAVLREFLSKRKQEHEAKSSKRTRPASKVIEKDASEASKEETPSENGMNNGDHEVASEDGPSSVSKDPAKTTERFAPREPKPPKVLEINFVCILIFQALSASGLRALRYAREIEGIGQVVALDNDLASVEACQRNIKFNGSVAISKVESHHTDARVHMLTHPKEFDVVDLDPYGSPSIFLDSAIQSVTDGGLLMCTATDMAVLCGGNGEVCYSKYGSYPLRAKYCHEMALRILLASIESHANRYKRYIVPVLSVQMDFYVRVFVRVYTSASAMKNTPLKLSYVYQCIGCDSFHLQPVGRSLPKNNSVRYLPAIGPVVKQDCNHCGKKYNMGGPIWSAPMHDPEWVTSILNSVKSMKDRYPAYDRISAVLTTVSEELLDVPLFLSLHNLCATLKCISPSAAMFRSAVINANYRISGTHVNPLGMKTDAPMEVIWDIMRCWVKNHPIKAQSPEQPGSVILSKEPSHEVDFSRHIGSLSKAQAKKVARFLPNPEKHWGPKLRAGRQITSKHVSLIGHEAVNGHLSQHHEELKEEDEEAEPEDNVQDKVDPKRQKTATDNITST

SEQ ID NO: 29109 - protein, 562 aa, Arabidopsis thaliana
  misc_feature (1)..(562): Ceres Seq. ID no. 4264567
MSIAVLREFLSKRKQEHEAKSSKRTRPASKVIEKDASEASKEETPSENGMNNGDHEVASEDGPSSVSKDPAKTTERFAPREPKPPKVLEINFVCILIFQALSASGLRALRYAREIEGIGQVVALDNDLASVEACQRNIKFNGSVAISKVESHHTDARVHMLTHPKEFDVVDLDPYGSPSIFLDSAIQSVTDGGLLMCTATDMAVLCGGNGEVCYSKYGSYPLRAKYCHEMALRILLASIESHANRYKRYIVPVLSVQMDFYVRVFVRVYTSASAMKNTPLKLSYVYQCIGCDSFHLQPVGRSLPKNNSVRYLPAIGPVVKQDCNHCGKKYNMGGPIWSAPMHDPEWVTSILNSVKSMKDRYPAYDRISAVLTTVSEELLDVPLFLSLHNLCATLKCISPSAAMFRSAVINANYRISGTHVNPLGMKTDAPMEVIWDIMRCWVKNHPIKAQSPEQPGSVILSKEPSHEVDFSRHIGSLSKAQAKKVARFLPNPEKHWGPKLRAGRQITSKHVSLIGHEAVNGHLSQHHEELKEEDEEAEPEDNVQDKVDPKRQKTATDNITST

SEQ ID NO: 29110 - DNA, 678 bp, Arabidopsis thaliana
  misc_feature (1)..(678): Ceres Seq. ID no. 4265244
atgggaaacagcattactgtgaagagaaaaagagctaaagtaatgaagatcgacggcgaaactttccgaattaaaactccggtgacggcgagagaagtcaccgcggattatcccggttacgttttgttagattctcaagccgttaaacactttggagttcgctctaagccgcttgaaccgaaccaaaccttgaagccgaaaaagacttattttctcgtcgagcttcctaagcttccaccggagacgacggcggtggatacagaaaataagctaccgtaccggagagtgatgtctggtatccacgttggcgcaaaggagcggttagatatgttgatgttgtctcggagaacggtttctgacgtcacaatcggaagatctgacggtggagatgggtttgggcctgagcttgggcctggacatacgagtgtgaggttgaggttgcctcgttctcagatcacgaagcttatggaagagaataataatgatgcttcggccatagctgagaagattttaggtatctatatggagaggtctggcgagcttggcggcggtagaggtggtgttgacggccgccgggaacttggaagtggggagattaaagcgcgtgagaagcaggtgagtttcgccggagaaggtggacgggagcttcctgttctatggagtagaagtggaaaataa

SEQ ID NO: 29111 - protein, 225 aa, Arabidopsis thaliana
  misc_feature (1)..(225): Ceres Seq. ID no. 4265245
MGNSITVKRKRAKVMKIDGETFRIKTPVTAREVTADYPGYVLLDSQAVKHFGVRSKPLEPNQTLKPKKTYFLVELPKLPPETTAVDTENKLPYRRVMSGIHVGAKERLDMLMLSRRTVSDVTIGRSDGGDGFGPELGPGHTSVRLRLPRSQITKLMEENNNDASAIAEKILGIYMERSGELGGGRGGVDGRRELGSGEIKAREKQVSFAGEGGRELPVLWSRSGK

SEQ ID NO: 29112 - protein, 211 aa, Arabidopsis thaliana
  misc_feature (1)..(211): Ceres Seq. ID no. 4265246
MKIDGETFRIKTPVTAREVTADYPGYVLLDSQAVKHFGVRSKPLEPNQTLKPKKTYFLVELPKLPPETTAVDTENKLPYRRVMSGIHVGAKERLDMLMLSRRTVSDVTIGRSDGGDGFGPELGPGHTSVRLRLPRSQITKLMEENNNDASAIAEKILGIYMERSGELGGGRGGVDGRRELGSGEIKAREKQVSFAGEGGRELPVLWSRSGK

SEQ ID NO: 29113 - protein, 129 aa, Arabidopsis thaliana
  misc_feature (1)..(129): Ceres Seq. ID no. 4265247
MSGIHVGAKERLDMLMLSRRTVSDVTIGRSDGGDGFGPELGPGHTSVRLRLPRSQITKLMEENNNDASAIAEKILGIYMERSGELGGGRGGVDGRRELGSGEIKAREKQVSFAGEGGRELPVLWSRSGK

SEQ ID NO: 29114 - DNA, 1431 bp, Arabidopsis thaliana
  misc_feature (1)..(1431): Ceres Seq. ID no. 4265882
atggctaggtcaccgagcaaacacggccgcgatcaaactcaggatttccagggatttttcaatgacttgcaggattgggaactctcattgaaggataaagacaagaagattaagcaacaacctgctaattcgtcgaatccgagtagtgagacgttcagaccaagtgggtcagggaaatatgactttgctaaaaagtatcgttccattagggatttgtcgagtagtttgattggagaaagtctattggattctagttcagagaaggagcagggtaatgaattcttcaagcagaagaagttcaatgaggcgattgattgttactctcggagcattgctttatcgccaaatgctgtgacttatgcaaatcgagcaatggcttaccttaaaatcaaaagatatcgagaggctgaggttgactgcacagaagctttaaatctggatgatcgatatataaaagcttactcacgccgagcaacagcaagaaaagaactcggcatgattaaagaagccaaagaagatgctgagtttgccttaagattggagcctgagagccaggaacttaagaagcaatatgccgatatcaaatctttgctcgagaaagaaatcattgagaaagccactggagcaatgcaaagcactgcacaagaattactcaaaacatcaggtttagataagaaaatacaaaagccaaagacagaaatgacttcaaagccagtgaccctagtggccaaaacgaacagggatattgttcagcctgttctaggtagcaatgaaagttcgggaaagaagctcattgaaaatatacaacctgaggagaaaagcaaagaaggttccatgaaaattccagctatcacggaaattctagacagcaagaaagtgacgcctggaagccaaagttatgaaaaggaggcgaagccttctgacagaaatggtactcagccttctggaccggaaaaccaggtttctaaacagctggaactaaagccatcagtacaagagcttgctgctcatgcagcgtcacttgcgatgactgaagcttctaaaaacattaaaaccccaaaatctgcttacgaatttgagaactcttggcggagtttttccggcgacagtgccctacgaagccaattgttgaaggtcacgactccgagctctttacctcagattttcaagaacgccctgacctctccggtgctggttgacataatcaaatgtgtagcctcattcttcactgaagacatggatttggcagttaaatacattgagaacctaacaaaggttcctagattcaacatgctcgtcatgtgccttacctcaaccgagaaaaacgagctactgaagatatgggaagatgttttctgcaataaagcaaccccaatggagtatgcagaggtcttagacaaactaaggtcaagatactgccttaaacagtaa

SEQ ID NO: 29115 - protein, 476 aa, Arabidopsis thaliana
  misc_feature (1)..(476): Ceres Seq. ID no. 4265883
MARSPSKHGRDQTQDFQGFFNDLQDWELSLKDKDKKIKQQPANSSNPSSETFRPSGSGKYDFAKKYRSIRDLSSSLIGESLLDSSSEKEQGNEFFKQKKFNEAIDCYSRSIALSPNAVTYANRAMAYLKIKRYREAEVDCTEALNLDDRYIKAYSRRATARKELGMIKEAKEDAEFALRLEPESQELKKQYADIKSLLEKEIIEKATGAMQSTAQELLKTSGLDKKIQKPKTEMTSKPVTLVAKTNRDIVQPVLGSNESSGKKLIENIQPEEKSKEGSMKIPAITEILDSKKVTPGSQSYEKEAKPSDRNGTQPSGPENQVSKQLELKPSVQELAAHAASLAMTEASKNIKTPKSAYEFENSWRSFSGDSALRSQLLKVTTPSSLPQIFKNALTSPVLVDIIKCVASFFTEDMDLAVKYIENLTKVPRFNMLVMCLTSTEKNELLKIWEDVFCNKATPMEYAEVLDKLRSRYCLKQ

SEQ ID NO: 29116 - protein, 352 aa, Arabidopsis thaliana
  misc_feature (1)..(352): Ceres Seq. ID no. 4265884
MAYLKIKRYREAEVDCTEALNLDDRYIKAYSRRATARKELGMIKEAKEDAEFALRLEPESQELKKQYADIKSLLEKEIIEKATGAMQSTAQELLKTSGLDKKIQKPKTEMTSKPVTLVAKTNRDIVQPVLGSNESSGKKLIENIQPEEKSKEGSMKIPAITEILDSKKVTPGSQSYEKEAKPSDRNGTQPSGPENQVSKQLELKPSVQELAAHAASLAMTEASKNIKTPKSAYEFENSWRSFSGDSALRSQLLKVTTPSSLPQIFKNALTSPVLVDIIKCVASFFTEDMDLAVKYIENLTKVPRFNMLVMCLTSTEKNELLKIWEDVFCNKATPMEYAEVLDKLRSRYCLKQ

SEQ ID NO: 29117 - protein, 311 aa, Arabidopsis thaliana
  misc_feature (1)..(311): Ceres Seq. ID no. 4265885
MIKEAKEDAEFALRLEPESQELKKQYADIKSLLEKEIIEKATGAMQSTAQELLKTSGLDKKIQKPKTEMTSKPVTLVAKTNRDIVQPVLGSNESSGKKLIENIQPEEKSKEGSMKIPAITEILDSKKVTPGSQSYEKEAKPSDRNGTQPSGPENQVSKQLELKPSVQELAAHAASLAMTEASKNIKTPKSAYEFENSWRSFSGDSALRSQLLKVTTPSSLPQIFKNALTSPVLVDIIKCVASFFTEDMDLAVKYIENLTKVPRFNMLVMCLTSTEKNELLKIWEDVFCNKATPMEYAEVLDKLRSRYCLKQ

SEQ ID NO: 29118 - DNA, 3210 bp, Arabidopsis thaliana
  misc_feature (1)..(3210): Ceres Seq. ID no. 4266503
atggaggcagatactaagacagactctcgtactctgaaagttaacgacttgttaaaagatgctcgcttagattacgattctctcaggaagcttgttgatgataccgtttcgtcgattaaagaagctattgatggaatccctgaaaaatttcaggttacctcggagttagctcctagttttgttgaggacattggggcagataaagaagtggagttcagttttaagaagccaaatggtttcaatctctgtggaagttactccatttgtggcatggcaaagccggatacttctgttgatcttcttgttcacttgcctaaagaatgtttttatgagaaggattacatgaatcatagataccatgccaaaagatgtctatatctttgtgttattgaaaagcatttgttgtcgtcatcgtccattgagaaggttgtatggtcaaccttacataacgaagctaggaagccagtccttgttgttttcccagctaagaaacttgatcagtttcctggattttccataaggttaatcccttccgcaacatcactgtttagtgttgcaaaattgagtattagcagaaacaacgtccgttctgtaactgcagatggtgtccctgagcccacgccaacttacaactcaagcatattggaggacatgtttctggaggaaaattctgagtttctcaagaaaaccttctctgagtggaaggagttgagcgatgctttgattttgctgaagatatgggcaagacaaaggagctcgatatacgtccacgattgcttgaacggatttctaatctctgtgatactttcatatcttgcaacccattccaaaattaacaaggcactaagtgcattagatatattcagagtgacattggatttcatagccacttctaaattatgggagagaggtttgtatcttccgccacagagtgaaattcgtgtctcgaaggagtatgactatgcactggtactactggattcgtctgctggagaagatgcagttcagagagttgttccctgttgttatatgcgattcatctacgtttgtgaacttggctttccggatgaccagtgttggattcctggagcacagcttcaagatgaggcttctttgacgcttaagtgtatggagaaactcagagatgggggattcgaggagatttttatgactaagattgactatcctgttaagtatgaccactgcataaggatagaagtggctggttatgttcttacttttgtcaaaccgttatggaagtggctgctaaaggggaaaacagcagtgtctctgtcagggttttgtttggacaaggaatgttggagactctatgagcagaaagtgcatagcctgcttttagaaggactcggtgacagagctaaatcaatccgtgtagtttggagaaataccaatcaagattggcatgtagagagtggcttgtcagttcttgacagagaacctcttttcattggcatatctgtcagctccactgaaaaggcttatagaacagttgatattgggccagatgctgaaaacaagatagaggcacttagattccggaagttttggggtgagaagtctgatctaaggaggtttaaagatggaagaatatctgaaagcacagtttgggagactcagcagtggaccaaacatcttatcatgaaacaaattgttgaatatatccttaagcggcatctttcactgacgtccgatgacattgtacaattagtggatcaacttgatttctctctaaactatgggggcaaagacccaatatctttatctggaaatttggttcaagcctatgaagttttatcaaagtgcttgcgtgagattgaaggcatacctctcaaagtctctagcgttcagtctttagattcagctctcaggttcacatccgtattccctcctgaacctcacccagtggcttgcgaaaaaatcgattcgcgaagactgcaaaaacttataccatcctgcattccagcaatggaagtcatgattcagctagaaggttctggtaactggcccatggatgatttagcagttgagaaaacaaaatctgccttcctcctgaaaattgcagagagccttcagaacgtcaagggaataccatgcacagctactgaggataatgtcgatgttttcattggtggttacgcatttcgcttgagaatattgcatgaaagaggcctgagtttggtgaagagagaaattggagtggacccggtgaagcatgtttcctctaccgataaaatgctttttattcgtagtcaacatgcaagtatgattaatggtttgcaaggtcgatttcctgtatacgcaccagttgccaggcttgcaaaaagatgggtttctgcgcatctcttttctggttgcctggcagaagaggccattgaacttttggttgcttatctcttcctcacacctctcccactcggtgttccttcctcccggattaatggattcttaaggttcttgcgattactagcagactatgaatggatgttctacccgttgattgttgacataaacaatgactttggtagaaatgacgagaaagagatcaatgataacttcatgtcaagtagaaaaggctacgaagaggacaaacaaaacataagttcagctatgttcttggctgctccttacgacaaggcatcagaggcatggacatcaacttcaccaaatttattggaacaaaaaaggttggtggcttatgctcgaagcagtgcaaacgtgttgagcaagatggtattgcaagaacataatgattctgttcaatgggagtgccttttcaggacacccttgaacaactatgacgcagttattcttctccatagagacaaattaccttatccacgtcgtcttctgtttccatctgaacttaaccaagggaagcatgtagcacggggaaaagcgagtagattgttcaacccatttatgtcgcctggagatttgaagagaagccatgaagagcttaagaataagctaatggaagagtttgggacgttgaagccatggtatgatcatataggaggcgacgcaattggtttaacatggaacaaacacaattcaaagaaacgagaacgagatgaagaagaagaagaagaagaagaaagtaatccaatggagatgttaaaggcggtaggcgaaatgggtaaagggttagtgagggatatctatttgctcaagcctccacgctttgtctaa

SEQ ID NO: 29119 - protein, 1069 aa, Arabidopsis thaliana
  misc_feature (1)..(1069): Ceres Seq. ID no. 4266504
MEADTKTDSRTLKVNDLLKDARLDYDSLRKLVDDTVSSIKEAIDGIPEKFQVTSELAPSFVEDIGADKEVEFSFKKPNGFNLCGSYSICGMAKPDTSVDLLVHLPKECFYEKDYMNHRYHAKRCLYLCVIEKHLLSSSSIEKVVWSTLHNEARKPVLVVFPAKKLDQFPGFSIRLIPSATSLFSVAKLSISRNNVRSVTADGVPEPTPTYNSSILEDMFLEENSEFLKKTFSEWKELSDALILLKIWARQRSSIYVHDCLNGFLISVILSYLATHSKINKALSALDIFRVTLDFIATSKLWERGLYLPPQSEIRVSKEYDYALVLLDSSAGEDAVQRVVPCCYMRFIYVCELGFPDDQCWIPGAQLQDEASLTLKCMEKLRDGGFEEIFMTKIDYPVKYDHCIRIEVAGYVLTFVKPLWKWLLKGKTAVSLSGFCLDKECWRLYEQKVHSLLLEGLGDRAKSIRVVWRNTNQDWHVESGLSVLDREPLFIGISVSSTEKAYRTVDIGPDAENKIEALRFRKFWGEKSDLRRFKDGRISESTVWETQQWTKHLIMKQIVEYILKRHLSLTSDDIVQLVDQLDFSLNYGGKDPISLSGNLVQAYEVLSKCLREIEGIPLKVSSVQSLDSALRFTSVFPPEPHPVACEKIDSRRLQKLIPSCIPAMEVMIQLEGSGNWPMDDLAVEKTKSAFLLKIAESLQNVKGIPCTATEDNVDVFIGGYAFRLRILHERGLSLVKREIGVDPVKHVSSTDKMLFIRSQHASMINGLQGRFPVYAPVARLAKRWVSAHLFSGCLAEEAIELLVAYLFLTPLPLGVPSSRINGFLRFLRLLADYEWMFYPLIVDINNDFGRNDEKEINDNFMSSRKGYEEDKQNISSAMFLAAPYDKASEAWTSTSPNLLEQKRLVAYARSSANVLSKMVLQEHNDSVQWECLFRTPLNNYDAVILLHRDKLPYPRRLLFPSELNQGKHVARGKASRLFNPFMSPGDLKRSHEELKNKLMEEFGTLKPWYDHIGGDAIGLTWNKHNSKKRERDEEEEEEEESNPMEMLKAVGEMGKGLVRDIYLLKPPRFV

SEQ ID NO: 29120 - protein, 979 aa, Arabidopsis thaliana
  misc_feature (1)..(979): Ceres Seq. ID no. 4266505
MAKPDTSVDLLVHLPKECFYEKDYMNHRYHAKRCLYLCVIEKHLLSSSSIEKVVWSTLHNEARKPVLVVFPAKKLDQFPGFSIRLIPSATSLFSVAKLSISRNNVRSVTADGVPEPTPTYNSSILEDMFLEENSEFLKKTFSEWKELSDALILLKIWARQRSSIYVHDCLNGFLISVILSYLATHSKINKALSALDIFRVTLDFIATSKLWERGLYLPPQSEIRVSKEYDYALVLLDSSAGEDAVQRVVPCCYMRFIYVCELGFPDDQCWIPGAQLQDEASLTLKCMEKLRDGGFEEIFMTKIDYPVKYDHCIRIEVAGYVLTFVKPLWKWLLKGKTAVSLSGFCLDKECWRLYEQKVHSLLLEGLGDRAKSIRVVWRNTNQDWHVESGLSVLDREPLFIGISVSSTEKAYRTVDIGPDAENKIEALRFRKFWGEKSDLRRFKDGRISESTVWETQQWTKHLIMKQIVEYILKRHLSLTSDDIVQLVDQLDFSLNYGGKDPISLSGNLVQAYEVLSKCLREIEGIPLKVSSVQSLDSALRFTSVFPPEPHPVACEKIDSRRLQKLIPSCIPAMEVMIQLEGSGNWPMDDLAVEKTKSAFLLKIAESLQNVKGIPCTATEDNVDVFIGGYAFRLRILHERGLSLVKREIGVDPVKHVSSTDKMLFIRSQHASMINGLQGRFPVYAPVARLAKRWVSAHLFSGCLAEEAIELLVAYLFLTPLPLGVPSSRINGFLRFLRLLADYEWMFYPLIVDINNDFGRNDEKEINDNFMSSRKGYEEDKQNISSAMFLAAPYDKASEAWTSTSPNLLEQKRLVAYARSSANVLSKMVLQEHNDSVQWECLFRTPLNNYDAVILLHRDKLPYPRRLLFPSELNQGKHVARGKASRLFNPFMSPGDLKRSHEELKNKLMEEFGTLKPWYDHIGGDAIGLTWNKHNSKKRERDEEEEEEEESNPMEMLKAVGEMGKGLVRDIYLLKPPRFV

SEQ ID NO: 29121 - protein, 955 aa, Arabidopsis thaliana
  misc_feature (1)..(955): Ceres Seq. ID no. 4266506
MNHRYHAKRCLYLCVIEKHLLSSSSIEKVVWSTLHNEARKPVLVVFPAKKLDQFPGFSIRLIPSATSLFSVAKLSISRNNVRSVTADGVPEPTPTYNSSILEDMFLEENSEFLKKTFSEWKELSDALILLKIWARQRSSIYVHDCLNGFLISVILSYLATHSKINKALSALDIFRVTLDFIATSKLWERGLYLPPQSEIRVSKEYDYALVLLDSSAGEDAVQRVVPCCYMRFIYVCELGFPDDQCWIPGAQLQDEASLTLKCMEKLRDGGFEEIFMTKIDYPVKYDHCIRIEVAGYVLTFVKPLWKWLLKGKTAVSLSGFCLDKECWRLYEQKVHSLLLEGLGDRAKSIRVVWRNTNQDWHVESGLSVLDREPLFIGISVSSTEKAYRTVDIGPDAENKIEALRFRKFWGEKSDLRRFKDGRISESTVWETQQWTKHLIMKQIVEYILKRHLSLTSDDIVQLVDQLDFSLNYGGKDPISLSGNLVQAYEVLSKCLREIEGIPLKVSSVQSLDSALRFTSVFPPEPHPVACEKIDSRRLQKLIPSCIPAMEVMIQLEGSGNWPMDDLAVEKTKSAFLLKIAESLQNVKGIPCTATEDNVDVFIGGYAFRLRILHERGLSLVKREIGVDPVKHVSSTDKMLFIRSQHASMINGLQGRFPVYAPVARLAKRWVSAHLFSGCLAEEAIELLVAYLFLTPLPLGVPSSRINGFLRFLRLLADYEWMFYPLIVDINNDFGRNDEKEINDNFMSSRKGYEEDKQNISSAMFLAAPYDKASEAWTSTSPNLLEQKRLVAYARSSANVLSKMVLQEHNDSVQWECLFRTPLNNYDAVILLHRDKLPYPRRLLFPSELNQGKHVARGKASRLFNPFMSPGDLKRSHEELKNKLMEEFGTLKPWYDHIGGDAIGLTWNKHNSKKRERDEEEEEEEESNPMEMLKAVGEMGKGLVRDIYLLKPPRFV

SEQ ID NO: 29122 - DNA, 1050 bp, Arabidopsis thaliana
  misc_feature (1)..(1050): Ceres Seq. ID no. 4267268
atgaagattcaaattatatggctcactttggttttaatcgtcgttgaagctaatgcagtcaaacaagggaaaaacgcaacgatcccggccctaatagtttttggagattcaataatggatacaggaaataacaataatcttcccactcttcttaaatgtaacttccctccatacggtaaagattatcctggaggctttgccactggaagattttctgatggaagagttccttctgatcttattgcggaaaaaataggattggctaagacattaccagcatatatgaatccatatttgaagccagaggatcttcttaaaggtgtaacatttgcatcaggaggaactggttatgatccattgacagcaaaaattatgtcagtgatatcagtgtgggatcaactcatatatttcaaagaatatatatcaaagatcaagaggcatttcggagaagaaaaagcaaaagatatcttggaacatagtttctttcttgtggtgtctagtagcaatgaccttgctcacacttatttagctcaagctcatagatatgatcgtacctcttatgccaatttcttggctgactctgctgttcatttcgtgagagaattacacaagcttggagctcaaaaaattggagtgtttagtgcagtccctgttggttgtgttccactccaaagaacagtttttggaggtttttttacaagaggatgtaatcaacctctaaacaacatggcaaaacaattcaacgcaagactttctccagcactagattctttagataaagagttggatggtgttatcctttacattaatgtttatgatactcttttcgacatgatccaacaccctaaaaaatacggttttgaagtggctgatagaggatgttgcggtaaaggactgctcacgatctcctatttatgtaactcattgaaccaatttacgtgttctaactcttcagcttatatattttgggatagctatcatccaagtaaaagagcttatcaagttattgtcgacaatttacttgacaaatatttgagcaaagtatattga

SEQ ID NO: 29123 - protein, 349 aa, Arabidopsis thaliana
  misc_feature (1)..(349): Ceres Seq. ID no. 4267269
MKIQIIWLTLVLIVVEANAVKQGKNATIPALIVFGDSIMDTGNNNNLPTLLKCNFPPYGKDYPGGFATGRFSDGRVPSDLIAEKIGLAKTLPAYMNPYLKPEDLLKGVTFASGGTGYDPLTAKIMSVISVWDQLIYFKEYISKIKRHFGEEKAKDILEHSFFLVVSSSNDLAHTYLAQAHRYDRTSYANFLADSAVHFVRELHKLGAQKIGVFSAVPVGCVPLQRTVFGGFFTRGCNQPLNNMAKQFNARLSPALDSLDKELDGVILYINVYDTLFDMIQHPKKYGFEVADRGCCGKGLLTISYLCNSLNQFTCSNSSAYIFWDSYHPSKRAYQVIVDNLLDKYLSKVY

SEQ ID NO: 29124 - protein, 311 aa, Arabidopsis thaliana
  misc_feature (1)..(311): Ceres Seq. ID no. 4267270
MDTGNNNNLPTLLKCNFPPYGKDYPGGFATGRFSDGRVPSDLIAEKIGLAKTLPAYMNPYLKPEDLLKGVTFASGGTGYDPLTAKIMSVISVWDQLIYFKEYISKIKRHFGEEKAKDILEHSFFLVVSSSNDLAHTYLAQAHRYDRTSYANFLADSAVHFVRELHKLGAQKIGVFSAVPVGCVPLQRTVFGGFFTRGCNQPLNNMAKQFNARLSPALDSLDKELDGVILYINVYDTLFDMIQHPKKYGFEVADRGCCGKGLLTISYLCNSLNQFTCSNSSAYIFWDSYHPSKRAYQVIVDNLLDKYLSKVY

SEQ ID NO: 29125 - protein, 255 aa, Arabidopsis thaliana
  misc_feature (1)..(255): Ceres Seq. ID no. 4267271
MNPYLKPEDLLKGVTFASGGTGYDPLTAKIMSVISVWDQLIYFKEYISKIKRHFGEEKAKDILEHSFFLVVSSSNDLAHTYLAQAHRYDRTSYANFLADSAVHFVRELHKLGAQKIGVFSAVPVGCVPLQRTVFGGFFTRGCNQPLNNMAKQFNARLSPALDSLDKELDGVILYINVYDTLFDMIQHPKKYGFEVADRGCCGKGLLTISYLCNSLNQFTCSNSSAYIFWDSYHPSKRAYQVIVDNLLDKYLSKVY

SEQ ID NO: 29126 - DNA, 918 bp, Arabidopsis thaliana
  misc_feature (1)..(918): Ceres Seq. ID no. 4267728
atgagttcgtctaacggaggtgtaccgcctggttttcggtttcatccaacggacgaagaacttcttcattactacttgaagaagaagatttcttatgaaaagtttgagatggaagtcatcaaagaggttgatttgaacaagattgagccgtgggatttacaagatagatgcaaaataggatcaacgccacaaaatgagtggtatttcttcagccacaaggataggaaatatccgacagggtcaaggacaaaccgtgcaacccactccggtttttggaaggcgacaggacgtgacaaatgcataagaaattcttacaagaagatcggcatgaggaagactcttgtattctacaaaggaagagctcctcatggccaaaagacagattggatcatgcacgagtaccgtatcgaagacactgaagatgacccttgtgaagatggatgggttgtttgtagagtgttcaagaagaaaaatctgttcaaagtagggaatgatgttggctcaaacatcagcaataataggcttgaagctcgtagtttcatccgaagagaaagcccttaccaaggaatctcaatgtttgagcttaacaagcctgaagagattagtgttcatcaatatcctcaaccaccaatgtttcaacctcatcacaagcctctttcaataggctatgactattcattggctcttctaccaagagaaagcgagtaccaacaagcgtgtcagccatcaggggttgaggttggcacgtgcaaggcagtaagtgaatggggaatagtgaattgtaacatggtgagtcatgaggactcgtctagagcgatgaggtttgaagatgacggtaacaacacttcttccacggtccagccaccttctaatctgctttcattgcgcggtgaaaatggatttcttgggttgttttaa

SEQ ID NO: 29127 - protein, 305 aa, Arabidopsis thaliana
  misc_feature (1)..(305): Ceres Seq. ID no. 4267729
MSSSNGGVPPGFRFHPTDEELLHYYLKKKISYEKFEMEVIKEVDLNKIEPWDLQDRCKIGSTPQNEWYFFSHKDRKYPTGSRTNRATHSGFWKATGRDKCIRNSYKKIGMRKTLVFYKGRAPHGQKTDWIMHEYRIEDTEDDPCEDGWVVCRVFKKKNLFKVGNDVGSNISNNRLEARSFIRRESPYQGISMFELNKPEEISVHQYPQPPMFQPHHKPLSIGYDYSLALLPRESEYQQACQPSGVEVGTCKAVSEWGIVNCNMVSHEDSSRAMRFEDDGNNTSSTVQPPSNLLSLRGENGFLGLF

SEQ ID NO: 29128 - protein, 269 aa, Arabidopsis thaliana
  misc_feature (1)..(269): Ceres Seq. ID no. 4267730
MEVIKEVDLNKIEPWDLQDRCKIGSTPQNEWYFFSHKDRKYPTGSRTNRATHSGFWKATGRDKCIRNSYKKIGMRKTLVFYKGRAPHGQKTDWIMHEYRIEDTEDDPCEDGWVVCRVFKKKNLFKVGNDVGSNISNNRLEARSFIRRESPYQGISMFELNKPEEISVHQYPQPPMFQPHHKPLSIGYDYSLALLPRESEYQQACQPSGVEVGTCKAVSEWGIVNCNMVSHEDSSRAMRFEDDGNNTSSTVQPPSNLLSLRGENGFLGLF

SEQ ID NO: 29129 - protein, 196 aa, Arabidopsis thaliana
  misc_feature (1)..(196): Ceres Seq. ID no. 4267731
MRKTLVFYKGRAPHGQKTDWIMHEYRIEDTEDDPCEDGWVVCRVFKKKNLFKVGNDVGSNISNNRLEARSFIRRESPYQGISMFELNKPEEISVHQYPQPPMFQPHHKPLSIGYDYSLALLPRESEYQQACQPSGVEVGTCKAVSEWGIVNCNMVSHEDSSRAMRFEDDGNNTSSTVQPPSNLLSLRGENGFLGLF

SEQ ID NO: 29130 - DNA, 672 bp, Arabidopsis thaliana
  misc_feature (1)..(672): Ceres Seq. ID no. 4267806
atgggaaacagcattactgtgaagagaaaaagagctaaagtaatgaagatcgacggcgaaactttccgaattaaaactccggtgacggcgagagaagtcaccgcggattatcccggttacgttttgttagattctcaagccgttaaacactttggagttcgctctaagccgcttgaaccgaaccaaaccttgaagccgaaaaagacttattttctcgtcgagcttcctaagcttccaccggagacgacggcggtggatacagaaaataagctaccgtaccggagagtgatgtctggtatccacgttggcgcaaaggagcggttagatatgttgatgttgtctcggagaacggtttctgacgtcacaatcggaagatctgacggtggagatgggtttgggcctgagcttgggcctggacatacgagtgtgaggttgaggttgcctcgttctcagatcacgaagcttatggaagagaataataatgatgcttcggccatagctgagaagattttaggtatctatatggagaggtctggcgagcttggcggcggtagaggtggtgttgacggccgccgggaacttggaagtggggagattaaagcgcgtgaggtgagtttcgccggagaaggtggacgggagcttcctgttctatggagtagaagtggaaaataa

SEQ ID NO: 29131 - protein, 223 aa, Arabidopsis thaliana
  misc_feature (1)..(223): Ceres Seq. ID no. 4267807
MGNSITVKRKRAKVMKIDGETFRIKTPVTAREVTADYPGYVLLDSQAVKHFGVRSKPLEPNQTLKPKKTYFLVELPKLPPETTAVDTENKLPYRRVMSGIHVGAKERLDMLMLSRRTVSDVTIGRSDGGDGFGPELGPGHTSVRLRLPRSQITKLMEENNNDASAIAEKILGIYMERSGELGGGRGGVDGRRELGSGEIKAREVSFAGEGGRELPVLWSRSGK

SEQ ID NO: 29132 - protein, 209 aa, Arabidopsis thaliana
  misc_feature (1)..(209): Ceres Seq. ID no. 4267808
MKIDGETFRIKTPVTAREVTADYPGYVLLDSQAVKHFGVRSKPLEPNQTLKPKKTYFLVELPKLPPETTAVDTENKLPYRRVMSGIHVGAKERLDMLMLSRRTVSDVTIGRSDGGDGFGPELGPGHTSVRLRLPRSQITKLMEENNNDASAIAEKILGIYMERSGELGGGRGGVDGRRELGSGEIKAREVSFAGEGGRELPVLWSRSGK

SEQ ID NO: 29133 - protein, 127 aa, Arabidopsis thaliana
  misc_feature (1)..(127): Ceres Seq. ID no. 4267809
MSGIHVGAKERLDMLMLSRRTVSDVTIGRSDGGDGFGPELGPGHTSVRLRLPRSQITKLMEENNNDASAIAEKILGIYMERSGELGGGRGGVDGRRELGSGEIKAREVSFAGEGGRELPVLWSRSGK

SEQ ID NO: 29134 - DNA, 3861 bp, Arabidopsis thaliana
  misc_feature (1)..(3861): Ceres Seq. ID no. 4267818
atgaagaacatgaactttgagcgactctctgagctcatggctttctaccacttgatggggaagatctctagtgagtgtgggaatatcaccgctggtttccccttctggggagggaatcgtctaaaacattgcggtcttccatcgctggagcttcactgcagcaaaaacatcacctctttattcatctcaagtcaagagttctatgttttacatctaaatcaaacgtctaaaacacttaaacttgctagaacagaccttttaggttcaatttgcaactctactttcactaccataaccttgcctccaaatattttcgagctttctccaacttacaagaggctcaccgttttctactactgcttcttattgactcattacgtttcgagttataaatgtcctatgagaggttttatctttgtgtctgaaaaccatgaatatcataaaatctgcggtgacactttcaccgtgattgttcctacacgttttggtgcaggagagaaagagttgaatatgaccaatttggaaagtgttttaagtaaaggatttgaagtaaaagtgaagatcgatgatacatcatgtcaagaatgtttatcctctcatggaagttgtggctttaatgaaaccttgccagtgggaggtaaatgcagtccactcaatccaacaacacaaccaccgccacaacctggggatcgtcacaaacattgcggtcatccattgctagagcttcgctgcgaccaaaacaagagtacctctttattcatctcagaccaagagttctttgttctccatgtcgatcaaacatcttacagtcttacactcgccagaccagaccttttacattccttttgctcccttacattcaccaacacaaccttaccaccagaaattttcgaactttctccggcctacaagagcgtcacattctaccactgttacccggttcttcctgacctttcgaattatacatgtcctgttataggtccaatctcagtgtctggaaaccctgaagatcacgaaacctgctttcccaattttgccgcaaacgttcccacgagtttcgtcacgaaagagaaaaaattgaatatagccaatttggaaagtgttttggaaaagggctttgaggtgaacatgaatgtcatcatgaaagcttgtcaagcatgttcatactctaatgaatcctgtggcttcgatgaaaactttccattcgaagtcaaatgcaaaccacaccattcaccaactgctaagtttcagtgtgggaacatcaccgctggtttccctttctccggtgggaatcgtcctcaaatttgcggtcatccatcgttggagcttcactgctataacaacatggcctctataatcatctcagaccacttttacaatgttctccatatagatcaaacatctaacactcttagacttgctagagcagagctggaaggttctttttgcaacgctacttacacagccacaaccttgccttccaaaatctttgagatttcatcaacctacaagagcctcactgttttctacctctgcgaccctaaggtttcttaccgttcgagttatacatgtcctggtagaggccttgtctcagtgtctcaaaattctgattaccataactcctgccaagacagtttcacgattaacgttccaaagagctttgttccagaagagaaagagttggatgtgaccaatttggaaagtgctttaagagaaggatttgaggtgaaggtaaaggttgatgagaaaacttgtcaaaaatgtacatcctctggtggaacctgcggcttccaaaattcaacacagatttgctgcaaggaagcctcatcattaggatgcaataaagtccatccactacctgatgctactgagcttgagcttcacagacgctgcaatggcacgtttagctgcggcgatcagagagaactcttttaccctttctggacatctggtagagaagactgtggccaccctgacttcaagctcgacgactgtagcggaagattcgcagagcttagcatttcctctgtgaaatttagaattctagcgtcggtttatggctctaatatcataagactcggcagatccgaatatataggcgatctctgtccccaagatcctataaatgcaccattcagcgaaagtgtccttccatttgctcctaacaccgagctgctgactattttttacaactgcagccgagactttccacagcaagttactaattttggagactttgcttgtggggatgatagtgatgatgatagaagttactatgtgacgagaaacctctcgtttcctccactcagtgagattaatgaccttttatacgacttcagtcaatcttgcgatagaaacgtcagtattcccgcatctggatcgacgcttaacatactgcagagcactccgagtaacgataatctaaagaaggctctcgaatacggtttcgagcttgaacttaaccaagattgtcggacgtgcatagactctaagggtgcttgtggatatagtcaaacctcaagtagattcgtctgctattctatagaagagccacaaacccctactccaccaaaccctactagaaacaagggcattgcggttgcttctgtatcgggtttggccattcttctactcgcaggtttgttcttatgcatcagacggagaaggaagactcaggacgctcaatacacaagcaaaagcttgcctatcacatcatactcgagtagagatacatcaagaaatccaacttccacaacaatctcctccagtagcaatcactctcttcttccctcaatctctaaccttgcaaaccgaagcgactactgtggagtccaagtctttagctatgaagaacttgaagaagcaactgagaatttctctagagaactcggggatggtggcttcggtactgtctactacggcgtgttgaaagacggacgagctgtagcagtgaaacgactctacgaaagatcactaaaacgcgtagaacaattcaagaacgaaatcgaaatcttgaaatcactaaaacatccgaacctcgtgatcctctacggatgcacatcaagacacagcagagagcttctactagtctacgaatacatctcaaacggaactctagccgaacatctacacggcaaccgcgcagaagctcgtcctctctgctggtcaacccgattaaacatcgcaatcgaaaccgcaagcgcattatcattcctccacataaaaggaatcatacacagagacatcaagactactaacatactcttagacgataactaccaagtcaaagtcgccgatttcggactttcacggttgtttccaatggatcaaacacacatatcaaccgcaccacaaggcacaccaggctacgtggatccagagtattaccaatgttaccaattaaacgagaagagcgatgtctacagcttcggagtcgtactaacggaactaatctcatcaaaagaagcagtagacattactcgacaccgtcacgatatcaatctagcgaacatggctgtatctaagattcagaacaatgcattacacgagcttgtggattcgagtttaggatacgataatgatcctgaagttaggaggaagatgatggcggtggcggaattagcgtttcgatgtttgcaacaagagagagatgttagaccggcgatggatgagattgtggagattttgagagggattaaggatgatgagaagaagcgtgtgttggtgaagtcgccggatgttgtggatattgaatgcggtggtggtgatgatgttggattgttgaggaatagtgttccgccgccgatttcgccggagactgataagtggactagtagttctgatacggcggcgagtttgtaa

SEQ ID NO: 29135 - protein, 1286 aa, Arabidopsis thaliana
  misc_feature (1)..(1286): Ceres Seq. ID no. 4267819
MKNMNFERLSELMAFYHLMGKISSECGNITAGFPFWGGNRLKHCGLPSLELHCSKNITSLFISSQEFYVLHLNQTSKTLKLARTDLLGSICNSTFTTITLPPNIFELSPTYKRLTVFYYCFLLTHYVSSYKCPMRGFIFVSENHEYHKICGDTFTVIVPTRFGAGEKELNMTNLESVLSKGFEVKVKIDDTSCQECLSSHGSCGFNETLPVGGKCSPLNPTTQPPPQPGDRHKHCGHPLLELRCDQNKSTSLFISDQEFFVLHVDQTSYSLTLARPDLLHSFCSLTFTNTTLPPEIFELSPAYKSVTFYHCYPVLPDLSNYTCPVIGPISVSGNPEDHETCFPNFAANVPTSFVTKEKKLNIANLESVLEKGFEVNMNVIMKACQACSYSNESCGFDENFPFEVKCKPHHSPTAKFQCGNITAGFPFSGGNRPQICGHPSLELHCYNNMASIIISDHFYNVLHIDQTSNTLRLARAELEGSFCNATYTATTLPSKIFEISSTYKSLTVFYLCDPKVSYRSSYTCPGRGLVSVSQNSDYHNSCQDSFTINVPKSFVPEEKELDVTNLESALREGFEVKVKVDEKTCQKCTSSGGTCGFQNSTQICCKEASSLGCNKVHPLPDATELELHRRCNGTFSCGDQRELFYPFWTSGREDCGHPDFKLDDCSGRFAELSISSVKFRILASVYGSNIIRLGRSEYIGDLCPQDPINAPFSESVLPFAPNTELLTIFYNCSRDFPQQVTNFGDFACGDDSDDDRSYYVTRNLSFPPLSEINDLLYDFSQSCDRNVSIPASGSTLNILQSTPSNDNLKKALEYGFELELNQDCRTCIDSKGACGYSQTSSRFVCYSIEEPQTPTPPNPTRNKGIAVASVSGLAILLLAGLFLCIRRRRKTQDAQYTSKSLPITSYSSRDTSRNPTSTTISSSSNHSLLPSISNLANRSDYCGVQVFSYEELEEATENFSRELGDGGFGTVYYGVLKDGRAVAVKRLYERSLKRVEQFKNEIEILKSLKHPNLVILYGCTSRHSRELLLVYEYISNGTLAEHLHGNRAEARPLCWSTRLNIAIETASALSFLHIKGIIHRDIKTTNILLDDNYQVKVADFGLSRLFPMDQTHISTAPQGTPGYVDPEYYQCYQLNEKSDVYSFGVVLTELISSKEAVDITRHRHDINLANMAVSKIQNNALHELVDSSLGYDNDPEVRRKMMAVAELAFRCLQQERDVRPAMDEIVEILRGIKDDEKKRVLVKSPDVVDIECGGGDDVGLLRNSVPPPISPETDKWTSSSDTAASL

SEQ ID NO: 29136 - protein, 1283 aa, Arabidopsis thaliana
  misc_feature (1)..(1283): Ceres Seq. ID no. 4267820
MNFERLSELMAFYHLMGKISSECGNITAGFPFWGGNRLKHCGLPSLELHCSKNITSLFISSQEFYVLHLNQTSKTLKLARTDLLGSICNSTFTTITLPPNIFELSPTYKRLTVFYYCFLLTHYVSSYKCPMRGFIFVSENHEYHKICGDTFTVIVPTRFGAGEKELNMTNLESVLSKGFEVKVKIDDTSCQECLSSHGSCGFNETLPVGGKCSPLNPTTQPPPQPGDRHKHCGHPLLELRCDQNKSTSLFISDQEFFVLHVDQTSYSLTLARPDLLHSFCSLTFTNTTLPPEIFELSPAYKSVTFYHCYPVLPDLSNYTCPVIGPISVSGNPEDHETCFPNFAANVPTSFVTKEKKLNIANLESVLEKGFEVNMNVIMKACQACSYSNESCGFDENFPFEVKCKPHHSPTAKFQCGNITAGFPFSGGNRPQICGHPSLELHCYNNMASIIISDHFYNVLHIDQTSNTLRLARAELEGSFCNATYTATTLPSKIFEISSTYKSLTVFYLCDPKVSYRSSYTCPGRGLVSVSQNSDYHNSCQDSFTINVPKSFVPEEKELDVTNLESALREGFEVKVKVDEKTCQKCTSSGGTCGFQNSTQICCKEASSLGCNKVHPLPDATELELHRRCNGTFSCGDQRELFYPFWTSGREDCGHPDFKLDDCSGRFAELSISSVKFRILASVYGSNIIRLGRSEYIGDLCPQDPINAPFSESVLPFAPNTELLTIFYNCSRDFPQQVTNFGDFACGDDSDDDRSYYVTRNLSFPPLSEINDLLYDFSQSCDRNVSIPASGSTLNILQSTPSNDNLKKALEYGFELELNQDCRTCIDSKGACGYSQTSSRFVCYSIEEPQTPTPPNPTRNKGIAVASVSGLAILLLAGLFLCIRRRRKTQDAQYTSKSLPITSYSSRDTSRNPTSTTISSSSNHSLLPSISNLANRSDYCGVQVFSYEELEEATENFSRELGDGGFGTVYYGVLKDGRAVAVKRLYERSLKRVEQFKNEIEILKSLKHPNLVILYGCTSRHSRELLLVYEYISNGTLAEHLHGNRAEARPLCWSTRLNIAIETASALSFLHIKGIIHRDIKTTNILLDDNYQVKVADFGLSRLFPMDQTHISTAPQGTPGYVDPEYYQCYQLNEKSDVYSFGVVLTELISSKEAVDITRHRHDINLANMAVSKIQNNALHELVDSSLGYDNDPEVRRKMMAVAELAFRCLQQERDVRPAMDEIVEILRGIKDDEKKRVLVKSPDVVDIECGGGDDVGLLRNSVPPPISPETDKWTSSSDTAASL

SEQ ID NO: 29137 - protein, 1274 aa, Arabidopsis thaliana
  misc_feature (1)..(1274): Ceres Seq. ID no. 4267821
MAFYHLMGKISSECGNITAGFPFWGGNRLKHCGLPSLELHCSKNITSLFISSQEFYVLHLNQTSKTLKLARTDLLGSICNSTFTTITLPPNIFELSPTYKRLTVFYYCFLLTHYVSSYKCPMRGFIFVSENHEYHKICGDTFTVIVPTRFGAGEKELNMTNLESVLSKGFEVKVKIDDTSCQECLSSHGSCGFNETLPVGGKCSPLNPTTQPPPQPGDRHKHCGHPLLELRCDQNKSTSLFISDQEFFVLHVDQTSYSLTLARPDLLHSFCSLTFTNTTLPPEIFELSPAYKSVTFYHCYPVLPDLSNYTCPVIGPISVSGNPEDHETCFPNFAANVPTSFVTKEKKLNIANLESVLEKGFEVNMNVIMKACQACSYSNESCGFDENFPFEVKCKPHHSPTAKFQCGNITAGFPFSGGNRPQICGHPSLELHCYNNMASIIISDHFYNVLHIDQTSNTLRLARAELEGSFCNATYTATTLPSKIFEISSTYKSLTVFYLCDPKVSYRSSYTCPGRGLVSVSQNSDYHNSCQDSFTINVPKSFVPEEKELDVTNLESALREGFEVKVKVDEKTCQKCTSSGGTCGFQNSTQICCKEASSLGCNKVHPLPDATELELHRRCNGTFSCGDQRELFYPFWTSGREDCGHPDFKLDDCSGRFAELSISSVKFRILASVYGSNIIRLGRSEYIGDLCPQDPINAPFSESVLPFAPNTELLTIFYNCSRDFPQQVTNFGDFACGDDSDDDRSYYVTRNLSFPPLSEINDLLYDFSQSCDRNVSIPASGSTLNILQSTPSNDNLKKALEYGFELELNQDCRTCIDSKGACGYSQTSSRFVCYSIEEPQTPTPPNPTRNKGIAVASVSGLAILLLAGLFLCIRRRRKTQDAQYTSKSLPITSYSSRDTSRNPTSTTISSSSNHSLLPSISNLANRSDYCGVQVFSYEELEEATENFSRELGDGGFGTVYYGVLKDGRAVAVKRLYERSLKRVEQFKNEIEILKSLKHPNLVILYGCTSRHSRELLLVYEYISNGTLAEHLHGNRAEARPLCWSTRLNIAIETASALSFLHIKGIIHRDIKTTNILLDDNYQVKVADFGLSRLFPMDQTHISTAPQGTPGYVDPEYYQCYQLNEKSDVYSFGVVLTELISSKEAVDITRHRHDINLANMAVSKIQNNALHELVDSSLGYDNDPEVRRKMMAVAELAFRCLQQERDVRPAMDEIVEILRGIKDDEKKRVLVKSPDVVDIECGGGDDVGLLRNSVPPPISPETDKWTSSSDTAASL

SEQ ID NO: 29138 - DNA, 3111 bp, Arabidopsis thaliana
  misc_feature (1)..(3111): Ceres Seq. ID no. 4268263
atggaagctttgcacgaacccatttggagaaaagctgggatttttgaggcaataaaggcatcgatgtacaaaatccgtaaaaatcagtctttgcttctagctcttgttgagaaatggtgtcctgaaaccaaatctttcctcttcccttggggtgaagcaacgataacgcttgaggatgtgcttgtgcttttagggttttctgttcagggttctcctgtttttgcccctttagaaagctcagagatgagagattccgtagagaaactggagaaagctagattggagaatagaggccaggatgggctagtgagacaaaacttatgggtttcgagcttcttgggtagaggtgatcaaatggagcatgaagcttttcttgcattttggctttcgcagttcgtttttccggatatgtgtcgtcgttctatttcgacaaaagttctccctatggctgttcgtttagctagaggcgaaaggattgcttttgctcctgctgttctagctagactatacagagatttgggtcaaattcaagcgtctgctagagaaaagtccactccaaatgtcactctgaaatcactgtttaagttagtccaactctgggcatgggagagattcaagagtaccagtccaaaagctagagtgataccaaaaggtgaacctaggatatctcggtggcactcacaaacatctaagaatgtgagattgaatcttgttgattttgattggcgtccttacactaaacctttacagatttggaaccctcctcggttttaccctgaagaagctatgtggatgactgttgatgacaatcttgatgatggattcgtttcctttgctcgatgtatgagagtttctcagcttgttggggttggtattgtggaggattactatccaaaccgagtggcaatgcagttcgggctggctcaagatcttcctggtttggttactgatcatagcagcttcacagaaaaagaagcatgggatggttacaataagtctcttgatggtttaatgctttacataccttctcgtgtcgctacgacttctgttactgaaagatatcgtgactggtggttgaaatctatttcaaagttttttctggattcttcagaatcaactgaaacgtttgatgcaagtaacacaattgatcattatgataataatgatgaggatgatgagctactgcctttgggtcaagtgcttcagaattttggagagagctttcttaagaaactcgaaagatgtagggcgcgtaggctagctaaaaatcatcgattcaagataaataaagacaagattggtgatggtggtgcatcagcttcaacagaattaccacttagtcagttgtttaaaaaggaggtgatgaagagaacaagtgagcatttgaaaaacaagggacggaagcgagctcgtgaggatgatgtaagttctatggatcacaaagatgatgacgttaccatcgctcagatgatcaaatctagaaggaatgatgaatgtggaagcaaaggaaagaagagtagtatggttcaaagaccatctaacgaaaacaactcttcagatcctcttgttgattctaatggaggtataattgacatttctgtgtcaccatcagagacaaggcaaacgtgtgatgatgagcttcatgtagatagaagcaagaaagaagagttggtccatgaagatgaagaaaagcaaagaagcaatgagaatttgtgcagtgaagctgagaaagaagaagatattgatgaaagattgaaacagagaaagcttgctatagaggagatagcattgaagctggagacacgtgttatggaggttgagaagaggttatgtcaaggtagaagagacagaacaaagatagatatggtaaggaagcagaagtacgggaaggtagtgttggtttcttgcatcgcgcttctagcaaccggactcattgccgactttctctgggctacttctcatcgattctcctccgccgcaatctccgccggattatctctaccttcttcacttaccaccgtaatcgttcctggccaggagaaagatacaaagaagaagaaggatagtgtgaaggaaaggaaactgtctaatacgtttcaagatttgcctgctcctgaattgaaatgggagaagatggcagcttcacctgtacctcgtctagacggagctgcaattcagattagggatcttctttatgtatttgctggatatggaaccattgatcttgtgcattcacatgtcgatatctacaatttcactgataactcgtggggaggaagattcaatatgccaaaagatatggcgcattctcatttagggatggtaacggatgggcgatacatttatattgttactggtcagtttggtccacaatgcagaggtcctacagctaaaacatttgtgcttgatactgatacaaatacatggaaggactttgttcctttaccagttcctaggtatgcaccagctactcagctttggagaggaagacttcatgtgatgggtggaagcaaagagaatcgatttacaccaggacttgaacattggagcatcgcagtgaaagatggcaaatctttggaaaatgagtggagaagtgaaatcccgatccctcgtggaggacctcacagggcatgtgtagtagttgatgaccgactatttgtaattggtggtcaagaaggtgatttcatggctaaacctggatctccaatcttcaaatgctcacgccgtatggaggtggtattcagtgatgtctacatgttggatgaggaaatgaaatggaaagttatgccgccgatgccaaaaccggactcccatatcgaatttgcttggaaagtcgttaataactccattgtaatcgttggaggcacaacagagaaacatcctgaaaccaaaaagatggttctcgttggtgaaatcttccagttcaacttaaatacactgaaatggtatgtgattgggaaattaccataccgtgtgaagacaacgctggctgggtattgggatggacagttatacttcacctcaggacaaagagacaaaggtccagatgatcccgccccgaggaaggtcatggcagagatgtggagaaccaaattgatactcaacccatga

SEQ ID NO: 29139 - protein, 1036 aa, Arabidopsis thaliana
  misc_feature (1)..(1036): Ceres Seq. ID no. 4268264
MEALHEPIWRKAGIFEAIKASMYKIRKNQSLLLALVEKWCPETKSFLFPWGEATITLEDVLVLLGFSVQGSPVFAPLESSEMRDSVEKLEKARLENRGQDGLVRQNLWVSSFLGRGDQMEHEAFLAFWLSQFVFPDMCRRSISTKVLPMAVRLARGERIAFAPAVLARLYRDLGQIQASAREKSTPNVTLKSLFKLVQLWAWERFKSTSPKARVIPKGEPRISRWHSQTSKNVRLNLVDFDWRPYTKPLQIWNPPRFYPEEAMWMTVDDNLDDGFVSFARCMRVSQLVGVGIVEDYYPNRVAMQFGLAQDLPGLVTDHSSFTEKEAWDGYNKSLDGLMLYIPSRVATTSVTERYRDWWLKSISKFFLDSSESTETFDASNTIDHYDNNDEDDELLPLGQVLQNFGESFLKKLERCRARRLAKNHRFKINKDKIGDGGASASTELPLSQLFKKEVMKRTSEHLKNKGRKRAREDDVSSMDHKDDDVTIAQMIKSRRNDECGSKGKKSSMVQRPSNENNSSDPLVDSNGGIIDISVSPSETRQTCDDELHVDRSKKEELVHEDEEKQRSNENLCSEAEKEEDIDERLKQRKLAIEEIALKLETRVMEVEKRLCQGRRDRTKIDMVRKQKYGKVVLVSCIALLATGLIADFLWATSHRFSSAAISAGLSLPSSLTTVIVPGQEKDTKKKKDSVKERKLSNTFQDLPAPELKWEKMAASPVPRLDGAAIQIRDLLYVFAGYGTIDLVHSHVDIYNFTDNSWGGRFNMPKDMAHSHLGMVTDGRYIYIVTGQFGPQCRGPTAKTFVLDTDTNTWKDFVPLPVPRYAPATQLWRGRLHVMGGSKENRFTPGLEHWSIAVKDGKSLENEWRSEIPIPRGGPHRACVVVDDRLFVIGGQEGDFMAKPGSPIFKCSRRMEVVFSDVYMLDEEMKWKVMPPMPKPDSHIEFAWKVVNNSIVIVGGTTEKHPETKKMVLVGEIFQFNLNTLKWYVIGKLPYRVKTTLAGYWDGQLYFTSGQRDKGPDDPAPRKVMAEMWRTKLILNP

SEQ ID NO: 29140 - protein, 1015 aa, Arabidopsis thaliana
  misc_feature (1)..(1015): Ceres Seq. ID no. 4268265
MYKIRKNQSLLLALVEKWCPETKSFLFPWGEATITLEDVLVLLGFSVQGSPVFAPLESSEMRDSVEKLEKARLENRGQDGLVRQNLWVSSFLGRGDQMEHEAFLAFWLSQFVFPDMCRRSISTKVLPMAVRLARGERIAFAPAVLARLYRDLGQIQASAREKSTPNVTLKSLFKLVQLWAWERFKSTSPKARVIPKGEPRISRWHSQTSKNVRLNLVDFDWRPYTKPLQIWNPPRFYPEEAMWMTVDDNLDDGFVSFARCMRVSQLVGVGIVEDYYPNRVAMQFGLAQDLPGLVTDHSSFTEKEAWDGYNKSLDGLMLYIPSRVATTSVTERYRDWWLKSISKFFLDSSESTETFDASNTIDHYDNNDEDDELLPLGQVLQNFGESFLKKLERCRARRLAKNHRFKINKDKIGDGGASASTELPLSQLFKKEVMKRTSEHLKNKGRKRAREDDVSSMDHKDDDVTIAQMIKSRRNDECGSKGKKSSMVQRPSNENNSSDPLVDSNGGIIDISVSPSETRQTCDDELHVDRSKKEELVHEDEEKQRSNENLCSEAEKEEDIDERLKQRKLAIEEIALKLETRVMEVEKRLCQGRRDRTKIDMVRKQKYGKVVLVSCIALLATGLIADFLWATSHRFSSAAISAGLSLPSSLTTVIVPGQEKDTKKKKDSVKERKLSNTFQDLPAPELKWEKMAASPVPRLDGAAIQIRDLLYVFAGYGTIDLVHSHVDIYNFTDNSWGGRFNMPKDMAHSHLGMVTDGRYIYIVTGQFGPQCRGPTAKTFVLDTDTNTWKDFVPLPVPRYAPATQLWRGRLHVMGGSKENRFTPGLEHWSIAVKDGKSLENEWRSEIPIPRGGPHRACVVVDDRLFVIGGQEGDFMAKPGSPIFKCSRRMEVVFSDVYMLDEEMKWKVMPPMPKPDSHIEFAWKVVNNSIVIVGGTTEKHPETKKMVLVGEIFQFNLNTLKWYVIGKLPYRVKTTLAGYWDGQLYFTSGQRDKGPDDPAPRKVMAEMWRTKLILNP

SEQ ID NO: 29141 - protein, 955 aa, Arabidopsis thaliana
  misc_feature (1)..(955): Ceres Seq. ID no. 4268266
MRDSVEKLEKARLENRGQDGLVRQNLWVSSFLGRGDQMEHEAFLAFWLSQFVFPDMCRRSISTKVLPMAVRLARGERIAFAPAVLARLYRDLGQIQASAREKSTPNVTLKSLFKLVQLWAWERFKSTSPKARVIPKGEPRISRWHSQTSKNVRLNLVDFDWRPYTKPLQIWNPPRFYPEEAMWMTVDDNLDDGFVSFARCMRVSQLVGVGIVEDYYPNRVAMQFGLAQDLPGLVTDHSSFTEKEAWDGYNKSLDGLMLYIPSRVATTSVTERYRDWWLKSISKFFLDSSESTETFDASNTIDHYDNNDEDDELLPLGQVLQNFGESFLKKLERCRARRLAKNHRFKINKDKIGDGGASASTELPLSQLFKKEVMKRTSEHLKNKGRKRAREDDVSSMDHKDDDVTIAQMIKSRRNDECGSKGKKSSMVQRPSNENNSSDPLVDSNGGIIDISVSPSETRQTCDDELHVDRSKKEELVHEDEEKQRSNENLCSEAEKEEDIDERLKQRKLAIEEIALKLETRVMEVEKRLCQGRRDRTKIDMVRKQKYGKVVLVSCIALLATGLIADFLWATSHRFSSAAISAGLSLPSSLTTVIVPGQEKDTKKKKDSVKERKLSNTFQDLPAPELKWEKMAASPVPRLDGAAIQIRDLLYVFAGYGTIDLVHSHVDIYNFTDNSWGGRFNMPKDMAHSHLGMVTDGRYIYIVTGQFGPQCRGPTAKTFVLDTDTNTWKDFVPLPVPRYAPATQLWRGRLHVMGGSKENRFTPGLEHWSIAVKDGKSLENEWRSEIPIPRGGPHRACVVVDDRLFVIGGQEGDFMAKPGSPIFKCSRRMEVVFSDVYMLDEEMKWKVMPPMPKPDSHIEFAWKVVNNSIVIVGGTTEKHPETKKMVLVGEIFQFNLNTLKWYVIGKLPYRVKTTLAGYWDGQLYFTSGQRDKGPDDPAPRKVMAEMWRTKLILNP

SEQ ID NO: 29142 - DNA, 2430 bp, Arabidopsis thaliana
  misc_feature (1)..(2430): Ceres Seq. ID no. 4268292
atggagagacgtaacgaagcgttgatgattaggaaatcgaagtggcagtacccacaagtgggttctccgacgccgaggattcttcagttgccacggaggcatagtgttcgacgaaatgcttcaaagggcttgaagacaacagtttcttcgtcgtctcagaaggatcggagagtgaaactggaggttttgtttcatcaagagaggacttttgatcggggggcatcgattgtgatggtgaatgataatggtggtgagaagaaggatgaagaagagggaaggagaagagggaaagttgcagatgggagagagattggtgtgtctgggttgtcttcttcttctgcggttgatgaagttgaggaagctaagtggaggtttcaagcggagatgttgagatcagagtgtaatttgttaagaatagaaaaagagattgctttgaagaagatggagaggaggaagaagcgaatggagcggacgctgagatctgctgttcttactcttctatctgggaaagagagaatctctgaagggacgaaagagagcaaggttttggaagatgagataagctatttggttgagaaactgaatgagttaaagtctccaaaggttaaggacatggaagctagaaacttcaaacataattttgataagcaagcttctgttttaagaagagagctagagaggttcgatgaagcagtttccgaagaggtttgtgtcaaagggattcagaaaatggcagaggctagcttctccgtccattctgatcaaaacgctcttaggaacaataatggaaatatagatacattgagtagtaaaatggaggcgttgtcaaaaggggttttgttggaaagaatggagaaagaatatggatcgagtctcgttgcaccgtcttcaagctctgtacaagacatgtattgtaagggaattaaagcgcatgaggaaaagaaagactgttctagacactgcaaagtagttatgaggaagattgcggatgaagtaagagctgaagcagagcaatggtcacaaatgcaagagatgttgaatcaagtgagaaaagaaatggaggaacttcaatcttgtcgtgatttctggcaaaaccgcgccctcgaagcagattccgagatacaaaatctacattcctctgttgaaggatggcgaagaaaggcgttatcatcagaggcaaagttgaaaaacctacaagcagaggtttgcggattacaagaagagatcaagagactgagaaaggaagataagttagaaccagagaagaacaaattgccatcagagtcagagaaaagggtattgatttgtcggttaaaagaaaaccgacatagcaacaatggagattggtccaagtacagtgaaggaagaacaacaaaaccgtcgagctcgagaccgcctttgagggaagttaagaacagttcagtcatagcaaggcagagaaactccaatatcatgaaaatcgaagaagagaagacagtgtgtgtgacaggagcttcaggttacattgcttcatggatcgttaagcttcttcttctccgtggttacaccgttaaagcctctgttcgtgatccaaatgatccaaggaaaacagagcatttgcttgcattggaaggagcagaggaaaggcttaaattgttcaaagcaaacttgttagaagaaggctctttcgattcagcaatcgatggttgcgaaggagttttccacaccgcatcgccattctatcatgacgtcaaggaccctcaggctgagttacttgatccggcagtgaaaggaacaatcaatgttctaagctcttgtttgaagacttcctcggttaagagagtcgtcttaacctcatcgatagcagctgttgctttcaatggaatgcctcgaacacccgaaaccatagttgacgaaacttggttcgccgatcctgactattgcagagcttccaagctatggtatgtactctcgaagacattagctgaaaacgcagcgtggaaattcgcaaaagagaacaatttacagctggtttcgataaatccggctatggtgattggtcctctcttacagccaacgctaaacactagtgctgctgcagtactaagcttgatcaaaggagcacaaacgtttcctaatgcgacgttcgggtgggttaacgttaaagatgtagcgaacgctcatattcaagcgtttgagaatccagatgctgatgggagatactgtttagtggagagagttgctcattactctgaagttgttaacattttgcatgatctttaccctgattttcaactccctgagaagtgtgcagatgaaaagatatatattccaacatataaagtgtctaaagagaaagcagagtctcttggggttgagtttgtgccattggaagttagcattaaagagactgtagagagcttgagagataaagggttcatcagattttga

SEQ ID NO: 29143 - protein, 809 aa, Arabidopsis thaliana
  misc_feature (1)..(809): Ceres Seq. ID no. 4268293
MERRNEALMIRKSKWQYPQVGSPTPRILQLPRRHSVRRNASKGLKTTVSSSSQKDRRVKLEVLFHQERTFDRGASIVMVNDNGGEKKDEEEGRRRGKVADGREIGVSGLSSSSAVDEVEEAKWRFQAEMLRSECNLLRIEKEIALKKMERRKKRMERTLRSAVLTLLSGKERISEGTKESKVLEDEISYLVEKLNELKSPKVKDMEARNFKHNFDKQASVLRRELERFDEAVSEEVCVKGIQKMAEASFSVHSDQNALRNNNGNIDTLSSKMEALSKGVLLERMEKEYGSSLVAPSSSSVQDMYCKGIKAHEEKKDCSRHCKVVMRKIADEVRAEAEQWSQMQEMLNQVRKEMEELQSCRDFWQNRALEADSEIQNLHSSVEGWRRKALSSEAKLKNLQAEVCGLQEEIKRLRKEDKLEPEKNKLPSESEKRVLICRLKENRHSNNGDWSKYSEGRTTKPSSSRPPLREVKNSSVIARQRNSNIMKIEEEKTVCVTGASGYIASWIVKLLLLRGYTVKASVRDPNDPRKTEHLLALEGAEERLKLFKANLLEEGSFDSAIDGCEGVFHTASPFYHDVKDPQAELLDPAVKGTINVLSSCLKTSSVKRVVLTSSIAAVAFNGMPRTPETIVDETWFADPDYCRASKLWYVLSKTLAENAAWKFAKENNLQLVSINPAMVIGPLLQPTLNTSAAAVLSLIKGAQTFPNATFGWVNVKDVANAHIQAFENPDADGRYCLVERVAHYSEVVNILHDLYPDFQLPEKCADEKIYIPTYKVSKEKAESLGVEFVPLEVSIKETVESLRDKGFIRF

SEQ ID NO: 29144 - protein, 801 aa, Arabidopsis thaliana
  misc_feature (1)..(801): Ceres Seq. ID no. 4268294
MIRKSKWQYPQVGSPTPRILQLPRRHSVRRNASKGLKTTVSSSSQKDRRVKLEVLFHQERTFDRGASIVMVNDNGGEKKDEEEGRRRGKVADGREIGVSGLSSSSAVDEVEEAKWRFQAEMLRSECNLLRIEKEIALKKMERRKKRMERTLRSAVLTLLSGKERISEGTKESKVLEDEISYLVEKLNELKSPKVKDMEARNFKHNFDKQASVLRRELERFDEAVSEEVCVKGIQKMAEASFSVHSDQNALRNNNGNIDTLSSKMEALSKGVLLERMEKEYGSSLVAPSSSSVQDMYCKGIKAHEEKKDCSRHCKVVMRKIADEVRAEAEQWSQMQEMLNQVRKEMEELQSCRDFWQNRALEADSEIQNLHSSVEGWRRKALSSEAKLKNLQAEVCGLQEEIKRLRKEDKLEPEKNKLPSESEKRVLICRLKENRHSNNGDWSKYSEGRTTKPSSSRPPLREVKNSSVIARQRNSNIMKIEEEKTVCVTGASGYIASWIVKLLLLRGYTVKASVRDPNDPRKTEHLLALEGAEERLKLFKANLLEEGSFDSAIDGCEGVFHTASPFYHDVKDPQAELLDPAVKGTINVLSSCLKTSSVKRVVLTSSIAAVAFNGMPRTPETIVDETWFADPDYCRASKLWYVLSKTLAENAAWKFAKENNLQLVSINPAMVIGPLLQPTLNTSAAAVLSLIKGAQTFPNATFGWVNVKDVANAHIQAFENPDADGRYCLVERVAHYSEVVNILHDLYPDFQLPEKCADEKIYIPTYKVSKEKAESLGVEFVPLEVSIKETVESLRDKGFIRF

SEQ ID NO: 29145 - protein, 732 aa, Arabidopsis thaliana
  misc_feature (1)..(732): Ceres Seq. ID no. 4268295
MVNDNGGEKKDEEEGRRRGKVADGREIGVSGLSSSSAVDEVEEAKWRFQAEMLRSECNLLRIEKEIALKKMERRKKRMERTLRSAVLTLLSGKERISEGTKESKVLEDEISYLVEKLNELKSPKVKDMEARNFKHNFDKQASVLRRELERFDEAVSEEVCVKGIQKMAEASFSVHSDQNALRNNNGNIDTLSSKMEALSKGVLLERMEKEYGSSLVAPSSSSVQDMYCKGIKAHEEKKDCSRHCKVVMRKIADEVRAEAEQWSQMQEMLNQVRKEMEELQSCRDFWQNRALEADSEIQNLHSSVEGWRRKALSSEAKLKNLQAEVCGLQEEIKRLRKEDKLEPEKNKLPSESEKRVLICRLKENRHSNNGDWSKYSEGRTTKPSSSRPPLREVKNSSVIARQRNSNIMKIEEEKTVCVTGASGYIASWIVKLLLLRGYTVKASVRDPNDPRKTEHLLALEGAEERLKLFKANLLEEGSFDSAIDGCEGVFHTASPFYHDVKDPQAELLDPAVKGTINVLSSCLKTSSVKRVVLTSSIAAVAFNGMPRTPETIVDETWFADPDYCRASKLWYVLSKTLAENAAWKFAKENNLQLVSINPAMVIGPLLQPTLNTSAAAVLSLIKGAQTFPNATFGWVNVKDVANAHIQAFENPDADGRYCLVERVAHYSEVVNILHDLYPDFQLPEKCADEKIYIPTYKVSKEKAESLGVEFVPLEVSIKETVESLRDKGFIRF

SEQ ID NO: 29146 - DNA, 828 bp, Arabidopsis thaliana
  misc_feature (1)..(828): Ceres Seq. ID no. 4268296
atgaaagggcttacgaggcttctcaattctctttcgcgacatacagcttccgtaacttgttctccatcttcttcttctcttctgatatcacgtcgctctctgtttatctcggcggcgacacactttccggtgaatttctcggagtcgataacaactaatgcttctcgtaactgttcgagatcttcttcatttcccttcaattggatcgagcaaaggaggacaatgtttatccaaacacaatcaacaccaaacccctcttctctaatgtttagtcctggtaaaccagttatggagattggaagtgctgacttccctaattctcgctctgctatgagttcacctttagctaaagccattttcgccattgatggtgtagttcgagttttctatgggtcagattttgttactgtaacaaagtcagatgatgtaacatgggatatactcaagcctgatatctttgcagtggtaatggacttttactcttctggtcagcctttgtttctcgactcacaagctacagctgccaaggataccgctattcatgaggatgactctgaaactgtagcaatgattaaggaactcttggagacgcgtatccgaccatcagtccaagatgatggaggggacatcgagtattgtggattcgatacggaaactggtatagtgaagcttagaatgcaaggagcttgtagcggttgtccaagttcatctgttactttgaaatccggaattgagaatatgcttatgcattatgtttccgaggtcaaaggtgttgagcaagaattcgatggtgaagaggagggaacatcttctggtccaatggagtag

SEQ ID NO: 29147 - protein, 275 aa, Arabidopsis thaliana
  misc_feature (1)..(275): Ceres Seq. ID no. 4268297
MKGLTRLLNSLSRHTASVTCSPSSSSLLISRRSLFISAATHFPVNFSESITTNASRNCSRSSSFPFNWIEQRRTMFIQTQSTPNPSSLMFSPGKPVMEIGSADFPNSRSAMSSPLAKAIFAIDGVVRVFYGSDFVTVTKSDDVTWDILKPDIFAVVMDFYSSGQPLFLDSQATAAKDTAIHEDDSETVAMIKELLETRIRPSVQDDGGDIEYCGFDTETGIVKLRMQGACSGCPSSSVTLKSGIENMLMHYVSEVKGVEQEFDGEEEGTSSGPME

SEQ ID NO: 29148 - protein, 201 aa, Arabidopsis thaliana
  misc_feature (1)..(201): Ceres Seq. ID no. 4268298
MFIQTQSTPNPSSLMFSPGKPVMEIGSADFPNSRSAMSSPLAKAIFAIDGVVRVFYGSDFVTVTKSDDVTWDILKPDIFAVVMDFYSSGQPLFLDSQATAAKDTAIHEDDSETVAMIKELLETRIRPSVQDDGGDIEYCGFDTETGIVKLRMQGACSGCPSSSVTLKSGIENMLMHYVSEVKGVEQEFDGEEEGTSSGPME

SEQ ID NO: 29149 - protein, 187 aa, Arabidopsis thaliana
  misc_feature (1)..(187): Ceres Seq. ID no. 4268299
MFSPGKPVMEIGSADFPNSRSAMSSPLAKAIFAIDGVVRVFYGSDFVTVTKSDDVTWDILKPDIFAVVMDFYSSGQPLFLDSQATAAKDTAIHEDDSETVAMIKELLETRIRPSVQDDGGDIEYCGFDTETGIVKLRMQGACSGCPSSSVTLKSGIENMLMHYVSEVKGVEQEFDGEEEGTSSGPME

SEQ ID NO: 29150 - DNA, 966 bp, Arabidopsis thaliana
  misc_feature (1)..(966): Ceres Seq. ID no. 4268403
atggtgaaagggtcccagaaaatcgtggccgtagatcaagacataccaataatagacatgtcgcaggagagatcacaagtgtcgatgcagatagtcaaagcctgcgagagtctcggcttcttcaaagtcatcaaccatggcgttgaccaaaccaccatctcaagaatggagcaagagtctataaacttctttgctaaaccggctcacgagaagaaatctgtccgaccagttaaccagcctttccggtatggttttagagacattggactcaacggtgactctggtgaggtcgagtatttgctgtttcacactaacgaccctgcctttcgctctcagctctccttcagctcggcagtgaattgttacatagaagcagttaagcagttggctcgtgagatcttagatctgacggctgagggacttcatgtcccacctcacagtttcagtaggttaatcagctccgtcgatagtgactccgttctgagagtgaatcattatccaccgtccgatcaattctttggtgaagccaatctttctgaccaatctgtgtcactgacaagagttggcttcggagaacacaccgaccctcagattttaacagttcttagatctaacggtgtaggagggctccaagtgtccaattcagatggcatgtgggtttctgtctcccctgacccttcagctttctgcgtcaatgtaggagacttgttacaggtgatgacgaacgggagatttataagtgtaaggcatagagcattgacctacggagaagaaagccggctatccacggcgtactttgccggaccaccgcttcaggcgaagattgggcctctttcggcgatggttatgacgatgaatcagccacggttgtaccaaacatttacttggggcgagtacaagaaacgtgcgtactctctacgacttgaggatagccgtttagacatgtttcgtacatgtaaggactag

SEQ ID NO: 29151 - protein, 321 aa, Arabidopsis thaliana
  misc_feature (1)..(321): Ceres Seq. ID no. 4268404
MVKGSQKIVAVDQDIPIIDMSQERSQVSMQIVKACESLGFFKVINHGVDQTTISRMEQESINFFAKPAHEKKSVRPVNQPFRYGFRDIGLNGDSGEVEYLLFHTNDPAFRSQLSFSSAVNCYIEAVKQLAREILDLTAEGLHVPPHSFSRLISSVDSDSVLRVNHYPPSDQFFGEANLSDQSVSLTRVGFGEHTDPQILTVLRSNGVGGLQVSNSDGMWVSVSPDPSAFCVNVGDLLQVMTNGRFISVRHRALTYGEESRLSTAYFAGPPLQAKIGPLSAMVMTMNQPRLYQTFTWGEYKKRAYSLRLEDSRLDMFRTCKD

SEQ ID NO: 29152 - protein, 302 aa, Arabidopsis thaliana
  misc_feature (1)..(302): Ceres Seq. ID no. 4268405
MSQERSQVSMQIVKACESLGFFKVINHGVDQTTISRMEQESINFFAKPAHEKKSVRPVNQPFRYGFRDIGLNGDSGEVEYLLFHTNDPAFRSQLSFSSAVNCYIEAVKQLAREILDLTAEGLHVPPHSFSRLISSVDSDSVLRVNHYPPSDQFFGEANLSDQSVSLTRVGFGEHTDPQILTVLRSNGVGGLQVSNSDGMWVSVSPDPSAFCVNVGDLLQVMTNGRFISVRHRALTYGEESRLSTAYFAGPPLQAKIGPLSAMVMTMNQPRLYQTFTWGEYKKRAYSLRLEDSRLDMFRTCKD

SEQ ID NO: 29153 - protein, 293 aa, Arabidopsis thaliana
  misc_feature (1)..(293): Ceres Seq. ID no. 4268406
MQIVKACESLGFFKVINHGVDQTTISRMEQESINFFAKPAHEKKSVRPVNQPFRYGFRDIGLNGDSGEVEYLLFHTNDPAFRSQLSFSSAVNCYIEAVKQLAREILDLTAEGLHVPPHSFSRLISSVDSDSVLRVNHYPPSDQFFGEANLSDQSVSLTRVGFGEHTDPQILTVLRSNGVGGLQVSNSDGMWVSVSPDPSAFCVNVGDLLQVMTNGRFISVRHRALTYGEESRLSTAYFAGPPLQAKIGPLSAMVMTMNQPRLYQTFTWGEYKKRAYSLRLEDSRLDMFRTCKD

SEQ ID NO: 29154 - DNA, 963 bp, Arabidopsis thaliana
  misc_feature (1)..(963): Ceres Seq. ID no. 4268818
atgaagattcaaattatatggctcactttggttttaatcgtcgttgaagctaatgcagtcaaacaagggaaaaacgcaacgatcccggccctaatagtttttggagattcaataatggatacaggaaataacaataatcttcccactcttcttaaatgtaacttccctccatacggtaaagattatcctggaggctttgccactggaagattttctgatggaagagttccttctgatcttattgcggaaaaaataggattggctaagacattaccagcatatatgaatccatatttgaagccagaggatcttcttaaaggtgtaacatttgcatcaggaggaactggttatgatccattgacagcaaaaattatgtcagtgatatcagtgtgggatcaactcatatatttcaaagaatatatatcaaagatcaagaggcatttcggagaagaaaaagcaaaagatatcttggaacatagtttctttcttgtggtgtctagtagcaatgaccttgctcacacttatttagctcaagctcatagatatgatcgtacctcttatgccaatttcttggctgactctgctgttcatttcgtgagagaattacacaagcttggagctcaaaaaattggagtgtttagtgcagtccctgttggttgtgttccactccaaagaacagtttttggagataaagagttggatggtgttatcctttacattaatgtttatgatactcttttcgacatgatccaacaccctaaaaaatacggttttgaagtggctgatagaggatgttgcggtaaaggactgctcacgatctcctatttatgtaactcattgaaccaatttacgtgttctaactcttcagcttatatattttgggatagctatcatccaagtaaaagagcttatcaagttattgtcgacaatttacttgacaaatatttgagcaaagtatattga

SEQ ID NO: 29155 - protein, 320 aa, Arabidopsis thaliana
  misc_feature (1)..(320): Ceres Seq. ID no. 4268819
MKIQIIWLTLVLIVVEANAVKQGKNATIPALIVFGDSIMDTGNNNNLPTLLKCNFPPYGKDYPGGFATGRFSDGRVPSDLIAEKIGLAKTLPAYMNPYLKPEDLLKGVTFASGGTGYDPLTAKIMSVISVWDQLIYFKEYISKIKRHFGEEKAKDILEHSFFLVVSSSNDLAHTYLAQAHRYDRTSYANFLADSAVHFVRELHKLGAQKIGVFSAVPVGCVPLQRTVFGDKELDGVILYINVYDTLFDMIQHPKKYGFEVADRGCCGKGLLTISYLCNSLNQFTCSNSSAYIFWDSYHPSKRAYQVIVDNLLDKYLSKVY

SEQ ID NO: 29156 - protein, 282 aa, Arabidopsis thaliana
  misc_feature (1)..(282): Ceres Seq. ID no. 4268820
MDTGNNNNLPTLLKCNFPPYGKDYPGGFATGRFSDGRVPSDLIAEKIGLAKTLPAYMNPYLKPEDLLKGVTFASGGTGYDPLTAKIMSVISVWDQLIYFKEYISKIKRHFGEEKAKDILEHSFFLVVSSSNDLAHTYLAQAHRYDRTSYANFLADSAVHFVRELHKLGAQKIGVFSAVPVGCVPLQRTVFGDKELDGVILYINVYDTLFDMIQHPKKYGFEVADRGCCGKGLLTISYLCNSLNQFTCSNSSAYIFWDSYHPSKRAYQVIVDNLLDKYLSKVY

SEQ ID NO: 29157 - protein, 226 aa, Arabidopsis thaliana
  misc_feature (1)..(226): Ceres Seq. ID no. 4268821
MNPYLKPEDLLKGVTFASGGTGYDPLTAKIMSVISVWDQLIYFKEYISKIKRHFGEEKAKDILEHSFFLVVSSSNDLAHTYLAQAHRYDRTSYANFLADSAVHFVRELHKLGAQKIGVFSAVPVGCVPLQRTVFGDKELDGVILYINVYDTLFDMIQHPKKYGFEVADRGCCGKGLLTISYLCNSLNQFTCSNSSAYIFWDSYHPSKRAYQVIVDNLLDKYLSKVY

SEQ ID NO: 29158 - DNA, 1017 bp, Arabidopsis thaliana
  misc_feature (1)..(1017): Ceres Seq. ID no. 4268897
atggtgttcgcagatgatgtgacaccaatcccagagggcaaaccccaagtggcgcagtggttcaatgccaacgttggtccattggctcaacgtaaaggcttagatcctgctcttgtagctgctgaggctgctccacgtatcatcaacggtggtgaattcaaaacactaacggacgcaataaagagcgttcctgcagggaacacaaagcgggtgatcataaagatggctcctggtgaatacaaagagaaggtcactatcgacaggaacaaacccttcattacattgatgggacaacccaatgccatgcctgttatcacctatgacggtaccgccgccaagtatggaaccgttgatagcgcctctctcattatcttatccgactatttcatggccgttaacatcgtcgttaagaacactgcgccggcaccagatggtaaaactaagggagcacaagctttatccatgagaatctccggaaattttgctgctttctacaactgcaaattctacggtttccaagacacaatctgtgacgatacaggaaaccatttcttcaaggattgttacgttgaaggaacattcgatttcatcttcggaagtggaacctctatgtacttgggaacacaattgcacgtggttggagacggtattagagtgatagcagcgcatgcaggaaagagcgcagaagagaagagtggatactctttcgtgcactgcaaggtgactggaaccggtggaggaatttatttgggaagagcatggatgagccaccctaaggttgtttatgcctacaccgagatgaccagcgttgtcaaccccaccggatggcaagaaaacaagactcccgcacatgacaaaaccgtgttctacggagagtacaagtgttcaggaccaggatcacacaaagccaagagagtaccattcacacaagacattgacgacaaagaagctaaccgtttcctatccctcggctacatccaaggatccaagtggcttctcccaccacccgctttgtaa

SEQ ID NO: 29159 - protein, 338 aa, Arabidopsis thaliana
  misc_feature (1)..(338): Ceres Seq. ID no. 4268898
MVFADDVTPIPEGKPQVAQWFNANVGPLAQRKGLDPALVAAEAAPRIINGGEFKTLTDAIKSVPAGNTKRVIIKMAPGEYKEKVTIDRNKPFITLMGQPNAMPVITYDGTAAKYGTVDSASLIILSDYFMAVNIVVKNTAPAPDGKTKGAQALSMRISGNFAAFYNCKFYGFQDTICDDTGNHFFKDCYVEGTFDFIFGSGTSMYLGTQLHVVGDGIRVIAAHAGKSAEEKSGYSFVHCKVTGTGGGIYLGRAWMSHPKVVYAYTEMTSVVNPTGWQENKTPAHDKTVFYGEYKCSGPGSHKAKRVPFTQDIDDKEANRFLSLGYIQGSKWLLPPPAL

SEQ ID NO: 29160 - protein, 264 aa, Arabidopsis thaliana
  misc_feature (1)..(264): Ceres Seq. ID no. 4268899
MAPGEYKEKVTIDRNKPFITLMGQPNAMPVITYDGTAAKYGTVDSASLIILSDYFMAVNIVVKNTAPAPDGKTKGAQALSMRISGNFAAFYNCKFYGFQDTICDDTGNHFFKDCYVEGTFDFIFGSGTSMYLGTQLHVVGDGIRVIAAHAGKSAEEKSGYSFVHCKVTGTGGGIYLGRAWMSHPKVVYAYTEMTSVVNPTGWQENKTPAHDKTVFYGEYKCSGPGSHKAKRVPFTQDIDDKEANRFLSLGYIQGSKWLLPPPAL

SEQ ID NO: 29161 - protein, 243 aa, Arabidopsis thaliana
  misc_feature (1)..(243): Ceres Seq. ID no. 4268900
MGQPNAMPVITYDGTAAKYGTVDSASLIILSDYFMAVNIVVKNTAPAPDGKTKGAQALSMRISGNFAAFYNCKFYGFQDTICDDTGNHFFKDCYVEGTFDFIFGSGTSMYLGTQLHVVGDGIRVIAAHAGKSAEEKSGYSFVHCKVTGTGGGIYLGRAWMSHPKVVYAYTEMTSVVNPTGWQENKTPAHDKTVFYGEYKCSGPGSHKAKRVPFTQDIDDKEANRFLSLGYIQGSKWLLPPPAL

SEQ ID NO: 29162 - DNA, 576 bp, Arabidopsis thaliana
  misc_feature (1)..(576): Ceres Seq. ID no. 4268917
atgaaccttggggatccggattttgtcgatgtttctaaggttatttctgatatgttgtctacaaattttgcacaaggcttgaagaaaaagataaacgacaacaaaacctttgatccaaattattacggtggcaggtgggatcagattaacgaccatgggacaagccatttatcaatcatagatagcgagaggaatgttgtttcactgactagtacaataaacagttactttggggcattgatgttatctccaagcaccggaattgttctgaacaacgaaatggatgatttctcaatccccatgaaatccagcagtaacctaactgtgccaccaccggcaccggccaatttcattcgtcctgggaaacgacctctgtcttctatgacacccaccattgtactcaaggatggtaaagtgaaagcctccgtgggtgcgagcggaggactgtacatcatcgctgggacaacagaagtttttctgaattatttcttcctcaagatggatcctctttcttccgttttggctccaagaatctaccatcagctgataccaaacatagtttcgtatgaaaactag

SEQ ID NO: 29163 - protein, 191 aa, Arabidopsis thaliana
  misc_feature (1)..(191): Ceres Seq. ID no. 4268918
MNLGDPDFVDVSKVISDMLSTNFAQGLKKKINDNKTFDPNYYGGRWDQINDHGTSHLSIIDSERNVVSLTSTINSYFGALMLSPSTGIVLNNEMDDFSIPMKSSSNLTVPPPAPANFIRPGKRPLSSMTPTIVLKDGKVKASVGASGGLYIIAGTTEVFLNYFFLKMDPLSSVLAPRIYHQLIPNIVSYEN

SEQ ID NO: 29164 - protein, 174 aa, Arabidopsis thaliana
  misc_feature (1)..(174): Ceres Seq. ID no. 4268919
MLSTNFAQGLKKKINDNKTFDPNYYGGRWDQINDHGTSHLSIIDSERNVVSLTSTINSYFGALMLSPSTGIVLNNEMDDFSIPMKSSSNLTVPPPAPANFIRPGKRPLSSMTPTIVLKDGKVKASVGASGGLYIIAGTTEVFLNYFFLKMDPLSSVLAPRIYHQLIPNIVSYEN

SEQ ID NO: 29165 - protein, 111 aa, Arabidopsis thaliana
  misc_feature (1)..(111): Ceres Seq. ID no. 4268920
MLSPSTGIVLNNEMDDFSIPMKSSSNLTVPPPAPANFIRPGKRPLSSMTPTIVLKDGKVKASVGASGGLYIIAGTTEVFLNYFFLKMDPLSSVLAPRIYHQLIPNIVSYEN

SEQ ID NO: 29166 - DNA, 1653 bp, Arabidopsis thaliana
  misc_feature (1)..(1653): Ceres Seq. ID no. 4270211
atggcgaattctcaaagatcatcatctctgatcgatccaaggaacggtttctgcacatcaaactccacattttacagtaaacgcaaaccattggcacttccttcaaaagaatcactcgacatcacaacattcatctcctcccaaacgtaccgtggcaaaaccgccttcatagacgcagccacggaccaccgcataagcttctccgatttatggatggccgtggatcgtgtcgccgactgtctcctccacgacgtgggaatacggagaggtgacgtggtcctagtcctctctcccaacaccatctccatccccattgtctgcctctccgtgatgtctcttggcgctgtcttaactaccgctaatcctctcaacaccgctagtgaaatcttaagacaaatcgcggatagcaatccaaaactcgccttcacaacaccggaactggctcccaaaatcgccagttccggtatctctatcgtcctcgagcgcgtagaagacactctacgcgttccgagaggactcaaagtggttgggaatctaactgaaatgatgaagaaagaaccaagtggacaagcagtcagaaaccaagttcataaagacgacacggcgatgttgctttactcctcggggacgacgggacgaagcaaaggagtgaattcgtctcacgggaacttaatagcacacgtggcgagatacatcgcggagccattcgagcagccacaacagaccttcatttgcactgttccgttgttccacacttttggtttactaaacttcgttttggccaccttagcgttaggtacgaccgttgtcatcctcccgaggtttgacctcggagagatgatggcggctgtcgagaaatacagagcgacgactctgattctcgtgccgccagttttagtaactatgataaacaaagcggatcaaataatgaagaagtacgacgtgagcttcttgagaacggtgcggtgcggtggagcacctttgagcaaggaagttactcaagggtttatgaagaaatatccaacggttgatgtttatcaaggatacgcattgacggaatctaacggtgcaggagcttcgatagaatcagtggaggagagtcggaggtacggtgcggtggggttgttgtcatgtggtgtagaagcgaggattgtggatccgaatacgggtcaggtcatgggtttgaaccaaacgggcgaactttggcttaaagggccttctatcgccaaaggttatttcaggaatgaagaagaaattataacttcagaaggatggcttaaaacaggagatctatgctatatagacaacgatggatttctttttatcgttgatcgattgaaagagcttatcaaatacaaaggttaccaggtacctccagctgaactagaggctctcttactaaaccatccagatattctcgatgcagccgttattccgtttccagataaagaagcaggacaatttccgatggcttacgtagcacgaaagcctgagagtaatctttgtgagaaaaaggttatcgactttatttctaaacaggtggcaccatataagaaaataagaaaagtcgcatttatagactctataccaaagactccatcgggcaaaacacttcgcaaggatctaatcaaatttgccatttcaaaaatttaa

SEQ ID NO: 29167 - protein, 550 aa, Arabidopsis thaliana
  misc_feature (1)..(550): Ceres Seq. ID no. 4270212
MANSQRSSSLIDPRNGFCTSNSTFYSKRKPLALPSKESLDITTFISSQTYRGKTAFIDAATDHRISFSDLWMAVDRVADCLLHDVGIRRGDVVLVLSPNTISIPIVCLSVMSLGAVLTTANPLNTASEILRQIADSNPKLAFTTPELAPKIASSGISIVLERVEDTLRVPRGLKVVGNLTEMMKKEPSGQAVRNQVHKDDTAMLLYSSGTTGRSKGVNSSHGNLIAHVARYIAEPFEQPQQTFICTVPLFHTFGLLNFVLATLALGTTVVILPRFDLGEMMAAVEKYRATTLILVPPVLVTMINKADQIMKKYDVSFLRTVRCGGAPLSKEVTQGFMKKYPTVDVYQGYALTESNGAGASIESVEESRRYGAVGLLSCGVEARIVDPNTGQVMGLNQTGELWLKGPSIAKGYFRNEEEIITSEGWLKTGDLCYIDNDGFLFIVDRLKELIKYKGYQVPPAELEALLLNHPDILDAAVIPFPDKEAGQFPMAYVARKPESNLCEKKVIDFISKQVAPYKKIRKVAFIDSIPKTPSGKTLRKDLIKFAISKI

SEQ ID NO: 29168 - protein, 479 aa, Arabidopsis thaliana
  misc_feature (1)..(479): Ceres Seq. ID no. 4270213
MAVDRVADCLLHDVGIRRGDVVLVLSPNTISIPIVCLSVMSLGAVLTTANPLNTASEILRQIADSNPKLAFTTPELAPKIASSGISIVLERVEDTLRVPRGLKVVGNLTEMMKKEPSGQAVRNQVHKDDTAMLLYSSGTTGRSKGVNSSHGNLIAHVARYIAEPFEQPQQTFICTVPLFHTFGLLNFVLATLALGTTVVILPRFDLGEMMAAVEKYRATTLILVPPVLVTMINKADQIMKKYDVSFLRTVRCGGAPLSKEVTQGFMKKYPTVDVYQGYALTESNGAGASIESVEESRRYGAVGLLSCGVEARIVDPNTGQVMGLNQTGELWLKGPSIAKGYFRNEEEIITSEGWLKTGDLCYIDNDGFLFIVDRLKELIKYKGYQVPPAELEALLLNHPDILDAAVIPFPDKEAGQFPMAYVARKPESNLCEKKVIDFISKQVAPYKKIRKVAFIDSIPKTPSGKTLRKDLIKFAISKI

SEQ ID NO: 29169 - protein, 440 aa, Arabidopsis thaliana
  misc_feature (1)..(440): Ceres Seq. ID no. 4270214
MSLGAVLTTANPLNTASEILRQIADSNPKLAFTTPELAPKIASSGISIVLERVEDTLRVPRGLKVVGNLTEMMKKEPSGQAVRNQVHKDDTAMLLYSSGTTGRSKGVNSSHGNLIAHVARYIAEPFEQPQQTFICTVPLFHTFGLLNFVLATLALGTTVVILPRFDLGEMMAAVEKYRATTLILVPPVLVTMINKADQIMKKYDVSFLRTVRCGGAPLSKEVTQGFMKKYPTVDVYQGYALTESNGAGASIESVEESRRYGAVGLLSCGVEARIVDPNTGQVMGLNQTGELWLKGPSIAKGYFRNEEEIITSEGWLKTGDLCYIDNDGFLFIVDRLKELIKYKGYQVPPAELEALLLNHPDILDAAVIPFPDKEAGQFPMAYVARKPESNLCEKKVIDFISKQVAPYKKIRKVAFIDSIPKTPSGKTLRKDLIKFAISKI

SEQ ID NO: 29170 - DNA, 2160 bp, Arabidopsis thaliana
  misc_feature (1)..(2160): Ceres Seq. ID no. 4305462
atgagggagaattgggcggtggtggctctgtttacactatgcattgtagggtttgagcttagattcatccatggagctactgatgcatcagacacttcagcattgaacacattgttcagtggtatgcattctccagctcagctaacacaatggactgcagcagctggtgatccttgtggccagaattggagaggcgtcacttgttccggctcacgagttactcaaataaagttgtcaggtcttgagctctctggaactcttggaggatacatgcttgataaattgacttctcttaccgagcttgatctaagcagcaataatcttggaggtgatttaccatatcagtttcctccaaatctgcaacgattgaaccttgcgaataatcaattcactggagctgcttcgtactcactttctcagattacaccacttaagtatctcaatcttggtcacaatcagtttaaggggcagatagctatcgacttctccaagctcgactctctcacaaccttggacttctctttcaattctttcacgaactctttaccggcaacgttttcctctctaacaagtttaaaatcactataccttcagaacaatcagttctcaggcacagtcgatgtcttagccggtcttcctcttgagactctgaacattgcgaacaatgacttcacggggtggatccccagttctttaaagggcatcacattaataaaagatggcaactcattcaatactggacctgcacctccaccaccacctggtacacctcctatccgtggctccccgagccgtaaatctggaggacgtgaaagccggtctagtgatgagtccaccagaaatggagattccaagaaatcaggaatcggagcgggggcaattgcgggcataatcatttcattgttagtagttacagctcttcttgttgctttcttcttgttcagaagaaaaaaatcaaagaggtcatcacccatggacattgagaaaaccgataaccagcctttcactcttgcttcaaacgactttcacgaaaacaattccattcagagttcttcatcagttgagacaaagaaactggacacttcattgtctattaatcttcgacctccaccaattgatagaaacaaatcatttgatgatgaagattcgacaagaaagcctattgctgtcaagaaatccacagtggtggttccttcaaatgtgagactctattcagttgcagatctccaaattgctactggcagtttcagcgtagataatcttcttggagaagggacttttggacgagtatacagagctgagtttgatgatggaaaggttcttgctgtgaagaaaattgattcgtctgctctcccacatggcatgaccgatgatttcattgaaatggtatcgaaaatagccaatttggatcatccaaatgtgaccaagcttgttggttactgtgctgagcacggacaacatctcgtggtctatgaattccacaaaaatggatcattacatgacttcttacacttatcagaagaggaaagtaaagcattggtgtggaattcacgagtcaagatcgctcttgggactgcacgcgcattggagtatctgcatgaagtttgctcaccgtctatagtggacaagaatatcaaatcagctaatattttactcgattcagagctgaatcctcacttatcagattctggtctcgcaagcttccttcccacagctaatgagttattaaaccaaaccgatgaagggtatagcgcacctgaagtatcaatgtcaggccaatattctttgaagagtgacatttacagttttggagtagtgatgcttgaacttttaactgggagaaaaccatttgacagcacaaggtcaagatctgagcagtcactggttcgatgggcgacaccacaacttcacgacattgatgctttagccaaaatggttgatccagctcttaaagggctttatcctgtcaaatccctttctcgatttgcagatgttatcgctctctgtgtccagccggagccggagtttagaccaccaatgtctgaagttgtgcaggctctagttgtgttagtgcagagagctaacatgagcaagagaactgtcggagttgatccatcgcaacgtgctggtagtgccgacacgaccagtgattacatgtaa

SEQ ID NO: 29171 - protein, 719 aa, Arabidopsis thaliana
  misc_feature (1)..(719): Ceres Seq. ID no. 4305463
MRENWAVVALFTLCIVGFELRFIHGATDASDTSALNTLFSGMHSPAQLTQWTAAAGDPCGQNWRGVTCSGSRVTQIKLSGLELSGTLGGYMLDKLTSLTELDLSSNNLGGDLPYQFPPNLQRLNLANNQFTGAASYSLSQITPLKYLNLGHNQFKGQIAIDFSKLDSLTTLDFSFNSFTNSLPATFSSLTSLKSLYLQNNQFSGTVDVLAGLPLETLNIANNDFTGWIPSSLKGITLIKDGNSFNTGPAPPPPPGTPPIRGSPSRKSGGRESRSSDESTRNGDSKKSGIGAGAIAGIIISLLVVTALLVAFFLFRRKKSKRSSPMDIEKTDNQPFTLASNDFHENNSIQSSSSVETKKLDTSLSINLRPPPIDRNKSFDDEDSTRKPIAVKKSTVVVPSNVRLYSVADLQIATGSFSVDNLLGEGTFGRVYRAEFDDGKVLAVKKIDSSALPHGMTDDFIEMVSKIANLDHPNVTKLVGYCAEHGQHLVVYEFHKNGSLHDFLHLSEEESKALVWNSRVKIALGTARALEYLHEVCSPSIVDKNIKSANILLDSELNPHLSDSGLASFLPTANELLNQTDEGYSAPEVSMSGQYSLKSDIYSFGVVMLELLTGRKPFDSTRSRSEQSLVRWATPQLHDIDALAKMVDPALKGLYPVKSLSRFADVIALCVQPEPEFRPPMSEVVQALVVLVQRANMSKRTVGVDPSQRAGSADTTSDYM

SEQ ID NO: 29172 - protein, 678 aa, Arabidopsis thaliana
  misc_feature (1)..(678): Ceres Seq. ID no. 4305464
MHSPAQLTQWTAAAGDPCGQNWRGVTCSGSRVTQIKLSGLELSGTLGGYMLDKLTSLTELDLSSNNLGGDLPYQFPPNLQRLNLANNQFTGAASYSLSQITPLKYLNLGHNQFKGQIAIDFSKLDSLTTLDFSFNSFTNSLPATFSSLTSLKSLYLQNNQFSGTVDVLAGLPLETLNIANNDFTGWIPSSLKGITLIKDGNSFNTGPAPPPPPGTPPIRGSPSRKSGGRESRSSDESTRNGDSKKSGIGAGAIAGIIISLLVVTALLVAFFLFRRKKSKRSSPMDIEKTDNQPFTLASNDFHENNSIQSSSSVETKKLDTSLSINLRPPPIDRNKSFDDEDSTRKPIAVKKSTVVVPSNVRLYSVADLQIATGSFSVDNLLGEGTFGRVYRAEFDDGKVLAVKKIDSSALPHGMTDDFIEMVSKIANLDHPNVTKLVGYCAEHGQHLVVYEFHKNGSLHDFLHLSEEESKALVWNSRVKIALGTARALEYLHEVCSPSIVDKNIKSANILLDSELNPHLSDSGLASFLPTANELLNQTDEGYSAPEVSMSGQYSLKSDIYSFGVVMLELLTGRKPFDSTRSRSEQSLVRWATPQLHDIDALAKMVDPALKGLYPVKSLSRFADVIALCVQPEPEFRPPMSEVVQALVVLVQRANMSKRTVGVDPSQRAGSADTTSDYM

SEQ ID NO: 29173 - protein, 629 aa, Arabidopsis thaliana
  misc_feature (1)..(629): Ceres Seq. ID no. 4305465
MLDKLTSLTELDLSSNNLGGDLPYQFPPNLQRLNLANNQFTGAASYSLSQITPLKYLNLGHNQFKGQIAIDFSKLDSLTTLDFSFNSFTNSLPATFSSLTSLKSLYLQNNQFSGTVDVLAGLPLETLNIANNDFTGWIPSSLKGITLIKDGNSFNTGPAPPPPPGTPPIRGSPSRKSGGRESRSSDESTRNGDSKKSGIGAGAIAGIIISLLVVTALLVAFFLFRRKKSKRSSPMDIEKTDNQPFTLASNDFHENNSIQSSSSVETKKLDTSLSINLRPPPIDRNKSFDDEDSTRKPIAVKKSTVVVPSNVRLYSVADLQIATGSFSVDNLLGEGTFGRVYRAEFDDGKVLAVKKIDSSALPHGMTDDFIEMVSKIANLDHPNVTKLVGYCAEHGQHLVVYEFHKNGSLHDFLHLSEEESKALVWNSRVKIALGTARALEYLHEVCSPSIVDKNIKSANILLDSELNPHLSDSGLASFLPTANELLNQTDEGYSAPEVSMSGQYSLKSDIYSFGVVMLELLTGRKPFDSTRSRSEQSLVRWATPQLHDIDALAKMVDPALKGLYPVKSLSRFADVIALCVQPEPEFRPPMSEVVQALVVLVQRANMSKRTVGVDPSQRAGSADTTSDYM

SEQ ID NO: 29174 - DNA, 3288 bp, Arabidopsis thaliana
  misc_feature (1)..(3288): Ceres Seq. ID no. 4360097
atgacgactacttcagaaatttctcttcaagaagaatacgtcaccgacgccgttgaccaccgtggacttgccgccagaagatccaataccggtagatggagagccgccttgttcataatcggtgtggaggtggctgagaggttcgcttactatggaatcggatcaaacttaataagctacttgactggaccacttggtgaatccacggctgtagccgccgctaatgtcaacgcgtggtcaggaattgccactcttcttcctgttcttggagcttttgtcgccgacgcatttctcggtcgttaccgaacaattatcatctcttctcttatctacgtcctgggattggcgtttctgactttatctgcgtttctgattcccaatactactgaagtgacatcttcaacttcttcttttctcaatgtactcttcttcttctctctgtatttggtggctattggacaaagtggacacaagccttgtgttcaagcttttggtgctgaccagtttgatgaaaaagactctcaagagaaatctgacagaagctccttcttcaactggtggtaccttagtctgtctgcaggaatctgctttgcgattttagttgttgtatacatccaggaagagttcagctgggcttttgggtttggaatcccatgtgtgttcatggtgatctctcttgttcttttcgtgtcagggagaaggatttataggtacagtaaaagaagacatgaagaggaaataaacccttttacgaggataggtagagtcttctttgtagcactcaagaaccaaagattgagttcatcagacttgtgcaaagttgagctagaggcaaatacatccccagagaaacagagttttttcaacaaagcattgcttgtacccaatgattcttctcaaggagaaaacgcatccaagtctagtgatgttgaagatgccacagctcttatcaggctaattccagtatggtttacgactctggcttacgcgataccctacgcgcaatacatgacatttttcactaagcaaggcgtcacaatggatagaacaattcttcctggtgttaagatcccacctgcttctcttcaggtctttatcggcatatcaatagtcctctttgtccccatctacgaccgagttttcgtccccatcgccaggttaataaccaaagaaccttgtggcatcacaaccctcaaaagaattggaactggaattgtactgtcgactatcactatggtaattgcagctctggttgagttcaagcggctcgagactgcgaaagaacacgggcttatagaccaaccggaagcaactcttccaatgtcgatatggtggttaatccctcagtacttgttgctgggattggctgacgtatatactttagtgggaatgcaagagttcttctacagccaagtccctactgagctgagaagcatcggtctcgcgctttacttaagcgcgttgggcgtgggaagcttattaagcagcttactcatctctctgatagacttggccactggaggagacgcaggaaacagctggtttaacagtaatctgaacagagctcatcttgattacttctattggttactagcgattaaaatgacgacgacttccaaaacttctcttcaagaagaatacgtcatcgacgccgttgaccaccgtggcttttccgccagaaggtctattaccggtagatggagagctgcatggttcattatcggtgtggaggtggcggagaggttcgcgaactacgggatcggatcaaacctgataagctacttgactggaccacttggtcaatctacggcggtcgccgccgctaatgtcaacgcttggtctggaatttccactattcttcctcttcttggagcttttgtcgccgacgcttttcttggtcgctacataacaattatcatcgcttcttttatctatgtcctgggactggcgtttctgactttatctgcgtttctgattcccaacaatactgaagtgacctcgtcaccttcttcttttctcaatgcactcttcttcttctctctttatttggtggctattggacaaagtggacacaagccttgtgttcaggcttttggtgcagatcagtttgatgagaagaacccgcaagagaatagtgatagaagctctttcttcaactggtggtaccttagtatgtgtgcaggaatcggcctagcgattttagtggttgtgtacatccaagaaaatgtaagctgggcacttgggtttggaatcccatgtgtgttcatggtgatctctcttgttcttttcgttttagggagaaagagttataggtttagtaaaacaagacaagaagaggaaacaaacccgtttacgagaataggtagagtcttctttgtagcattcaagaaccagagattgaattcatcagacttgtgcaaagttgagctaatagaggcaaatcgatctcaagaatctccagaggagctgagttttctcaacaaagcattgcttgtcccaaatgattctgatgaaggagaagtggcatgcaagtctagagatgtcgaagatgctacagctcttgtcaggcttattccagtatggcttacaactttggcttacgcgatacctttcgcgcagtacatgactttctttacaaagcaaggtgtcacaatggaaagaacaatatttccaggtgtagagatcccacctgcttctcttcaggttcttatcagcatatcaattgttctctttgtccccatctatgaccgtgttttggtcccaatcggaaggtcaataactaaagatccttgtggcatcacaactctcaaaagaattggaaccggaatggtactagcaactctcactatggtggtggctgctttggttgagtcaaagcggctcgagactgcaaaagaatacggacttatagaccaaccgaaaacaactcttccaatgtcgatatggtggttattccctcagtatatgttactgggattggctgacgtacacactttagtaggaatgcaagagttcttctacagccaagtccccactgagctgagaagcctcggtctcgcgatttacttaagtgcaatgggcgttggaagcttattaagcagcttactcatctatctgatcgatttggccactggaggagacgccggaaacagctggttcaacagtaatctgaacagagcccatctagattacttctattggttacttgcggttgttagtgccgttgggttctttacgttcttgttcatctccaagtcctatatatatcgccgggtggacgtagtgtag

SEQ ID NO: 29175 - protein, 1095 aa, Arabidopsis thaliana
  misc_feature (1)..(1095): Ceres Seq. ID no. 4360098
MTTTSEISLQEEYVTDAVDHRGLAARRSNTGRWRAALFIIGVEVAERFAYYGIGSNLISYLTGPLGESTAVAAANVNAWSGIATLLPVLGAFVADAFLGRYRTIIISSLIYVLGLAFLTLSAFLIPNTTEVTSSTSSFLNVLFFFSLYLVAIGQSGHKPCVQAFGADQFDEKDSQEKSDRSSFFNWWYLSLSAGICFAILVVVYIQEEFSWAFGFGIPCVFMVISLVLFVSGRRIYRYSKRRHEEEINPFTRIGRVFFVALKNQRLSSSDLCKVELEANTSPEKQSFFNKALLVPNDSSQGENASKSSDVEDATALIRLIPVWFTTLAYAIPYAQYMTFFTKQGVTMDRTILPGVKIPPASLQVFIGISIVLFVPIYDRVFVPIARLITKEPCGITTLKRIGTGIVLSTITMVIAALVEFKRLETAKEHGLIDQPEATLPMSIWWLIPQYLLLGLADVYTLVGMQEFFYSQVPTELRSIGLALYLSALGVGSLLSSLLISLIDLATGGDAGNSWFNSNLNRAHLDYFYWLLAIKMTTTSKTSLQEEYVIDAVDHRGFSARRSITGRWRAAWFIIGVEVAERFANYGIGSNLISYLTGPLGQSTAVAAANVNAWSGISTILPLLGAFVADAFLGRYITIIIASFIYVLGLAFLTLSAFLIPNNTEVTSSPSSFLNALFFFSLYLVAIGQSGHKPCVQAFGADQFDEKNPQENSDRSSFFNWWYLSMCAGIGLAILVVVYIQENVSWALGFGIPCVFMVISLVLFVLGRKSYRFSKTRQEEETNPFTRIGRVFFVAFKNQRLNSSDLCKVELIEANRSQESPEELSFLNKALLVPNDSDEGEVACKSRDVEDATALVRLIPVWLTTLAYAIPFAQYMTFFTKQGVTMERTIFPGVEIPPASLQVLISISIVLFVPIYDRVLVPIGRSITKDPCGITTLKRIGTGMVLATLTMVVAALVESKRLETAKEYGLIDQPKTTLPMSIWWLFPQYMLLGLADVHTLVGMQEFFYSQVPTELRSLGLAIYLSAMGVGSLLSSLLIYLIDLATGGDAGNSWFNSNLNRAHLDYFYWLLAVVSAVGFFTFLFISKSYIYRRVDVV

SEQ ID NO: 29176 - protein, 874 aa, Arabidopsis thaliana
  misc_feature (1)..(874): Ceres Seq. ID no. 4360099
MVISLVLFVSGRRIYRYSKRRHEEEINPFTRIGRVFFVALKNQRLSSSDLCKVELEANTSPEKQSFFNKALLVPNDSSQGENASKSSDVEDATALIRLIPVWFTTLAYAIPYAQYMTFFTKQGVTMDRTILPGVKIPPASLQVFIGISIVLFVPIYDRVFVPIARLITKEPCGITTLKRIGTGIVLSTITMVIAALVEFKRLETAKEHGLIDQPEATLPMSIWWLIPQYLLLGLADVYTLVGMQEFFYSQVPTELRSIGLALYLSALGVGSLLSSLLISLIDLATGGDAGNSWFNSNLNRAHLDYFYWLLAIKMTTTSKTSLQEEYVIDAVDHRGFSARRSITGRWRAAWFIIGVEVAERFANYGIGSNLISYLTGPLGQSTAVAAANVNAWSGISTILPLLGAFVADAFLGRYITIIIASFIYVLGLAFLTLSAFLIPNNTEVTSSPSSFLNALFFFSLYLVAIGQSGHKPCVQAFGADQFDEKNPQENSDRSSFFNWWYLSMCAGIGLAILVVVYIQENVSWALGFGIPCVFMVISLVLFVLGRKSYRFSKTRQEEETNPFTRIGRVFFVAFKNQRLNSSDLCKVELIEANRSQESPEELSFLNKALLVPNDSDEGEVACKSRDVEDATALVRLIPVWLTTLAYAIPFAQYMTFFTKQGVTMERTIFPGVEIPPASLQVLISISIVLFVPIYDRVLVPIGRSITKDPCGITTLKRIGTGMVLATLTMVVAALVESKRLETAKEYGLIDQPKTTLPMSIWWLFPQYMLLGLADVHTLVGMQEFFYSQVPTELRSLGLAIYLSAMGVGSLLSSLLIYLIDLATGGDAGNSWFNSNLNRAHLDYFYWLLAVVSAVGFFTFLFISKSYIYRRVDVV

SEQ ID NO: 29177 - protein, 759 aa, Arabidopsis thaliana
  misc_feature (1)..(759): Ceres Seq. ID no. 4360100
MTFFTKQGVTMDRTILPGVKIPPASLQVFIGISIVLFVPIYDRVFVPIARLITKEPCGITTLKRIGTGIVLSTITMVIAALVEFKRLETAKEHGLIDQPEATLPMSIWWLIPQYLLLGLADVYTLVGMQEFFYSQVPTELRSIGLALYLSALGVGSLLSSLLISLIDLATGGDAGNSWFNSNLNRAHLDYFYWLLAIKMTTTSKTSLQEEYVIDAVDHRGFSARRSITGRWRAAWFIIGVEVAERFANYGIGSNLISYLTGPLGQSTAVAAANVNAWSGISTILPLLGAFVADAFLGRYITIIIASFIYVLGLAFLTLSAFLIPNNTEVTSSPSSFLNALFFFSLYLVAIGQSGHKPCVQAFGADQFDEKNPQENSDRSSFFNWWYLSMCAGIGLAILVVVYIQENVSWALGFGIPCVFMVISLVLFVLGRKSYRFSKTRQEEETNPFTRIGRVFFVAFKNQRLNSSDLCKVELIEANRSQESPEELSFLNKALLVPNDSDEGEVACKSRDVEDATALVRLIPVWLTTLAYAIPFAQYMTFFTKQGVTMERTIFPGVEIPPASLQVLISISIVLFVPIYDRVLVPIGRSITKDPCGITTLKRIGTGMVLATLTMVVAALVESKRLETAKEYGLIDQPKTTLPMSIWWLFPQYMLLGLADVHTLVGMQEFFYSQVPTELRSLGLAIYLSAMGVGSLLSSLLIYLIDLATGGDAGNSWFNSNLNRAHLDYFYWLLAVVSAVGFFTFLFISKSYIYRRVDVV

SEQ ID NO: 29178 - DNA, 1539 bp, Arabidopsis thaliana
  misc_feature (1)..(1539): Ceres Seq. ID no. 4361900
atggcggaatctgcaggagaatcctataggcttctctctgtttcttcatcaaccacatttcttgccttcataatcatcttcttacttgcgggtatagcaagaagaaagagaagagcgcctcacaggctgcctccgggaagcagaggatggcctttgatcggagataccttcgcttggctcaacgccgtcgctggttctcatccttcaagcttcgtcgagaaacaaataaaaaagttcgtctctttgctatgctctgttttgttattaatactcaagaggcctgataatagtggttttaatgaaattaggtatgggaggatattctcgtgtagcttgtttgggaaatgggcagtggtatcagcagacccggattttaaccggtttataatgcagaacgaaggaaagctatttcagtcaagttatccaaagtctttcagggatttggttgggaaagatggagtgatcacagtgcatggtgatcagcagagacggcttcactcgattgcatcgagcatgatgcgtcatgaccagctcaagactcattttcttgaggttattcccgtcgttatgctccagacactgagtaatttcaaggacggtgaagtcgtgcttctccaagatatctgcagaaaggttgccattcatcttatggttaaccaacttctcggtgtgtcgagcgaatcagaagtcgatgaaatgtctcagcttttctctgattttgttgatggatgtctctctgttcctattgacttgcctggtttcacatacaacaaagcaatgaaggcacgaaaggagatcataaggaagataaacaagacgatagaaaagcggttgcaaaacaaagcagcatcagatactgctggtaatggtgtacttggaagattgcttgaagaagaaagtttaccaaacgaatcaatggcagattttatcatcaatctactgtttgccggaaatgaaacaacctcaaaaacaatgctgtttgcggtttacttcctcactcattgtcctaaggccatgacccaactcctggaggaacatgataggctcgcgggtggaatgttaacatggcaagattacaagacaatggacttcactcaatgcgtaatagatgaaacactcaggcttggtggaattgcgatatggcttatgagagaggccaaagaagatgtctcatatcaagattatgtcattcccaagggatgcttcgtagttccgtttctctcggcagtgcacttagacgagagctattacaaagaaagtctctccttcaatccatggcgatggcttgaccctgaaactcagcaaaagaggaattggagaacgagccctttttattgcccatttggtggaggaactcggttttgcccaggagcagaactggctcgccttcaaattgctctctttctgcattacttcatcaccacatataagtggacacaacttaaggaagatcgtatctccttcttcccttcggctcgtctagtgaatggcttcaaaatccagttgaacagacgagacagtgatcctccgaatcaataa

SEQ ID NO: 29179 - protein, 512 aa, Arabidopsis thaliana
  misc_feature (1)..(512): Ceres Seq. ID no. 4361901
MAESAGESYRLLSVSSSTTFLAFIIIFLLAGIARRKRRAPHRLPPGSRGWPLIGDTFAWLNAVAGSHPSSFVEKQIKKFVSLLCSVLLLILKRPDNSGFNEIRYGRIFSCSLFGKWAVVSADPDFNRFIMQNEGKLFQSSYPKSFRDLVGKDGVITVHGDQQRRLHSIASSMMRHDQLKTHFLEVIPVVMLQTLSNFKDGEVVLLQDICRKVAIHLMVNQLLGVSSESEVDEMSQLFSDFVDGCLSVPIDLPGFTYNKAMKARKEIIRKINKTIEKRLQNKAASDTAGNGVLGRLLEEESLPNESMADFIINLLFAGNETTSKTMLFAVYFLTHCPKAMTQLLEEHDRLAGGMLTWQDYKTMDFTQCVIDETLRLGGIAIWLMREAKEDVSYQDYVIPKGCFVVPFLSAVHLDESYYKESLSFNPWRWLDPETQQKRNWRTSPFYCPFGGGTRFCPGAELARLQIALFLHYFITTYKWTQLKEDRISFFPSARLVNGFKIQLNRRDSDPPNQ

SEQ ID NO: 29180 - protein, 383 aa, Arabidopsis thaliana
  misc_feature (1)..(383): Ceres Seq. ID no. 4361902
MQNEGKLFQSSYPKSFRDLVGKDGVITVHGDQQRRLHSIASSMMRHDQLKTHFLEVIPVVMLQTLSNFKDGEVVLLQDICRKVAIHLMVNQLLGVSSESEVDEMSQLFSDFVDGCLSVPIDLPGFTYNKAMKARKEIIRKINKTIEKRLQNKAASDTAGNGVLGRLLEEESLPNESMADFIINLLFAGNETTSKTMLFAVYFLTHCPKAMTQLLEEHDRLAGGMLTWQDYKTMDFTQCVIDETLRLGGIAIWLMREAKEDVSYQDYVIPKGCFVVPFLSAVHLDESYYKESLSFNPWRWLDPETQQKRNWRTSPFYCPFGGGTRFCPGAELARLQIALFLHYFITTYKWTQLKEDRISFFPSARLVNGFKIQLNRRDSDPPNQ

SEQ ID NO: 29181 - protein, 341 aa, Arabidopsis thaliana
  misc_feature (1)..(341): Ceres Seq. ID no. 4361903
MMRHDQLKTHFLEVIPVVMLQTLSNFKDGEVVLLQDICRKVAIHLMVNQLLGVSSESEVDEMSQLFSDFVDGCLSVPIDLPGFTYNKAMKARKEIIRKINKTIEKRLQNKAASDTAGNGVLGRLLEEESLPNESMADFIINLLFAGNETTSKTMLFAVYFLTHCPKAMTQLLEEHDRLAGGMLTWQDYKTMDFTQCVIDETLRLGGIAIWLMREAKEDVSYQDYVIPKGCFVVPFLSAVHLDESYYKESLSFNPWRWLDPETQQKRNWRTSPFYCPFGGGTRFCPGAELARLQIALFLHYFITTYKWTQLKEDRISFFPSARLVNGFKIQLNRRDSDPPNQ

SEQ ID NO: 29182 - DNA, 981 bp, Arabidopsis thaliana
  misc_feature (1)..(981): Ceres Seq. ID no. 4362003
atgtggaagcattgtttatgtcagaaacatgagaaatccgaaaagtgggttgatattgtccctagtcacaagcctcatcgtagtaacggcagatttcgagtcgtctcttacaacaccctagctcatcggatggcgtcgtcgtctctcatgtatgtctctcctccagagtctatcctgtgggagaaacgttcgaaggcgattcttgataatataaagaattttgaagctgatttcatctgtctacaagaagtagacgagtaccatagttttttcgatagaaacatggaagctcaaggatactctggaattcctattgaaaataaagaaggctatgaatgcgcaatctttttcaagcccaaatttgcagagttcattacataccaaacaaccagaatccaaggatacaccaaatatgaaaacctttgcgtggcgccgagtagtagtaccgtaagtagtgagtctagtgacgttgttaacgctgaagagctttctgtggtaatggtagcgttcaagattttaaaaccatttaatcatgtcgttattattgcaagctctcatttaaaatccgggaaacctgatcgatgggatgatttaaagctagctcaagtcaagactctaatgactgaattagcctcgttcaaggagattatatcagcgctaacaaattgcagtccatcggtgatccttgctggtgacttcaattcgaaaccctacgtgcataaatacataaattcagacaatataccgtctgatattgatctacgaagtgtgtatgaatttacgaaaggagagccaaggttcacaaataatgtgccagggtttgctgaaacactcgattacatgttctacacgcattctgaaattatttctcctgtgaagctcctggattcgccggacgaagtcgatttcttacccaatgaaattcatccgagtgatcatttacccatcggcgttgagtttgagatcaaccgaaacatatag

SEQ ID NO: 29183 - protein, 326 aa, Arabidopsis thaliana
  misc_feature (1)..(326): Ceres Seq. ID no. 4362004
MWKHCLCQKHEKSEKWVDIVPSHKPHRSNGRFRVVSYNTLAHRMASSSLMYVSPPESILWEKRSKAILDNIKNFEADFICLQEVDEYHSFFDRNMEAQGYSGIPIENKEGYECAIFFKPKFAEFITYQTTRIQGYTKYENLCVAPSSSTVSSESSDVVNAEELSVVMVAFKILKPFNHVVIIASSHLKSGKPDRWDDLKLAQVKTLMTELASFKEIISALTNCSPSVILAGDFNSKPYVHKYINSDNIPSDIDLRSVYEFTKGEPRFTNNVPGFAETLDYMFYTHSEIISPVKLLDSPDEVDFLPNEIHPSDHLPIGVEFEINRNI

SEQ ID NO: 29184 - protein, 283 aa, Arabidopsis thaliana
  misc_feature (1)..(283): Ceres Seq. ID no. 4362005
MASSSLMYVSPPESILWEKRSKAILDNIKNFEADFICLQEVDEYHSFFDRNMEAQGYSGIPIENKEGYECAIFFKPKFAEFITYQTTRIQGYTKYENLCVAPSSSTVSSESSDVVNAEELSVVMVAFKILKPFNHVVIIASSHLKSGKPDRWDDLKLAQVKTLMTELASFKEIISALTNCSPSVILAGDFNSKPYVHKYINSDNIPSDIDLRSVYEFTKGEPRFTNNVPGFAETLDYMFYTHSEIISPVKLLDSPDEVDFLPNEIHPSDHLPIGVEFEINRNI

SEQ ID NO: 29185 - protein, 277 aa, Arabidopsis thaliana
  misc_feature (1)..(277): Ceres Seq. ID no. 4362006
MYVSPPESILWEKRSKAILDNIKNFEADFICLQEVDEYHSFFDRNMEAQGYSGIPIENKEGYECAIFFKPKFAEFITYQTTRIQGYTKYENLCVAPSSSTVSSESSDVVNAEELSVVMVAFKILKPFNHVVIIASSHLKSGKPDRWDDLKLAQVKTLMTELASFKEIISALTNCSPSVILAGDFNSKPYVHKYINSDNIPSDIDLRSVYEFTKGEPRFTNNVPGFAETLDYMFYTHSEIISPVKLLDSPDEVDFLPNEIHPSDHLPIGVEFEINRNI

SEQ ID NO: 29186 - DNA, 1020 bp, Arabidopsis thaliana
  misc_feature (1)..(1020): Ceres Seq. ID no. 4362265
atgactttggtgccggccattggtcgcgagctctcgaatccaccgtccgatgggatttctaatcttcgattttctaataacagcgatcatttactagtctcttcatgggataagagtgtaagattgtatgatgcgaacggcgatttgatgagaggggagtttaaacatggtggagcggtactcgattgctgcttccatgatgattcttctggattcagtgtttgcgccgatactaaagttagaagaattgacttcaatgctggcaaagaagacgttttgggtacgcatgagaagccagttcgatgtgttgagtattcttatgctgcagggcaagtgatcactggaagttgggataaaacgattaaatgttgggatccaagaggtgcaagtgggactgagcgcacacagattggaacttatatgcaacctgagcgtgttaactctctttctcttgttggaaatcgtttggtagtggcaacagcaggaaggcatgtcaacatttatgatcttagaaatatgtcccagcctgagcaaagaagagagtcctcacttaaataccagacaagatgtgtacgttgttatcccaacggaacaggatatgcccttagctctgttgaagggagggtttcaatggagttttttgatctatcagaagctgctcaggctaaaaaatatgctttcaaatgtcaccggaaatcagaggatggaagggacattgtctaccctgtaaatgcaattgctttccatccgatttatggcacttttgcttccggaggctgtgatggttttgtcaacatttgggacggtaacaataagaagaggctttatcagtactctaagtatccaacaagtattgcggcgctgtcattcagccgagatggtggattactggctgttgcttctagttacacgtttgaagagggagacaaaccgcatgaaccggacgccatctttgttagaagtgttaatgaaattgaagtgaaaccgaaacccaaagtatacccaaatcccccggtatag

SEQ ID NO: 29187 - protein, 339 aa, Arabidopsis thaliana
  misc_feature (1)..(339): Ceres Seq. ID no. 4362266
MTLVPAIGRELSNPPSDGISNLRFSNNSDHLLVSSWDKSVRLYDANGDLMRGEFKHGGAVLDCCFHDDSSGFSVCADTKVRRIDFNAGKEDVLGTHEKPVRCVEYSYAAGQVITGSWDKTIKCWDPRGASGTERTQIGTYMQPERVNSLSLVGNRLVVATAGRHVNIYDLRNMSQPEQRRESSLKYQTRCVRCYPNGTGYALSSVEGRVSMEFFDLSEAAQAKKYAFKCHRKSEDGRDIVYPVNAIAFHPIYGTFASGGCDGFVNIWDGNNKKRLYQYSKYPTSIAALSFSRDGGLLAVASSYTFEEGDKPHEPDAIFVRSVNEIEVKPKPKVYPNPPV

SEQ ID NO: 29188 - protein, 290 aa, Arabidopsis thaliana
  misc_feature (1)..(290): Ceres Seq. ID no. 4362267
MRGEFKHGGAVLDCCFHDDSSGFSVCADTKVRRIDFNAGKEDVLGTHEKPVRCVEYSYAAGQVITGSWDKTIKCWDPRGASGTERTQIGTYMQPERVNSLSLVGNRLVVATAGRHVNIYDLRNMSQPEQRRESSLKYQTRCVRCYPNGTGYALSSVEGRVSMEFFDLSEAAQAKKYAFKCHRKSEDGRDIVYPVNAIAFHPIYGTFASGGCDGFVNIWDGNNKKRLYQYSKYPTSIAALSFSRDGGLLAVASSYTFEEGDKPHEPDAIFVRSVNEIEVKPKPKVYPNPPV

SEQ ID NO: 29189 - protein, 199 aa, Arabidopsis thaliana
  misc_feature (1)..(199): Ceres Seq. ID no. 4362268
MQPERVNSLSLVGNRLVVATAGRHVNIYDLRNMSQPEQRRESSLKYQTRCVRCYPNGTGYALSSVEGRVSMEFFDLSEAAQAKKYAFKCHRKSEDGRDIVYPVNAIAFHPIYGTFASGGCDGFVNIWDGNNKKRLYQYSKYPTSIAALSFSRDGGLLAVASSYTFEEGDKPHEPDAIFVRSVNEIEVKPKPKVYPNPPV

SEQ ID NO: 29190 - DNA, 2373 bp, Arabidopsis thaliana
  misc_feature (1)..(2373): Ceres Seq. ID no. 4370992
atgcaaccgaatccagaccttgtccgagccatcgccaaccgctacgccgcgaatctccgcctctgtttgccgctccgacgaacatctctgcagctcgcgcgagccgtccatggaaatatcattactttcgggtttcagccacgtgcccatatcctgaaccgtttgattgatgtttattgtaaatcgtcagagctaaattatgcacgccaactgttcgatgaaatctctgaaccagataaaattgctagaaccaccatggtctctggctattgtgcttccggtgatatcaccctcgctcgaggggtttttgagaaagctcctgtgtgtatgcgtgatactgtaatgtacaatgcgatgatcactggcttttcacataacaatgatggttactctgctattaacctcttttgtaagatgaagcatgaaggattcaaacctgacaacttcactttcgcaagtgttctcgcgggtttagcgttagttgccgatgacgagaagcaatgtgtgcaatttcatgccgcagctctgaaatctggtgctggttatattacttcggtttctaacgctctggtgtctgtgtattcgaaatgtgcgtcttctccgtctctgctacattcagctagaaaagtgtttgatgagattcttgagaaagatgagaggtcgtggacgactatgatgacgggttatgtaaagaatggttattttgatttaggggaagagttgcttgaggggatggacgacaatatgaagctggttgcttataatgctatgatttctggttatgttaatcgtggtttttatcaggaggcattggagatggtaagaaggatggtttcatctggaattgagctcgatgagtttacatatcctagcgttattagggcgtgtgccacagctggattgcttcagttgggaaagcaagttcatgcttatgtattaagaagggaggatttctcgtttcattttgacaattcgttagtttcgttatactacaaatgcggtaagtttgatgaggcgagagccatttttgagaaaatgccggcaaaagacttggtttcctggaatgcgttgttgtcagggtatgttagttctgggcacataggtgaggcgaagttgattttcaaagagatgaaagagaagaatattctatcatggatgataatgatatccgggttagctgaaaatgggtttggagaagaaggtttgaagctgttttcttgtatgaagagagaaggtttcgagccttgtgattacgctttttccggggcaatcaaatcatgtgccgtgctgggagcatattgcaatgggcaacagtaccatgcacagttgcttaaaatagggtttgactctagcctctctgctggaaacgctctgattacaatgtatgcgaaatgcggggttgtggaggaagctcgacaggtgtttcgaactatgccttgtctggattcggtttcctggaatgcgttgattgctgcattgggacagcatggccatggtgctgaagcagtagatgtgtatgaggagatgctaaagaaagggataagaccggatcggattacgttgcttacagttttgacagcatgtagccacgcgggtttagtggaccagggacggaaatattttgattctatggagactgtttaccgtatacctccaggtgcagatcattacgcaaggctgatcgatttgctttgtcgttctgggaaattctctgatgcggaaagtgtaatcgaatcattacctttcaaacctactgcagaaatctgggaagctcttctttctggttgcagagtgcatggaaacatggaactagggatcatcgctgcagacaaactcttcggtctcataccagaacatgatgggacatacatgctcttatcaaacatgcacgcagctactggccagtgggaggaagtggcaagggtacgtaaactaatgcgggatcgaggtgtaaaaaaagaagtagcttgtagttggattgaaatggagacacaagtgcatacatttctagttgatgatacatcacatccagaagcagaagctgtttacatctatcttcaagacctgggtaaagagatgaggagactcgggtatgtaccagacacgagcttcgtgttgcacgacgtagagtctgatggtcacaaggaagatatgttgacaactcatagtgagaagattgcggttgcttttgggctaatgaaacttcctccgggaacaactattaggattttcaagaacttgaggacttgtggagattgccataacttcttcaggttcttgtcgtgggtggtgcagcgagacattatcttgagagacaggaagaggtttcatcatttccggaatggcgagtgttcttgtggtaacttctggtag

SEQ ID NO: 29191 - protein, 790 aa, Arabidopsis thaliana
  misc_feature (1)..(790): Ceres Seq. ID no. 4370993
MQPNPDLVRAIANRYAANLRLCLPLRRTSLQLARAVHGNIITFGFQPRAHILNRLIDVYCKSSELNYARQLFDEISEPDKIARTTMVSGYCASGDITLARGVFEKAPVCMRDTVMYNAMITGFSHNNDGYSAINLFCKMKHEGFKPDNFTFASVLAGLALVADDEKQCVQFHAAALKSGAGYITSVSNALVSVYSKCASSPSLLHSARKVFDEILEKDERSWTTMMTGYVKNGYFDLGEELLEGMDDNMKLVAYNAMISGYVNRGFYQEALEMVRRMVSSGIELDEFTYPSVIRACATAGLLQLGKQVHAYVLRREDFSFHFDNSLVSLYYKCGKFDEARAIFEKMPAKDLVSWNALLSGYVSSGHIGEAKLIFKEMKEKNILSWMIMISGLAENGFGEEGLKLFSCMKREGFEPCDYAFSGAIKSCAVLGAYCNGQQYHAQLLKIGFDSSLSAGNALITMYAKCGVVEEARQVFRTMPCLDSVSWNALIAALGQHGHGAEAVDVYEEMLKKGIRPDRITLLTVLTACSHAGLVDQGRKYFDSMETVYRIPPGADHYARLIDLLCRSGKFSDAESVIESLPFKPTAEIWEALLSGCRVHGNMELGIIAADKLFGLIPEHDGTYMLLSNMHAATGQWEEVARVRKLMRDRGVKKEVACSWIEMETQVHTFLVDDTSHPEAEAVYIYLQDLGKEMRRLGYVPDTSFVLHDVESDGHKEDMLTTHSEKIAVAFGLMKLPPGTTIRIFKNLRTCGDCHNFFRFLSWVVQRDIILRDRKRFHHFRNGECSCGNFW

SEQ ID NO: 29192 - protein, 705 aa, Arabidopsis thaliana
  misc_feature (1)..(705): Ceres Seq. ID no. 4370994
MVSGYCASGDITLARGVFEKAPVCMRDTVMYNAMITGFSHNNDGYSAINLFCKMKHEGFKPDNFTFASVLAGLALVADDEKQCVQFHAAALKSGAGYITSVSNALVSVYSKCASSPSLLHSARKVFDEILEKDERSWTTMMTGYVKNGYFDLGEELLEGMDDNMKLVAYNAMISGYVNRGFYQEALEMVRRMVSSGIELDEFTYPSVIRACATAGLLQLGKQVHAYVLRREDFSFHFDNSLVSLYYKCGKFDEARAIFEKMPAKDLVSWNALLSGYVSSGHIGEAKLIFKEMKEKNILSWMIMISGLAENGFGEEGLKLFSCMKREGFEPCDYAFSGAIKSCAVLGAYCNGQQYHAQLLKIGFDSSLSAGNALITMYAKCGVVEEARQVFRTMPCLDSVSWNALIAALGQHGHGAEAVDVYEEMLKKGIRPDRITLLTVLTACSHAGLVDQGRKYFDSMETVYRIPPGADHYARLIDLLCRSGKFSDAESVIESLPFKPTAEIWEALLSGCRVHGNMELGIIAADKLFGLIPEHDGTYMLLSNMHAATGQWEEVARVRKLMRDRGVKKEVACSWIEMETQVHTFLVDDTSHPEAEAVYIYLQDLGKEMRRLGYVPDTSFVLHDVESDGHKEDMLTTHSEKIAVAFGLMKLPPGTTIRIFKNLRTCGDCHNFFRFLSWVVQRDIILRDRKRFHHFRNGECSCGNFW

SEQ ID NO: 29193 - protein, 681 aa, Arabidopsis thaliana
  misc_feature (1)..(681): Ceres Seq. ID no. 4370995
MRDTVMYNAMITGFSHNNDGYSAINLFCKMKHEGFKPDNFTFASVLAGLALVADDEKQCVQFHAAALKSGAGYITSVSNALVSVYSKCASSPSLLHSARKVFDEILEKDERSWTTMMTGYVKNGYFDLGEELLEGMDDNMKLVAYNAMISGYVNRGFYQEALEMVRRMVSSGIELDEFTYPSVIRACATAGLLQLGKQVHAYVLRREDFSFHFDNSLVSLYYKCGKFDEARAIFEKMPAKDLVSWNALLSGYVSSGHIGEAKLIFKEMKEKNILSWMIMISGLAENGFGEEGLKLFSCMKREGFEPCDYAFSGAIKSCAVLGAYCNGQQYHAQLLKIGFDSSLSAGNALITMYAKCGVVEEARQVFRTMPCLDSVSWNALIAALGQHGHGAEAVDVYEEMLKKGIRPDRITLLTVLTACSHAGLVDQGRKYFDSMETVYRIPPGADHYARLIDLLCRSGKFSDAESVIESLPFKPTAEIWEALLSGCRVHGNMELGIIAADKLFGLIPEHDGTYMLLSNMHAATGQWEEVARVRKLMRDRGVKKEVACSWIEMETQVHTFLVDDTSHPEAEAVYIYLQDLGKEMRRLGYVPDTSFVLHDVESDGHKEDMLTTHSEKIAVAFGLMKLPPGTTIRIFKNLRTCGDCHNFFRFLSWVVQRDIILRDRKRFHHFRNGECSCGNFW

SEQ ID NO: 29194 - DNA, 1038 bp, Arabidopsis thaliana
  misc_feature (1)..(1038): Ceres Seq. ID no. 4585161
atgaagagtgtagttgcaatggtggcggttcagtttatcttcgccgggatgttcattttgtttaagataacggtcgacgatggtacgaatctcaaagttcttgtagcgtatcgtctgtcctttgctactattttcatgcttccccttgccctcatcttccaaaggaagaagcggccagaatttacatggaggctgctcttactagcatttgtttcggggttgctcggagcggcgataccaaatattctctacttgccgggtatggctcgaacatcagcgacattttcagctgcaagcagcataattagcccattgatcaccttggtgttgggtttggtgtttaggatggagactctacggctgggatcgaacgaagggagggccaagctagtggggacgctgcttggtgcatgtggagccctcgtgtttgtattctacaaaggtattgagattcatatctggtcaacacacgttgacttactcaaaggctcgcatactggtcgagccactacgaaccaccacgtctcaatcttaggggttcttatggttcttggcagtaacgcaaaaataggcaaggaacttggaggactttattggaacacaagtttgatgaatggggtgggaagtttggtgtgcgtgattattgctctctgttcggatcatgactgggagcaatggcaattaggatgggatattaacctcttagctacgctttattcgggaatcgtggtttcgggaatggtcgtgcctcttgttgcatggtgcatcgcaacaaaaggaccattatttgttactgtctttagccctataaggctggtgatcgtagccctaataggatcatttgctttagaggaacccctgcatttgggaagtataatcggtgccatgataatggtgggaggagtatacctagtggtatggtgtaaaatgaaggaaaaaaagagtgcgtctacgacttcggaccatattgaaacaaataagaataacaaagaactggaccttggcaatctttcatcagtaaatagagatgtcccctga

SEQ ID NO: 29195 - protein, 345 aa, Arabidopsis thaliana
  misc_feature (1)..(345): Ceres Seq. ID no. 4585162
MKSVVAMVAVQFIFAGMFILFKITVDDGTNLKVLVAYRLSFATIFMLPLALIFQRKKRPEFTWRLLLLAFVSGLLGAAIPNILYLPGMARTSATFSAASSIISPLITLVLGLVFRMETLRLGSNEGRAKLVGTLLGACGALVFVFYKGIEIHIWSTHVDLLKGSHTGRATTNHHVSILGVLMVLGSNAKIGKELGGLYWNTSLMNGVGSLVCVIIALCSDHDWEQWQLGWDINLLATLYSGIVVSGMVVPLVAWCIATKGPLFVTVFSPIRLVIVALIGSFALEEPLHLGSIIGAMIMVGGVYLVVWCKMKEKKSASTTSDHIETNKNNKELDLGNLSSVNRDVP

SEQ ID NO: 29196 - protein, 339 aa, Arabidopsis thaliana
  misc_feature (1)..(339): Ceres Seq. ID no. 4585163
MVAVQFIFAGMFILFKITVDDGTNLKVLVAYRLSFATIFMLPLALIFQRKKRPEFTWRLLLLAFVSGLLGAAIPNILYLPGMARTSATFSAASSIISPLITLVLGLVFRMETLRLGSNEGRAKLVGTLLGACGALVFVFYKGIEIHIWSTHVDLLKGSHTGRATTNHHVSILGVLMVLGSNAKIGKELGGLYWNTSLMNGVGSLVCVIIALCSDHDWEQWQLGWDINLLATLYSGIVVSGMVVPLVAWCIATKGPLFVTVFSPIRLVIVALIGSFALEEPLHLGSIIGAMIMVGGVYLVVWCKMKEKKSASTTSDHIETNKNNKELDLGNLSSVNRDVP

SEQ ID NO: 29197 - protein, 329 aa, Arabidopsis thaliana
  misc_feature (1)..(329): Ceres Seq. ID no. 4585164
MFILFKITVDDGTNLKVLVAYRLSFATIFMLPLALIFQRKKRPEFTWRLLLLAFVSGLLGAAIPNILYLPGMARTSATFSAASSIISPLITLVLGLVFRMETLRLGSNEGRAKLVGTLLGACGALVFVFYKGIEIHIWSTHVDLLKGSHTGRATTNHHVSILGVLMVLGSNAKIGKELGGLYWNTSLMNGVGSLVCVIIALCSDHDWEQWQLGWDINLLATLYSGIVVSGMVVPLVAWCIATKGPLFVTVFSPIRLVIVALIGSFALEEPLHLGSIIGAMIMVGGVYLVVWCKMKEKKSASTTSDHIETNKNNKELDLGNLSSVNRDVP

SEQ ID NO: 29198 - DNA, 1110 bp, Arabidopsis thaliana
  misc_feature (1)..(1110): Ceres Seq. ID no. 4585252
atggtatcagtgtcattatctcatcataatctctggccaccggaatctggatctacggcgtttcgtggtttcgcaaccgccgcttccgtacacgcctgccaccatgttagccgtcacctccgccttgatttccatcttcgctcttcccttaaggttcacctactcatcttcgctcgcgcttctgatttctgggttaatctcattttatttgactatgctctgcttctacagaaactgcagcatttttctgatgatgcaagaatgaagtttgcaagataccaaagagtatttgtattcaatggggctaattttctcaagtctagagttgatatccggttgtcccaatcttcgccatttgtatgtttctttaatggtggagagagtagattaaaccctagaggtggtgaggaaggatcatcgaacccggagacttccaagagaaacacagttaacggacggagatggaccaatgtccttcttgccattaacgttataatgtatattgcacaaattgcatccgatgggaaggtcctgacatggggagccaagataaacagtttaatcgaaagaggtcagctatggagactggctacagcttctgttcttcatgcgaatcctatgcatctcatgataaattgctattctttgaattctattggaccaactgctgagagtttaggtggcccaaagagatttcttgctgtttacttgacatccgcagttgcaaaacccatcttaagagttctaggttcagcaatgagctactggttcaacaaagcgccatcagttggtgcttcaggtgcaatattcggattggttggctcggtagctgtatttgttataagacacaaacagatggtcagaggtggcaatgaggatctaatgcagatagctcaaattattgccctaaacatggcaatgggtctaatgtccagacgtatagataactggggacatattggtggcttacttggtggaaccgcaatgacatggcttcttggaccacagtggaagtatgaatatacaacaagagacggtcggagagtcttcatggacagtgctcctattcctctccttttgcggtggagaaatgaacagcgacggctttga

SEQ ID NO: 29199 - protein, 369 aa, Arabidopsis thaliana
  misc_feature (1)..(369): Ceres Seq. ID no. 4585253
MVSVSLSHHNLWPPESGSTAFRGFATAASVHACHHVSRHLRLDFHLRSSLKVHLLIFARASDFWVNLILFDYALLLQKLQHFSDDARMKFARYQRVFVFNGANFLKSRVDIRLSQSSPFVCFFNGGESRLNPRGGEEGSSNPETSKRNTVNGRRWTNVLLAINVIMYIAQIASDGKVLTWGAKINSLIERGQLWRLATASVLHANPMHLMINCYSLNSIGPTAESLGGPKRFLAVYLTSAVAKPILRVLGSAMSYWFNKAPSVGASGAIFGLVGSVAVFVIRHKQMVRGGNEDLMQIAQIIALNMAMGLMSRRIDNWGHIGGLLGGTAMTWLLGPQWKYEYTTRDGRRVFMDSAPIPLLLRWRNEQRRL

SEQ ID NO: 29200 - protein, 282 aa, Arabidopsis thaliana
  misc_feature (1)..(282): Ceres Seq. ID no. 4585254
MKFARYQRVFVFNGANFLKSRVDIRLSQSSPFVCFFNGGESRLNPRGGEEGSSNPETSKRNTVNGRRWTNVLLAINVIMYIAQIASDGKVLTWGAKINSLIERGQLWRLATASVLHANPMHLMINCYSLNSIGPTAESLGGPKRFLAVYLTSAVAKPILRVLGSAMSYWFNKAPSVGASGAIFGLVGSVAVFVIRHKQMVRGGNEDLMQIAQIIALNMAMGLMSRRIDNWGHIGGLLGGTAMTWLLGPQWKYEYTTRDGRRVFMDSAPIPLLLRWRNEQRRL

SEQ ID NO: 29201 - protein, 204 aa, Arabidopsis thaliana
  misc_feature (1)..(204): Ceres Seq. ID no. 4585255
MYIAQIASDGKVLTWGAKINSLIERGQLWRLATASVLHANPMHLMINCYSLNSIGPTAESLGGPKRFLAVYLTSAVAKPILRVLGSAMSYWFNKAPSVGASGAIFGLVGSVAVFVIRHKQMVRGGNEDLMQIAQIIALNMAMGLMSRRIDNWGHIGGLLGGTAMTWLLGPQWKYEYTTRDGRRVFMDSAPIPLLLRWRNEQRRL

SEQ ID NO: 29202 - DNA, 1098 bp, Arabidopsis thaliana
  misc_feature (1)..(1098): Ceres Seq. ID no. 4607554
atgctcagattagcgattcctttgtttctttttgcattatgctctttcacattattttcttctgcaagatccttcatcaccacaaaacctcttccgattgattcatttattcctaaaccaaagctagagaatgcggctgcgtgttcttacacggtgatcattaagacaagctgttcctctgtgtcttacactagagataagatcagtatatcgtttggtgatgtctacggcaacgaggtgtatgtgaagagactagacgatccatcgtcgaggacgttcgaaaagtgttcatcagacacatacaagatatcgggaccgtgtatgcgcgacgtttgttatctctacctcctcaggcaaggatccgacggctggaaaccagagaatgttaagatctacggctcatccatcagatcagtcactttctactacaaccttttcttgcctaactctgtttggtacggctttaatgtctgcaatggcattggcaataccaagtcttctcaacccattagtactacctcttccgttgcagctataaatctaagaagattccataattcttatcagcggaagagcatgccggagaccagctctttcaatatacacaagcggtgggacaaaaaaaaacatatatatagccatatagggttcattgaagaattggcgaacagatttgaggaagaagatgtgcaactactgcgagttctccagcaacagctgcgggaaaaggtggagagattacggtttttgatcaagagaatgactggaaaagacgacgatgctcatttcaccgagctgcaagcacttgaaagtcgtcttaaggatgttagtcgcactgtgttggaccaaaaggagaagatgataaagctagaagaagacgaaaggaagaaggaagctcagaatgagagtgatggtacgaggagaggggttttggtcccatgcaacaggagaatgaacggtagagagctcgagggtatgtcatctcgtgacctgctctcacttgacaatcagatattaaatgctttgttgggtttgcttgtccaaatgaatagaccaagggaggaacaagttgctgcaaggcagcgcgagaaggtatag

SEQ ID NO: 29203 - protein, 365 aa, Arabidopsis thaliana
  misc_feature (1)..(365): Ceres Seq. ID no. 4607555
MLRLAIPLFLFALCSFTLFSSARSFITTKPLPIDSFIPKPKLENAAACSYTVIIKTSCSSVSYTRDKISISFGDVYGNEVYVKRLDDPSSRTFEKCSSDTYKISGPCMRDVCYLYLLRQGSDGWKPENVKIYGSSIRSVTFYYNLFLPNSVWYGFNVCNGIGNTKSSQPISTTSSVAAINLRRFHNSYQRKSMPETSSFNIHKRWDKKKHIYSHIGFIEELANRFEEEDVQLLRVLQQQLREKVERLRFLIKRMTGKDDDAHFTELQALESRLKDVSRTVLDQKEKMIKLEEDERKKEAQNESDGTRRGVLVPCNRRMNGRELEGMSSRDLLSLDNQILNALLGLLVQMNRPREEQVAARQREKV

SEQ ID NO: 29204 - protein, 258 aa, Arabidopsis thaliana
  misc_feature (1)..(258): Ceres Seq. ID no. 4607556
MRDVCYLYLLRQGSDGWKPENVKIYGSSIRSVTFYYNLFLPNSVWYGFNVCNGIGNTKSSQPISTTSSVAAINLRRFHNSYQRKSMPETSSFNIHKRWDKKKHIYSHIGFIEELANRFEEEDVQLLRVLQQQLREKVERLRFLIKRMTGKDDDAHFTELQALESRLKDVSRTVLDQKEKMIKLEEDERKKEAQNESDGTRRGVLVPCNRRMNGRELEGMSSRDLLSLDNQILNALLGLLVQMNRPREEQVAARQREKV

SEQ ID NO: 29205 - DNA, 1515 bp, Arabidopsis thaliana
  misc_feature (1)..(1515): Ceres Seq. ID no. 4774563
atgtcgacggtgtacgtgctagagccgccgacaaagggaaaggtcattgtaaatactactcatggtccaatcgacgtcgagctttggcctaaggaagcgcccaaatccgtacggaacttcgttcaactatgcctcgagggttactttgacaacaccatcttccatcgtgtcattcccggttttctcgttcaaggcggcgatcccaccggctccggaaccggtggagatagtatatatggaggtgtctttgccgatgagttccattcaaggctgagatttagccaccgtgggattgttgccatggctaatgcgagctcacctaattctaatggaagtcagttctttttcactttggataagtgtgattggcttgataagaagcacactatctttggcaaggtaacgggcgattcaatctacaatcttttaagactaggagaggttgacacgagtaaggatgatcgacctctggatcctgctccgaaaatattatctgtcgaggttttgtggaacccttttgaagatattgttcctagagtgttagcaaagacatcagaagaatctgctgctgaaatcaaggaacccccaacaaagcccgtgaagaaattgaatttactgtcattcggagaagaagctgaagaagaggaaaaggaactggctgttgtaaagcaaaagattaagagcagtcatgacgtattgaatgatcctcgacttttgaaggcagaagcttcagataaagagaggaacgcatctgagtccaaggaggtactatctgtgcgagaagctctgaatgctaagaaagaagcggctcaaaaagataaaagcttttctgtatctgatacagttggaaatagtgatgatgacgatgatggtgaagatgagactaaatttgatgcaaagatgaggaatcaagtgctcagcagaaggaaggagattggagatacgccttcaaagccgactcagaaaaaaaagagctctagcctgaaaggccgtgaagagtctacgcaaaggtctgatgctgtaagtagtgaagatgagaaaccaaggatggaaaagttgtccttgaagaaaaaaggaataggctcagaagccaaagccgaacatatggagaaaggagacactgatttacagctttacaacgcttctgaacgcgcccggcagttgcataagttgaaaaagcgcagactgcaaggaaatgaggattctgtgttagcaaaactcgagaagtttaagcagtctatctctgcaaaaccgtttacctcgagtaatgaaccagtagtgttgacctcgagtagtgaaccagttgacaataaagaagaagatctctctgattggaagaatgtaaagctcaagtttgctcctgagcgtggcaaggataaaatgtcacgcagggatgatccagatgcgtatatggtggttgaccctcttcttgaaaagggaaaagagaagttcaacagaatgcaagccaaacaaaaacgaagggagcgagaatggtctggaaaatctcttgcctga

SEQ ID NO: 29206 - protein, 504 aa, Arabidopsis thaliana
  misc_feature (1)..(504): Ceres Seq. ID no. 4774564
MSTVYVLEPPTKGKVIVNTTHGPIDVELWPKEAPKSVRNFVQLCLEGYFDNTIFHRVIPGFLVQGGDPTGSGTGGDSIYGGVFADEFHSRLRFSHRGIVAMANASSPNSNGSQFFFTLDKCDWLDKKHTIFGKVTGDSIYNLLRLGEVDTSKDDRPLDPAPKILSVEVLWNPFEDIVPRVLAKTSEESAAEIKEPPTKPVKKLNLLSFGEEAEEEEKELAVVKQKIKSSHDVLNDPRLLKAEASDKERNASESKEVLSVREALNAKKEAAQKDKSFSVSDTVGNSDDDDDGEDETKFDAKMRNQVLSRRKEIGDTPSKPTQKKKSSSLKGREESTQRSDAVSSEDEKPRMEKLSLKKKGIGSEAKAEHMEKGDTDLQLYNASERARQLHKLKKRRLQGNEDSVLAKLEKFKQSISAKPFTSSNEPVVLTSSSEPVDNKEEDLSDWKNVKLKFAPERGKDKMSRRDDPDAYMVVDPLLEKGKEKFNRMQAKQKRREREWSGKSLA

SEQ ID NO: 29207 - protein, 404 aa, Arabidopsis thaliana
  misc_feature (1)..(404): Ceres Seq. ID no. 4774565
MANASSPNSNGSQFFFTLDKCDWLDKKHTIFGKVTGDSIYNLLRLGEVDTSKDDRPLDPAPKILSVEVLWNPFEDIVPRVLAKTSEESAAEIKEPPTKPVKKLNLLSFGEEAEEEEKELAVVKQKIKSSHDVLNDPRLLKAEASDKERNASESKEVLSVREALNAKKEAAQKDKSFSVSDTVGNSDDDDDGEDETKFDAKMRNQVLSRRKEIGDTPSKPTQKKKSSSLKGREESTQRSDAVSSEDEKPRMEKLSLKKKGIGSEAKAEHMEKGDTDLQLYNASERARQLHKLKKRRLQGNEDSVLAKLEKFKQSISAKPFTSSNEPVVLTSSSEPVDNKEEDLSDWKNVKLKFAPERGKDKMSRRDDPDAYMVVDPLLEKGKEKFNRMQAKQKRREREWSGKSLA

SEQ ID NO: 29208 - DNA, 1110 bp, Arabidopsis thaliana
  misc_feature (1)..(1110): Ceres Seq. ID no. 4803117
atggtggagctcaaagatcaacaagacatgggagaaggtatgcaatgcattacacatccttacacaaagaacccaggtgggatctgtgctttatgtctccaggaaaagcttggtaagctcgtcacttcctctttccctgttcctaaacccaaccatctctcttcttcttctcctaaatccttcactccttccacgacctctctcgctctgtctctctcatcggcaagcaatggcagagactccactaacaacaacaatctcccgtttcttctggctaagaagaagaagaacatgctcgcagcttcttcttcatcttcttcttcttcctcttcgtcttcttctgcgaatcttatctacaagagaagcaaatcgactgctgctgcttacggtgagagtttcagccaaaggaaacgaagtgggttttggtcttttttccatctctactcttcaaaacatcagatcagcaacaccaccaaaaaagtcgataactttagccatttaaggaggaaccagagaacagagtcaaaaacagagacttcttccatgagggtcggtggtggtggaggcattgatgtgatagttgaggaagaagatgagagtcctaacaaagtggtttcagaaacgccaacgaatggtataggtggtggtggtggttcgtcgtttgggaggaaagtgttgagatctagatctgttggttgtggtagtagaagcttctctggtgatttctttgagaggatctctaatgggtttggtgattgtgccttgagaaggattgagtcacagagagaagccactaaggtcattagtaatggtggtggtggtgaagcagcagatgcaatgagtgaaatggtcaaatgtggtggcatctttggtgggtttatgatcatgacatcatcatctacaacatcatcaacaacatcatcaacggttgatcatcatcataatcataagatggggaacagaaactggggatgggctttcgcaagtccaatgagagccaaagctactgctactcatagaggtcgtaccattacagagtccacagctgacaacaagaacacatcttcaaatttggactcaatcccttcattgttggctttgaaaagctaa

SEQ ID NO: 29209 - protein, 369 aa, Arabidopsis thaliana
  misc_feature (1)..(369): Ceres Seq. ID no. 4803118
MVELKDQQDMGEGMQCITHPYTKNPGGICALCLQEKLGKLVTSSFPVPKPNHLSSSSPKSFTPSTTSLALSLSSASNGRDSTNNNNLPFLLAKKKKNMLAASSSSSSSSSSSSSANLIYKRSKSTAAAYGESFSQRKRSGFWSFFHLYSSKHQISNTTKKVDNFSHLRRNQRTESKTETSSMRVGGGGGIDVIVEEEDESPNKVVSETPTNGIGGGGGSSFGRKVLRSRSVGCGSRSFSGDFFERISNGFGDCALRRIESQREATKVISNGGGGEAADAMSEMVKCGGIFGGFMIMTSSSTTSSTTSSTVDHHHNHKMGNRNWGWAFASPMRAKATATHRGRTITESTADNKNTSSNLDSIPSLLALKS

SEQ ID NO: 29210 - protein, 360 aa, Arabidopsis thaliana
  misc_feature (1)..(360): Ceres Seq. ID no. 4803119
MGEGMQCITHPYTKNPGGICALCLQEKLGKLVTSSFPVPKPNHLSSSSPKSFTPSTTSLALSLSSASNGRDSTNNNNLPFLLAKKKKNMLAASSSSSSSSSSSSSANLIYKRSKSTAAAYGESFSQRKRSGFWSFFHLYSSKHQISNTTKKVDNFSHLRRNQRTESKTETSSMRVGGGGGIDVIVEEEDESPNKVVSETPTNGIGGGGGSSFGRKVLRSRSVGCGSRSFSGDFFERISNGFGDCALRRIESQREATKVISNGGGGEAADAMSEMVKCGGIFGGFMIMTSSSTTSSTTSSTVDHHHNHKMGNRNWGWAFASPMRAKATATHRGRTITESTADNKNTSSNLDSIPSLLALKS

SEQ ID NO: 29211 - protein, 356 aa, Arabidopsis thaliana
  misc_feature (1)..(356): Ceres Seq. ID no. 4803120
MQCITHPYTKNPGGICALCLQEKLGKLVTSSFPVPKPNHLSSSSPKSFTPSTTSLALSLSSASNGRDSTNNNNLPFLLAKKKKNMLAASSSSSSSSSSSSSANLIYKRSKSTAAAYGESFSQRKRSGFWSFFHLYSSKHQISNTTKKVDNFSHLRRNQRTESKTETSSMRVGGGGGIDVIVEEEDESPNKVVSETPTNGIGGGGGSSFGRKVLRSRSVGCGSRSFSGDFFERISNGFGDCALRRIESQREATKVISNGGGGEAADAMSEMVKCGGIFGGFMIMTSSSTTSSTTSSTVDHHHNHKMGNRNWGWAFASPMRAKATATHRGRTITESTADNKNTSSNLDSIPSLLALKS

SEQ ID NO: 29212 - DNA, 612 bp, Arabidopsis thaliana
  misc_feature (1)..(612): Ceres Seq. ID no. 4803276
atgtgtttgattatggaaacggatgatcacaacggtgatgttttagcgccgccgtcgaatttctcgatggttgaagatggaatttatcgatctgggtttcctcgacctgagaatttcagtttccttaaaaccctaaatcttcgttccatcatttatctgtgtcctgaaccatacccagaggagaatctcaagtttcttgaggctaacaacattaagctttaccaatttggaatcgaaggcaaaacggatcctccaactcctatgccaaaagatacagttttggatgctctcaaagttttagttgatgtgagaaaccatccaattctcatacattgcaaacgcgggaagcataggacaggttgtctagtgggatgcttaagaaaagttcagagctggtgtttatcatcggtgctcgaggagtaccagaagaacgcgggtttaaaatggagacaaagggacttgaattttatagaggcatttgatatagtgagcttgagacagtgtctcttgagcatcatgtatcagtatcacggttatggcttcaagaggagaaggttggcatatgaagaagagaatgtcaagacaccaaaaccgcaggctgctagagtttaa

SEQ ID NO: 29213 - protein, 203 aa, Arabidopsis thaliana
  misc_feature (1)..(203): Ceres Seq. ID no. 4803277
MCLIMETDDHNGDVLAPPSNFSMVEDGIYRSGFPRPENFSFLKTLNLRSIIYLCPEPYPEENLKFLEANNIKLYQFGIEGKTDPPTPMPKDTVLDALKVLVDVRNHPILIHCKRGKHRTGCLVGCLRKVQSWCLSSVLEEYQKNAGLKWRQRDLNFIEAFDIVSLRQCLLSIMYQYHGYGFKRRRLAYEEENVKTPKPQAARV

SEQ ID NO: 29214 - protein, 199 aa, Arabidopsis thaliana
  misc_feature (1)..(199): Ceres Seq. ID no. 4803278
METDDHNGDVLAPPSNFSMVEDGIYRSGFPRPENFSFLKTLNLRSIIYLCPEPYPEENLKFLEANNIKLYQFGIEGKTDPPTPMPKDTVLDALKVLVDVRNHPILIHCKRGKHRTGCLVGCLRKVQSWCLSSVLEEYQKNAGLKWRQRDLNFIEAFDIVSLRQCLLSIMYQYHGYGFKRRRLAYEEENVKTPKPQAARV

SEQ ID NO: 29215 - protein, 181 aa, Arabidopsis thaliana
  misc_feature (1)..(181): Ceres Seq. ID no. 4803279
MVEDGIYRSGFPRPENFSFLKTLNLRSIIYLCPEPYPEENLKFLEANNIKLYQFGIEGKTDPPTPMPKDTVLDALKVLVDVRNHPILIHCKRGKHRTGCLVGCLRKVQSWCLSSVLEEYQKNAGLKWRQRDLNFIEAFDIVSLRQCLLSIMYQYHGYGFKRRRLAYEEENVKTPKPQAARV

SEQ ID NO: 29216 - DNA, 669 bp, Arabidopsis thaliana
  misc_feature (1)..(669): Ceres Seq. ID no. 4803378
atgaaaggtcttctgcattttcttttagccaaaatcattttgttggctttagcatcttcgtttgtatattgttacgaaccatctcctcttcaagactactgtgttgccaccaacgaaactaatggagtttatgtaaatggaaagttctgcaaagatccaaaatgtgtaacggcgaatgatttttacacttccggcctaaacgttcccggaaataccagcaccggtccgggcgtcaaaatcaccgtcgtggatgtcaaaagaatgcctggtctcaacactcttggggtcgacattgcccgcattgacttcgccccgggcggtctatacccacctcacacccacccacgtggcagcgagatcttcttagtcatgaagggcaagcttttcgttggatttgtgtcgtcgaacgaatacaactacacgctcttcaccaaagttctttatccgggagatgtatttgtgtttcccaaaggtttgatacaatttcatgcgaatattggaaagacaaatgcggttgtgattgctgcaactgggagccaaaaccccggtaggatcataataggtaatgcggttttcggatcgaaacctttgattgatcccaaggttttggctaaagcttttgcgttggacttcaacaaagtgaaatattttcaggcagtgttctcttga

SEQ ID NO: 29217 - protein, 222 aa, Arabidopsis thaliana
  misc_feature (1)..(222): Ceres Seq. ID no. 4803379
MKGLLHFLLAKIILLALASSFVYCYEPSPLQDYCVATNETNGVYVNGKFCKDPKCVTANDFYTSGLNVPGNTSTGPGVKITVVDVKRMPGLNTLGVDIARIDFAPGGLYPPHTHPRGSEIFLVMKGKLFVGFVSSNEYNYTLFTKVLYPGDVFVFPKGLIQFHANIGKTNAVVIAATGSQNPGRIIIGNAVFGSKPLIDPKVLAKAFALDFNKVKYFQAVFS

SEQ ID NO: 29218 - protein, 135 aa, Arabidopsis thaliana
  misc_feature (1)..(135): Ceres Seq. ID no. 4803380
MPGLNTLGVDIARIDFAPGGLYPPHTHPRGSEIFLVMKGKLFVGFVSSNEYNYTLFTKVLYPGDVFVFPKGLIQFHANIGKTNAVVIAATGSQNPGRIIIGNAVFGSKPLIDPKVLAKAFALDFNKVKYFQAVFS

SEQ ID NO: 29219 - DNA, 1437 bp, Arabidopsis thaliana
  misc_feature (1)..(1437): Ceres Seq. ID no. 4803596
atggaacttcctgcgacaaagttacgaataggactagtgatatttcctcttattctacttacgatagctccaatcctttatctcttttttggttatcctctctattattcaacatcaacatacaaacatttatcgaattcatcatcgtcgtcggcaatatcttctccatctaggtataaccattcatcatcatcatcagatagttataagacagaagattcagaaccatcgtcgtatgataatgattacgacgacacatatcatgatcccaagtcatcatctttgcataacaatgatcgtctatccatctcatcatcgaatggtcatcatcaagtaactcctaagaaagagcaccgccggaaaaagagaaaacgtaaatgcgatatattctccggcgagtggatcccaaaccctaaagccccgtactacacaaacacgacatgcagggcgatacacgaacaccaaaactgcatcaagtatggaagacctgatttaggtttcatgaaatggagatggaaacctaaagaatgtgatctccctctgtttgatccttacgagtttctggaaatagttagaggaacaagaatggcgttcgttggtgactccgttagcagaaaccacgttcagtctttgatctgcctactctctcgggtggaacatcctgagggtgactcacaacaggagtttaatttccaacgatggaaatacaaaacgtacaacttcacgatcgccacattttggacaacacatttggttcgcgctgaagaaacggaaaccggtccgacaggtcctaattcattctacaatctctacctcgacgaacctgaccctacttgggcttcccaaatcggtgagttcgattacataatcatctcatctggacaatggtttttccgaccactcttccttttcgacaaacaaaaaaggataggatgtttgtattgctacattcccggagtcagaaatgtcggggcacatttcgcgtatagaagagcattgagaacaacattcaagacaattcttggattagagaattttaaaggagaagtgtttctgaggacatttgctccttcacatttcgaaggtggagaatgggacaaaggtggaaattgcttgaaaacgcgaccatataggagcaatgagacagagttagatggtatgaatctagagacacacagcattcaactcgatgaatttcgcattgcaaacagagacaaaaacagaaatgacggattaaatttgagattactagatgtcacacagatgatgttgttaagaccagatggacatccgagcagattcggacataaacgagaagataaagttatcttgtataatgattgtgtacattggtgtttgccaggtccaattgattcatggaacgattttttactagacatgttgaaaaatagagatttaaagagattaaaatactag

SEQ ID NO: 29220 - protein, 478 aa, Arabidopsis thaliana
  misc_feature (1)..(478): Ceres Seq. ID no. 4803597
MELPATKLRIGLVIFPLILLTIAPILYLFFGYPLYYSTSTYKHLSNSSSSSAISSPSRYNHSSSSSDSYKTEDSEPSSYDNDYDDTYHDPKSSSLHNNDRLSISSSNGHHQVTPKKEHRRKKRKRKCDIFSGEWIPNPKAPYYTNTTCRAIHEHQNCIKYGRPDLGFMKWRWKPKECDLPLFDPYEFLEIVRGTRMAFVGDSVSRNHVQSLICLLSRVEHPEGDSQQEFNFQRWKYKTYNFTIATFWTTHLVRAEETETGPTGPNSFYNLYLDEPDPTWASQIGEFDYIIISSGQWFFRPLFLFDKQKRIGCLYCYIPGVRNVGAHFAYRRALRTTFKTILGLENFKGEVFLRTFAPSHFEGGEWDKGGNCLKTRPYRSNETELDGMNLETHSIQLDEFRIANRDKNRNDGLNLRLLDVTQMMLLRPDGHPSRFGHKREDKVILYNDCVHWCLPGPIDSWNDFLLDMLKNRDLKRLKY

SEQ ID NO: 29221 - protein, 311 aa, Arabidopsis thaliana
  misc_feature (1)..(311): Ceres Seq. ID no. 4803598
MKWRWKPKECDLPLFDPYEFLEIVRGTRMAFVGDSVSRNHVQSLICLLSRVEHPEGDSQQEFNFQRWKYKTYNFTIATFWTTHLVRAEETETGPTGPNSFYNLYLDEPDPTWASQIGEFDYIIISSGQWFFRPLFLFDKQKRIGCLYCYIPGVRNVGAHFAYRRALRTTFKTILGLENFKGEVFLRTFAPSHFEGGEWDKGGNCLKTRPYRSNETELDGMNLETHSIQLDEFRIANRDKNRNDGLNLRLLDVTQMMLLRPDGHPSRFGHKREDKVILYNDCVHWCLPGPIDSWNDFLLDMLKNRDLKRLKY

SEQ ID NO: 29222 - protein, 283 aa, Arabidopsis thaliana
  misc_feature (1)..(283): Ceres Seq. ID no. 4803599
MAFVGDSVSRNHVQSLICLLSRVEHPEGDSQQEFNFQRWKYKTYNFTIATFWTTHLVRAEETETGPTGPNSFYNLYLDEPDPTWASQIGEFDYIIISSGQWFFRPLFLFDKQKRIGCLYCYIPGVRNVGAHFAYRRALRTTFKTILGLENFKGEVFLRTFAPSHFEGGEWDKGGNCLKTRPYRSNETELDGMNLETHSIQLDEFRIANRDKNRNDGLNLRLLDVTQMMLLRPDGHPSRFGHKREDKVILYNDCVHWCLPGPIDSWNDFLLDMLKNRDLKRLKY

SEQ ID NO: 29223 - DNA, 2214 bp, Arabidopsis thaliana
  misc_feature (1)..(2214): Ceres Seq. ID no. 4803685
atgaggctgttgaaggttgctacgtgtaacttgaaccaatgggccatggatttcgagagcaacatgaagaacatcaaggcttcgatcgctgaggcaaaggctgctggtgctgttatcaggcttggacccgagctcgaggtcactggctatggttgcgaggatcacttcttggaactcgacactgtcactcatgcgtgggagtgtttgaaggaattgctgcttggtgattggacggatgatattttgtgcagcataggaatgcctgtgattaaaggagcagagcgttataactgccaggttctctgtatgaacagaagaatcatcatgattcgaccgaaaatgtggctcgcaaacgatggaaactatagggagctacggtggttcacagcttggaagcagagagaagagctagaggaatttcagctccccattgaaatttcagaggctttggagcagaaatcagtcccttttggttatggttacatccagtttatcgacacggctgttgcagctgaagtctgtgaggaactgtttagtccacttcctcctcatgccgagctcgcattgaatggtgttgaagtatttatgaatgcaagtgggagtcatcaccaacttaggaaactagatattcgtctgaatgcttttatgggggctactcatgctcgtggtggggtgtatatgtacagtaatcaacaaggatgcgatggtagccgcttatactacgatggatgtgcatgtattgttgtaaacgggaatgttgttgctcaaggctcacaattctcgttgagagacgttgaggtcatcatttcacaagtggatcttgatgcgttcttaggatcatcttgcttatttgtcttgagaaaggttgctagccttcgtggatctataagtagctttcaggaacaagcaagctgcaaggttaaagtatcttcagtagctgtgccctgtagacttacacagtccttcaacctgaaaatgacactaagcagtccgaagaagatcatttaccactctccacaagaagaaatagcctttggtcccgcttgctggatgtgggactatttgagaagaagtggcgcttcaggatttttgcttcctctttctggcggagcagacagctcctccgtggcagctattgttggctgcatgtgccaacttgttgttaaagagattgcaaagggagatgagcaagtaaaagctgatgcgaaccgaattgggaattatgctaatgggcagtttcctactgatagcaaagagtttgccaaacgaatattttacactgtctttatgggttctgaaaacagttctgaggagacaaaaaggcgttcaaagcagctggcagacgagattggtgcttggcatcttgatgtttgcatagatggtgttgtctctgcagttttatcattatttcaaacagttacaggcaagcgaccaaggtataaggttgatggaggatcaaatgctgagaaccttgggttgcagaacattcaagcccggatgagaatggtgttagcatttatgttagcgtctctcttgccttgggttcatagcaaaccaggcttttaccttgttctaggcagctccaacgttgatgaaggacttcgtggttacctgacaaagtatgattgcagctcagcagacataaatcctataggaagtatcagtaaaatggatttgaggttgttcttaaaatgggctgcaacgaatctcggatatccatccttggcagagatagaagctgctccaccaacagctgagcttgagcccattcgttctgactattctcagctcgatgaagtcgacatgggaatgacatatgaagagctttcagtctatggaaggatgaggaagatattccgttgtggaccagtatctatgttcaagaatctatgttacaagtggggaacaaagctaagcccagcagaagtagctgagaaagtgaagtatttcttcaaatattattcgatcaatcgacacaaaatgactgtcctcacaccgtcttatcacgctgagagttactccccagaggacaacagattcgatctgaggcagtttctgtacaacagcaagtggccataccagtttaagaagattgacgagattgttgacagcttaaatggtgactcagttgctttcccggaagaagaagcaaactccaacaaagaaattggagttgtagcagcaaactccggagacccaagtgcgggtctctga

SEQ ID NO: 29224 - protein, 737 aa, Arabidopsis thaliana
  misc_feature (1)..(737): Ceres Seq. ID no. 4803686
MRLLKVATCNLNQWAMDFESNMKNIKASIAEAKAAGAVIRLGPELEVTGYGCEDHFLELDTVTHAWECLKELLLGDWTDDILCSIGMPVIKGAERYNCQVLCMNRRIIMIRPKMWLANDGNYRELRWFTAWKQREELEEFQLPIEISEALEQKSVPFGYGYIQFIDTAVAAEVCEELFSPLPPHAELALNGVEVFMNASGSHHQLRKLDIRLNAFMGATHARGGVYMYSNQQGCDGSRLYYDGCACIVVNGNVVAQGSQFSLRDVEVIISQVDLDAFLGSSCLFVLRKVASLRGSISSFQEQASCKVKVSSVAVPCRLTQSFNLKMTLSSPKKIIYHSPQEEIAFGPACWMWDYLRRSGASGFLLPLSGGADSSSVAAIVGCMCQLVVKEIAKGDEQVKADANRIGNYANGQFPTDSKEFAKRIFYTVFMGSENSSEETKRRSKQLADEIGAWHLDVCIDGVVSAVLSLFQTVTGKRPRYKVDGGSNAENLGLQNIQARMRMVLAFMLASLLPWVHSKPGFYLVLGSSNVDEGLRGYLTKYDCSSADINPIGSISKMDLRLFLKWAATNLGYPSLAEIEAAPPTAELEPIRSDYSQLDEVDMGMTYEELSVYGRMRKIFRCGPVSMFKNLCYKWGTKLSPAEVAEKVKYFFKYYSINRHKMTVLTPSYHAESYSPEDNRFDLRQFLYNSKWPYQFKKIDEIVDSLNGDSVAFPEEEANSNKEIGVVAANSGDPSAGL

SEQ ID NO: 29225 - protein, 722 aa, Arabidopsis thaliana
  misc_feature (1)..(722): Ceres Seq. ID no. 4803687
MDFESNMKNIKASIAEAKAAGAVIRLGPELEVTGYGCEDHFLELDTVTHAWECLKELLLGDWTDDILCSIGMPVIKGAERYNCQVLCMNRRIIMIRPKMWLANDGNYRELRWFTAWKQREELEEFQLPIEISEALEQKSVPFGYGYIQFIDTAVAAEVCEELFSPLPPHAELALNGVEVFMNASGSHHQLRKLDIRLNAFMGATHARGGVYMYSNQQGCDGSRLYYDGCACIVVNGNVVAQGSQFSLRDVEVIISQVDLDAFLGSSCLFVLRKVASLRGSISSFQEQASCKVKVSSVAVPCRLTQSFNLKMTLSSPKKIIYHSPQEEIAFGPACWMWDYLRRSGASGFLLPLSGGADSSSVAAIVGCMCQLVVKEIAKGDEQVKADANRIGNYANGQFPTDSKEFAKRIFYTVFMGSENSSEETKRRSKQLADEIGAWHLDVCIDGVVSAVLSLFQTVTGKRPRYKVDGGSNAENLGLQNIQARMRMVLAFMLASLLPWVHSKPGFYLVLGSSNVDEGLRGYLTKYDCSSADINPIGSISKMDLRLFLKWAATNLGYPSLAEIEAAPPTAELEPIRSDYSQLDEVDMGMTYEELSVYGRMRKIFRCGPVSMFKNLCYKWGTKLSPAEVAEKVKYFFKYYSINRHKMTVLTPSYHAESYSPEDNRFDLRQFLYNSKWPYQFKKIDEIVDSLNGDSVAFPEEEANSNKEIGVVAANSGDPSAGL

SEQ ID NO: 29226 - protein, 716 aa, Arabidopsis thaliana
  misc_feature (1)..(716): Ceres Seq. ID no. 4803688
MKNIKASIAEAKAAGAVIRLGPELEVTGYGCEDHFLELDTVTHAWECLKELLLGDWTDDILCSIGMPVIKGAERYNCQVLCMNRRIIMIRPKMWLANDGNYRELRWFTAWKQREELEEFQLPIEISEALEQKSVPFGYGYIQFIDTAVAAEVCEELFSPLPPHAELALNGVEVFMNASGSHHQLRKLDIRLNAFMGATHARGGVYMYSNQQGCDGSRLYYDGCACIVVNGNVVAQGSQFSLRDVEVIISQVDLDAFLGSSCLFVLRKVASLRGSISSFQEQASCKVKVSSVAVPCRLTQSFNLKMTLSSPKKIIYHSPQEEIAFGPACWMWDYLRRSGASGFLLPLSGGADSSSVAAIVGCMCQLVVKEIAKGDEQVKADANRIGNYANGQFPTDSKEFAKRIFYTVFMGSENSSEETKRRSKQLADEIGAWHLDVCIDGVVSAVLSLFQTVTGKRPRYKVDGGSNAENLGLQNIQARMRMVLAFMLASLLPWVHSKPGFYLVLGSSNVDEGLRGYLTKYDCSSADINPIGSISKMDLRLFLKWAATNLGYPSLAEIEAAPPTAELEPIRSDYSQLDEVDMGMTYEELSVYGRMRKIFRCGPVSMFKNLCYKWGTKLSPAEVAEKVKYFFKYYSINRHKMTVLTPSYHAESYSPEDNRFDLRQFLYNSKWPYQFKKIDEIVDSLNGDSVAFPEEEANSNKEIGVVAANSGDPSAGL

SEQ ID NO: 29227 - DNA, 2658 bp, Arabidopsis thaliana
  misc_feature (1)..(2658): Ceres Seq. ID no. 4803721
atggagagacattttgtgtttattgccacctatttgctgatatttcatcttgttcaagctcaaaatcaaacaggattcattagtgtggattgtggtttatcccttcttgagtctccttacgatgcaccacaaacgggtttaacatatacatcagatgccgatttagtagctagtggcaaaaccggtagactcgccaaagaatttgaaccactcgttgataagccgactttgacactgagatactttccagagggagtacgaaactgctacaatctaaatgtcaccagcgacaccaactatttaatcaaggccacatttgtatatgggaattacgatggtcttaatgttgggccaaacttcaacctttatctcggtccgaatttgtggacaacggtgagtagcaatgacactatagaggaaataatccttgtgaccagatccaactctttacaggtgtgtcttgttaagacgggaataagtataccttttataaatatgttggagctacgaccgatgaagaaaaatatgtacgttactcaaagcggttcactgaagtatttattcagagggtatattagcaattcaagtactcgtataaggttcccggatgatgtctatgaccgtaaatggtacccgctcttcgacgactcatggacacaagtaactacaaatctcaaagtgaacacaagtattacttatgaactaccacaaagtgtaatggcaaaagccgcaacgccaattaaggctaacgacaccttgaacattacatggacggtagagccccctactacacagttttactcttacgtacacattgcagagattcaggctctaagggcaaacgagacaagggagttcaatgtgacactgaatggagaatatacttttggaccttttagtcctataccgctaaaaaccgcatccatagtcgacttaagcccagggcaatgcgatggagggagatgcattttgcaggttgtgaagacgctgaaatctacgcttcctcctttacttaatgctatcgaagctttcaccgtgattgatttcccgcaaatggagacaaatgaaaatgatgttgctgggatcaagaatgttcaaggtacttatggattgagtagaattagttggcaaggagatccatgtgtccccaaacagttattgtgggatggtctaaactgcaaaaactcggatatttctacgccaccgataatcacttccttagacttatcttcaagtggattaactgggatcatcacgcaagccattaagaatcttactcacctgcaaatattggacttgtcagataataatttgactggagaagtacctgagtttttagctgacataaaatcactcttggtcataaacttaagtggtaataatctaagtggctcagttcctccctcacttcttcagaagaaaggaatgaagttaaatgtcgaaggcaatcctcatattctttgcacaacgggttcttgtgtcaagaaaaaagaggatggacataagaaaaagagtgtcatagtgccagttgttgcatcaattgcttcaatagctgttcttataggtgcattggttctgtttctaattcttagaaagaaaaggtcaccaaaagttgaagggccaccaccatcttatatgcaagcatcagatggtagattgcctagatcatctgaaccggcaatcgtaacgaaaaatagaaggttttcttattcacaagttgtgataatgacaaataacttccaaagaatccttgggaaaggagggtttggaatggtttatcatggtttcgtgaacggtacagagcaagtagctgttaagatactctcccattcatcgtctcaaggatataaacaattcaaagctgaggtagaacttcttcttagagttcatcacaagaacttggttggtcttgttgggtactgcgacgaaggagataacttggctcttatctatgaatacatggccaatggagatctaaaagaacatatgtcaggaacacgtaaccgctttattttgaattggggaactagactaaaaatagtcatcgagtctgcacaaggactcgagtacttgcataatggttgcaaaccaccaatggtacatagggacgtcaaaactacaaatatattgttgaacgaacactttgaggccaaacttgcggattttgggctttcgagatcattcctgatcgaaggtgaaactcatgtatcaacagttgttgctggaactcctggatatctcgatcctgaataccatagaacaaattggttgacagaaaagagtgatgtttatagttttgggattctattgttggagattatcacaaaccgacatgtgatcgaccaaagccgtgaaaagccacacataggagaatgggtaggagtaatgcttacaaaaggagacatccaaagcattatggatccaagtctcaatgaagattatgattccggttctgtttggaaagctgttgaactagcaatgagttgtctaaatcattcttcagcgagaagaccgaccatgtcccaagttgttattgaattgaacgagtgtctggcttctgaaaatgcaaggggaggagcaagtcgggacatggaatcaaagagttctatagaagtgagcttgacgtttggtactgaagtgagcccaaacgctcgatag

SEQ ID NO: 29228 - protein, 885 aa, Arabidopsis thaliana
  misc_feature (1)..(885): Ceres Seq. ID no. 4803722
MERHFVFIATYLLIFHLVQAQNQTGFISVDCGLSLLESPYDAPQTGLTYTSDADLVASGKTGRLAKEFEPLVDKPTLTLRYFPEGVRNCYNLNVTSDTNYLIKATFVYGNYDGLNVGPNFNLYLGPNLWTTVSSNDTIEEIILVTRSNSLQVCLVKTGISIPFINMLELRPMKKNMYVTQSGSLKYLFRGYISNSSTRIRFPDDVYDRKWYPLFDDSWTQVTTNLKVNTSITYELPQSVMAKAATPIKANDTLNITWTVEPPTTQFYSYVHIAEIQALRANETREFNVTLNGEYTFGPFSPIPLKTASIVDLSPGQCDGGRCILQVVKTLKSTLPPLLNAIEAFTVIDFPQMETNENDVAGIKNVQGTYGLSRISWQGDPCVPKQLLWDGLNCKNSDISTPPIITSLDLSSSGLTGIITQAIKNLTHLQILDLSDNNLTGEVPEFLADIKSLLVINLSGNNLSGSVPPSLLQKKGMKLNVEGNPHILCTTGSCVKKKEDGHKKKSVIVPVVASIASIAVLIGALVLFLILRKKRSPKVEGPPPSYMQASDGRLPRSSEPAIVTKNRRFSYSQVVIMTNNFQRILGKGGFGMVYHGFVNGTEQVAVKILSHSSSQGYKQFKAEVELLLRVHHKNLVGLVGYCDEGDNLALIYEYMANGDLKEHMSGTRNRFILNWGTRLKIVIESAQGLEYLHNGCKPPMVHRDVKTTNILLNEHFEAKLADFGLSRSFLIEGETHVSTVVAGTPGYLDPEYHRTNWLTEKSDVYSFGILLLEIITNRHVIDQSREKPHIGEWVGVMLTKGDIQSIMDPSLNEDYDSGSVWKAVELAMSCLNHSSARRPTMSQVVIELNECLASENARGGASRDMESKSSIEVSLTFGTEVSPNAR

SEQ ID NO: 29229 - protein, 720 aa, Arabidopsis thaliana
  misc_feature (1)..(720): Ceres Seq. ID no. 4803723
MLELRPMKKNMYVTQSGSLKYLFRGYISNSSTRIRFPDDVYDRKWYPLFDDSWTQVTTNLKVNTSITYELPQSVMAKAATPIKANDTLNITWTVEPPTTQFYSYVHIAEIQALRANETREFNVTLNGEYTFGPFSPIPLKTASIVDLSPGQCDGGRCILQVVKTLKSTLPPLLNAIEAFTVIDFPQMETNENDVAGIKNVQGTYGLSRISWQGDPCVPKQLLWDGLNCKNSDISTPPIITSLDLSSSGLTGIITQAIKNLTHLQILDLSDNNLTGEVPEFLADIKSLLVINLSGNNLSGSVPPSLLQKKGMKLNVEGNPHILCTTGSCVKKKEDGHKKKSVIVPVVASIASIAVLIGALVLFLILRKKRSPKVEGPPPSYMQASDGRLPRSSEPAIVTKNRRFSYSQVVIMTNNFQRILGKGGFGMVYHGFVNGTEQVAVKILSHSSSQGYKQFKAEVELLLRVHHKNLVGLVGYCDEGDNLALIYEYMANGDLKEHMSGTRNRFILNWGTRLKIVIESAQGLEYLHNGCKPPMVHRDVKTTNILLNEHFEAKLADFGLSRSFLIEGETHVSTVVAGTPGYLDPEYHRTNWLTEKSDVYSFGILLLEIITNRHVIDQSREKPHIGEWVGVMLTKGDIQSIMDPSLNEDYDSGSVWKAVELAMSCLNHSSARRPTMSQVVIELNECLASENARGGASRDMESKSSIEVSLTFGTEVSPNAR

SEQ ID NO: 29230 - protein, 714 aa, Arabidopsis thaliana
  misc_feature (1)..(714): Ceres Seq. ID no. 4803724
MKKNMYVTQSGSLKYLFRGYISNSSTRIRFPDDVYDRKWYPLFDDSWTQVTTNLKVNTSITYELPQSVMAKAATPIKANDTLNITWTVEPPTTQFYSYVHIAEIQALRANETREFNVTLNGEYTFGPFSPIPLKTASIVDLSPGQCDGGRCILQVVKTLKSTLPPLLNAIEAFTVIDFPQMETNENDVAGIKNVQGTYGLSRISWQGDPCVPKQLLWDGLNCKNSDISTPPIITSLDLSSSGLTGIITQAIKNLTHLQILDLSDNNLTGEVPEFLADIKSLLVINLSGNNLSGSVPPSLLQKKGMKLNVEGNPHILCTTGSCVKKKEDGHKKKSVIVPVVASIASIAVLIGALVLFLILRKKRSPKVEGPPPSYMQASDGRLPRSSEPAIVTKNRRFSYSQVVIMTNNFQRILGKGGFGMVYHGFVNGTEQVAVKILSHSSSQGYKQFKAEVELLLRVHHKNLVGLVGYCDEGDNLALIYEYMANGDLKEHMSGTRNRFILNWGTRLKIVIESAQGLEYLHNGCKPPMVHRDVKTTNILLNEHFEAKLADFGLSRSFLIEGETHVSTVVAGTPGYLDPEYHRTNWLTEKSDVYSFGILLLEIITNRHVIDQSREKPHIGEWVGVMLTKGDIQSIMDPSLNEDYDSGSVWKAVELAMSCLNHSSARRPTMSQVVIELNECLASENARGGASRDMESKSSIEVSLTFGTEVSPNAR

SEQ ID NO: 29231 - DNA, 1779 bp, Arabidopsis thaliana
  misc_feature (1)..(1779): Ceres Seq. ID no. 4803889
atgcggatgagccttcacttaaacaagaagcttctaaaagaaaagaaaacattgcagaattatccatccgaatatgggttcgcttcagacaccgatagaaatgagaagctcatcgttgttggatacgtcctgcggatatttgctcagagagttacaggcaagtttgttttgatgatgatatgggatgaagttggagaagataagtttgagagagaaaaagtgttgcttgatatagagcaggaatgtgtagaggcttaccggagaaaagttgaccatgccaatgtttcgaggtctcgtctacatcaagagctggcagaatctgaagccgaactcacccattttcttttgtgcctcggtgaaagatcagtacctggaagaccggagaaaaagggaggaacactgagggagcagctggattctattgcgcctgcactgcgtgagatgaggcttaggaaagacgagagagtgaagcagttccgatctgtcaaaggggaaattcagaaaatatcagcagaaatagcaggtagatcgacatatgaagactcaactagaaagataaccatagatgacaacgatctttctaataaaaaacttgaggaatatcagaatgaactgcatagactccatgatgagaagaatgagagactacagaaggttgatatatacatatgcgccattcgagatctatcagcaacattgggaacagaagcatcaatgatcataacaaagattcacccaagcttgaacgacctctatggaatatccaaaaacatcagtgatgatatcttaaaaaagcttaatggcactgttgtgtctctggaagaggaaaagcacaagcgccttgaaaagcttcaccatcttggtagagctttatcgaacctgtggaatctgatggatgcatcttatgaagatcgtcaaaagttttttcatgtcattgatttactgtcgtccgcaccatcagacgtgtgtgctcctggaagcattacattggacataattcagcaggctgaggctgaagtcaagagactagatcaactgaaagcaagcagaatcaaagaacttttcatcaagaagcaaaaggaactagaagatacgtgcaacatgtcgcatatggagactccatcaacggaaatgggaaatatcacgaaccttgtagactctggggaagttgaccatgttgaccttctagccgccatggatgaaaagatagcaagagcaaaggaagaagcagcaagtagaaaaggaataattgaaaaagttgataggtggatgttggcaagtgatgaagagcgctggctagaagaatatgaccaggacgagaatcggtactcagtaagtagaaatgctcatcgaaacctaaggagagcagaacgggcacgcataacagtcagcaaaatctcaggattagtggaatctatattggttaaggctaagagctgggaggtagaaagacagaaagtcttcttatacaatgaggtacctcttgttgcaatgttgcaagaatacaataagctgaggcaggaaaaagaaatggagaagcaaaggctccgggaaatgaagaagatgagcattccacaacctgtggctgagggagataatttttacatggcaaggccagctagcagcaataggcgaatatcaaatcgaagcatgaatggtggatttggaagtggaagtcctataaacagaaagtattcaggaggattcaacaatactaacaataattacacagcacttggtacatctataagaagagaaagcagaaagagtgaggcataa

SEQ ID NO: 29232 - protein, 592 aa, Arabidopsis thaliana
  misc_feature (1)..(592): Ceres Seq. ID no. 4803890
MRMSLHLNKKLLKEKKTLQNYPSEYGFASDTDRNEKLIVVGYVLRIFAQRVTGKFVLMMIWDEVGEDKFEREKVLLDIEQECVEAYRRKVDHANVSRSRLHQELAESEAELTHFLLCLGERSVPGRPEKKGGTLREQLDSIAPALREMRLRKDERVKQFRSVKGEIQKISAEIAGRSTYEDSTRKITIDDNDLSNKKLEEYQNELHRLHDEKNERLQKVDIYICAIRDLSATLGTEASMIITKIHPSLNDLYGISKNISDDILKKLNGTVVSLEEEKHKRLEKLHHLGRALSNLWNLMDASYEDRQKFFHVIDLLSSAPSDVCAPGSITLDIIQQAEAEVKRLDQLKASRIKELFIKKQKELEDTCNMSHMETPSTEMGNITNLVDSGEVDHVDLLAAMDEKIARAKEEAASRKGIIEKVDRWMLASDEERWLEEYDQDENRYSVSRNAHRNLRRAERARITVSKISGLVESILVKAKSWEVERQKVFLYNEVPLVAMLQEYNKLRQEKEMEKQRLREMKKMSIPQPVAEGDNFYMARPASSNRRISNRSMNGGFGSGSPINRKYSGGFNNTNNNYTALGTSIRRESRKSEA

SEQ ID NO: 29233 - protein, 590 aa, Arabidopsis thaliana
  misc_feature (1)..(590): Ceres Seq. ID no. 4803891
MSLHLNKKLLKEKKTLQNYPSEYGFASDTDRNEKLIVVGYVLRIFAQRVTGKFVLMMIWDEVGEDKFEREKVLLDIEQECVEAYRRKVDHANVSRSRLHQELAESEAELTHFLLCLGERSVPGRPEKKGGTLREQLDSIAPALREMRLRKDERVKQFRSVKGEIQKISAEIAGRSTYEDSTRKITIDDNDLSNKKLEEYQNELHRLHDEKNERLQKVDIYICAIRDLSATLGTEASMIITKIHPSLNDLYGISKNISDDILKKLNGTVVSLEEEKHKRLEKLHHLGRALSNLWNLMDASYEDRQKFFHVIDLLSSAPSDVCAPGSITLDIIQQAEAEVKRLDQLKASRIKELFIKKQKELEDTCNMSHMETPSTEMGNITNLVDSGEVDHVDLLAAMDEKIARAKEEAASRKGIIEKVDRWMLASDEERWLEEYDQDENRYSVSRNAHRNLRRAERARITVSKISGLVESILVKAKSWEVERQKVFLYNEVPLVAMLQEYNKLRQEKEMEKQRLREMKKMSIPQPVAEGDNFYMARPASSNRRISNRSMNGGFGSGSPINRKYSGGFNNTNNNYTALGTSIRRESRKSEA

SEQ ID NO: 29234 - protein, 535 aa, Arabidopsis thaliana
  misc_feature (1)..(535): Ceres Seq. ID no. 4803892
MMIWDEVGEDKFEREKVLLDIEQECVEAYRRKVDHANVSRSRLHQELAESEAELTHFLLCLGERSVPGRPEKKGGTLREQLDSIAPALREMRLRKDERVKQFRSVKGEIQKISAEIAGRSTYEDSTRKITIDDNDLSNKKLEEYQNELHRLHDEKNERLQKVDIYICAIRDLSATLGTEASMIITKIHPSLNDLYGISKNISDDILKKLNGTVVSLEEEKHKRLEKLHHLGRALSNLWNLMDASYEDRQKFFHVIDLLSSAPSDVCAPGSITLDIIQQAEAEVKRLDQLKASRIKELFIKKQKELEDTCNMSHMETPSTEMGNITNLVDSGEVDHVDLLAAMDEKIARAKEEAASRKGIIEKVDRWMLASDEERWLEEYDQDENRYSVSRNAHRNLRRAERARITVSKISGLVESILVKAKSWEVERQKVFLYNEVPLVAMLQEYNKLRQEKEMEKQRLREMKKMSIPQPVAEGDNFYMARPASSNRRISNRSMNGGFGSGSPINRKYSGGFNNTNNNYTALGTSIRRESRKSEA

SEQ ID NO: 29235 - DNA, 816 bp, Arabidopsis thaliana
  misc_feature (1)..(816): Ceres Seq. ID no. 4803908
atgtcaggcgtgtctcttgcggttggtccaagaaccgacgtggacaaaacggcgtcatccagtgagaagggacggtggtcggggatgacggcgataggaggtggcagtggaggtttgatggggtcgttaagggttatagagctacagctagtcgcgttcatactagttttctcagcaagcggtctcgtaccaatacttgacatgctttttccagcgtttgcgtctatctatataatcgccctctcgcgtttagctttcccttctcacggcgtttccaccgcttcccccgaagtcttccgcggcagcaaactcttcaggttgtacgtgatttcggggacaacgattggtctgttcttgcctctagcttacgtattaggtggttttgcaagaggagatgatcatgcggtaagatcagcaacaccacacttgtttctactgtcgtgtcaaatcctgacagagaatgtaataagtggcctttctctgttctcgccaccggtaagagctctcgtcccattgctctacacagtctggagaatctttgtcatcattggttggtctaaagatgtttggttcaacaagtctttaccaatcaatgctacacccaatgtggttacatggttctggtttggaaggtatttagcactagcaaacttaggctacttcggagtgaatctactctgtttcttgatccctaggttcctgcctcgtgctttcgagcaatacttcagagagagagacgagatcttggcgaaaagccaagaagacaagccagttcaagttcctagatcaaaaccttctaaccacaaatctgattga

SEQ ID NO: 29236 - protein, 271 aa, Arabidopsis thaliana
  misc_feature (1)..(271): Ceres Seq. ID no. 4803909
MSGVSLAVGPRTDVDKTASSSEKGRWSGMTAIGGGSGGLMGSLRVIELQLVAFILVFSASGLVPILDMLFPAFASIYIIALSRLAFPSHGVSTASPEVFRGSKLFRLYVISGTTIGLFLPLAYVLGGFARGDDHAVRSATPHLFLLSCQILTENVISGLSLFSPPVRALVPLLYTVWRIFVIIGWSKDVWFNKSLPINATPNVVTWFWFGRYLALANLGYFGVNLLCFLIPRFLPRAFEQYFRERDEILAKSQEDKPVQVPRSKPSNHKSD

SEQ ID NO: 29237 - protein, 243 aa, Arabidopsis thaliana
  misc_feature (1)..(243): Ceres Seq. ID no. 4803910
MTAIGGGSGGLMGSLRVIELQLVAFILVFSASGLVPILDMLFPAFASIYIIALSRLAFPSHGVSTASPEVFRGSKLFRLYVISGTTIGLFLPLAYVLGGFARGDDHAVRSATPHLFLLSCQILTENVISGLSLFSPPVRALVPLLYTVWRIFVIIGWSKDVWFNKSLPINATPNVVTWFWFGRYLALANLGYFGVNLLCFLIPRFLPRAFEQYFRERDEILAKSQEDKPVQVPRSKPSNHKSD

SEQ ID NO: 29238 - protein, 232 aa, Arabidopsis thaliana
  misc_feature (1)..(232): Ceres Seq. ID no. 4803911
MGSLRVIELQLVAFILVFSASGLVPILDMLFPAFASIYIIALSRLAFPSHGVSTASPEVFRGSKLFRLYVISGTTIGLFLPLAYVLGGFARGDDHAVRSATPHLFLLSCQILTENVISGLSLFSPPVRALVPLLYTVWRIFVIIGWSKDVWFNKSLPINATPNVVTWFWFGRYLALANLGYFGVNLLCFLIPRFLPRAFEQYFRERDEILAKSQEDKPVQVPRSKPSNHKSD

SEQ ID NO: 29239 - DNA, 3744 bp, Arabidopsis thaliana
  misc_feature (1)..(3744): Ceres Seq. ID no. 4803912
atggataacatagaaccaccctttagtggaaacatccatgctgagaccgaagtaaagaaggaggagaagaaaaagatgaagaaggaatcggtgtcattgatgggtttgtttagtgcagctgataatgttgattactttctgatgtttcttgggggtttaggcacgtgtattcatggcggtacgcttccgctcttcttcgtgttcttcgggggaatgctagattctcttgggaagctttctacagacccgaatgccatatcttctcgcgtttcacagaatgctctgtacttggtctacttaggattggtcaatttggtatcagcctggattggagttgcttgttggatgcaaacaggggaaagacaaacagcgcgattgcgtataaattatctcaaatcaatcttagcaaaagatattactttctttgatactgaagctagagattcaaacttcattttccacatctcaagcgacgcaatcttggttcaagatgccattggcgataagaccggccatgttttgcggtacctatgtcagttcatcgcgggatttgtcatcggttttttgtcagtatggcaactaacgttgcttacgttaggagtggttccactgatagcaattgcaggaggagggtatgctatagtcatgtctacaatatcagagaagagtgaggctgcttatgctgatgcaggaaaagttgcagaagaggtcatgtcacaggtgagaacagtgtatgcatttgtaggagaagagaaagctgtaaaatcttactcaaattctctcaagaaagctctgaaactcagtaaaagaagtggtcttgctaaaggtttaggagttggattaacatatagcctcttgttctgtgcttgggcattgcttttttggtatgcaagtcttcttgtacgccatggcaaaaccaacggcgcaaaagccttcacaacaatcctcaatgtcatttacagcggattcgccttaggtcaagccgtgcctagcttatccgcaatttctaaaggcagagttgctgctgcaaatattttcaaaatgataggaaacaacaatcttgaaagctctgagagattagaaaacggaacaacattgcaaaacgtagttggcaagattgagttttgtggagtttcgttcgcatatccttcgagaccaaacatggtttttgagaatcttagtttcacgatacattcaggcaagacttttgcatttgtcggtccaagtggttcggggaaaagcacaatcatatcaatggtgcaacgtttctatgaacctagatcaggggagattctcttggatggaaatgacatcaagaacctgaagctgaaatggttgagagaacagatgggattagtgagtcaagaaccagcattattcgccacaacaatagcttctaatattcttctcggtaaagagaaagccaatatggatcagatcatagaagctgctaaagcagccaacgcagattctttcattaaatcattacctaatggttacaatactcaggttggagaaggaggaactcaactttcaggagggcagaaacagaggattgctattgctcgggcggttctaagaaatccaaagatattacttttagatgaagcaacaagcgctcttgatgccgaatcagagaagattgttcagcaagcacttgacaatgtcatggaaaaaagaacaacaatcgtcattgcacatagattatccaccattcgaaatgttgacaagattgttgtcttgagagatggtcaagttagggaaaccggaagtcactcagaactgatatcaagaggaggagattatgccactcttgtaaattgtcaagacacagaacctcaagaaaacttgagatcagtcatgtatgaatcttgtaggtctcaagctggatcatatagttcaagaagagtttttagctcaagaaggacttcaagcttcagggaagaccaagagaagactgaaaaagattcaaaaggcgaagatttaataagctcgtcctcaatgatatgggaactaataaagttgaatgctccagaatggctttatgcattacttggctcaattggtgccgttcttgccggatcacaaccggcattgttctccatggggcttgcttacgtgttaaccacgttttattcaccttttcctagtctgatcaagcgtgaagtcgataaggtagctattatctttgttggagctggaatagtaacagcgcctatatacattctccaacattacttctatacactaatgggagagcgtcttacttctcgggttcgcttatccttgttctcagcgattctttcaaatgagattggatggtttgatctggatgagaacaacactggctcactcacttcaatcttagctgctgatgcaaccttggtgaggagtgctatagcggatcgtctatcgacaatagtccaaaacttgtctcttacaatcacagccttagcacttgcctttttctacagttggcgtgttgcagctgtcgtaacagcttgttttcctcttctcattgccgcttcacttaccgagcaattatttctaaaaggctttggaggagattacacaagggcttactctagggcaacttcattggcgcgtgaagcgatttcgaatataagaaccgtcgctgcatttagtgctgaaaagcaaatctcagaacagtttacttgtgaactaagcaaacccaccaagagtgccttactcagaggtcatatctcgggatttggatacggtttgtcacagtgtctcgcgttctgttcctacgcacttggtctctggtatatctcagttctgattaagcgcaacgagaccaactttgaggatagtatcaaatctttcatggtattgctcgtcactgcttactccgtagcggaaacgcttgcgttaaccccagatatcgtgaagggcacacaagcactcgggtccgtatttagggttttacatagagagactgaaatacctccagaccagcctaactcaagattggtcactcatatcaaaggagatatagagtttagaaacgtgagctttgcgtatcccactagacccgaaatcgccattttcaaaaatctaaatctccgagtttcagccgggaagagtcttgcggtcgtgggacctagtggttcgggaaagagcacagtgatcggactaatcatgagattctacgatccgagcaacggaaatctctgtatcgatgggcatgatataaaatctgtaaacctacgtagcttgcgcaagaagctagcgttagttcagcaagaaccggctctgttttcaacatccatacacgagaacatcaagtatgggaacgagaacgcgtcagaggcagagatcattgaagccgcaaaagccgcgaacgcgcacgagttcataagcaggatggaagaagggtacatgactcacgtgggtgataagggagtgcagttatcaggtgggcaaaaacagagagtggctatcgcacgggcagttctaaaagatccttcagtgcttctccttgatgaggcaacaagtgctttggatacgagcgcagagaaacaggtccaagaggcgctagacaagttgatgaagggacgaaccacgattctggtggctcacaggctctcgaccataagaaaagcagacacaatcgttgtattgcataaaggaaaagttgtggagaaaggaagtcacagagaacttgtatctaaatccgatgggttttataagaaattgacgagtcttcaagaagcggtgtga

SEQ ID NO: 29240 - protein, 1247 aa, Arabidopsis thaliana
  misc_feature (1)..(1247): Ceres Seq. ID no. 4803913
MDNIEPPFSGNIHAETEVKKEEKKKMKKESVSLMGLFSAADNVDYFLMFLGGLGTCIHGGTLPLFFVFFGGMLDSLGKLSTDPNAISSRVSQNALYLVYLGLVNLVSAWIGVACWMQTGERQTARLRINYLKSILAKDITFFDTEARDSNFIFHISSDAILVQDAIGDKTGHVLRYLCQFIAGFVIGFLSVWQLTLLTLGVVPLIAIAGGGYAIVMSTISEKSEAAYADAGKVAEEVMSQVRTVYAFVGEEKAVKSYSNSLKKALKLSKRSGLAKGLGVGLTYSLLFCAWALLFWYASLLVRHGKTNGAKAFTTILNVIYSGFALGQAVPSLSAISKGRVAAANIFKMIGNNNLESSERLENGTTLQNVVGKIEFCGVSFAYPSRPNMVFENLSFTIHSGKTFAFVGPSGSGKSTIISMVQRFYEPRSGEILLDGNDIKNLKLKWLREQMGLVSQEPALFATTIASNILLGKEKANMDQIIEAAKAANADSFIKSLPNGYNTQVGEGGTQLSGGQKQRIAIARAVLRNPKILLLDEATSALDAESEKIVQQALDNVMEKRTTIVIAHRLSTIRNVDKIVVLRDGQVRETGSHSELISRGGDYATLVNCQDTEPQENLRSVMYESCRSQAGSYSSRRVFSSRRTSSFREDQEKTEKDSKGEDLISSSSMIWELIKLNAPEWLYALLGSIGAVLAGSQPALFSMGLAYVLTTFYSPFPSLIKREVDKVAIIFVGAGIVTAPIYILQHYFYTLMGERLTSRVRLSLFSAILSNEIGWFDLDENNTGSLTSILAADATLVRSAIADRLSTIVQNLSLTITALALAFFYSWRVAAVVTACFPLLIAASLTEQLFLKGFGGDYTRAYSRATSLAREAISNIRTVAAFSAEKQISEQFTCELSKPTKSALLRGHISGFGYGLSQCLAFCSYALGLWYISVLIKRNETNFEDSIKSFMVLLVTAYSVAETLALTPDIVKGTQALGSVFRVLHRETEIPPDQPNSRLVTHIKGDIEFRNVSFAYPTRPEIAIFKNLNLRVSAGKSLAVVGPSGSGKSTVIGLIMRFYDPSNGNLCIDGHDIKSVNLRSLRKKLALVQQEPALFSTSIHENIKYGNENASEAEIIEAAKAANAHEFISRMEEGYMTHVGDKGVQLSGGQKQRVAIARAVLKDPSVLLLDEATSALDTSAEKQVQEALDKLMKGRTTILVAHRLSTIRKADTIVVLHKGKVVEKGSHRELVSKSDGFYKKLTSLQEAV

SEQ ID NO: 29241 - protein, 1222 aa, Arabidopsis thaliana
  misc_feature (1)..(1222): Ceres Seq. ID no. 4803914
MKKESVSLMGLFSAADNVDYFLMFLGGLGTCIHGGTLPLFFVFFGGMLDSLGKLSTDPNAISSRVSQNALYLVYLGLVNLVSAWIGVACWMQTGERQTARLRINYLKSILAKDITFFDTEARDSNFIFHISSDAILVQDAIGDKTGHVLRYLCQFIAGFVIGFLSVWQLTLLTLGVVPLIAIAGGGYAIVMSTISEKSEAAYADAGKVAEEVMSQVRTVYAFVGEEKAVKSYSNSLKKALKLSKRSGLAKGLGVGLTYSLLFCAWALLFWYASLLVRHGKTNGAKAFTTILNVIYSGFALGQAVPSLSAISKGRVAAANIFKMIGNNNLESSERLENGTTLQNVVGKIEFCGVSFAYPSRPNMVFENLSFTIHSGKTFAFVGPSGSGKSTIISMVQRFYEPRSGEILLDGNDIKNLKLKWLREQMGLVSQEPALFATTIASNILLGKEKANMDQIIEAAKAANADSFIKSLPNGYNTQVGEGGTQLSGGQKQRIAIARAVLRNPKILLLDEATSALDAESEKIVQQALDNVMEKRTTIVIAHRLSTIRNVDKIVVLRDGQVRETGSHSELISRGGDYATLVNCQDTEPQENLRSVMYESCRSQAGSYSSRRVFSSRRTSSFREDQEKTEKDSKGEDLISSSSMIWELIKLNAPEWLYALLGSIGAVLAGSQPALFSMGLAYVLTTFYSPFPSLIKREVDKVAIIFVGAGIVTAPIYILQHYFYTLMGERLTSRVRLSLFSAILSNEIGWFDLDENNTGSLTSILAADATLVRSAIADRLSTIVQNLSLTITALALAFFYSWRVAAVVTACFPLLIAASLTEQLFLKGFGGDYTRAYSRATSLAREAISNIRTVAAFSAEKQISEQFTCELSKPTKSALLRGHISGFGYGLSQCLAFCSYALGLWYISVLIKRNETNFEDSIKSFMVLLVTAYSVAETLALTPDIVKGTQALGSVFRVLHRETEIPPDQPNSRLVTHIKGDIEFRNVSFAYPTRPEIAIFKNLNLRVSAGKSLAVVGPSGSGKSTVIGLIMRFYDPSNGNLCIDGHDIKSVNLRSLRKKLALVQQEPALFSTSIHENIKYGNENASEAEIIEAAKAANAHEFISRMEEGYMTHVGDKGVQLSGGQKQRVAIARAVLKDPSVLLLDEATSALDTSAEKQVQEALDKLMKGRTTILVAHRLSTIRKADTIVVLHKGKVVEKGSHRELVSKSDGFYKKLTSLQEAV

SEQ ID NO: 29242 - protein, 1214 aa, Arabidopsis thaliana
  misc_feature (1)..(1214): Ceres Seq. ID no. 4803915
MGLFSAADNVDYFLMFLGGLGTCIHGGTLPLFFVFFGGMLDSLGKLSTDPNAISSRVSQNALYLVYLGLVNLVSAWIGVACWMQTGERQTARLRINYLKSILAKDITFFDTEARDSNFIFHISSDAILVQDAIGDKTGHVLRYLCQFIAGFVIGFLSVWQLTLLTLGVVPLIAIAGGGYAIVMSTISEKSEAAYADAGKVAEEVMSQVRTVYAFVGEEKAVKSYSNSLKKALKLSKRSGLAKGLGVGLTYSLLFCAWALLFWYASLLVRHGKTNGAKAFTTILNVIYSGFALGQAVPSLSAISKGRVAAANIFKMIGNNNLESSERLENGTTLQNVVGKIEFCGVSFAYPSRPNMVFENLSFTIHSGKTFAFVGPSGSGKSTIISMVQRFYEPRSGEILLDGNDIKNLKLKWLREQMGLVSQEPALFATTIASNILLGKEKANMDQIIEAAKAANADSFIKSLPNGYNTQVGEGGTQLSGGQKQRIAIARAVLRNPKILLLDEATSALDAESEKIVQQALDNVMEKRTTIVIAHRLSTIRNVDKIVVLRDGQVRETGSHSELISRGGDYATLVNCQDTEPQENLRSVMYESCRSQAGSYSSRRVFSSRRTSSFREDQEKTEKDSKGEDLISSSSMIWELIKLNAPEWLYALLGSIGAVLAGSQPALFSMGLAYVLTTFYSPFPSLIKREVDKVAIIFVGAGIVTAPIYILQHYFYTLMGERLTSRVRLSLFSAILSNEIGWFDLDENNTGSLTSILAADATLVRSAIADRLSTIVQNLSLTITALALAFFYSWRVAAVVTACFPLLIAASLTEQLFLKGFGGDYTRAYSRATSLAREAISNIRTVAAFSAEKQISEQFTCELSKPTKSALLRGHISGFGYGLSQCLAFCSYALGLWYISVLIKRNETNFEDSIKSFMVLLVTAYSVAETLALTPDIVKGTQALGSVFRVLHRETEIPPDQPNSRLVTHIKGDIEFRNVSFAYPTRPEIAIFKNLNLRVSAGKSLAVVGPSGSGKSTVIGLIMRFYDPSNGNLCIDGHDIKSVNLRSLRKKLALVQQEPALFSTSIHENIKYGNENASEAEIIEAAKAANAHEFISRMEEGYMTHVGDKGVQLSGGQKQRVAIARAVLKDPSVLLLDEATSALDTSAEKQVQEALDKLMKGRTTILVAHRLSTIRKADTIVVLHKGKVVEKGSHRELVSKSDGFYKKLTSLQEAV

SEQ ID NO: 29243 - DNA, 732 bp, Arabidopsis thaliana
  misc_feature (1)..(732): Ceres Seq. ID no. 4803967
atggaggaggtaaagggacaaagaggaagtggaaccacagaggcagattttgtgttgcaatggggtgagaggaaaagagttagatgtatgaaagtgaagaaagatcaaagccttgccaatggcaaatcaactgattgtttgactaaacgtaaactcatttctcgtgctgtctcttctgagagaggctcaccttctcgacatcttaaccgtcctaacaagatcactgattctctagtcaatgtgcggagatcgtttatggcgtcgcccgagaaggaagataggtattatacaacaaggggttcgatgggaatagatgagagtgggaaaattattaaggaacctgtgaaagaaacaaagaagcatgtgtggccaaagttgtatatagctttgtcaaataaagagaaggaagaagattttttggctatgaaaggttgcaagcttcctcaaagacctaagaagcgagccaaattggttcagaagacattgcttctggtgagtccaggagcttggttatcagatctgtgcaaagagagatatgaagtaagagagaagaagacttcaaagaagaccaagaggattgaaggcaatggggagcatggaaagcgattcggagtgaagaaccgtcgaagaaagaacttaaatgagatattcaagattttggcgaggggtaggaaggtgtatttcactttttcgttgcattttgagatgcctctcttcattactacaggttaa

SEQ ID NO: 29244 - protein, 243 aa, Arabidopsis thaliana
  misc_feature (1)..(243): Ceres Seq. ID no. 4803968
MEEVKGQRGSGTTEADFVLQWGERKRVRCMKVKKDQSLANGKSTDCLTKRKLISRAVSSERGSPSRHLNRPNKITDSLVNVRRSFMASPEKEDRYYTTRGSMGIDESGKIIKEPVKETKKHVWPKLYIALSNKEKEEDFLAMKGCKLPQRPKKRAKLVQKTLLLVSPGAWLSDLCKERYEVREKKTSKKTKRIEGNGEHGKRFGVKNRRRKNLNEIFKILARGRKVYFTFSLHFEMPLFITTG

SEQ ID NO: 29245 - protein, 214 aa, Arabidopsis thaliana
  misc_feature (1)..(214): Ceres Seq. ID no. 4803969
MKVKKDQSLANGKSTDCLTKRKLISRAVSSERGSPSRHLNRPNKITDSLVNVRRSFMASPEKEDRYYTTRGSMGIDESGKIIKEPVKETKKHVWPKLYIALSNKEKEEDFLAMKGCKLPQRPKKRAKLVQKTLLLVSPGAWLSDLCKERYEVREKKTSKKTKRIEGNGEHGKRFGVKNRRRKNLNEIFKILARGRKVYFTFSLHFEMPLFITTG

SEQ ID NO: 29246 - protein, 158 aa, Arabidopsis thaliana
  misc_feature (1)..(158): Ceres Seq. ID no. 4803970
MASPEKEDRYYTTRGSMGIDESGKIIKEPVKETKKHVWPKLYIALSNKEKEEDFLAMKGCKLPQRPKKRAKLVQKTLLLVSPGAWLSDLCKERYEVREKKTSKKTKRIEGNGEHGKRFGVKNRRRKNLNEIFKILARGRKVYFTFSLHFEMPLFITTG

SEQ ID NO: 29247 - DNA, 1266 bp, Arabidopsis thaliana
  misc_feature (1)..(1266): Ceres Seq. ID no. 4804174
atgagccaaaagaaactgacgaggactcaatcgtcgttactcagatcatctccgacgattcgatcgtcgatccaaagcctttcttcaatcactgaatgtgatgacttcaacgaaacctctcaccaccgccgtgaacaagatctcgaagccggtgagaaagaggaaaaacagaggaggagaaaaccggttaaatcattcgggtcaatgaaccgaattaaaccgggtctcgcattcacactcgcttgtctctctttcctgagtctctcatctttcttactgttcttcgttgatgagattttcacgtcggagaatctcttactaggtttgattttcgtcgctcttgctctgttcttcgcgtcgagaaacatggcggttattaaccaaaccgtaatcgcaatcaagcagattcgtgtaaggtctcgaatcaaacacaaaccgaaaccggttcaatggtacatcggagattcaaaaccggaaccgatcaaagaagaagaaacaagacttgtcgttaaagaaggagttcaattctttagcaatggagatttctacgaaggtgaattcaacagagggaagtgtaacggaagtggagtttattattattacgttaatggaagatatgaaggagattggatcaatggaaggtacgatggttatggaatcgagtgttggtctaaaggaagtaaatataaaggacagtataagcaaggacttagacatggttttggagtttactggttttacaccggagattcttactctggtgaatggtttaacggtcaaagccatggctttggagttcaaacttgtgctgatggaagctcttttgtcggagaattcaaatttggtgtcaaacatggacttggttcttaccatttcaggaatggagataagtatgcaggagagtattttggagacaagattcatggatttggtgtttaccatttcgctaatggtcactattacgaaggagcttggcatgaaggtcgtaaacaaggctatggcacgtatagatttagaaccggtgatatcaaatccggtgaatgggatgatggtaatctcgttaaccatcttcctttagactctgacccggttcgtagggcggttcagagtgcacgagaaagagcaaagaatggagtgaatcagagacggatcgatgagcaggtgatacgagctgtggctgcagctaataaagctgcgacggctgctagagttgcagctgtgaaagcagttcaaaatcaaatggatggtaaaatttgtgacaattaa

SEQ ID NO: 29248 - protein, 421 aa, Arabidopsis thaliana
  misc_feature (1)..(421): Ceres Seq. ID no. 4804175
MSQKKLTRTQSSLLRSSPTIRSSIQSLSSITECDDFNETSHHRREQDLEAGEKEEKQRRRKPVKSFGSMNRIKPGLAFTLACLSFLSLSSFLLFFVDEIFTSENLLLGLIFVALALFFASRNMAVINQTVIAIKQIRVRSRIKHKPKPVQWYIGDSKPEPIKEEETRLVVKEGVQFFSNGDFYEGEFNRGKCNGSGVYYYYVNGRYEGDWINGRYDGYGIECWSKGSKYKGQYKQGLRHGFGVYWFYTGDSYSGEWFNGQSHGFGVQTCADGSSFVGEFKFGVKHGLGSYHFRNGDKYAGEYFGDKIHGFGVYHFANGHYYEGAWHEGRKQGYGTYRFRTGDIKSGEWDDGNLVNHLPLDSDPVRRAVQSARERAKNGVNQRRIDEQVIRAVAAANKAATAARVAAVKAVQNQMDGKICDN

SEQ ID NO: 29249 - protein, 353 aa, Arabidopsis thaliana
  misc_feature (1)..(353): Ceres Seq. ID no. 4804176
MNRIKPGLAFTLACLSFLSLSSFLLFFVDEIFTSENLLLGLIFVALALFFASRNMAVINQTVIAIKQIRVRSRIKHKPKPVQWYIGDSKPEPIKEEETRLVVKEGVQFFSNGDFYEGEFNRGKCNGSGVYYYYVNGRYEGDWINGRYDGYGIECWSKGSKYKGQYKQGLRHGFGVYWFYTGDSYSGEWFNGQSHGFGVQTCADGSSFVGEFKFGVKHGLGSYHFRNGDKYAGEYFGDKIHGFGVYHFANGHYYEGAWHEGRKQGYGTYRFRTGDIKSGEWDDGNLVNHLPLDSDPVRRAVQSARERAKNGVNQRRIDEQVIRAVAAANKAATAARVAAVKAVQNQMDGKICDN

SEQ ID NO: 29250 - protein, 299 aa, Arabidopsis thaliana
  misc_feature (1)..(299): Ceres Seq. ID no. 4804177
MAVINQTVIAIKQIRVRSRIKHKPKPVQWYIGDSKPEPIKEEETRLVVKEGVQFFSNGDFYEGEFNRGKCNGSGVYYYYVNGRYEGDWINGRYDGYGIECWSKGSKYKGQYKQGLRHGFGVYWFYTGDSYSGEWFNGQSHGFGVQTCADGSSFVGEFKFGVKHGLGSYHFRNGDKYAGEYFGDKIHGFGVYHFANGHYYEGAWHEGRKQGYGTYRFRTGDIKSGEWDDGNLVNHLPLDSDPVRRAVQSARERAKNGVNQRRIDEQVIRAVAAANKAATAARVAAVKAVQNQMDGKICDN

SEQ ID NO: 29251 - DNA, 1089 bp, Arabidopsis thaliana
  misc_feature (1)..(1089): Ceres Seq. ID no. 4804200
atgtcttcttcttcttcaatggacttactcatgtgtctgcttcttctaatctctccggttgttctggccaagtcttcttccaccgtccctgctatctttaccttcggtgactctatttttgacgccggaaacaaccattacaacaaaaactgtaccgctcaggctgattttcctccttatggttcttcctttttccaccgtcctactgggaggttcaccaacggaagaaccgtcgctgacttcatctcggaatttgtaggccttccattacagaaaccattcttggaattgcagattcaaatcttgaatggaacttcaaacttttcaaatggcattaactttgctagtgctggtagtggtctcttgcttgataccaacaaatttatgggcgtgacaccgatccaaacccagctacagcaattccagacacttgtagagcaaaaccttatcgaaaaatctataatccaagagtctctcttcttattagaaactggttctaacgacatcttcaactacttcctcccattccgagctcctacactttctccagacgcttatgtgaacgcaatgttagaccaagtgaacaaaacgattgatcagatctacaaactaggcgcacgccgcatcgctttcttctccttaggtcctgtaggttgtgtccctgcaagagccatgcttcctaatgccccaaccaataaatgctttggtaagatgaatgttatggccaagatgtataataaaagacttgaagatatagtgaacataatccccactaagtaccctggagccattgcggtgtttggagctgtatatggtatcactcacagatttcaaacctaccctgcccgttacgggttttcggatgtttcaaacgcgtgttgtgggaacggtacactgggaggattgatgcagtgtggaagagaaggatacaagatttgcaataacccaaatgagtttctgttttgggatttttatcatcccacagaacacacttaccgtctcatgtcaaaagctttatggaatggaaacaaaaaccatatcagaccatttaatctcatggctcttgccaccaacaagatcacattttaa

SEQ ID NO: 29252 - protein, 362 aa, Arabidopsis thaliana
  misc_feature (1)..(362): Ceres Seq. ID no. 4804201
MSSSSSMDLLMCLLLLISPVVLAKSSSTVPAIFTFGDSIFDAGNNHYNKNCTAQADFPPYGSSFFHRPTGRFTNGRTVADFISEFVGLPLQKPFLELQIQILNGTSNFSNGINFASAGSGLLLDTNKFMGVTPIQTQLQQFQTLVEQNLIEKSIIQESLFLLETGSNDIFNYFLPFRAPTLSPDAYVNAMLDQVNKTIDQIYKLGARRIAFFSLGPVGCVPARAMLPNAPTNKCFGKMNVMAKMYNKRLEDIVNIIPTKYPGAIAVFGAVYGITHRFQTYPARYGFSDVSNACCGNGTLGGLMQCGREGYKICNNPNEFLFWDFYHPTEHTYRLMSKALWNGNKNHIRPFNLMALATNKITF

SEQ ID NO: 29253 - protein, 356 aa, Arabidopsis thaliana
  misc_feature (1)..(356): Ceres Seq. ID no. 4804202
MDLLMCLLLLISPVVLAKSSSTVPAIFTFGDSIFDAGNNHYNKNCTAQADFPPYGSSFFHRPTGRFTNGRTVADFISEFVGLPLQKPFLELQIQILNGTSNFSNGINFASAGSGLLLDTNKFMGVTPIQTQLQQFQTLVEQNLIEKSIIQESLFLLETGSNDIFNYFLPFRAPTLSPDAYVNAMLDQVNKTIDQIYKLGARRIAFFSLGPVGCVPARAMLPNAPTNKCFGKMNVMAKMYNKRLEDIVNIIPTKYPGAIAVFGAVYGITHRFQTYPARYGFSDVSNACCGNGTLGGLMQCGREGYKICNNPNEFLFWDFYHPTEHTYRLMSKALWNGNKNHIRPFNLMALATNKITF

SEQ ID NO: 29254 - protein, 352 aa, Arabidopsis thaliana
  misc_feature (1)..(352): Ceres Seq. ID no. 4804203
MCLLLLISPVVLAKSSSTVPAIFTFGDSIFDAGNNHYNKNCTAQADFPPYGSSFFHRPTGRFTNGRTVADFISEFVGLPLQKPFLELQIQILNGTSNFSNGINFASAGSGLLLDTNKFMGVTPIQTQLQQFQTLVEQNLIEKSIIQESLFLLETGSNDIFNYFLPFRAPTLSPDAYVNAMLDQVNKTIDQIYKLGARRIAFFSLGPVGCVPARAMLPNAPTNKCFGKMNVMAKMYNKRLEDIVNIIPTKYPGAIAVFGAVYGITHRFQTYPARYGFSDVSNACCGNGTLGGLMQCGREGYKICNNPNEFLFWDFYHPTEHTYRLMSKALWNGNKNHIRPFNLMALATNKITF

SEQ ID NO: 29255 - DNA, 1566 bp, Arabidopsis thaliana
  misc_feature (1)..(1566): Ceres Seq. ID no. 4804279
atggcagacgctggagataatcagagaagaagcgatgaaaaagagtcgatatcaactgaagaaacgaaggagaatgaagacttgggatctggaagaaacgacacaggtcatcatgtatacaacgagggacacgaagaggtactagagtatctgaaacaagagagactgaaagatgctgatatgcagaggaaaaggcatgaaacagagtcgaaatccattgagggcacaactcctgatattaggctgagtgattcagggaaagggtctgatgaaatacagaaagcagactcagtttacaaacgctctaacgctgacacgcgagtgagtctgccacaacagagacgactgaaagatgtggtggaggcgcatagggatagatctctggtttggggaggaagtgaacccaggatgagatttgatgaaagtactcagggttggagagatagtgactatgaatccaaatggaggataggagaggaagtgaatcccaaggggtatttgatgagagaacagagaggagacaagaaccagtgcgatggcccggtgaagagtgttggtgtctgcggtgtcgaaacggaggaagttgccgttacaatcatcctactcaacttccacagatttgcagggggatattgtaagttcggctcagtttgtggatttcaacacataagggacagggatgttgcagaacctatgtatgagaattggagttttgatgtgagaactcagaggagatatgaaatagagtactcaggattcaggccagagaagagggcaaaaactagtctggattccgtagagcctgattcaagaaaaagactggaaggtctagagaataaacgagagcaagagaatccgcaagaacctgaaaggcagaggactgaggctcaagacaatctgcaggaatttcgagagcaagagaatccgcaaaaccagatacagataaatactgaaagacagaggacaatggctcatgacaatctgcagatcgtttcggattctcgaatgcatgatccaagacgccatgatacagagttgagactcgaacgagagaagatggtaaacagagaacttgaaaagcagaggatagaacatctaatcgatccactagtgaggcgatacatgcaagcaaagagagataaagaagttgaacagagagagagagctagcattgagagccagaggatagtggctcaagagattctgcggcaacagagattacaggggatgcgagagaatcagaacgtggattctcgaatgcatgatccaagacgccatgatacagagttgagactcgaacgagagaagatggtaaacagagaacttgaaaagcagaggatagaacctctaatcggtccactagtgaggcgatacatgcaagcaaagagagataaagaagttgaacagagagagagagctagcattgagagccagaggatagtggctcaagagaatctgcgacaacagagattgcaggggatgcgagagaatcagaacgtggatgctcatgatcaagagaaaactcaggaactcggtttcaaaggaaaagagggagatggagtttaa

SEQ ID NO: 29256 - protein, 521 aa, Arabidopsis thaliana
  misc_feature (1)..(521): Ceres Seq. ID no. 4804280
MADAGDNQRRSDEKESISTEETKENEDLGSGRNDTGHHVYNEGHEEVLEYLKQERLKDADMQRKRHETESKSIEGTTPDIRLSDSGKGSDEIQKADSVYKRSNADTRVSLPQQRRLKDVVEAHRDRSLVWGGSEPRMRFDESTQGWRDSDYESKWRIGEEVNPKGYLMREQRGDKNQCDGPVKSVGVCGVETEEVAVTIILLNFHRFAGGYCKFGSVCGFQHIRDRDVAEPMYENWSFDVRTQRRYEIEYSGFRPEKRAKTSLDSVEPDSRKRLEGLENKREQENPQEPERQRTEAQDNLQEFREQENPQNQIQINTERQRTMAHDNLQIVSDSRMHDPRRHDTELRLEREKMVNRELEKQRIEHLIDPLVRRYMQAKRDKEVEQRERASIESQRIVAQEILRQQRLQGMRENQNVDSRMHDPRRHDTELRLEREKMVNRELEKQRIEPLIGPLVRRYMQAKRDKEVEQRERASIESQRIVAQENLRQQRLQGMRENQNVDAHDQEKTQELGFKGKEGDGV

SEQ ID NO: 29257 - protein, 461 aa, Arabidopsis thaliana
  misc_feature (1)..(461): Ceres Seq. ID no. 4804281
MQRKRHETESKSIEGTTPDIRLSDSGKGSDEIQKADSVYKRSNADTRVSLPQQRRLKDVVEAHRDRSLVWGGSEPRMRFDESTQGWRDSDYESKWRIGEEVNPKGYLMREQRGDKNQCDGPVKSVGVCGVETEEVAVTIILLNFHRFAGGYCKFGSVCGFQHIRDRDVAEPMYENWSFDVRTQRRYEIEYSGFRPEKRAKTSLDSVEPDSRKRLEGLENKREQENPQEPERQRTEAQDNLQEFREQENPQNQIQINTERQRTMAHDNLQIVSDSRMHDPRRHDTELRLEREKMVNRELEKQRIEHLIDPLVRRYMQAKRDKEVEQRERASIESQRIVAQEILRQQRLQGMRENQNVDSRMHDPRRHDTELRLEREKMVNRELEKQRIEPLIGPLVRRYMQAKRDKEVEQRERASIESQRIVAQENLRQQRLQGMRENQNVDAHDQEKTQELGFKGKEGDGV

SEQ ID NO: 29258 - protein, 385 aa, Arabidopsis thaliana
  misc_feature (1)..(385): Ceres Seq. ID no. 4804282
MRFDESTQGWRDSDYESKWRIGEEVNPKGYLMREQRGDKNQCDGPVKSVGVCGVETEEVAVTIILLNFHRFAGGYCKFGSVCGFQHIRDRDVAEPMYENWSFDVRTQRRYEIEYSGFRPEKRAKTSLDSVEPDSRKRLEGLENKREQENPQEPERQRTEAQDNLQEFREQENPQNQIQINTERQRTMAHDNLQIVSDSRMHDPRRHDTELRLEREKMVNRELEKQRIEHLIDPLVRRYMQAKRDKEVEQRERASIESQRIVAQEILRQQRLQGMRENQNVDSRMHDPRRHDTELRLEREKMVNRELEKQRIEPLIGPLVRRYMQAKRDKEVEQRERASIESQRIVAQENLRQQRLQGMRENQNVDAHDQEKTQELGFKGKEGDGV

SEQ ID NO: 29259 - DNA, 1668 bp, Arabidopsis thaliana
  misc_feature (1)..(1668): Ceres Seq. ID no. 4804359
atgtcgacatccatcggcgataatgagactggagctatagtttcaaacgagaatgtcgagttttccgtcgatttccgaggcaatccatctatcagatcctcttccggtgcatggaaatcttctggcttcaccatgtgtgcggaagttgccgagaaattcgcctacttcggtatcgcctcgaatctgataacctacttcaccgaggcgttaggagagtcgacggctgttgcagcgtcaaacgttaacctctggcttgggacggcagctttcttgcctctcatatggggttctatcgccgactcttttcttggccgtttccgtacaatcctcttaacctcttctttctatatcatgggacttgggctgcttacgttttcagcaacgattccttctctttgtaatgatcaagaaacacgtgagtcgtgcgtctctcaggtcaaagtaataatcttcttttgtgctctctacctaattgctttgggagaaggaggcttcaaggtatgtcttcgagcctttggagcagatcagtttgatgaacaagacccaaatgagtccaaagccaagagttcttactttaactggttgtattttgctatatcaatcggcatattgaccactcgtctggtcacaaattatgtccaagagaatctgagctgggctttaggatatgcgattccatgtctttctatgatgcttgctctattcttgttcttacttggaatcaaaacttaccgcttcagcaccggaggagaaggaagacagggcaaaaaacatgataacccttttgttagaattggccgtgtttttgtggctgcagctagaaaccggcgacaaactccttctgatacttgtcttcttctgcctaacgaaagcaccaagaaattcagattcttggacagagcggtgatttcatgcgattcatatgaagttgaggaagcaaaagctgtgttgagtctcattccaatttggttgtgtagtttggtgtttggcattgtgtttgcgcaatctcctactttctttacaaagcaaggatctacaatggatagatcaatctcatcaacactccaagtccctgcagctacactccaatgcttcataagcctagcaatcctcgtcttcatcccaatctacgaccgtttattcgtcccaatcgcacgatcaatcactcgtaaaccagcaggaattacaacccttcagagaatttccaccggcattttcctctcaattatttcaatggtaatagctgctttggtcgagatgaaaagactcaagactgctcgagatcatggattagttgattcgcctaaagccacggtcccgatgagcgtttgctggctgattccacaatacattctctttggagtctctgacgttttcactatggttggtttgcaagagtttttctacggagaagtcccgccacagcttaggagcatgggactggctctatatctaagcataatcggcataggaaacttcttgagtagcttcatggtatcagtcatcgaggaagccacaagccagtccggtcaagtgagctggttctctaataacctgaaccaggcacatcttgattacttctactggctacttgcttgtctcagctccctcgcctttatttttactgtctattttgccaagtcctatctctacaacagcccaaagtag

SEQ ID NO: 29260 - protein, 555 aa, Arabidopsis thaliana
  misc_feature (1)..(555): Ceres Seq. ID no. 4804360
MSTSIGDNETGAIVSNENVEFSVDFRGNPSIRSSSGAWKSSGFTMCAEVAEKFAYFGIASNLITYFTEALGESTAVAASNVNLWLGTAAFLPLIWGSIADSFLGRFRTILLTSSFYIMGLGLLTFSATIPSLCNDQETRESCVSQVKVIIFFCALYLIALGEGGFKVCLRAFGADQFDEQDPNESKAKSSYFNWLYFAISIGILTTRLVTNYVQENLSWALGYAIPCLSMMLALFLFLLGIKTYRFSTGGEGRQGKKHDNPFVRIGRVFVAAARNRRQTPSDTCLLLPNESTKKFRFLDRAVISCDSYEVEEAKAVLSLIPIWLCSLVFGIVFAQSPTFFTKQGSTMDRSISSTLQVPAATLQCFISLAILVFIPIYDRLFVPIARSITRKPAGITTLQRISTGIFLSIISMVIAALVEMKRLKTARDHGLVDSPKATVPMSVCWLIPQYILFGVSDVFTMVGLQEFFYGEVPPQLRSMGLALYLSIIGIGNFLSSFMVSVIEEATSQSGQVSWFSNNLNQAHLDYFYWLLACLSSLAFIFTVYFAKSYLYNSPK

SEQ ID NO: 29261 - protein, 511 aa, Arabidopsis thaliana
  misc_feature (1)..(511): Ceres Seq. ID no. 4804361
MCAEVAEKFAYFGIASNLITYFTEALGESTAVAASNVNLWLGTAAFLPLIWGSIADSFLGRFRTILLTSSFYIMGLGLLTFSATIPSLCNDQETRESCVSQVKVIIFFCALYLIALGEGGFKVCLRAFGADQFDEQDPNESKAKSSYFNWLYFAISIGILTTRLVTNYVQENLSWALGYAIPCLSMMLALFLFLLGIKTYRFSTGGEGRQGKKHDNPFVRIGRVFVAAARNRRQTPSDTCLLLPNESTKKFRFLDRAVISCDSYEVEEAKAVLSLIPIWLCSLVFGIVFAQSPTFFTKQGSTMDRSISSTLQVPAATLQCFISLAILVFIPIYDRLFVPIARSITRKPAGITTLQRISTGIFLSIISMVIAALVEMKRLKTARDHGLVDSPKATVPMSVCWLIPQYILFGVSDVFTMVGLQEFFYGEVPPQLRSMGLALYLSIIGIGNFLSSFMVSVIEEATSQSGQVSWFSNNLNQAHLDYFYWLLACLSSLAFIFTVYFAKSYLYNSPK

SEQ ID NO: 29262 - protein, 438 aa, Arabidopsis thaliana
  misc_feature (1)..(438): Ceres Seq. ID no. 4804362
MGLGLLTFSATIPSLCNDQETRESCVSQVKVIIFFCALYLIALGEGGFKVCLRAFGADQFDEQDPNESKAKSSYFNWLYFAISIGILTTRLVTNYVQENLSWALGYAIPCLSMMLALFLFLLGIKTYRFSTGGEGRQGKKHDNPFVRIGRVFVAAARNRRQTPSDTCLLLPNESTKKFRFLDRAVISCDSYEVEEAKAVLSLIPIWLCSLVFGIVFAQSPTFFTKQGSTMDRSISSTLQVPAATLQCFISLAILVFIPIYDRLFVPIARSITRKPAGITTLQRISTGIFLSIISMVIAALVEMKRLKTARDHGLVDSPKATVPMSVCWLIPQYILFGVSDVFTMVGLQEFFYGEVPPQLRSMGLALYLSIIGIGNFLSSFMVSVIEEATSQSGQVSWFSNNLNQAHLDYFYWLLACLSSLAFIFTVYFAKSYLYNSPK

SEQ ID NO: 29263 - DNA, 1791 bp, Arabidopsis thaliana
  misc_feature (1)..(1791): Ceres Seq. ID no. 4804398
atggatgttcatgatctatctgaagaagccaaaagaggagtaatacacacgtcggaggaatcattggacgatctttgtgttgattttcgaggtcggccatgcaggccaagcaagcatggtggtacaagagctgccctctttgttctaggcttccaagctttcgagatgatggcgatcgcagctgttggaaacaacttgatcacatacgtattcaatgagatgcatttccctttgtcaaaatccgcaaacctcgttactaacttcataggaacggtgtttctcctctcgcttcttggtggcttcctctctgattcataccttggaagctttcgtaccatgctcgtttttggcgtcatcgaaatctctgtattccaagctcatctcccagagctaagaccaccagaatgcaacatgaagagcaccacaatacattgcgtagaggcaaatggttacaaggcagccactctctacaccgcactctgtttagtggccttagggagcggctgcctcaaaccgaacatcatctctcacggtgcaaaccagtttcaaaggaaagatttgaggaagctctcgagtttcttcaatgcggcttacttcgccttctcaatgggtcagcttattgcactcacactcttagtttgggtgcaaacacattctggtatggacgttggttttggtgtctccgcggctgttatggccgcggggatgatcagccttgtcgctggaactagcttttataggaataaaccgcctagtggtagcatcttcacaccaattgctcaggtcttcgtagccgcgatcactaaacgaaaacagatttgcccatcaaacccaaacatggttcaccaaccttcaacggatcttgttcgtgtcaaacctctcctccattctaataaattcaggtttcttgacaaggcttgcatcaagacgcaaggcaaggcaatggagagtccatggagactctgcacaatcgaacaagtccatcaagtcaagatattgttatcagtcataccgatattcgcgtgtactatcatcttcaacaccatcttagctcagcttcaaactttctctgttcagcaaggaagttccatgaacacacacattacaaaaactttccaaattccaccagcttctcttcaagccattccttacatcattctcatcttctttgtgcctctctacgagacgttcttcgtcccactcgctagaaaactcacgggaaacgattctggaatctctcctcttcagagaattggcactggactgttcttagcaactttctcgatggttgcagccgctttagtggagaagaagagacgagaatcgttcttggaacagaacgtaatgctctcgatcttttggatcgcgccgcagtttctgatatttggtttatcagagatgtttacagccgttggattagtggagtttttttacaaacagtcttcacagagtatgcaatcttttctcacagcaatgacatactgttcttactctttcgggttttatcttagctctgttcttgtctcgaccgtgaatagagttacttctagtaatggttccgggaccaaagaaggttggttaggcgataatgaccttaacaaagatagattagatcacttttactggcttttagcttcattgagtttcatcaacttctttaattatcttttctggtcaagatggtattcgtgtgatccgtccgcgacacatcatagcgccgaagtcaatagcttggaggctttagaaaatggcgaaatcaaggattccacgacggagaagcctagaatttga

SEQ ID NO: 29264 - protein, 596 aa, Arabidopsis thaliana
  misc_feature (1)..(596): Ceres Seq. ID no. 4804399
MDVHDLSEEAKRGVIHTSEESLDDLCVDFRGRPCRPSKHGGTRAALFVLGFQAFEMMAIAAVGNNLITYVFNEMHFPLSKSANLVTNFIGTVFLLSLLGGFLSDSYLGSFRTMLVFGVIEISVFQAHLPELRPPECNMKSTTIHCVEANGYKAATLYTALCLVALGSGCLKPNIISHGANQFQRKDLRKLSSFFNAAYFAFSMGQLIALTLLVWVQTHSGMDVGFGVSAAVMAAGMISLVAGTSFYRNKPPSGSIFTPIAQVFVAAITKRKQICPSNPNMVHQPSTDLVRVKPLLHSNKFRFLDKACIKTQGKAMESPWRLCTIEQVHQVKILLSVIPIFACTIIFNTILAQLQTFSVQQGSSMNTHITKTFQIPPASLQAIPYIILIFFVPLYETFFVPLARKLTGNDSGISPLQRIGTGLFLATFSMVAAALVEKKRRESFLEQNVMLSIFWIAPQFLIFGLSEMFTAVGLVEFFYKQSSQSMQSFLTAMTYCSYSFGFYLSSVLVSTVNRVTSSNGSGTKEGWLGDNDLNKDRLDHFYWLLASLSFINFFNYLFWSRWYSCDPSATHHSAEVNSLEALENGEIKDSTTEKPRI

SEQ ID NO: 29265 - protein, 541 aa, Arabidopsis thaliana
  misc_feature (1)..(541): Ceres Seq. ID no. 4804400
MMAIAAVGNNLITYVFNEMHFPLSKSANLVTNFIGTVFLLSLLGGFLSDSYLGSFRTMLVFGVIEISVFQAHLPELRPPECNMKSTTIHCVEANGYKAATLYTALCLVALGSGCLKPNIISHGANQFQRKDLRKLSSFFNAAYFAFSMGQLIALTLLVWVQTHSGMDVGFGVSAAVMAAGMISLVAGTSFYRNKPPSGSIFTPIAQVFVAAITKRKQICPSNPNMVHQPSTDLVRVKPLLHSNKFRFLDKACIKTQGKAMESPWRLCTIEQVHQVKILLSVIPIFACTIIFNTILAQLQTFSVQQGSSMNTHITKTFQIPPASLQAIPYIILIFFVPLYETFFVPLARKLTGNDSGISPLQRIGTGLFLATFSMVAAALVEKKRRESFLEQNVMLSIFWIAPQFLIFGLSEMFTAVGLVEFFYKQSSQSMQSFLTAMTYCSYSFGFYLSSVLVSTVNRVTSSNGSGTKEGWLGDNDLNKDRLDHFYWLLASLSFINFFNYLFWSRWYSCDPSATHHSAEVNSLEALENGEIKDSTTEKPRI

SEQ ID NO: 29266 - protein, 540 aa, Arabidopsis thaliana
  misc_feature (1)..(540): Ceres Seq. ID no. 4804401
MAIAAVGNNLITYVFNEMHFPLSKSANLVTNFIGTVFLLSLLGGFLSDSYLGSFRTMLVFGVIEISVFQAHLPELRPPECNMKSTTIHCVEANGYKAATLYTALCLVALGSGCLKPNIISHGANQFQRKDLRKLSSFFNAAYFAFSMGQLIALTLLVWVQTHSGMDVGFGVSAAVMAAGMISLVAGTSFYRNKPPSGSIFTPIAQVFVAAITKRKQICPSNPNMVHQPSTDLVRVKPLLHSNKFRFLDKACIKTQGKAMESPWRLCTIEQVHQVKILLSVIPIFACTIIFNTILAQLQTFSVQQGSSMNTHITKTFQIPPASLQAIPYIILIFFVPLYETFFVPLARKLTGNDSGISPLQRIGTGLFLATFSMVAAALVEKKRRESFLEQNVMLSIFWIAPQFLIFGLSEMFTAVGLVEFFYKQSSQSMQSFLTAMTYCSYSFGFYLSSVLVSTVNRVTSSNGSGTKEGWLGDNDLNKDRLDHFYWLLASLSFINFFNYLFWSRWYSCDPSATHHSAEVNSLEALENGEIKDSTTEKPRI

SEQ ID NO: 29267 - DNA, 1839 bp, Arabidopsis thaliana
  misc_feature (1)..(1839): Ceres Seq. ID no. 4804543
atgcaatcacgtatagatttcttacttatccgatgcataaaggattcgtttttaccatatataaattgcagcatattctcagatgttgcgggagacatcacaattgttgttgatggagagtcctttttactccacaagtttcctttagtggctcggtgtggaaagattaggaaaatggtggcagagatgaaagaatcatcttcaaatctctcgcatacagagctccgagactttccaggtgggtctaagacgtttgaactcgccatgaagttctgctacggcatcaacttcgagatcactatctccaacgtggttgctatccgttgcgcagctggttatcttgagatgacagaggacttcaaagaagagaatttgattgcgcggaccgagacttacctcgagcaagtcgcgtttcgcagtcttgagaagtctgtggaagtcctctgttcctgtgagacgctttatcctcaagacattgctgaaactgctcacattcctgatagatgtgtggaggctatcgctgtgaatgcttgcagagaacagttagtgttagggctgtcacggctgaaccgaggcaccgagtcaggggaactcaagcgaggagatagtcctgagtggtggattgaagacctctctgctctgaggattgactattacgcacgagttgtctctgcgatggctagaacaggcttgcggtcagagagtatcataacgtctttgatgcattacgctcaagaatcgttgaaaggtattcgaaactgcaaggagcgaaccaagctcgattcgggtacttttgagaatgaacagaggaacgtccttgaagccattgttagtcttttcccaaatgacaatgtccctctgagtttcctctttggaatgttgagggtcgggattaccataaacgtagccatctcttgcaggctcgagctcgagcggagaatcgctcagcagctggaaacagtctccctcgatgatctactcatacctgttgtccgagacggagattccatgtacgatgtagacactgtccatagaatactcgtctgctttctgaagaaaatagaggaggaagaagaatatgatgaagattgctgttacgagaacgagaccgagaatcttactggttctatgtgccacagttcattgctgaaagtgggtcggatcatggatgcatacttggcagagattgcaccagacccgtgtctgagtcttcacaagttcatggctttgatagagatattgcctgattacgcacgtgtcatggatgatgggctatacagagccattgatatgtttctaaaggggcatccgtcgctgaacgaacaagaatgtaagagtctctgcaaattcatagacactcagaaactttcacaagaagcatgcaaccatgtggctcagaacgatcggctgccgatgcagatggtggtccgagtcctctactcagaacagctgcgtatgaagaatgtaatgtccggagagtcaggggaagggctattgctgtcttctcagaaacatagtagcgagaacccgagccgagctgtgtctccgagagacacttatgcctcactgaggagggagaatagagagctgaagctggagatttcaagggtgagagtgaggctgactgagttggagaaggagcagattttgatgaaacaggggatgatggagaagtcaggtcatggtggaacattgctgacctcactttccaaagggattgggaggatttcgatatttggtggaggacctacagaagggaagctgcggaatgctaaccgcaaatccaagtcaaggttggagagaaaaaccgttaggagccgaccagagtctatgttttag

SEQ ID NO: 29268 - protein, 612 aa, Arabidopsis thaliana
  misc_feature (1)..(612): Ceres Seq. ID no. 4804544
MQSRIDFLLIRCIKDSFLPYINCSIFSDVAGDITIVVDGESFLLHKFPLVARCGKIRKMVAEMKESSSNLSHTELRDFPGGSKTFELAMKFCYGINFEITISNVVAIRCAAGYLEMTEDFKEENLIARTETYLEQVAFRSLEKSVEVLCSCETLYPQDIAETAHIPDRCVEAIAVNACREQLVLGLSRLNRGTESGELKRGDSPEWWIEDLSALRIDYYARVVSAMARTGLRSESIITSLMHYAQESLKGIRNCKERTKLDSGTFENEQRNVLEAIVSLFPNDNVPLSFLFGMLRVGITINVAISCRLELERRIAQQLETVSLDDLLIPVVRDGDSMYDVDTVHRILVCFLKKIEEEEEYDEDCCYENETENLTGSMCHSSLLKVGRIMDAYLAEIAPDPCLSLHKFMALIEILPDYARVMDDGLYRAIDMFLKGHPSLNEQECKSLCKFIDTQKLSQEACNHVAQNDRLPMQMVVRVLYSEQLRMKNVMSGESGEGLLLSSQKHSSENPSRAVSPRDTYASLRRENRELKLEISRVRVRLTELEKEQILMKQGMMEKSGHGGTLLTSLSKGIGRISIFGGGPTEGKLRNANRKSKSRLERKTVRSRPESMF

SEQ ID NO: 29269 - protein, 554 aa, Arabidopsis thaliana
  misc_feature (1)..(554): Ceres Seq. ID no. 4804545
MVAEMKESSSNLSHTELRDFPGGSKTFELAMKFCYGINFEITISNVVAIRCAAGYLEMTEDFKEENLIARTETYLEQVAFRSLEKSVEVLCSCETLYPQDIAETAHIPDRCVEAIAVNACREQLVLGLSRLNRGTESGELKRGDSPEWWIEDLSALRIDYYARVVSAMARTGLRSESIITSLMHYAQESLKGIRNCKERTKLDSGTFENEQRNVLEAIVSLFPNDNVPLSFLFGMLRVGITINVAISCRLELERRIAQQLETVSLDDLLIPVVRDGDSMYDVDTVHRILVCFLKKIEEEEEYDEDCCYENETENLTGSMCHSSLLKVGRIMDAYLAEIAPDPCLSLHKFMALIEILPDYARVMDDGLYRAIDMFLKGHPSLNEQECKSLCKFIDTQKLSQEACNHVAQNDRLPMQMVVRVLYSEQLRMKNVMSGESGEGLLLSSQKHSSENPSRAVSPRDTYASLRRENRELKLEISRVRVRLTELEKEQILMKQGMMEKSGHGGTLLTSLSKGIGRISIFGGGPTEGKLRNANRKSKSRLERKTVRSRPESMF

SEQ ID NO: 29270 - protein, 550 aa, Arabidopsis thaliana
  misc_feature (1)..(550): Ceres Seq. ID no. 4804546
MKESSSNLSHTELRDFPGGSKTFELAMKFCYGINFEITISNVVAIRCAAGYLEMTEDFKEENLIARTETYLEQVAFRSLEKSVEVLCSCETLYPQDIAETAHIPDRCVEAIAVNACREQLVLGLSRLNRGTESGELKRGDSPEWWIEDLSALRIDYYARVVSAMARTGLRSESIITSLMHYAQESLKGIRNCKERTKLDSGTFENEQRNVLEAIVSLFPNDNVPLSFLFGMLRVGITINVAISCRLELERRIAQQLETVSLDDLLIPVVRDGDSMYDVDTVHRILVCFLKKIEEEEEYDEDCCYENETENLTGSMCHSSLLKVGRIMDAYLAEIAPDPCLSLHKFMALIEILPDYARVMDDGLYRAIDMFLKGHPSLNEQECKSLCKFIDTQKLSQEACNHVAQNDRLPMQMVVRVLYSEQLRMKNVMSGESGEGLLLSSQKHSSENPSRAVSPRDTYASLRRENRELKLEISRVRVRLTELEKEQILMKQGMMEKSGHGGTLLTSLSKGIGRISIFGGGPTEGKLRNANRKSKSRLERKTVRSRPESMF

SEQ ID NO: 29271 - DNA, 3588 bp, Arabidopsis thaliana
  misc_feature (1)..(3588): Ceres Seq. ID no. 4805151
atggaggattgttgtgatccacttctcgcaactgatgcttctccgcgacctgaaagcttctctcgctctgaaaaggatatagcatcgcgctcaaggactgtggcaatggcagatctggattcaaattgcgaattgagtaacgatgttgatatggaacaatcaagcccagatttgatgaaattggaacaatctagtgatcccgtagcgttagatggaaaagttgtattagggttttcattagcatctccagatctagtaaattgtggcgcttcacctgatttacctagaggtagctatgaagattcaccagaattttctaagaaaagaagattttctactgagctttctctagagaatggaattgatggttctactactactacaagacttggccgtaaaagccaagttgtgaaattctcagcaatctgtcagacatttggctatgagttgtctcctgagtcttcttttgagttaccttctccacctggagactttcgggagagtatgactcctgttataagtatcaactctggttctataagcacggatgtgactgtggaggatgtaactttcttgaaggatgagttttttagtggaggtgaaagtattacaactgatgctgttgttggcaatgaagatgagattttgttgtatcaaacagctcgtcttggtaatttcgcttacaagtttcagtcactggatcctggggactacttcatcgatttgcattttgctgaaatcgagttcactaagggtccaccgggagtcatatccggccttgatttgttttcgcaagtaggagcaaatacacctcttgtgatagaggatctaaggatgctcgtaggtagggaaggagagttatctatacgattagaaggagtgacaggagctgcaattctatgtggcatttctattaggaaagagacaacggctacctatgttgaagaaactggaatgctagcggtgaaaggttcaactgacactgttctgtcccagcaaactcaagaaaatcttgtctgcagggcagaagaagaggctgaagggatgagaagtgactgtgagcagcagaggaaagagatggaggatatgaagagaatggttgaggaacttaaactggagaaccaacaaaagactagagaatgcgaagaagcattgaattctctcagtgagattcaaaatgaactaatgcgcaagtcgatgcatgttggttctttggggacaagtcaaagagaagagcagatggttctcttcattaagagatttgacaagaaaattgaagtggagcaaattaagctgttggaggaggcaacaacatacaaacacctagtccaagatatcaacgagttcagttctcacatccagtctagagtgaagcaggacgcagaattgcatgaaaatctcaaagtcaaatttgtagcaggagaaaaagagaggaaagaactatataacaagatactagaactaaaaggtaacatcagggtcttttgcaggtgtcgaccactaaactttgaagaaactgaagcaggagtatcaatgggaattgatgttgagtcaaccaaaaatggagaggtcatagtgatgtcaaatggttttcccaaaaaaagcttcaagttcgattctgtttttggtcctaacgcttcccaagctgatgtttttgaagatactgctccctttgctacgtcagtcattgatggatacaacgtttgcatcttcgcctatggccagactggtactgggaaaacttttaccatggagggaactcaacatgaccgtggtgtaaactatagaacactggaaaatctgtttcgaataatcaaagcacgagaacaccgctacaattatgagatctcggtcagtgtattggaagtttacaatgagcagataagagatttgttggttccagcttcacagagtgcatctgcacccaaaagatttgagataaggcaactgagtgaaggaaaccaccacgtaccaggattggttgaagcacctgtgaaaagcatagaagaggtttgggatgtgttgaaaacaggaagtaatgcaagggctgttgggaaaacgacggctaatgagcacagtagccgatctcactgcattcactgcgtgatggtaaaaggtgagaatttgttgaatggtgaatgcacaaagagcaaactatggttagttgatttagcaggaagcgaacgggttgctaagacagaagtacaaggagaacggctgaaggagactcaaaacatcaacaaatcattatctgctcttggtgatgtcatattcgctcttgccaacaaaagctctcacattcctttcagaaactcaaaactcacgcacttgcttcaggattctctaggaggagattcaaaaaccctcatgtttgtacaaatcagtcctaacgagaatgatcaaagtgagacactatgctcactgaattttgctagcagagtgagagggatagagttgggacctgcaaagaagcagctagacaatactgaactcttgaaatacaagcaaatggttgagaaatggaagcaagatatgaaaggaaaagacgaacagattaggaaaatggaggaaacgatgtatggtttagaagcaaagattaaggaacgagacactaagaacaaaaccctccaagacaaggttaaagaacttgaatcacaactactggtggagaggaagcttgctcgtcaacatgtagacaccaagattgctgaacagcagacaaaacagcagactgaagatgaaaacaacacatcaaagaggccgccactgacaaatatactgttgggatcagcttcgaaagaaatggtgaatctaacacgtccatcactcttggagagcacgaccagctatgatctagctcctttacctagtggtgtccccaagtataatgatctctctgagaaggagaacaatccagaaatggctgatcaagtgcatctacctaataaaacaggaagattctctatctgtgcaaaacgtattccatcagctccagctccaagaaggagttctcttgccccaaccacatcaacttcgagagaaatggtatatctaacccgaccaccactctcagagagcacgaccagctatgatctacctcctttacccaatggtggcctcaagtacagtgacctcattgagaaggtgaacaatcaagaaatggctgagcaagtgcaaattcccaagagaataggagcaggaagatcctccatctgcgcaaaacgtattccaccagctccaagaaggaagagttttgcgccaatgccattcattccaatcacatcaacattaacttctcctgatgaaaagagtggcgctaaccaagtgctctgcaccagtcctaagctacatagaagtaatgggaagacgttgaccagcatactgagacgaagcatacaaaagagaatgcaaatgaaaccttccccgaggcagcaaccaatgagaagaggtggcggcattaatgtagggatggagagagttaggctgtctataggaaacagaggaaggttagctcatagagttctgctaaccaatgctcgtaaggcaggtctgaaggagacaccgcagaaacaagagcgatggatctga

SEQ ID NO: 29272 - protein, 1195 aa, Arabidopsis thaliana
  misc_feature (1)..(1195): Ceres Seq. ID no. 4805152
MEDCCDPLLATDASPRPESFSRSEKDIASRSRTVAMADLDSNCELSNDVDMEQSSPDLMKLEQSSDPVALDGKVVLGFSLASPDLVNCGASPDLPRGSYEDSPEFSKKRRFSTELSLENGIDGSTTTTRLGRKSQVVKFSAICQTFGYELSPESSFELPSPPGDFRESMTPVISINSGSISTDVTVEDVTFLKDEFFSGGESITTDAVVGNEDEILLYQTARLGNFAYKFQSLDPGDYFIDLHFAEIEFTKGPPGVISGLDLFSQVGANTPLVIEDLRMLVGREGELSIRLEGVTGAAILCGISIRKETTATYVEETGMLAVKGSTDTVLSQQTQENLVCRAEEEAEGMRSDCEQQRKEMEDMKRMVEELKLENQQKTRECEEALNSLSEIQNELMRKSMHVGSLGTSQREEQMVLFIKRFDKKIEVEQIKLLEEATTYKHLVQDINEFSSHIQSRVKQDAELHENLKVKFVAGEKERKELYNKILELKGNIRVFCRCRPLNFEETEAGVSMGIDVESTKNGEVIVMSNGFPKKSFKFDSVFGPNASQADVFEDTAPFATSVIDGYNVCIFAYGQTGTGKTFTMEGTQHDRGVNYRTLENLFRIIKAREHRYNYEISVSVLEVYNEQIRDLLVPASQSASAPKRFEIRQLSEGNHHVPGLVEAPVKSIEEVWDVLKTGSNARAVGKTTANEHSSRSHCIHCVMVKGENLLNGECTKSKLWLVDLAGSERVAKTEVQGERLKETQNINKSLSALGDVIFALANKSSHIPFRNSKLTHLLQDSLGGDSKTLMFVQISPNENDQSETLCSLNFASRVRGIELGPAKKQLDNTELLKYKQMVEKWKQDMKGKDEQIRKMEETMYGLEAKIKERDTKNKTLQDKVKELESQLLVERKLARQHVDTKIAEQQTKQQTEDENNTSKRPPLTNILLGSASKEMVNLTRPSLLESTTSYDLAPLPSGVPKYNDLSEKENNPEMADQVHLPNKTGRFSICAKRIPSAPAPRRSSLAPTTSTSREMVYLTRPPLSESTTSYDLPPLPNGGLKYSDLIEKVNNQEMAEQVQIPKRIGAGRSSICAKRIPPAPRRKSFAPMPFIPITSTLTSPDEKSGANQVLCTSPKLHRSNGKTLTSILRRSIQKRMQMKPSPRQQPMRRGGGINVGMERVRLSIGNRGRLAHRVLLTNARKAGLKETPQKQERWI

SEQ ID NO: 29273 - protein, 1160 aa, Arabidopsis thaliana
  misc_feature (1)..(1160): Ceres Seq. ID no. 4805153
MADLDSNCELSNDVDMEQSSPDLMKLEQSSDPVALDGKVVLGFSLASPDLVNCGASPDLPRGSYEDSPEFSKKRRFSTELSLENGIDGSTTTTRLGRKSQVVKFSAICQTFGYELSPESSFELPSPPGDFRESMTPVISINSGSISTDVTVEDVTFLKDEFFSGGESITTDAVVGNEDEILLYQTARLGNFAYKFQSLDPGDYFIDLHFAEIEFTKGPPGVISGLDLFSQVGANTPLVIEDLRMLVGREGELSIRLEGVTGAAILCGISIRKETTATYVEETGMLAVKGSTDTVLSQQTQENLVCRAEEEAEGMRSDCEQQRKEMEDMKRMVEELKLENQQKTRECEEALNSLSEIQNELMRKSMHVGSLGTSQREEQMVLFIKRFDKKIEVEQIKLLEEATTYKHLVQDINEFSSHIQSRVKQDAELHENLKVKFVAGEKERKELYNKILELKGNIRVFCRCRPLNFEETEAGVSMGIDVESTKNGEVIVMSNGFPKKSFKFDSVFGPNASQADVFEDTAPFATSVIDGYNVCIFAYGQTGTGKTFTMEGTQHDRGVNYRTLENLFRIIKAREHRYNYEISVSVLEVYNEQIRDLLVPASQSASAPKRFEIRQLSEGNHHVPGLVEAPVKSIEEVWDVLKTGSNARAVGKTTANEHSSRSHCIHCVMVKGENLLNGECTKSKLWLVDLAGSERVAKTEVQGERLKETQNINKSLSALGDVIFALANKSSHIPFRNSKLTHLLQDSLGGDSKTLMFVQISPNENDQSETLCSLNFASRVRGIELGPAKKQLDNTELLKYKQMVEKWKQDMKGKDEQIRKMEETMYGLEAKIKERDTKNKTLQDKVKELESQLLVERKLARQHVDTKIAEQQTKQQTEDENNTSKRPPLTNILLGSASKEMVNLTRPSLLESTTSYDLAPLPSGVPKYNDLSEKENNPEMADQVHLPNKTGRFSICAKRIPSAPAPRRSSLAPTTSTSREMVYLTRPPLSESTTSYDLPPLPNGGLKYSDLIEKVNNQEMAEQVQIPKRIGAGRSSICAKRIPPAPRRKSFAPMPFIPITSTLTSPDEKSGANQVLCTSPKLHRSNGKTLTSILRRSIQKRMQMKPSPRQQPMRRGGGINVGMERVRLSIGNRGRLAHRVLLTNARKAGLKETPQKQERWI

SEQ ID NO: 29274 - protein, 1145 aa, Arabidopsis thaliana
  misc_feature (1)..(1145): Ceres Seq. ID no. 4805154
MEQSSPDLMKLEQSSDPVALDGKVVLGFSLASPDLVNCGASPDLPRGSYEDSPEFSKKRRFSTELSLENGIDGSTTTTRLGRKSQVVKFSAICQTFGYELSPESSFELPSPPGDFRESMTPVISINSGSISTDVTVEDVTFLKDEFFSGGESITTDAVVGNEDEILLYQTARLGNFAYKFQSLDPGDYFIDLHFAEIEFTKGPPGVISGLDLFSQVGANTPLVIEDLRMLVGREGELSIRLEGVTGAAILCGISIRKETTATYVEETGMLAVKGSTDTVLSQQTQENLVCRAEEEAEGMRSDCEQQRKEMEDMKRMVEELKLENQQKTRECEEALNSLSEIQNELMRKSMHVGSLGTSQREEQMVLFIKRFDKKIEVEQIKLLEEATTYKHLVQDINEFSSHIQSRVKQDAELHENLKVKFVAGEKERKELYNKILELKGNIRVFCRCRPLNFEETEAGVSMGIDVESTKNGEVIVMSNGFPKKSFKFDSVFGPNASQADVFEDTAPFATSVIDGYNVCIFAYGQTGTGKTFTMEGTQHDRGVNYRTLENLFRIIKAREHRYNYEISVSVLEVYNEQIRDLLVPASQSASAPKRFEIRQLSEGNHHVPGLVEAPVKSIEEVWDVLKTGSNARAVGKTTANEHSSRSHCIHCVMVKGENLLNGECTKSKLWLVDLAGSERVAKTEVQGERLKETQNINKSLSALGDVIFALANKSSHIPFRNSKLTHLLQDSLGGDSKTLMFVQISPNENDQSETLCSLNFASRVRGIELGPAKKQLDNTELLKYKQMVEKWKQDMKGKDEQIRKMEETMYGLEAKIKERDTKNKTLQDKVKELESQLLVERKLARQHVDTKIAEQQTKQQTEDENNTSKRPPLTNILLGSASKEMVNLTRPSLLESTTSYDLAPLPSGVPKYNDLSEKENNPEMADQVHLPNKTGRFSICAKRIPSAPAPRRSSLAPTTSTSREMVYLTRPPLSESTTSYDLPPLPNGGLKYSDLIEKVNNQEMAEQVQIPKRIGAGRSSICAKRIPPAPRRKSFAPMPFIPITSTLTSPDEKSGANQVLCTSPKLHRSNGKTLTSILRRSIQKRMQMKPSPRQQPMRRGGGINVGMERVRLSIGNRGRLAHRVLLTNARKAGLKETPQKQERWI

SEQ ID NO: 29275 - DNA, 1029 bp, Arabidopsis thaliana
  misc_feature (1)..(1029): Ceres Seq. ID no. 4805407
atgaagcttcaaattctattgcttgctttggttttaatcgctgttgaagcgaatgcagtcaagcaagggataaacgcaacgatcccagcgctaatagtttttggagattcaataatggatacaggaaataacaataatcttccgactcttcttaaatgtaactttcctccatatggtaaagattatcctggaggcgacgccactggaagattttctgatggaagagttccttctgatcttattgcggaaaagttgggattggctaagacattaccagcatatatgaattcatatttgaagcctgaggatcttcttaaaggtgtaacatttgcatctcgaggaactggttatgatccattgacagcaaaaattatgtcagtgatatcggtatgggatcaactcatatatttcaaagaatatatatcaaagatcaagaggcatttcggagaagaaaaagccaaagatatcttggaacatagtttctttcttgtggtgtctagtagcaatgaccttgctcacacttatttagctcaagctcatagatatgaccgtacctcttatgccaatttcttggctgactctgctgtccatttcgtgagagaattacataagcttggagctcgaaaaattggagtgtttagtgcagtccccgttggttgtgttccattacaaagaacagtttttggaggtttttttacaagaggatgtaatgaacctctaaacaacatggcaaaacaattcaacgcaagactttctccagcattagattctttagataaagagttggatggtgttatcctttacattaatgtttatgatactctttttgacatgatccaacaccctaaaaaatacggatgttgcggtaaaggactgctcacaatatcctatttatgtaactcattgaacccatttacgtgttctaattcttcatcatacatattttgggatagctatcatccatctgaaagagcttatcaagttatcgtcgacaatttactcgataaatatttgagcaaagtctattga

SEQ ID NO: 29276 - protein, 342 aa, Arabidopsis thaliana
  misc_feature (1)..(342): Ceres Seq. ID no. 4805408
MKLQILLLALVLIAVEANAVKQGINATIPALIVFGDSIMDTGNNNNLPTLLKCNFPPYGKDYPGGDATGRFSDGRVPSDLIAEKLGLAKTLPAYMNSYLKPEDLLKGVTFASRGTGYDPLTAKIMSVISVWDQLIYFKEYISKIKRHFGEEKAKDILEHSFFLVVSSSNDLAHTYLAQAHRYDRTSYANFLADSAVHFVRELHKLGARKIGVFSAVPVGCVPLQRTVFGGFFTRGCNEPLNNMAKQFNARLSPALDSLDKELDGVILYINVYDTLFDMIQHPKKYGCCGKGLLTISYLCNSLNPFTCSNSSSYIFWDSYHPSERAYQVIVDNLLDKYLSKVY

SEQ ID NO: 29277 - protein, 304 aa, Arabidopsis thaliana
  misc_feature (1)..(304): Ceres Seq. ID no. 4805409
MDTGNNNNLPTLLKCNFPPYGKDYPGGDATGRFSDGRVPSDLIAEKLGLAKTLPAYMNSYLKPEDLLKGVTFASRGTGYDPLTAKIMSVISVWDQLIYFKEYISKIKRHFGEEKAKDILEHSFFLVVSSSNDLAHTYLAQAHRYDRTSYANFLADSAVHFVRELHKLGARKIGVFSAVPVGCVPLQRTVFGGFFTRGCNEPLNNMAKQFNARLSPALDSLDKELDGVILYINVYDTLFDMIQHPKKYGCCGKGLLTISYLCNSLNPFTCSNSSSYIFWDSYHPSERAYQVIVDNLLDKYLSKVY

SEQ ID NO: 29278 - protein, 248 aa, Arabidopsis thaliana
  misc_feature (1)..(248): Ceres Seq. ID no. 4805410
MNSYLKPEDLLKGVTFASRGTGYDPLTAKIMSVISVWDQLIYFKEYISKIKRHFGEEKAKDILEHSFFLVVSSSNDLAHTYLAQAHRYDRTSYANFLADSAVHFVRELHKLGARKIGVFSAVPVGCVPLQRTVFGGFFTRGCNEPLNNMAKQFNARLSPALDSLDKELDGVILYINVYDTLFDMIQHPKKYGCCGKGLLTISYLCNSLNPFTCSNSSSYIFWDSYHPSERAYQVIVDNLLDKYLSKVY

SEQ ID NO: 29279 - DNA, 3555 bp, Arabidopsis thaliana
  misc_feature (1)..(3555): Ceres Seq. ID no. 4805507
atggcgacagtgagtggaaggagacgcaaaaggaagatacaattaagcaagcttttcacattaacaggtgctaaagcttgtttcaagcctgaccattcgaaaattggacgatctggtttctctcgtgtggttttctgcaaccaacctgattcccctgaagctgaatcaaggaattactgtgacaattatgtgaggaccactaagtataccctcgccactttcctccctaaatcattgtttgagcagttcaggagagttgccaatttctacttccttgttgttgggatcttgtcttttactcctctggcgccatataccgctgtgagcgccattgttccgctgacgttcgtcattctcgctactatgtttaaagagggtgtagaagattggcgccggaaacagcaggatattgaagtgaataacagaaaagttagagtgcaccgaggcaatgggaattttgatcttagggaatggaagacactaagagttggggatatattgaaggtagagaaaaacgagttttttccggcagaccttgtcctgctttcttctagctacgaggatgctgtttgctatgtagagacaatgaaccttgacggggaaacaaatctgaaacttaaacaaggactagaagtaacattgtcattgcgtgaagagctcaatttcagggattttgaggcttttatcaaatgtgaggacccgaatgctaacttatactcgtttgttggtactatggaccttaagggagaaaagtaccctctctcaccacagcagcttcttctgaggggctcaaaactcaggaacacagactacatctatggggttgttatcttcacaggacctgatacaaaagttgtccagaattcaacagatcccccttctaagagaagcatgatcgagaggaagatggataagattatatacctgatgttccttatggtattttcattagcattttttggttcagttttatttggaatatggacgagagatgatttccagaatggcgtgatggaaagatggtatctgaaaccggatgattccagcatcttctttgacccaaagagggcgccaatggctgcaatatatcactttctaacggcgctaatgttaaatagttatttcattcctatatccttgtatgtgtcgatagagatcgttaaagttcttcagagtatcttcatcaatcaggatatccatatgtattatgaggaagctgacaaaccggcacatgcacgtacttccaatctgaatgaagaacttgggcaagtgggtacgatactttcagataagacaggaacattgacttgtaactccatggagttcattaagtgttctattgctgggacagcctatggacgtggtgttacagaggtggagatggctatggataagagaaaaggttctgctttggtgaatcagagcaatggaaatagtaccgaggatgctgttgctgcagaaccggctgtgaaaggattcaactttagagatgaaaggataatggatggaaactgggtcacggaaacgcatgctgatgtcattcagaaattctttcaattactggcagtatgtcatacagtcatacctgaagtggatgaagatacaggaaagatctcctacgaggctgaatcaccggatgaggcagcatttgttattgcagcaagggagcttgggtttgaatttttcactcgaactcaaacaacaatatccgtcagagagctagacctggtgactggggaaagagttgaaaggttgtatagtgtcctgaacgttcttgaattcagtagctcaaagaagaggatgtcagtaatagtgcaggatcaagatggcaaactacttttactttgtaaaggggcagacagtgtcatgtttgaaagactttccgaaagtggtagaaagtatgaaaaggaaacccgggaccatgtgaacgagtatgctgatgctggattgagaactttgatacttgcctatcgtgaactcgacgagaatgaatacgaggtattcactgagagaatcagtgaagcaaagaattcagttagtgctgatcgagaagcactgatagatgaagtaacagagaagattgagaaaaacttggttcttcttggagctactgctgttgaggataaacttcaaaatggggttcctgattgcattaataagcttgctcaagcaggaataaagatttgggttttgactggagacaagatggagactgccatcaatattggcttcgcttgtagtttgctcagacgagacatgaagcagataataattaacttggagactcctgaaatccagcagttggaaaaatccggagagaaagatgccattgcagctttaaaggaaaatgtactgcatcagataactagtggaaaggctcaactgaaagcgtctggtggaaacgctaaggcttttgctttaatcattgatgggaaatcacttgcttatgcattggaggaagatatgaaaggcatcttccttgagctggccattggttgtgcttcagtgatttgctgccgttcatcaccaaaacagaaggcactggtaacaagactagtcaaaactggaagtggtcagacgacactggcaattggcgatggcgcaaatgatgttggaatgcttcaggaagcagatataggagttgggatcagtggcgtggaaggaatgcaggctgtaatgtctagcgatattgccattgctcaattcagatacctggagcgtttgttactggtccatgggcactggtgttacagacggatctcaaaaatgatttgttatttcttctacaagaacatcacatttggtttcactctgttcttatatgaggcatacacatcattttcagcgacaccggcttacaatgactggtatctatctctatatagtgtctttttcacgtctcttcctgtaatttgtttgggcatcttcgaccaggatgtatctgcaccgttttgtctcaagttccccgtattgtaccaagaaggtgtacagaatctcctatttagttggcgccggatactaagctggatgttccatggcttctgcagcgcaataatcattttctttctgtgcaaaacctctcttgaatctcaagctttcaaccacgaagggaaaaccgcagggagagatattctagggggaacgatgtacacatgtgtggtgtgggttgtgagtttgcagatggtcttgacgatcagttacttcacattgatccaacatgttgtcgtttggggatccgttgttatatggtaccttttcctgatggtgtacggatcccttccaataagaatgtctacagatgcctatatggtcttccttgaagctcttgcacctgcgccttcgtactggatcaccactctctttgtagtgctatcgacaatgatgccttacttcatcttctctgctattcagatgaggtttttcccaatgtcacatggaaccgtacagctgcttagatacgaggatcagtgcagcaactctgggaactttgaaatggggaggcagggatcagtgaggcctacactggtcatgagatctcatcagccagaatcttga

SEQ ID NO: 29280 - protein, 1184 aa, Arabidopsis thaliana
  misc_feature (1)..(1184): Ceres Seq. ID no. 4805508
MATVSGRRRKRKIQLSKLFTLTGAKACFKPDHSKIGRSGFSRVVFCNQPDSPEAESRNYCDNYVRTTKYTLATFLPKSLFEQFRRVANFYFLVVGILSFTPLAPYTAVSAIVPLTFVILATMFKEGVEDWRRKQQDIEVNNRKVRVHRGNGNFDLREWKTLRVGDILKVEKNEFFPADLVLLSSSYEDAVCYVETMNLDGETNLKLKQGLEVTLSLREELNFRDFEAFIKCEDPNANLYSFVGTMDLKGEKYPLSPQQLLLRGSKLRNTDYIYGVVIFTGPDTKVVQNSTDPPSKRSMIERKMDKIIYLMFLMVFSLAFFGSVLFGIWTRDDFQNGVMERWYLKPDDSSIFFDPKRAPMAAIYHFLTALMLNSYFIPISLYVSIEIVKVLQSIFINQDIHMYYEEADKPAHARTSNLNEELGQVGTILSDKTGTLTCNSMEFIKCSIAGTAYGRGVTEVEMAMDKRKGSALVNQSNGNSTEDAVAAEPAVKGFNFRDERIMDGNWVTETHADVIQKFFQLLAVCHTVIPEVDEDTGKISYEAESPDEAAFVIAARELGFEFFTRTQTTISVRELDLVTGERVERLYSVLNVLEFSSSKKRMSVIVQDQDGKLLLLCKGADSVMFERLSESGRKYEKETRDHVNEYADAGLRTLILAYRELDENEYEVFTERISEAKNSVSADREALIDEVTEKIEKNLVLLGATAVEDKLQNGVPDCINKLAQAGIKIWVLTGDKMETAINIGFACSLLRRDMKQIIINLETPEIQQLEKSGEKDAIAALKENVLHQITSGKAQLKASGGNAKAFALIIDGKSLAYALEEDMKGIFLELAIGCASVICCRSSPKQKALVTRLVKTGSGQTTLAIGDGANDVGMLQEADIGVGISGVEGMQAVMSSDIAIAQFRYLERLLLVHGHWCYRRISKMICYFFYKNITFGFTLFLYEAYTSFSATPAYNDWYLSLYSVFFTSLPVICLGIFDQDVSAPFCLKFPVLYQEGVQNLLFSWRRILSWMFHGFCSAIIIFFLCKTSLESQAFNHEGKTAGRDILGGTMYTCVVWVVSLQMVLTISYFTLIQHVVVWGSVVIWYLFLMVYGSLPIRMSTDAYMVFLEALAPAPSYWITTLFVVLSTMMPYFIFSAIQMRFFPMSHGTVQLLRYEDQCSNSGNFEMGRQGSVRPTLVMRSHQPES

SEQ ID NO: 29281 - protein, 1063 aa, Arabidopsis thaliana
  misc_feature (1)..(1063): Ceres Seq. ID no. 4805509
MFKEGVEDWRRKQQDIEVNNRKVRVHRGNGNFDLREWKTLRVGDILKVEKNEFFPADLVLLSSSYEDAVCYVETMNLDGETNLKLKQGLEVTLSLREELNFRDFEAFIKCEDPNANLYSFVGTMDLKGEKYPLSPQQLLLRGSKLRNTDYIYGVVIFTGPDTKVVQNSTDPPSKRSMIERKMDKIIYLMFLMVFSLAFFGSVLFGIWTRDDFQNGVMERWYLKPDDSSIFFDPKRAPMAAIYHFLTALMLNSYFIPISLYVSIEIVKVLQSIFINQDIHMYYEEADKPAHARTSNLNEELGQVGTILSDKTGTLTCNSMEFIKCSIAGTAYGRGVTEVEMAMDKRKGSALVNQSNGNSTEDAVAAEPAVKGFNFRDERIMDGNWVTETHADVIQKFFQLLAVCHTVIPEVDEDTGKISYEAESPDEAAFVIAARELGFEFFTRTQTTISVRELDLVTGERVERLYSVLNVLEFSSSKKRMSVIVQDQDGKLLLLCKGADSVMFERLSESGRKYEKETRDHVNEYADAGLRTLILAYRELDENEYEVFTERISEAKNSVSADREALIDEVTEKIEKNLVLLGATAVEDKLQNGVPDCINKLAQAGIKIWVLTGDKMETAINIGFACSLLRRDMKQIIINLETPEIQQLEKSGEKDAIAALKENVLHQITSGKAQLKASGGNAKAFALIIDGKSLAYALEEDMKGIFLELAIGCASVICCRSSPKQKALVTRLVKTGSGQTTLAIGDGANDVGMLQEADIGVGISGVEGMQAVMSSDIAIAQFRYLERLLLVHGHWCYRRISKMICYFFYKNITFGFTLFLYEAYTSFSATPAYNDWYLSLYSVFFTSLPVICLGIFDQDVSAPFCLKFPVLYQEGVQNLLFSWRRILSWMFHGFCSAIIIFFLCKTSLESQAFNHEGKTAGRDILGGTMYTCVVWVVSLQMVLTISYFTLIQHVVVWGSVVIWYLFLMVYGSLPIRMSTDAYMVFLEALAPAPSYWITTLFVVLSTMMPYFIFSAIQMRFFPMSHGTVQLLRYEDQCSNSGNFEMGRQGSVRPTLVMRSHQPES

SEQ ID NO: 29282 - protein, 989 aa, Arabidopsis thaliana
  misc_feature (1)..(989): Ceres Seq. ID no. 4805510
MNLDGETNLKLKQGLEVTLSLREELNFRDFEAFIKCEDPNANLYSFVGTMDLKGEKYPLSPQQLLLRGSKLRNTDYIYGVVIFTGPDTKVVQNSTDPPSKRSMIERKMDKIIYLMFLMVFSLAFFGSVLFGIWTRDDFQNGVMERWYLKPDDSSIFFDPKRAPMAAIYHFLTALMLNSYFIPISLYVSIEIVKVLQSIFINQDIHMYYEEADKPAHARTSNLNEELGQVGTILSDKTGTLTCNSMEFIKCSIAGTAYGRGVTEVEMAMDKRKGSALVNQSNGNSTEDAVAAEPAVKGFNFRDERIMDGNWVTETHADVIQKFFQLLAVCHTVIPEVDEDTGKISYEAESPDEAAFVIAARELGFEFFTRTQTTISVRELDLVTGERVERLYSVLNVLEFSSSKKRMSVIVQDQDGKLLLLCKGADSVMFERLSESGRKYEKETRDHVNEYADAGLRTLILAYRELDENEYEVFTERISEAKNSVSADREALIDEVTEKIEKNLVLLGATAVEDKLQNGVPDCINKLAQAGIKIWVLTGDKMETAINIGFACSLLRRDMKQIIINLETPEIQQLEKSGEKDAIAALKENVLHQITSGKAQLKASGGNAKAFALIIDGKSLAYALEEDMKGIFLELAIGCASVICCRSSPKQKALVTRLVKTGSGQTTLAIGDGANDVGMLQEADIGVGISGVEGMQAVMSSDIAIAQFRYLERLLLVHGHWCYRRISKMICYFFYKNITFGFTLFLYEAYTSFSATPAYNDWYLSLYSVFFTSLPVICLGIFDQDVSAPFCLKFPVLYQEGVQNLLFSWRRILSWMFHGFCSAIIIFFLCKTSLESQAFNHEGKTAGRDILGGTMYTCVVWVVSLQMVLTISYFTLIQHVVVWGSVVIWYLFLMVYGSLPIRMSTDAYMVFLEALAPAPSYWITTLFVVLSTMMPYFIFSAIQMRFFPMSHGTVQLLRYEDQCSNSGNFEMGRQGSVRPTLVMRSHQPES

SEQ ID NO: 29283 - DNA, 1080 bp, Arabidopsis thaliana
  misc_feature (1)..(1080): Ceres Seq. ID no. 4806152
atgaattcctccgacgtcaacttctccctactccagagccaaccaaatgttccggctgaattcttctggccggagaaagacgttgccccttcagaaggcgacctcgatctcccaatcatcgacttgagtgggttcttgaatggcaatgaggccgagacgcaacttgcagctaaggcagtgaaaaaagcgtgcatggctcacggtacttttctagtggtcaatcatggcttcaagtcgggcttggctgaaaaggcgcttgagatatcgagtttgttctttgggctatccaaggatgagaagctaagggcttataggatcccggggaatatctctggctataccgcaggtcatagccaaagattttcctccaatcttccgtggaatgagactttgactttggccttcaaaaaggggccaccccatgttgttgaagactttctaacctcaaggctaggcaaccatcgtcaagagatcggtcaagtgtttcaagaattttgtgatgcaatgaatggactggttatggatttgatggagctattgggtataagtatgggtttaaaagacaggacatactaccggagattcttcgaagatggaagtggcatcttcagatgcaactattatccgccgtgcaagcagccagagaaagcccttggtgttggcccccataatgacccaacggctataaccgttttgcttcaagacgatgttgtgggcttagaggtctttgccgcaggtagttggcagaccgttcgccctcgtcctggtgctcttgtcgtcaacgttggagacaccttcatggcattgtcaaatggaaactacaggagttgttaccacagggcagtggtaaacaaggagaaagtgagaaggtcattagtattcttctcttgtcctagagaagataaaatcatcgtacctcctcctgaacttgtggaaggtgaagaagcttctagaaagtaccctgactttacttgggctcagcttcagaaatttacccagtccggctatcgagtcgataacaccactctccataacttctcttcgtggctcgtctctaactccgacaagaaatcaacttga

SEQ ID NO: 29284 - protein, 359 aa, Arabidopsis thaliana
  misc_feature (1)..(359): Ceres Seq. ID no. 4806153
MNSSDVNFSLLQSQPNVPAEFFWPEKDVAPSEGDLDLPIIDLSGFLNGNEAETQLAAKAVKKACMAHGTFLVVNHGFKSGLAEKALEISSLFFGLSKDEKLRAYRIPGNISGYTAGHSQRFSSNLPWNETLTLAFKKGPPHVVEDFLTSRLGNHRQEIGQVFQEFCDAMNGLVMDLMELLGISMGLKDRTYYRRFFEDGSGIFRCNYYPPCKQPEKALGVGPHNDPTAITVLLQDDVVGLEVFAAGSWQTVRPRPGALVVNVGDTFMALSNGNYRSCYHRAVVNKEKVRRSLVFFSCPREDKIIVPPPELVEGEEASRKYPDFTWAQLQKFTQSGYRVDNTTLHNFSSWLVSNSDKKST

SEQ ID NO: 29285 - protein, 295 aa, Arabidopsis thaliana
  misc_feature (1)..(295): Ceres Seq. ID no. 4806154
MAHGTFLVVNHGFKSGLAEKALEISSLFFGLSKDEKLRAYRIPGNISGYTAGHSQRFSSNLPWNETLTLAFKKGPPHVVEDFLTSRLGNHRQEIGQVFQEFCDAMNGLVMDLMELLGISMGLKDRTYYRRFFEDGSGIFRCNYYPPCKQPEKALGVGPHNDPTAITVLLQDDVVGLEVFAAGSWQTVRPRPGALVVNVGDTFMALSNGNYRSCYHRAVVNKEKVRRSLVFFSCPREDKIIVPPPELVEGEEASRKYPDFTWAQLQKFTQSGYRVDNTTLHNFSSWLVSNSDKKST

SEQ ID NO: 29286 - protein, 191 aa, Arabidopsis thaliana
  misc_feature (1)..(191): Ceres Seq. ID no. 4806155
MNGLVMDLMELLGISMGLKDRTYYRRFFEDGSGIFRCNYYPPCKQPEKALGVGPHNDPTAITVLLQDDVVGLEVFAAGSWQTVRPRPGALVVNVGDTFMALSNGNYRSCYHRAVVNKEKVRRSLVFFSCPREDKIIVPPPELVEGEEASRKYPDFTWAQLQKFTQSGYRVDNTTLHNFSSWLVSNSDKKST

SEQ ID NO: 29287 - DNA, 690 bp, Arabidopsis thaliana
  misc_feature (1)..(690): Ceres Seq. ID no. 4806277
atggaggaagaatacataagaataataagcataacaacaataagaataatctcatggggtctcattttcatccttgtaagacgaatcttctcaagctactcgttcgacttcagcacccgtatagtctcaacgcttcacgcaacaatcgctgtcactttagcaactctctcgattcaagattggtcttgtcctgtttgtcccattgcttctacatcgtctctccggcagatggaaacgttggcgttttcattgtcgtacatgatctacgatctcatttgtagccactttgatcaagtccttagcattgataatgcggttcatcattctgtttgcattcttggttttgtagctggacttttctaccaaaagtgtggatccgagatggtggcagcaatatggataacagagatctcaagtccgtttcttcacctcagggagattcttaaagagattggttgtagagacaccgacctaaatcttgcagccgatgtgttttttgcaacaattttctcggtggcccgaatggtgggtggaccttacctagtttacgtaacaataccagctgataatcccatcctcatcaaggtaatggggttgggattacaacttgtgagcgcgttctataaattactcaaaatgatgagatacaaatttattaaacgatcaatgtccaccaaaaaatcgacgtag

SEQ ID NO: 29288 - protein, 229 aa, Arabidopsis thaliana
  misc_feature (1)..(229): Ceres Seq. ID no. 4806278
MEEEYIRIISITTIRIISWGLIFILVRRIFSSYSFDFSTRIVSTLHATIAVTLATLSIQDWSCPVCPIASTSSLRQMETLAFSLSYMIYDLICSHFDQVLSIDNAVHHSVCILGFVAGLFYQKCGSEMVAAIWITEISSPFLHLREILKEIGCRDTDLNLAADVFFATIFSVARMVGGPYLVYVTIPADNPILIKVMGLGLQLVSAFYKLLKMMRYKFIKRSMSTKKST

SEQ ID NO: 29289 - protein, 153 aa, Arabidopsis thaliana
  misc_feature (1)..(153): Ceres Seq. ID no. 4806279
METLAFSLSYMIYDLICSHFDQVLSIDNAVHHSVCILGFVAGLFYQKCGSEMVAAIWITEISSPFLHLREILKEIGCRDTDLNLAADVFFATIFSVARMVGGPYLVYVTIPADNPILIKVMGLGLQLVSAFYKLLKMMRYKFIKRSMSTKKST

SEQ ID NO: 29290 - protein, 143 aa, Arabidopsis thaliana
  misc_feature (1)..(143): Ceres Seq. ID no. 4806280
MIYDLICSHFDQVLSIDNAVHHSVCILGFVAGLFYQKCGSEMVAAIWITEISSPFLHLREILKEIGCRDTDLNLAADVFFATIFSVARMVGGPYLVYVTIPADNPILIKVMGLGLQLVSAFYKLLKMMRYKFIKRSMSTKKST

SEQ ID NO: 29291 - DNA, 1125 bp, Arabidopsis thaliana
  misc_feature (1)..(1125): Ceres Seq. ID no. 4807665
atgggattaatggatacaagatgggaaaccatagttccatttattgttatggcgttgatggaggcatgtaccattgcactcaccatcttggctaagaccgcactgaccggtggcatgagccctttcgtgttcatcgtctacaccaacgctcttggctctctccttctcctcccttactctttctacttccatagagatgaaagtgacgatgaacccttcctcacgaaaccttcccttgttcgtatcttcctactcggttttacaggggtgtttttgttccagaacatggcatttttggggctaagttatagctctccaattgtggtatgtgccatgggcttgcagtcacctgctttctccttcttgctatctcttgctcttggtaaggaaggagggttaggatgggcaagtaagagaacaaaaggaagagtgataggcacgttgatatgtttcacaggagcctttgttgaagttatttacttaggaccttttataagaccttctcctccttcatccccaacctccaatttccttactacaatctcacactacttaactttcttcaaaaattctgacaattgggctctcggctctctcctccttgcatgcgccacgctctccatctccatttggaatattatacagttggatacagtccaaaaatatcctcaagtgatgaaagtagtgtctgcctatagtttagctgggacactccaatgtgcaatcttctcagcgttcatggagccagacctaagtgcatgggaactcaaacttaacatggacctatatctcattattgccacgggaatatttgggagcataatcagaacaagtgttcaagtgaagtgctccaaaatgaaggggccttattatgtgccactcttcaagccatttgggatcctttgggcttccatttttggcacaagcttctttgtcaatagtcttcactatggaagtgtgttaggagctgctatagcaggaactggatatctattgataatgtggagtcaagttcaaaaagatgatccaaatgaaacggtggagaaaaacgataatcatcaattggattcagatgaacagacaactccacttttgctcgcgaatggtgattttgatcaagtttaa

SEQ ID NO: 29292 - protein, 374 aa, Arabidopsis thaliana
  misc_feature (1)..(374): Ceres Seq. ID no. 4807666
MGLMDTRWETIVPFIVMALMEACTIALTILAKTALTGGMSPFVFIVYTNALGSLLLLPYSFYFHRDESDDEPFLTKPSLVRIFLLGFTGVFLFQNMAFLGLSYSSPIVVCAMGLQSPAFSFLLSLALGKEGGLGWASKRTKGRVIGTLICFTGAFVEVIYLGPFIRPSPPSSPTSNFLTTISHYLTFFKNSDNWALGSLLLACATLSISIWNIIQLDTVQKYPQVMKVVSAYSLAGTLQCAIFSAFMEPDLSAWELKLNMDLYLIIATGIFGSIIRTSVQVKCSKMKGPYYVPLFKPFGILWASIFGTSFFVNSLHYGSVLGAAIAGTGYLLIMWSQVQKDDPNETVEKNDNHQLDSDEQTTPLLLANGDFDQV

SEQ ID NO: 29293 - protein, 371 aa, Arabidopsis thaliana
  misc_feature (1)..(371): Ceres Seq. ID no. 4807667
MDTRWETIVPFIVMALMEACTIALTILAKTALTGGMSPFVFIVYTNALGSLLLLPYSFYFHRDESDDEPFLTKPSLVRIFLLGFTGVFLFQNMAFLGLSYSSPIVVCAMGLQSPAFSFLLSLALGKEGGLGWASKRTKGRVIGTLICFTGAFVEVIYLGPFIRPSPPSSPTSNFLTTISHYLTFFKNSDNWALGSLLLACATLSISIWNIIQLDTVQKYPQVMKVVSAYSLAGTLQCAIFSAFMEPDLSAWELKLNMDLYLIIATGIFGSIIRTSVQVKCSKMKGPYYVPLFKPFGILWASIFGTSFFVNSLHYGSVLGAAIAGTGYLLIMWSQVQKDDPNETVEKNDNHQLDSDEQTTPLLLANGDFDQV

SEQ ID NO: 29294 - protein, 358 aa, Arabidopsis thaliana
  misc_feature (1)..(358): Ceres Seq. ID no. 4807668
MALMEACTIALTILAKTALTGGMSPFVFIVYTNALGSLLLLPYSFYFHRDESDDEPFLTKPSLVRIFLLGFTGVFLFQNMAFLGLSYSSPIVVCAMGLQSPAFSFLLSLALGKEGGLGWASKRTKGRVIGTLICFTGAFVEVIYLGPFIRPSPPSSPTSNFLTTISHYLTFFKNSDNWALGSLLLACATLSISIWNIIQLDTVQKYPQVMKVVSAYSLAGTLQCAIFSAFMEPDLSAWELKLNMDLYLIIATGIFGSIIRTSVQVKCSKMKGPYYVPLFKPFGILWASIFGTSFFVNSLHYGSVLGAAIAGTGYLLIMWSQVQKDDPNETVEKNDNHQLDSDEQTTPLLLANGDFDQV

SEQ ID NO: 29295 - DNA, 858 bp, Arabidopsis thaliana
  misc_feature (1)..(858): Ceres Seq. ID no. 4808307
atggaacaatactgggctttatataaagaactaactctctctcatctccgtctgttatactgggaacggactcgacggagcatagtgaacgggaaaataactgtcaagcgagcgagagagaaagagaaatcagaaatggtggttatggattctccagtttcggggagaatggctgatcagaacatcgatcctaacaccacgacgagccctagtcctatagagaagcatgtttcggcgattaaggctatctccggcgacgagaaagctccgtcgaaggagaaaaagaactacgcgtcgaagaaatcaactaccgtaatccagaaatcgcactgtttccagaattcttggacattttggttcgataatccttcctccaaatcgaatcaagtcatatggggaagctctttgagatctttgtatacattcgctaccatcgaagagttctggagtctttacaataacattcatcctccaaccaagtgggtgtcagggtcggatctctactgcttcaaagataagattgaaccaaaatgggaagatcctatctgtgccaatggaggaaaatggactatgtttttccctagagctacactagaatctaattggcttaacacgttacttgcgttggttggtgagcaatttgaccaaggagatgagatctgtggagcagttttgaacttcagaacgagaggggacaggatctctctatggacaaagaaagctgcaaatgaggaggctcagctaagcattgggaagcagtggaaggaacttcttggctacaatgacacaatcggatttatagttcatgaggatgcaaagactcttgatcgtgatgctaaacgtcgatatactgtatga

SEQ ID NO: 29296 - protein, 285 aa, Arabidopsis thaliana
  misc_feature (1)..(285): Ceres Seq. ID no. 4808308
MEQYWALYKELTLSHLRLLYWERTRRSIVNGKITVKRAREKEKSEMVVMDSPVSGRMADQNIDPNTTTSPSPIEKHVSAIKAISGDEKAPSKEKKNYASKKSTTVIQKSHCFQNSWTFWFDNPSSKSNQVIWGSSLRSLYTFATIEEFWSLYNNIHPPTKWVSGSDLYCFKDKIEPKWEDPICANGGKWTMFFPRATLESNWLNTLLALVGEQFDQGDEICGAVLNFRTRGDRISLWTKKAANEEAQLSIGKQWKELLGYNDTIGFIVHEDAKTLDRDAKRRYTV

SEQ ID NO: 29297 - protein, 240 aa, Arabidopsis thaliana
  misc_feature (1)..(240): Ceres Seq. ID no. 4808309
MVVMDSPVSGRMADQNIDPNTTTSPSPIEKHVSAIKAISGDEKAPSKEKKNYASKKSTTVIQKSHCFQNSWTFWFDNPSSKSNQVIWGSSLRSLYTFATIEEFWSLYNNIHPPTKWVSGSDLYCFKDKIEPKWEDPICANGGKWTMFFPRATLESNWLNTLLALVGEQFDQGDEICGAVLNFRTRGDRISLWTKKAANEEAQLSIGKQWKELLGYNDTIGFIVHEDAKTLDRDAKRRYTV

SEQ ID NO: 29298 - protein, 237 aa, Arabidopsis thaliana
  misc_feature (1)..(237): Ceres Seq. ID no. 4808310
MDSPVSGRMADQNIDPNTTTSPSPIEKHVSAIKAISGDEKAPSKEKKNYASKKSTTVIQKSHCFQNSWTFWFDNPSSKSNQVIWGSSLRSLYTFATIEEFWSLYNNIHPPTKWVSGSDLYCFKDKIEPKWEDPICANGGKWTMFFPRATLESNWLNTLLALVGEQFDQGDEICGAVLNFRTRGDRISLWTKKAANEEAQLSIGKQWKELLGYNDTIGFIVHEDAKTLDRDAKRRYTV

SEQ ID NO: 29299 - DNA, 3165 bp, Arabidopsis thaliana
  misc_feature (1)..(3165): Ceres Seq. ID no. 4808406
atggaccgacgaagctggccgtggaagaaaaaggcgtctgataaatcaatcttagtgattgattctgcagctgatgcttctcattctcagattgataaggaagctattaagaagccaaagtatgtgcaaatatctgtggagcagtatacacatttcactggtttggaggaacaaataaagagttatgatgttcagattaaaggttacgatgttcaagttaaaacttatgagaatcaagttgagagttatgaggagcaagttaaggattttgaagaacagattgatgcttatgatgagaaggttcatgagtatgaagaacaagtgcagaaacttaatgaagatgttgaggatttgaatgaaaaactttctgttgctaatgaggaaattgttactaaagaggctttagtgaagcagcactctaaggttgctgaagatgctgtttcaggttgggaaaaagctgacgcggaagctttggcattgaaaaacacgttggagtctgttactctttcgaaactcacagctgaggatcgtgcagcgcatttagatggtgcattgaaagaatgtatgaggcagataaggaacttgaagaaagaccatgaagtgaaactgcatgatgttgctttaagcaagaccaagcaaattgaaaaaatgaccatggagtttgaaaagaggatgtgtgactatgaacaagagttacttaggtctgcagcggatagtgatgctttatctagaactttacaggagcggtccaacatgctggtaaaagtcagtgaggagaagtcaagagctgatgccgagatcgagaccctgaagagcaatctggaaatgtgtgaaagagaaataaagtctcttaagtatgaagtccatgttgtttctaaagagctagagatacgaaacgaagaaaagaacatgtgtattagatctgcagaatctgctaataagcaacacttggaaggagtaaagaaaatagctaagttggaagcagaatgccagagactgagaagtcttgtgagaaagaagttgccaggcccagctgcacttgctcaaatgaagcttgaggttgagaacttaggcagggatagtggtgatgcccgacaaaagagatctcctgtcaaggtctctagtccgtgcaagtcgccaggaggatactcgtcaactgggtctgagttctctctcgataatgcacagaaattccaaaaggaaaatgaatttctaacagagcgtttacttgcaatggaagaagagacaaaaatgctgaaagaagccttggcaaagcggaatagtgagttgttggagtcacggaatctttgtgctcagagcacaagtaagcttcaaagcttagaagctcaactgcagcaaaataattctcagaagtcctcacttgaagtgtgtccaaatctgaatacgagcaatccatcaagctcaatctctgtttctgaagatgggaatgacgactctggtagctgcagcggatctctgtcaacaaacccatcacaacagatcaagaaggagaaggacatggcagccttggagagggttgagagtgttaatagtcatgttgagcttatggatgattttctagaaatggagaagttagcttgtttaccaaatctatctagcagtaatggtagtatagattctaaagatggttcaggtgatcaaaagtcagaaatggtgattcttgatgctcataccgaccttgaggattccgatagaggtagtccagcagtgatgaaatttagatctagattatcaaaggttcttgaatctgtatctcctgatgctgacatacaaaagatagtgggggatataaaatgcattttgcaagatgtgaatgcttgtatggaccaggaaaagccttctgaggtgcatgttcatcctgaagaagtgtcagatttatgtccagaacaaaatctggttgaagattgtcatttggcagaacaaaagctgcagagcattcaccaagatttgaaaaatgctgtatctcggattcatgattttgttttgttgctaagaaatgaggtaaaggcaggtcaggacacctctattgagggaaatgattttgttgagctgattgagggcttctccgtcacgttcaaccatgttttaagcggtgataaaagtttggacgattttgtttcgaatcttgctaatgtcttcaacgaggcgatggagcgaaaggtaagttttaggggtctagcttcctctgaggttgaaactctgagtccagattgcatagacaaggttgcattacccgagagcaaggttgtagataaagattcatctcaggaaatatatcaaaatggatgtgtccacaacgagccaggggttccatgtgatgaaaacagagtttcagggtatgaatcagattccaaattacaggaaatagaagaactgagatcagaaaaagaaaagatggctgtggatatcgaggggctgaaatgtcagttacaagaatctgagcagctgttagctgacattagatcacagtttgattcagctcagaggtcaaacagattggcggatactcaactcagatgtatgactgagtcatatagatcacttgaatcacgtgcagctgatttagagatcgatgtgaaccagcttaaggaaaagatacagaagttggagaacgagcttgaggatgaaaaatgcaaccaccaagaagccattctgaggtgccatgaacttgaagaacatattcaaagacacagaaacacttctttggttgctgaggatgatgaagaagctgatatcaagagcaaacaggagagagagctatcggcagcagcagagaagttagccgagtgtcaagaaaccatatttgtgttggggaagcagctgaagtcatttcggccacaacctgagcaaatgaggtcaccacaaactcgaaatgagtcctattctgaagaagaggaactaggcaccaccactacctcagtcccaaagaactatgccgtagtagacgaaggagattcggttaacgaggttcctagatttatggagtctccaaaatgcccctctgattcagagactagcgatacgacgacatcgccatcacgagtgggttccaggctctcaaggtcaggttcatctactaacgcgaccccagagaaagcctctagaggaataagcaggttcttctcctccaaatcaggttattaa

SEQ ID NO: 29300 - protein, 1054 aa, Arabidopsis thaliana
  misc_feature (1)..(1054): Ceres Seq. ID no. 4808407
MDRRSWPWKKKASDKSILVIDSAADASHSQIDKEAIKKPKYVQISVEQYTHFTGLEEQIKSYDVQIKGYDVQVKTYENQVESYEEQVKDFEEQIDAYDEKVHEYEEQVQKLNEDVEDLNEKLSVANEEIVTKEALVKQHSKVAEDAVSGWEKADAEALALKNTLESVTLSKLTAEDRAAHLDGALKECMRQIRNLKKDHEVKLHDVALSKTKQIEKMTMEFEKRMCDYEQELLRSAADSDALSRTLQERSNMLVKVSEEKSRADAEIETLKSNLEMCEREIKSLKYEVHVVSKELEIRNEEKNMCIRSAESANKQHLEGVKKIAKLEAECQRLRSLVRKKLPGPAALAQMKLEVENLGRDSGDARQKRSPVKVSSPCKSPGGYSSTGSEFSLDNAQKFQKENEFLTERLLAMEEETKMLKEALAKRNSELLESRNLCAQSTSKLQSLEAQLQQNNSQKSSLEVCPNLNTSNPSSSISVSEDGNDDSGSCSGSLSTNPSQQIKKEKDMAALERVESVNSHVELMDDFLEMEKLACLPNLSSSNGSIDSKDGSGDQKSEMVILDAHTDLEDSDRGSPAVMKFRSRLSKVLESVSPDADIQKIVGDIKCILQDVNACMDQEKPSEVHVHPEEVSDLCPEQNLVEDCHLAEQKLQSIHQDLKNAVSRIHDFVLLLRNEVKAGQDTSIEGNDFVELIEGFSVTFNHVLSGDKSLDDFVSNLANVFNEAMERKVSFRGLASSEVETLSPDCIDKVALPESKVVDKDSSQEIYQNGCVHNEPGVPCDENRVSGYESDSKLQEIEELRSEKEKMAVDIEGLKCQLQESEQLLADIRSQFDSAQRSNRLADTQLRCMTESYRSLESRAADLEIDVNQLKEKIQKLENELEDEKCNHQEAILRCHELEEHIQRHRNTSLVAEDDEEADIKSKQERELSAAAEKLAECQETIFVLGKQLKSFRPQPEQMRSPQTRNESYSEEEELGTTTTSVPKNYAVVDEGDSVNEVPRFMESPKCPSDSETSDTTTSPSRVGSRLSRSGSSTNATPEKASRGISRFFSSKSGY

SEQ ID NO: 29301 - protein, 866 aa, Arabidopsis thaliana
  misc_feature (1)..(866): Ceres Seq. ID no. 4808408
MRQIRNLKKDHEVKLHDVALSKTKQIEKMTMEFEKRMCDYEQELLRSAADSDALSRTLQERSNMLVKVSEEKSRADAEIETLKSNLEMCEREIKSLKYEVHVVSKELEIRNEEKNMCIRSAESANKQHLEGVKKIAKLEAECQRLRSLVRKKLPGPAALAQMKLEVENLGRDSGDARQKRSPVKVSSPCKSPGGYSSTGSEFSLDNAQKFQKENEFLTERLLAMEEETKMLKEALAKRNSELLESRNLCAQSTSKLQSLEAQLQQNNSQKSSLEVCPNLNTSNPSSSISVSEDGNDDSGSCSGSLSTNPSQQIKKEKDMAALERVESVNSHVELMDDFLEMEKLACLPNLSSSNGSIDSKDGSGDQKSEMVILDAHTDLEDSDRGSPAVMKFRSRLSKVLESVSPDADIQKIVGDIKCILQDVNACMDQEKPSEVHVHPEEVSDLCPEQNLVEDCHLAEQKLQSIHQDLKNAVSRIHDFVLLLRNEVKAGQDTSIEGNDFVELIEGFSVTFNHVLSGDKSLDDFVSNLANVFNEAMERKVSFRGLASSEVETLSPDCIDKVALPESKVVDKDSSQEIYQNGCVHNEPGVPCDENRVSGYESDSKLQEIEELRSEKEKMAVDIEGLKCQLQESEQLLADIRSQFDSAQRSNRLADTQLRCMTESYRSLESRAADLEIDVNQLKEKIQKLENELEDEKCNHQEAILRCHELEEHIQRHRNTSLVAEDDEEADIKSKQERELSAAAEKLAECQETIFVLGKQLKSFRPQPEQMRSPQTRNESYSEEEELGTTTTSVPKNYAVVDEGDSVNEVPRFMESPKCPSDSETSDTTTSPSRVGSRLSRSGSSTNATPEKASRGISRFFSSKSGY

SEQ ID NO: 29302 - protein, 838 aa, Arabidopsis thaliana
  misc_feature (1)..(838): Ceres Seq. ID no. 4808409
MTMEFEKRMCDYEQELLRSAADSDALSRTLQERSNMLVKVSEEKSRADAEIETLKSNLEMCEREIKSLKYEVHVVSKELEIRNEEKNMCIRSAESANKQHLEGVKKIAKLEAECQRLRSLVRKKLPGPAALAQMKLEVENLGRDSGDARQKRSPVKVSSPCKSPGGYSSTGSEFSLDNAQKFQKENEFLTERLLAMEEETKMLKEALAKRNSELLESRNLCAQSTSKLQSLEAQLQQNNSQKSSLEVCPNLNTSNPSSSISVSEDGNDDSGSCSGSLSTNPSQQIKKEKDMAALERVESVNSHVELMDDFLEMEKLACLPNLSSSNGSIDSKDGSGDQKSEMVILDAHTDLEDSDRGSPAVMKFRSRLSKVLESVSPDADIQKIVGDIKCILQDVNACMDQEKPSEVHVHPEEVSDLCPEQNLVEDCHLAEQKLQSIHQDLKNAVSRIHDFVLLLRNEVKAGQDTSIEGNDFVELIEGFSVTFNHVLSGDKSLDDFVSNLANVFNEAMERKVSFRGLASSEVETLSPDCIDKVALPESKVVDKDSSQEIYQNGCVHNEPGVPCDENRVSGYESDSKLQEIEELRSEKEKMAVDIEGLKCQLQESEQLLADIRSQFDSAQRSNRLADTQLRCMTESYRSLESRAADLEIDVNQLKEKIQKLENELEDEKCNHQEAILRCHELEEHIQRHRNTSLVAEDDEEADIKSKQERELSAAAEKLAECQETIFVLGKQLKSFRPQPEQMRSPQTRNESYSEEEELGTTTTSVPKNYAVVDEGDSVNEVPRFMESPKCPSDSETSDTTTSPSRVGSRLSRSGSSTNATPEKASRGISRFFSSKSGY

SEQ ID NO: 29303 - DNA, 936 bp, Arabidopsis thaliana
  misc_feature (1)..(936): Ceres Seq. ID no. 4808982
atgggatcatttttaggacatgttttgccaggttttgccttcgtagcacttggcttatggcacttattcaacaacataaaactcttttgtctccatccaaacacattcagttcatcaacatggttcccaatttcaaagctcagacacttagagctctacttaatcatgctatcttcaacagcctccatatccatggagctcttcattggacctagaagacaccatccctttgacgtcgatggtaccatcccatcgaaccacctccacaacttcgaacattcttccatctccatgtccttcttagtctatgccgttttggcattagtcctggatcgagcacggcctagagccgccgcttctgaggggctaaccatgctagctgcagccgctgccttcagtcaacagctacttctctttcattttcactctaccgaccacatgggcgttgagggacaatatcatgtgattctacaagtcgttatcttcgtctctctccttaccacaatcatgggtattttcttgcccaagagttttctggtgagccttgtgagatcttcaagcatagcctttcaaggcgtgtggctcattgtgattggttgcatgctttacacaccgagtttgatccccaagggatgttatattcacgatgaaggaagacacataatagttaagtgttccaccgaagaagctcttcacagagctaagtcgttggtcaacctcgaattcagttggctatttgttacaaacacactatttgttgtcacactatatttgattctcgatcgtgtttacggtgaaaacgtagagtactctagtctaaccaccaataatcaaacataccaagatgatgaagaacaacacttcgaatcgaagtcgactcagaaaacaagttttgtccaaatgggtaaactcgttggacatgggcagaaaatgtga

SEQ ID NO: 29304 - protein, 311 aa, Arabidopsis thaliana
  misc_feature (1)..(311): Ceres Seq. ID no. 4808983
MGSFLGHVLPGFAFVALGLWHLFNNIKLFCLHPNTFSSSTWFPISKLRHLELYLIMLSSTASISMELFIGPRRHHPFDVDGTIPSNHLHNFEHSSISMSFLVYAVLALVLDRARPRAAASEGLTMLAAAAAFSQQLLLFHFHSTDHMGVEGQYHVILQVVIFVSLLTTIMGIFLPKSFLVSLVRSSSIAFQGVWLIVIGCMLYTPSLIPKGCYIHDEGRHIIVKCSTEEALHRAKSLVNLEFSWLFVTNTLFVVTLYLILDRVYGENVEYSSLTTNNQTYQDDEEQHFESKSTQKTSFVQMGKLVGHGQKM

SEQ ID NO: 29305 - protein, 256 aa, Arabidopsis thaliana
  misc_feature (1)..(256): Ceres Seq. ID no. 4808984
MLSSTASISMELFIGPRRHHPFDVDGTIPSNHLHNFEHSSISMSFLVYAVLALVLDRARPRAAASEGLTMLAAAAAFSQQLLLFHFHSTDHMGVEGQYHVILQVVIFVSLLTTIMGIFLPKSFLVSLVRSSSIAFQGVWLIVIGCMLYTPSLIPKGCYIHDEGRHIIVKCSTEEALHRAKSLVNLEFSWLFVTNTLFVVTLYLILDRVYGENVEYSSLTTNNQTYQDDEEQHFESKSTQKTSFVQMGKLVGHGQKM

SEQ ID NO: 29306 - protein, 247 aa, Arabidopsis thaliana
  misc_feature (1)..(247): Ceres Seq. ID no. 4808985
MELFIGPRRHHPFDVDGTIPSNHLHNFEHSSISMSFLVYAVLALVLDRARPRAAASEGLTMLAAAAAFSQQLLLFHFHSTDHMGVEGQYHVILQVVIFVSLLTTIMGIFLPKSFLVSLVRSSSIAFQGVWLIVIGCMLYTPSLIPKGCYIHDEGRHIIVKCSTEEALHRAKSLVNLEFSWLFVTNTLFVVTLYLILDRVYGENVEYSSLTTNNQTYQDDEEQHFESKSTQKTSFVQMGKLVGHGQKM

SEQ ID NO: 29307 - DNA, 2079 bp, Arabidopsis thaliana
  misc_feature (1)..(2079): Ceres Seq. ID no. 4809107
atggcaaaccggaatggtgaaccgggtttacagcaactctcaagtctgtttatccagcaacttcgaggtcgttcttcagtagtctctgttcgtgatgataggatgttggcaggttgttcgagttcatcattgttgtcgcctactcgaagattgaggagtgaagcagtagcagcaacatcagcaacagtatcagcgcattttcccatgaacacacagagattggacttaccatgcagtagtagcttctctcgcaaggaaactccttctagcagaccacttggaagaagcatctctcttgacaacagcaacaacaacaacaacaaaccgatcgagcgcaagacgaagaccagtggttgttcgcttaaacagaacataaagcttccacctttggcaacaacaagaggaaatggagaagggttttcttggaacaacgacaacaacaacagagggaagagtttgaagagattagctgaggaggacgagtcttgtttgagcagagcgaagaggacaaaatgcgaaaacgaaggtggtttctggtttgagcatttcactggccaggattcttcttcaccagcattacctttttctttgacttgttcaggtgatgatgaggaaaaggtttgctttgtgccaagtgaagtcatttctcagcctttaccaaactgggttgattcggtgattacggagctagctggtataggcgataaggacgttgagagtagccttcctgcagcagttaaggaagcatctggaggatcatctacaagcgcatcatccgagagtcgtagcttaagccatagagtaccagaacctacaaatggctcaaggaatccgtactcacaccgcggtgcaacagaggaaaggaccaccggaaacatcaacaacaacaacaacaggaacgatttgcagagggatttcgagcttgtcaatttgcttacgggatgcttagacgcgatcagatcaagaaacatagcagcgattaaccatttcattgcaagaaccggtgatcttgcttctcctagaggaagaacaccaatgactcgcctcatagcttactacattgaagctttggctctaagagtggcgcgtatgtggcctcacatcttccacatcgcaccccctcgtgaattcgatagaactgtcgaagatgaatcaggaaatgcattgaggttcttgaatcaagtaaccccaattccaaagttcattcatttcacagccaacgagatgttactcagagcatttgaagggaaagagagagttcacattattgacttcgacatcaagcaaggtttacagtggcctagcttcttccaaagcttagcttcgagaataaatccaccacaccatgtacgaatcactgggatcggagaatcgaaacttgagctaaacgaaaccggagatcgcctccacggatttgcagaggcgatgaatcttcaattcgagtttcatcctgtagttgatagactcgaagacgttagactatggatgcttcacgtcaaagaaggtgaatcagtagctgtaaactgtgtcatgcagatgcacaagacactctacgatggaaccggagcagcaattagggattttttgggtttaatcagaagcacaaacccaatagctctcgttcttgcggagcaagaagcagaacacaactcagagcaacttgagacacgagtttgtaactcgctaaagtactattcagctatgtttgatgcaattcacacgaatcttgctacagatagcttaatgagagtcaaagttgaggagatgttgtttgggagagagatcaggaacattgttgcgtgtgaaggaagtcatagacaagagaggcatgtgggttttcgtcattggaggaggatgttggagcagttagggtttcggagtcttggagtctcggagagagaggttttgcagagtaagatgttgcttaggatgtacggatctgataatgaagggtttttcaatgtggagaggagcgatgaagacaacggcggtgaaggcggacgcggcggtggagttactttacggtggtcggagcagccactttatacgatctcggcttggactaccggagggaattaa

SEQ ID NO: 29308 - protein, 692 aa, Arabidopsis thaliana
  misc_feature (1)..(692): Ceres Seq. ID no. 4809108
MANRNGEPGLQQLSSLFIQQLRGRSSVVSVRDDRMLAGCSSSSLLSPTRRLRSEAVAATSATVSAHFPMNTQRLDLPCSSSFSRKETPSSRPLGRSISLDNSNNNNNKPIERKTKTSGCSLKQNIKLPPLATTRGNGEGFSWNNDNNNRGKSLKRLAEEDESCLSRAKRTKCENEGGFWFEHFTGQDSSSPALPFSLTCSGDDEEKVCFVPSEVISQPLPNWVDSVITELAGIGDKDVESSLPAAVKEASGGSSTSASSESRSLSHRVPEPTNGSRNPYSHRGATEERTTGNINNNNNRNDLQRDFELVNLLTGCLDAIRSRNIAAINHFIARTGDLASPRGRTPMTRLIAYYIEALALRVARMWPHIFHIAPPREFDRTVEDESGNALRFLNQVTPIPKFIHFTANEMLLRAFEGKERVHIIDFDIKQGLQWPSFFQSLASRINPPHHVRITGIGESKLELNETGDRLHGFAEAMNLQFEFHPVVDRLEDVRLWMLHVKEGESVAVNCVMQMHKTLYDGTGAAIRDFLGLIRSTNPIALVLAEQEAEHNSEQLETRVCNSLKYYSAMFDAIHTNLATDSLMRVKVEEMLFGREIRNIVACEGSHRQERHVGFRHWRRMLEQLGFRSLGVSEREVLQSKMLLRMYGSDNEGFFNVERSDEDNGGEGGRGGGVTLRWSEQPLYTISAWTTGGN

SEQ ID NO: 29309 - protein, 658 aa, Arabidopsis thaliana
  misc_feature (1)..(658): Ceres Seq. ID no. 4809109
MLAGCSSSSLLSPTRRLRSEAVAATSATVSAHFPMNTQRLDLPCSSSFSRKETPSSRPLGRSISLDNSNNNNNKPIERKTKTSGCSLKQNIKLPPLATTRGNGEGFSWNNDNNNRGKSLKRLAEEDESCLSRAKRTKCENEGGFWFEHFTGQDSSSPALPFSLTCSGDDEEKVCFVPSEVISQPLPNWVDSVITELAGIGDKDVESSLPAAVKEASGGSSTSASSESRSLSHRVPEPTNGSRNPYSHRGATEERTTGNINNNNNRNDLQRDFELVNLLTGCLDAIRSRNIAAINHFIARTGDLASPRGRTPMTRLIAYYIEALALRVARMWPHIFHIAPPREFDRTVEDESGNALRFLNQVTPIPKFIHFTANEMLLRAFEGKERVHIIDFDIKQGLQWPSFFQSLASRINPPHHVRITGIGESKLELNETGDRLHGFAEAMNLQFEFHPVVDRLEDVRLWMLHVKEGESVAVNCVMQMHKTLYDGTGAAIRDFLGLIRSTNPIALVLAEQEAEHNSEQLETRVCNSLKYYSAMFDAIHTNLATDSLMRVKVEEMLFGREIRNIVACEGSHRQERHVGFRHWRRMLEQLGFRSLGVSEREVLQSKMLLRMYGSDNEGFFNVERSDEDNGGEGGRGGGVTLRWSEQPLYTISAWTTGGN

SEQ ID NO: 29310 - protein, 624 aa, Arabidopsis thaliana
  misc_feature (1)..(624): Ceres Seq. ID no. 4809110
MNTQRLDLPCSSSFSRKETPSSRPLGRSISLDNSNNNNNKPIERKTKTSGCSLKQNIKLPPLATTRGNGEGFSWNNDNNNRGKSLKRLAEEDESCLSRAKRTKCENEGGFWFEHFTGQDSSSPALPFSLTCSGDDEEKVCFVPSEVISQPLPNWVDSVITELAGIGDKDVESSLPAAVKEASGGSSTSASSESRSLSHRVPEPTNGSRNPYSHRGATEERTTGNINNNNNRNDLQRDFELVNLLTGCLDAIRSRNIAAINHFIARTGDLASPRGRTPMTRLIAYYIEALALRVARMWPHIFHIAPPREFDRTVEDESGNALRFLNQVTPIPKFIHFTANEMLLRAFEGKERVHIIDFDIKQGLQWPSFFQSLASRINPPHHVRITGIGESKLELNETGDRLHGFAEAMNLQFEFHPVVDRLEDVRLWMLHVKEGESVAVNCVMQMHKTLYDGTGAAIRDFLGLIRSTNPIALVLAEQEAEHNSEQLETRVCNSLKYYSAMFDAIHTNLATDSLMRVKVEEMLFGREIRNIVACEGSHRQERHVGFRHWRRMLEQLGFRSLGVSEREVLQSKMLLRMYGSDNEGFFNVERSDEDNGGEGGRGGGVTLRWSEQPLYTISAWTTGGN

SEQ ID NO: 29311 - DNA, 1272 bp, Arabidopsis thaliana
  misc_feature (1)..(1272): Ceres Seq. ID no. 4809357
atgaagaatccagaaaaacccttacttctgtttctaattttagcttcaagcttagcatcaatggcgactgcaaaatccacaatagagccttgctccagtaaagacacttgtaactcattgctaggctacactctctacaccgacctcaaagtcacagaagtcgcttctctcttccaagtagacccagtttcaatgcttttgtctaactccattgatatctcttacccagacgtcgagaaccatgtccttcccgctaagctcttcctcaagatcccaatcacttgctcctgtgtcgacggaatcagaaaatccctctcgactcattacaagactcgtacttctgacacactaggatcgattgctgactctgtttacggtggtctggtctctccggagcagattcaggtcgcgaattcagagactgacctttcggttctcgatgtaggtacaaagcttgtgattccattgccttgcgcttgcttcaatggtaccgatgaatctcttccggcgctttatctatcttacgttgtgagaggaatcgacactatggctggaatcgcaaagagattctcgacctctgttactgatttaacaaacgtgaatgctatgggagctcctgatatcaatcctggtgatatcctcgctgtcccattgctagcttgtagttcaaatttccccaaatacgctacggattacggattaatcattccaaatggaagctatgctctcactgcaggccactgtgtacaatgcagctgtgttctcggaagccgaagtatgtattgtgagcctgcttctatatcagtctcttgttccagtatgagatgtagaaacagcaacttcatgcttggtaacattacttcgcagcagagtagctccggttgtaaacttactacttgtagttacaacggtttcgctagcggcactatcttgaccacgttgtccatgtctcttcaacctcgatgccctggaccgcaacaattagcaccgcttatagccccgcctgataatgttccaaaggaactgatgtatctaccttcaccttcaccttcgccatcaccagagtttgatgatattgctggtggaggatcatctatagccgcagtccccgcggcttcacctggaggagctacggtttcttcaagcaattcaatcccgggtaatccagctaatggtccaggcggaagtatttctatagcttcttgtccattgagctattactcattcattgcgttactcatccccattggttcttgcttttttgttttctaa

SEQ ID NO: 29312 - protein, 423 aa, Arabidopsis thaliana
  misc_feature (1)..(423): Ceres Seq. ID no. 4809358
MKNPEKPLLLFLILASSLASMATAKSTIEPCSSKDTCNSLLGYTLYTDLKVTEVASLFQVDPVSMLLSNSIDISYPDVENHVLPAKLFLKIPITCSCVDGIRKSLSTHYKTRTSDTLGSIADSVYGGLVSPEQIQVANSETDLSVLDVGTKLVIPLPCACFNGTDESLPALYLSYVVRGIDTMAGIAKRFSTSVTDLTNVNAMGAPDINPGDILAVPLLACSSNFPKYATDYGLIIPNGSYALTAGHCVQCSCVLGSRSMYCEPASISVSCSSMRCRNSNFMLGNITSQQSSSGCKLTTCSYNGFASGTILTTLSMSLQPRCPGPQQLAPLIAPPDNVPKELMYLPSPSPSPSPEFDDIAGGGSSIAAVPAASPGGATVSSSNSIPGNPANGPGGSISIASCPLSYYSFIALLIPIGSCFFVF

SEQ ID NO: 29313 - protein, 403 aa, Arabidopsis thaliana
  misc_feature (1)..(403): Ceres Seq. ID no. 4809359
MATAKSTIEPCSSKDTCNSLLGYTLYTDLKVTEVASLFQVDPVSMLLSNSIDISYPDVENHVLPAKLFLKIPITCSCVDGIRKSLSTHYKTRTSDTLGSIADSVYGGLVSPEQIQVANSETDLSVLDVGTKLVIPLPCACFNGTDESLPALYLSYVVRGIDTMAGIAKRFSTSVTDLTNVNAMGAPDINPGDILAVPLLACSSNFPKYATDYGLIIPNGSYALTAGHCVQCSCVLGSRSMYCEPASISVSCSSMRCRNSNFMLGNITSQQSSSGCKLTTCSYNGFASGTILTTLSMSLQPRCPGPQQLAPLIAPPDNVPKELMYLPSPSPSPSPEFDDIAGGGSSIAAVPAASPGGATVSSSNSIPGNPANGPGGSISIASCPLSYYSFIALLIPIGSCFFVF

SEQ ID NO: 29314 - protein, 359 aa, Arabidopsis thaliana
  misc_feature (1)..(359): Ceres Seq. ID no. 4809360
MLLSNSIDISYPDVENHVLPAKLFLKIPITCSCVDGIRKSLSTHYKTRTSDTLGSIADSVYGGLVSPEQIQVANSETDLSVLDVGTKLVIPLPCACFNGTDESLPALYLSYVVRGIDTMAGIAKRFSTSVTDLTNVNAMGAPDINPGDILAVPLLACSSNFPKYATDYGLIIPNGSYALTAGHCVQCSCVLGSRSMYCEPASISVSCSSMRCRNSNFMLGNITSQQSSSGCKLTTCSYNGFASGTILTTLSMSLQPRCPGPQQLAPLIAPPDNVPKELMYLPSPSPSPSPEFDDIAGGGSSIAAVPAASPGGATVSSSNSIPGNPANGPGGSISIASCPLSYYSFIALLIPIGSCFFVF

SEQ ID NO: 29315 - DNA, 1692 bp, Arabidopsis thaliana
  misc_feature (1)..(1692): Ceres Seq. ID no. 4811190
atggatttagaacagaagacaagaggacttagcaagtcatgtgcccttctcatagtgattgcgggaatggagagatatgcattcaaaggagttgcatcaaacttagtgacatatctaacagatgtagtgaagatgagtaattcaagagcagccaaaactgttaacacttgggctggtttcacttctatgttgcctctcttctctgctcctttggctgatacttattgggacagattcttcaccatccttgcttcttcttccgtctactttgtgggactagtgggattgacatggacggcatttgctgggtcacgttcagctactaagactatctcttcttactttctctactcttcactatgtcttgtctcaatcggtttaggcgtcttaaacccttctcttcaagcctttggtgcagaccaactcgaccacgacctcgataagaatttcgatctttcctcgggtgatcaaaaggacgcgaaagctacccgaaagactcagtttttccaattgtggtactttggcgtctgcaccggcagccttatgggtgtcacagtcatggcttatattcaagacacttttggttgggttctcggtttcgccattcctggtatcgtgatattcctgtcgattttggtgttcatgtcgggttgtggaatttatgtttatgctccgggcgcccgtctgaagaagaaaacaactactacaccttttgagaagattcttaaattcattaaagggagagtagtgaagcagagaagcatatatacacttgcagatgagaaagatttggatgctatggagcttgagctagaggagaggcctctctgtaaatgtgagaccgaagacattgagactccttcaacaacctccaaaggattggaagatgacgagagctcgaaaacggttttctctggaattgataatgttaagttagtgattcgccttttccccatatggatgatgcttctcatgttcgcggttatcttccagctaccagcaacctttttcaccaaacaaggtgtgactatgaagagaaacattgggtccaacttcaaaatcccacctgcaaccctgcaaagcacgatcacattatcaatcatcctgcttatgccattatatgataagattttgatacctattaccaagagaatcaagaaaaacggtacaggtatctctgtgatggagagaatgggagtcggaatgtttctatccatcattgccattgttattgcggcaatagtcgaaaggaaaagactagccataagccaaaagatgaagactttacctgattatgatccagaaaccgtcccactgagcatcttctggctgctgcctcagtacatcctcttgggaatctcagatatattcacagtcgttgggatgcaagagtttttctacagtgaggttcctgtaagaatgagaacaatgggatttgctctctacacaagtgtttttggtgttggaagctttgtgagcgccgcactgatctcaattgtcgaggcttactcgagctcaacaggtgaccgacaaaactggtttgcagatgatatgtcggaagctcggcttgacaaatactactggcttcttgctcttacaagtacaataagctttgtagtctacatatttctatgcaagtttttcaagagtagcagtgatcaaggcgatgaaaaagaagaagcccctaaatga

SEQ ID NO: 29316 - protein, 563 aa, Arabidopsis thaliana
  misc_feature (1)..(563): Ceres Seq. ID no. 4811191
MDLEQKTRGLSKSCALLIVIAGMERYAFKGVASNLVTYLTDVVKMSNSRAAKTVNTWAGFTSMLPLFSAPLADTYWDRFFTILASSSVYFVGLVGLTWTAFAGSRSATKTISSYFLYSSLCLVSIGLGVLNPSLQAFGADQLDHDLDKNFDLSSGDQKDAKATRKTQFFQLWYFGVCTGSLMGVTVMAYIQDTFGWVLGFAIPGIVIFLSILVFMSGCGIYVYAPGARLKKKTTTTPFEKILKFIKGRVVKQRSIYTLADEKDLDAMELELEERPLCKCETEDIETPSTTSKGLEDDESSKTVFSGIDNVKLVIRLFPIWMMLLMFAVIFQLPATFFTKQGVTMKRNIGSNFKIPPATLQSTITLSIILLMPLYDKILIPITKRIKKNGTGISVMERMGVGMFLSIIAIVIAAIVERKRLAISQKMKTLPDYDPETVPLSIFWLLPQYILLGISDIFTVVGMQEFFYSEVPVRMRTMGFALYTSVFGVGSFVSAALISIVEAYSSSTGDRQNWFADDMSEARLDKYYWLLALTSTISFVVYIFLCKFFKSSSDQGDEKEEAPK

SEQ ID NO: 29317 - protein, 541 aa, Arabidopsis thaliana
  misc_feature (1)..(541): Ceres Seq. ID no. 4811192
MERYAFKGVASNLVTYLTDVVKMSNSRAAKTVNTWAGFTSMLPLFSAPLADTYWDRFFTILASSSVYFVGLVGLTWTAFAGSRSATKTISSYFLYSSLCLVSIGLGVLNPSLQAFGADQLDHDLDKNFDLSSGDQKDAKATRKTQFFQLWYFGVCTGSLMGVTVMAYIQDTFGWVLGFAIPGIVIFLSILVFMSGCGIYVYAPGARLKKKTTTTPFEKILKFIKGRVVKQRSIYTLADEKDLDAMELELEERPLCKCETEDIETPSTTSKGLEDDESSKTVFSGIDNVKLVIRLFPIWMMLLMFAVIFQLPATFFTKQGVTMKRNIGSNFKIPPATLQSTITLSIILLMPLYDKILIPITKRIKKNGTGISVMERMGVGMFLSIIAIVIAAIVERKRLAISQKMKTLPDYDPETVPLSIFWLLPQYILLGISDIFTVVGMQEFFYSEVPVRMRTMGFALYTSVFGVGSFVSAALISIVEAYSSSTGDRQNWFADDMSEARLDKYYWLLALTSTISFVVYIFLCKFFKSSSDQGDEKEEAPK

SEQ ID NO: 29318 - protein, 519 aa, Arabidopsis thaliana
  misc_feature (1)..(519): Ceres Seq. ID no. 4811193
MSNSRAAKTVNTWAGFTSMLPLFSAPLADTYWDRFFTILASSSVYFVGLVGLTWTAFAGSRSATKTISSYFLYSSLCLVSIGLGVLNPSLQAFGADQLDHDLDKNFDLSSGDQKDAKATRKTQFFQLWYFGVCTGSLMGVTVMAYIQDTFGWVLGFAIPGIVIFLSILVFMSGCGIYVYAPGARLKKKTTTTPFEKILKFIKGRVVKQRSIYTLADEKDLDAMELELEERPLCKCETEDIETPSTTSKGLEDDESSKTVFSGIDNVKLVIRLFPIWMMLLMFAVIFQLPATFFTKQGVTMKRNIGSNFKIPPATLQSTITLSIILLMPLYDKILIPITKRIKKNGTGISVMERMGVGMFLSIIAIVIAAIVERKRLAISQKMKTLPDYDPETVPLSIFWLLPQYILLGISDIFTVVGMQEFFYSEVPVRMRTMGFALYTSVFGVGSFVSAALISIVEAYSSSTGDRQNWFADDMSEARLDKYYWLLALTSTISFVVYIFLCKFFKSSSDQGDEKEEAPK

SEQ ID NO: 29319 - DNA, 915 bp, Arabidopsis thaliana
  misc_feature (1)..(915): Ceres Seq. ID no. 4811427
atgatgaaaggaagcaaggcgaatctctctgccttagcggagaaatgcaaaactgtaatcgtttcgaactggcaagggtacctaaataccgtcaaacctgaagataaagctagtataatacatacttcaaagattaagtatgtgatgagaagaggaaagccatatctctgggtaccagaaagtgaaccacacaatgtcaacataatgtttgatgaacgtggatccttttctattgcccatccgtatcctggtccccttgcagctttattcaagtctataggaaagcttccagaaagggttgcttttactggagagattgttcctgttaaagagaaaagggttgatgcggtgaagaaatatgtcgaggaagctatacagtcagagatgaaagcgattagcgataccccaaattctgtccgtagtattttgaattcttccgatcagatgtatgcctcccggtgtgacagtcttagagccctgatcaatgatgcaaaggaaaaatacgttatctataagttcgttccaagctcatgtatgtttattgacccaaatggtacgaaagaaatagacttgaaggttttggaactgtcaaaaccagatccattagggacttggtcgacaaaacttgtggatggaatcaataagaacgaatcaagaagacgagctttgattcttttctgtttatattttcttgatataaacgcaagggatgcttatatggtatcagtggataggaaaggtttccacttgttggggaaggtaccgagtgaacaagaagctggagatgagtatcagtggagagagtttaggtttgagtttgaagaagaggtgaaagacgttgaagctttttgccaccaacttgtggaaatggaacaagaggttgtaagcaagtttactgaccataccggtttgtga

SEQ ID NO: 29320 - protein, 304 aa, Arabidopsis thaliana
  misc_feature (1)..(304): Ceres Seq. ID no. 4811428
MMKGSKANLSALAEKCKTVIVSNWQGYLNTVKPEDKASIIHTSKIKYVMRRGKPYLWVPESEPHNVNIMFDERGSFSIAHPYPGPLAALFKSIGKLPERVAFTGEIVPVKEKRVDAVKKYVEEAIQSEMKAISDTPNSVRSILNSSDQMYASRCDSLRALINDAKEKYVIYKFVPSSCMFIDPNGTKEIDLKVLELSKPDPLGTWSTKLVDGINKNESRRRALILFCLYFLDINARDAYMVSVDRKGFHLLGKVPSEQEAGDEYQWREFRFEFEEEVKDVEAFCHQLVEMEQEVVSKFTDHTGL

SEQ ID NO: 29321 - protein, 303 aa, Arabidopsis thaliana
  misc_feature (1)..(303): Ceres Seq. ID no. 4811429
MKGSKANLSALAEKCKTVIVSNWQGYLNTVKPEDKASIIHTSKIKYVMRRGKPYLWVPESEPHNVNIMFDERGSFSIAHPYPGPLAALFKSIGKLPERVAFTGEIVPVKEKRVDAVKKYVEEAIQSEMKAISDTPNSVRSILNSSDQMYASRCDSLRALINDAKEKYVIYKFVPSSCMFIDPNGTKEIDLKVLELSKPDPLGTWSTKLVDGINKNESRRRALILFCLYFLDINARDAYMVSVDRKGFHLLGKVPSEQEAGDEYQWREFRFEFEEEVKDVEAFCHQLVEMEQEVVSKFTDHTGL

SEQ ID NO: 29322 - protein, 256 aa, Arabidopsis thaliana
  misc_feature (1)..(256): Ceres Seq. ID no. 4811430
MRRGKPYLWVPESEPHNVNIMFDERGSFSIAHPYPGPLAALFKSIGKLPERVAFTGEIVPVKEKRVDAVKKYVEEAIQSEMKAISDTPNSVRSILNSSDQMYASRCDSLRALINDAKEKYVIYKFVPSSCMFIDPNGTKEIDLKVLELSKPDPLGTWSTKLVDGINKNESRRRALILFCLYFLDINARDAYMVSVDRKGFHLLGKVPSEQEAGDEYQWREFRFEFEEEVKDVEAFCHQLVEMEQEVVSKFTDHTGL

SEQ ID NO: 29323 - DNA, 387 bp, Arabidopsis thaliana
  misc_feature (1)..(387): Ceres Seq. ID no. 4811532
atgggaagactattcgtgatagacctcgaaggactggtttatagctgcaagtattgtcagacacatttcgcagttactaatgatattatctcaaagtcatttcactgcaaacacggaagggcttatcttttcgacaatgttgtcaatgtgacggttggagagaaggagcatcgcgtcatgataactggttggcacactgtagctgacatcttctgtgttagctgtggctctcttgtcggctggaaatacgaaatcgcttacgataagtctcagaaatacaaggaaggaaaattcatcttagaaaggtttaaggtgcttgggccctatggaggaggatacgacatgaaccagaacgagcctatgactggaagcgatgatgaagaataa

SEQ ID NO: 29324 - protein, 128 aa, Arabidopsis thaliana
  misc_feature (1)..(128): Ceres Seq. ID no. 4811533
MGRLFVIDLEGLVYSCKYCQTHFAVTNDIISKSFHCKHGRAYLFDNVVNVTVGEKEHRVMITGWHTVADIFCVSCGSLVGWKYEIAYDKSQKYKEGKFILERFKVLGPYGGGYDMNQNEPMTGSDDEE

SEQ ID NO: 29325 - protein, 69 aa, Arabidopsis thaliana
  misc_feature (1)..(69): Ceres Seq. ID no. 4811534
MITGWHTVADIFCVSCGSLVGWKYEIAYDKSQKYKEGKFILERFKVLGPYGGGYDMNQNEPMTGSDDEE

SEQ ID NO: 29326 - DNA, 1062 bp, Arabidopsis thaliana
  misc_feature (1)..(1062): Ceres Seq. ID no. 4811686
atggaaggaatcgatcatagaatggtgagtgtcaatggcataacaatgcacattgccgagaaaggtcccaaagaaggacctgtggtgcttctcctccatggattccctgatctctggtacacgtggcgtcaccagattagtgggttatcatctctaggttaccgcgctgtagctccagacctccgaggctacggagactctgattcgccggagtctttctccgagtacacgtgtcttaacgtcgttggggacctcgtagctcttctggacagtgttgctggaaatcaagagaaggtgtttctggtcggtcatgattggggagccattatcggatggtttctctgtttgtttcgacctgaaaagattaacggctttgtgtgtttgagtgtgccgtatagatcaagaaaccctaaagtcaagcccgttcaagggttcaaggctgtatttggagatgattactacatttgtagatttcaggaaccggggaagattgaaggagagattgcaagtgcagatccaagaatatttctgaggaacctcttcacagggaggacactcggtccgccgattttacctaaggataatccctttggggaaaaacctaaccctaatagcgaaaacattgaattgcctgaatggttttctaagaaagatctcgatttctatgtctccaaattcgagaaggcaggatttaccggtggattgaactactacagagccatggatctgaattgggagctcactgcaccatggaccggagctaagattcaagttccagtgaagttcatgacaggtgacttcgacatggtgtacaccacaccagggatgaaagagtacattcacggtggtggatttgctgcagatgttccaactcttcaagagatagtgatgctggtcacttcgttaaccaagagaaacctcaagaggtcactgctcacatcaatgacttcttcaccaagcttcgggacaacaacaaaagcttttagagttctcgtttggttctattatgttggctctcaaaacaagttggttcttgcatgtgttgtttcgacaagattttga

SEQ ID NO: 29327 - protein, 353 aa, Arabidopsis thaliana
  misc_feature (1)..(353): Ceres Seq. ID no. 4811687
MEGIDHRMVSVNGITMHIAEKGPKEGPVVLLLHGFPDLWYTWRHQISGLSSLGYRAVAPDLRGYGDSDSPESFSEYTCLNVVGDLVALLDSVAGNQEKVFLVGHDWGAIIGWFLCLFRPEKINGFVCLSVPYRSRNPKVKPVQGFKAVFGDDYYICRFQEPGKIEGEIASADPRIFLRNLFTGRTLGPPILPKDNPFGEKPNPNSENIELPEWFSKKDLDFYVSKFEKAGFTGGLNYYRAMDLNWELTAPWTGAKIQVPVKFMTGDFDMVYTTPGMKEYIHGGGFAADVPTLQEIVMLVTSLTKRNLKRSLLTSMTSSPSFGTTTKAFRVLVWFYYVGSQNKLVLACVVSTRF

SEQ ID NO: 29328 - protein, 346 aa, Arabidopsis thaliana
  misc_feature (1)..(346): Ceres Seq. ID no. 4811688
MVSVNGITMHIAEKGPKEGPVVLLLHGFPDLWYTWRHQISGLSSLGYRAVAPDLRGYGDSDSPESFSEYTCLNVVGDLVALLDSVAGNQEKVFLVGHDWGAIIGWFLCLFRPEKINGFVCLSVPYRSRNPKVKPVQGFKAVFGDDYYICRFQEPGKIEGEIASADPRIFLRNLFTGRTLGPPILPKDNPFGEKPNPNSENIELPEWFSKKDLDFYVSKFEKAGFTGGLNYYRAMDLNWELTAPWTGAKIQVPVKFMTGDFDMVYTTPGMKEYIHGGGFAADVPTLQEIVMLVTSLTKRNLKRSLLTSMTSSPSFGTTTKAFRVLVWFYYVGSQNKLVLACVVSTRF

SEQ ID NO: 29329 - protein, 338 aa, Arabidopsis thaliana
  misc_feature (1)..(338): Ceres Seq. ID no. 4811689
MHIAEKGPKEGPVVLLLHGFPDLWYTWRHQISGLSSLGYRAVAPDLRGYGDSDSPESFSEYTCLNVVGDLVALLDSVAGNQEKVFLVGHDWGAIIGWFLCLFRPEKINGFVCLSVPYRSRNPKVKPVQGFKAVFGDDYYICRFQEPGKIEGEIASADPRIFLRNLFTGRTLGPPILPKDNPFGEKPNPNSENIELPEWFSKKDLDFYVSKFEKAGFTGGLNYYRAMDLNWELTAPWTGAKIQVPVKFMTGDFDMVYTTPGMKEYIHGGGFAADVPTLQEIVMLVTSLTKRNLKRSLLTSMTSSPSFGTTTKAFRVLVWFYYVGSQNKLVLACVVSTRF

SEQ ID NO: 29330 - DNA, 1854 bp, Arabidopsis thaliana
  misc_feature (1)..(1854): Ceres Seq. ID no. 4812180
atgggtattatatcggacaatgctcaatctcactcgtcttcctctgcccctgctccttccatcttctccagctcctttgccactcgcatattctcagatgttgcgggagacatcacaattgttgttgatggagagtcctttttactccacaagtttcctttagtggctcggtgtggaaagattaggaaaatggtggcagagatgaaagaatcatcttcaaatctctcgcatacagagctccgagactttccaggtgggtctaagacgtttgaactcgccatgaagttctgctacggcatcaacttcgagatcactatctccaacgtggttgctatccgttgcgcagctggttatcttgagatgacagaggacttcaaagaagagaatttgattgcgcggaccgagacttacctcgagcaagtcgcgtttcgcagtcttgagaagtctgtggaagtcctctgttcctgtgagacgctttatcctcaagacattgctgaaactgctcacattcctgatagatgtgtggaggctatcgctgtgaatgcttgcagagaacagttagtgttagggctgtcacggctgaaccgaggcaccgagtcaggggaactcaagcgaggagatagtcctgagtggtggattgaagacctctctgctctgaggattgactattacgcacgagttgtctctgcgatggctagaacaggcttgcggtcagagagtatcataacgtctttgatgcattacgctcaagaatcgttgaaaggtattcgaaactgcaaggagcgaaccaagctcgattcgggtacttttgagaatgaacagaggaacgtccttgaagccattgttagtcttttcccaaatgacaatgtccctctgagtttcctctttggaatgttgagggtcgggattaccataaacgtagccatctcttgcaggctcgagctcgagcggagaatcgctcagcagctggaaacagtctccctcgatgatctactcatacctgttgtccgagacggagattccatgtacgatgtagacactgtccatagaatactcgtctgctttctgaagaaaatagaggaggaagaagaatatgatgaagattgctgttacgagaacgagaccgagaatcttactggttctatgtgccacagttcattgctgaaagtgggtcggatcatggatgcatacttggcagagattgcaccagacccgtgtctgagtcttcacaagttcatggctttgatagagatattgcctgattacgcacgtgtcatggatgatgggctatacagagccattgatatgtttctaaaggggcatccgtcgctgaacgaacaagaatgtaagagtctctgcaaattcatagacactcagaaactttcacaagaagcatgcaaccatgtggctcagaacgatcggctgccgatgcagatggtggtccgagtcctctactcagaacagctgcgtatgaagaatgtaatgtccggagagtcaggggaagggctattgctgtcttctcagaaacatagtagcgagaacccgagccgagctgtgtctccgagagacacttatgcctcactgaggagggagaatagagagctgaagctggagatttcaagggtgagagtgaggctgactgagttggagaaggagcagattttgatgaaacaggggatgatggagaagtcaggtcatggtggaacattgctgacctcactttccaaagggattgggaggatttcgatatttggtggaggacctacagaagggaagctgcggaatgctaaccgcaaatccaagtcaaggttggagagaaaaaccgttaggagccgaccagagtctatgttttag

SEQ ID NO: 29331 - protein, 617 aa, Arabidopsis thaliana
  misc_feature (1)..(617): Ceres Seq. ID no. 4812181
MGIISDNAQSHSSSSAPAPSIFSSSFATRIFSDVAGDITIVVDGESFLLHKFPLVARCGKIRKMVAEMKESSSNLSHTELRDFPGGSKTFELAMKFCYGINFEITISNVVAIRCAAGYLEMTEDFKEENLIARTETYLEQVAFRSLEKSVEVLCSCETLYPQDIAETAHIPDRCVEAIAVNACREQLVLGLSRLNRGTESGELKRGDSPEWWIEDLSALRIDYYARVVSAMARTGLRSESIITSLMHYAQESLKGIRNCKERTKLDSGTFENEQRNVLEAIVSLFPNDNVPLSFLFGMLRVGITINVAISCRLELERRIAQQLETVSLDDLLIPVVRDGDSMYDVDTVHRILVCFLKKIEEEEEYDEDCCYENETENLTGSMCHSSLLKVGRIMDAYLAEIAPDPCLSLHKFMALIEILPDYARVMDDGLYRAIDMFLKGHPSLNEQECKSLCKFIDTQKLSQEACNHVAQNDRLPMQMVVRVLYSEQLRMKNVMSGESGEGLLLSSQKHSSENPSRAVSPRDTYASLRRENRELKLEISRVRVRLTELEKEQILMKQGMMEKSGHGGTLLTSLSKGIGRISIFGGGPTEGKLRNANRKSKSRLERKTVRSRPESMF

SEQ ID NO: 29332 - protein, 554 aa, Arabidopsis thaliana; identical to SEQ ID NO: 29269
  misc_feature (1)..(554): Ceres Seq. ID no. 4812182

SEQ ID NO: 29333 - protein, 550 aa, Arabidopsis thaliana; identical to SEQ ID NO: 29270
  misc_feature (1)..(550): Ceres Seq. ID no. 4812183

SEQ ID NO: 29334 - DNA, 3765 bp, Arabidopsis thaliana
  misc_feature (1)..(3765): Ceres Seq. ID no. 4812743
atggataacatagaaccaccctttagtggaaacatccatgctgagaccgaagtaaagaaggaggagaagaaaaagatgaagaaggaatcggtgtcattgatgggtttgtttagtgcagctgataatgttgattactttctgatgtttcttgggggtttaggcacgtgtattcatggcggtacgcttccgctcttcttcgtgttcttcgggggaatgctagattctcttgggaagctttctacagacccgaatgccatatcttctcgcgtttcacagaatgctctgtacttggtctacttaggattggtcaatttggtatcagcctggattggttcaaatggtatattggcaggagttgcttgttggatgcaaacaggggaaagacaaacagcgcgattgcgtataaattatctcaaatcaatcttagcaaaagatattactttctttgatactgaagctagagattcaaacttcattttccacatctcaagcgacgcaatcttggttcaagatgccattggcgataagaccggccatgttttgcggtacctatgtcagttcatcgcgggatttgtcatcggttttttgtcagtatggcaactaacgttgcttacgttaggagtggttccactgatagcaattgcaggaggagggtatgctatagtcatgtctacaatatcagagaagagtgaggctgcttatgctgatgcaggaaaagttgcagaagaggtcatgtcacaggtgagaacagtgtatgcatttgtaggagaagagaaagctgtaaaatcttactcaaattctctcaagaaagctctgaaactcagtaaaagaagtggtcttgctaaaggtttaggagttggattaacatatagcctcttgttctgtgcttgggcattgcttttttggtatgcaagtcttcttgtacgccatggcaaaaccaacggcgcaaaagccttcacaacaatcctcaatgtcatttacagcggattcgccttaggtcaagccgtgcctagcttatccgcaatttctaaaggcagagttgctgctgcaaatattttcaaaatgataggaaacaacaatcttgaaagctctgagagattagaaaacggaacaacattgcaaaacgtagttggcaagattgagttttgtggagtttcgttcgcatatccttcgagaccaaacatggtttttgagaatcttagtttcacgatacattcaggcaagacttttgcatttgtcggtccaagtggttcggggaaaagcacaatcatatcaatggtgcaacgtttctatgaacctagatcaggggagattctcttggatggaaatgacatcaagaacctgaagctgaaatggttgagagaacagatgggattagtgagtcaagaaccagcattattcgccacaacaatagcttctaatattcttctcggtaaagagaaagccaatatggatcagatcatagaagctgctaaagcagccaacgcagattctttcattaaatcattacctaatggttacaatactcaggttggagaaggaggaactcaactttcaggagggcagaaacagaggattgctattgctcgggcggttctaagaaatccaaagatattacttttagatgaagcaacaagcgctcttgatgccgaatcagagaagattgttcagcaagcacttgacaatgtcatggaaaaaagaacaacaatcgtcattgcacatagattatccaccattcgaaatgttgacaagattgttgtcttgagagatggtcaagttagggaaaccggaagtcactcagaactgatatcaagaggaggagattatgccactcttgtaaattgtcaagacacagaacctcaagaaaacttgagatcagtcatgtatgaatcttgtaggtctcaagctggatcatatagttcaagaagagtttttagctcaagaaggacttcaagcttcagggaagaccaagagaagactgaaaaagattcaaaaggcgaagatttaataagctcgtcctcaatgatatgggaactaataaagttgaatgctccagaatggctttatgcattacttggctcaattggtgccgttcttgccggatcacaaccggcattgttctccatggggcttgcttacgtgttaaccacgttttattcaccttttcctagtctgatcaagcgtgaagtcgataaggtagctattatctttgttggagctggaatagtaacagcgcctatatacattctccaacattacttctatacactaatgggagagcgtcttacttctcgggttcgcttatccttgttctcagcgattctttcaaatgagattggatggtttgatctggatgagaacaacactggctcactcacttcaatcttagctgctgatgcaaccttggtgaggagtgctatagcggatcgtctatcgacaatagtccaaaacttgtctcttacaatcacagccttagcacttgcctttttctacagttggcgtgttgcagctgtcgtaacagcttgttttcctcttctcattgccgcttcacttaccgagcaattatttctaaaaggctttggaggagattacacaagggcttactctagggcaacttcattggcgcgtgaagcgatttcgaatataagaaccgtcgctgcatttagtgctgaaaagcaaatctcagaacagtttacttgtgaactaagcaaacccaccaagagtgccttactcagaggtcatatctcgggatttggatacggtttgtcacagtgtctcgcgttctgttcctacgcacttggtctctggtatatctcagttctgattaagcgcaacgagaccaactttgaggatagtatcaaatctttcatggtattgctcgtcactgcttactccgtagcggaaacgcttgcgttaaccccagatatcgtgaagggcacacaagcactcgggtccgtatttagggttttacatagagagactgaaatacctccagaccagcctaactcaagattggtcactcatatcaaaggagatatagagtttagaaacgtgagctttgcgtatcccactagacccgaaatcgccattttcaaaaatctaaatctccgagtttcagccgggaagagtcttgcggtcgtgggacctagtggttcgggaaagagcacagtgatcggactaatcatgagattctacgatccgagcaacggaaatctctgtatcgatgggcatgatataaaatctgtaaacctacgtagcttgcgcaagaagctagcgttagttcagcaagaaccggctctgttttcaacatccatacacgagaacatcaagtatgggaacgagaacgcgtcagaggcagagatcattgaagccgcaaaagccgcgaacgcgcacgagttcataagcaggatggaagaagggtacatgactcacgtgggtgataagggagtgcagttatcaggtgggcaaaaacagagagtggctatcgcacgggcagttctaaaagatccttcagtgcttctccttgatgaggcaacaagtgctttggatacgagcgcagagaaacaggtccaagaggcgctagacaagttgatgaagggacgaaccacgattctggtggctcacaggctctcgaccataagaaaagcagacacaatcgttgtattgcataaaggaaaagttgtggagaaaggaagtcacagagaacttgtatctaaatccgatgggttttataagaaattgacgagtcttcaagaagcggtgtga

SEQ ID NO: 29335 - protein, 1254 aa, Arabidopsis thaliana
  misc_feature (1)..(1254): Ceres Seq. ID no. 4812744
MDNIEPPFSGNIHAETEVKKEEKKKMKKESVSLMGLFSAADNVDYFLMFLGGLGTCIHGGTLPLFFVFFGGMLDSLGKLSTDPNAISSRVSQNALYLVYLGLVNLVSAWIGSNGILAGVACWMQTGERQTARLRINYLKSILAKDITFFDTEARDSNFIFHISSDAILVQDAIGDKTGHVLRYLCQFIAGFVIGFLSVWQLTLLTLGVVPLIAIAGGGYAIVMSTISEKSEAAYADAGKVAEEVMSQVRTVYAFVGEEKAVKSYSNSLKKALKLSKRSGLAKGLGVGLTYSLLFCAWALLFWYASLLVRHGKTNGAKAFTTILNVIYSGFALGQAVPSLSAISKGRVAAANIFKMIGNNNLESSERLENGTTLQNVVGKIEFCGVSFAYPSRPNMVFENLSFTIHSGKTFAFVGPSGSGKSTIISMVQRFYEPRSGEILLDGNDIKNLKLKWLREQMGLVSQEPALFATTIASNILLGKEKANMDQIIEAAKAANADSFIKSLPNGYNTQVGEGGTQLSGGQKQRIAIARAVLRNPKILLLDEATSALDAESEKIVQQALDNVMEKRTTIVIAHRLSTIRNVDKIVVLRDGQVRETGSHSELISRGGDYATLVNCQDTEPQENLRSVMYESCRSQAGSYSSRRVFSSRRTSSFREDQEKTEKDSKGEDLISSSSMIWELIKLNAPEWLYALLGSIGAVLAGSQPALFSMGLAYVLTTFYSPFPSLIKREVDKVAIIFVGAGIVTAPIYILQHYFYTLMGERLTSRVRLSLFSAILSNEIGWFDLDENNTGSLTSILAADATLVRSAIADRLSTIVQNLSLTITALALAFFYSWRVAAVVTACFPLLIAASLTEQLFLKGFGGDYTRAYSRATSLAREAISNIRTVAAFSAEKQISEQFTCELSKPTKSALLRGHISGFGYGLSQCLAFCSYALGLWYISVLIKRNETNFEDSIKSFMVLLVTAYSVAETLALTPDIVKGTQALGSVFRVLHRETEIPPDQPNSRLVTHIKGDIEFRNVSFAYPTRPEIAIFKNLNLRVSAGKSLAVVGPSGSGKSTVIGLIMRFYDPSNGNLCIDGHDIKSVNLRSLRKKLALVQQEPALFSTSIHENIKYGNENASEAEIIEAAKAANAHEFISRMEEGYMTHVGDKGVQLSGGQKQRVAIARAVLKDPSVLLLDEATSALDTSAEKQVQEALDKLMKGRTTILVAHRLSTIRKADTIVVLHKGKVVEKGSHRELVSKSDGFYKKLTSLQEAV

SEQ ID NO: 29336 - protein, 1229 aa, Arabidopsis thaliana
  misc_feature (1)..(1229): Ceres Seq. ID no. 4812745
MKKESVSLMGLFSAADNVDYFLMFLGGLGTCIHGGTLPLFFVFFGGMLDSLGKLSTDPNAISSRVSQNALYLVYLGLVNLVSAWIGSNGILAGVACWMQTGERQTARLRINYLKSILAKDITFFDTEARDSNFIFHISSDAILVQDAIGDKTGHVLRYLCQFIAGFVIGFLSVWQLTLLTLGVVPLIAIAGGGYAIVMSTISEKSEAAYADAGKVAEEVMSQVRTVYAFVGEEKAVKSYSNSLKKALKLSKRSGLAKGLGVGLTYSLLFCAWALLFWYASLLVRHGKTNGAKAFTTILNVIYSGFALGQAVPSLSAISKGRVAAANIFKMIGNNNLESSERLENGTTLQNVVGKIEFCGVSFAYPSRPNMVFENLSFTIHSGKTFAFVGPSGSGKSTIISMVQRFYEPRSGEILLDGNDIKNLKLKWLREQMGLVSQEPALFATTIASNILLGKEKANMDQIIEAAKAANADSFIKSLPNGYNTQVGEGGTQLSGGQKQRIAIARAVLRNPKILLLDEATSALDAESEKIVQQALDNVMEKRTTIVIAHRLSTIRNVDKIVVLRDGQVRETGSHSELISRGGDYATLVNCQDTEPQENLRSVMYESCRSQAGSYSSRRVFSSRRTSSFREDQEKTEKDSKGEDLISSSSMIWELIKLNAPEWLYALLGSIGAVLAGSQPALFSMGLAYVLTTFYSPFPSLIKREVDKVAIIFVGAGIVTAPIYILQHYFYTLMGERLTSRVRLSLFSAILSNEIGWFDLDENNTGSLTSILAADATLVRSAIADRLSTIVQNLSLTITALALAFFYSWRVAAVVTACFPLLIAASLTEQLFLKGFGGDYTRAYSRATSLAREAISNIRTVAAFSAEKQISEQFTCELSKPTKSALLRGHISGFGYGLSQCLAFCSYALGLWYISVLIKRNETNFEDSIKSFMVLLVTAYSVAETLALTPDIVKGTQALGSVFRVLHRETEIPPDQPNSRLVTHIKGDIEFRNVSFAYPTRPEIAIFKNLNLRVSAGKSLAVVGPSGSGKSTVIGLIMRFYDPSNGNLCIDGHDIKSVNLRSLRKKLALVQQEPALFSTSIHENIKYGNENASEAEIIEAAKAANAHEFISRMEEGYMTHVGDKGVQLSGGQKQRVAIARAVLKDPSVLLLDEATSALDTSAEKQVQEALDKLMKGRTTILVAHRLSTIRKADTIVVLHKGKVVEKGSHRELVSKSDGFYKKLTSLQEAV

SEQ ID NO: 29337 - protein, 1221 aa, Arabidopsis thaliana
  misc_feature (1)..(1221): Ceres Seq. ID no. 4812746
MGLFSAADNVDYFLMFLGGLGTCIHGGTLPLFFVFFGGMLDSLGKLSTDPNAISSRVSQNALYLVYLGLVNLVSAWIGSNGILAGVACWMQTGERQTARLRINYLKSILAKDITFFDTEARDSNFIFHISSDAILVQDAIGDKTGHVLRYLCQFIAGFVIGFLSVWQLTLLTLGVVPLIAIAGGGYAIVMSTISEKSEAAYADAGKVAEEVMSQVRTVYAFVGEEKAVKSYSNSLKKALKLSKRSGLAKGLGVGLTYSLLFCAWALLFWYASLLVRHGKTNGAKAFTTILNVIYSGFALGQAVPSLSAISKGRVAAANIFKMIGNNNLESSERLENGTTLQNVVGKIEFCGVSFAYPSRPNMVFENLSFTIHSGKTFAFVGPSGSGKSTIISMVQRFYEPRSGEILLDGNDIKNLKLKWLREQMGLVSQEPALFATTIASNILLGKEKANMDQIIEAAKAANADSFIKSLPNGYNTQVGEGGTQLSGGQKQRIAIARAVLRNPKILLLDEATSALDAESEKIVQQALDNVMEKRTTIVIAHRLSTIRNVDKIVVLRDGQVRETGSHSELISRGGDYATLVNCQDTEPQENLRSVMYESCRSQAGSYSSRRVFSSRRTSSFREDQEKTEKDSKGEDLISSSSMIWELIKLNAPEWLYALLGSIGAVLAGSQPALFSMGLAYVLTTFYSPFPSLIKREVDKVAIIFVGAGIVTAPIYILQHYFYTLMGERLTSRVRLSLFSAILSNEIGWFDLDENNTGSLTSILAADATLVRSAIADRLSTIVQNLSLTITALALAFFYSWRVAAVVTACFPLLIAASLTEQLFLKGFGGDYTRAYSRATSLAREAISNIRTVAAFSAEKQISEQFTCELSKPTKSALLRGHISGFGYGLSQCLAFCSYALGLWYISVLIKRNETNFEDSIKSFMVLLVTAYSVAETLALTPDIVKGTQALGSVFRVLHRETEIPPDQPNSRLVTHIKGDIEFRNVSFAYPTRPEIAIFKNLNLRVSAGKSLAVVGPSGSGKSTVIGLIMRFYDPSNGNLCIDGHDIKSVNLRSLRKKLALVQQEPALFSTSIHENIKYGNENASEAEIIEAAKAANAHEFISRMEEGYMTHVGDKGVQLSGGQKQRVAIARAVLKDPSVLLLDEATSALDTSAEKQVQEALDKLMKGRTTILVAHRLSTIRKADTIVVLHKGKVVEKGSHRELVSKSDGFYKKLTSLQEAV

SEQ ID NO: 29338 - DNA, 927 bp, Arabidopsis thaliana
  misc_feature (1)..(927): Ceres Seq. ID no. 4812828
atgaagatagcggccaatggccggtttttcacaatcggactcgtagcgtcatggtattcatcgaacatcggagttttattgctgaacaagtacttgttaagcaactatggattcaagtatccgatcttcctcaccatgtgtcacatgacggcttgttctcttctcagctacgttgctattgcttggatgaagatggttccgatgcaaacgatccgatctcgagttcagtttcttaagatcgctgcgttaagtctcgttttctgtgtgtcggtggtttttgggaatatctctcttcggtttcttcctgtatcgtttaatcaagcgattggtgctacgacgccgtttttcaccgccgtgtttgcttatctgattacttttaagagagaagcttggttgacttacttcactctcgtccctgttgttaccggtgttgtcattgccagtgggagtgagccaagtttccacctgtttggattcattatgtgcattgcagctacagctgcaagagcacttaaatcagttcttcaaggaattttgctttcttcagaaggggagaagctaaattccatgaacctcctcctttacatggctcccatagctgttgtgttcctccttcctgctacacttatcatggaaaaaaatgttgttggcattacaattgcacttgccagagacgattttagaatcgtttggtatctgctattcaattcggcgctagcttattttgtgaacttgaccaatttcttagtcacgaaacacaccagcgctctgactctccaggtgctaggaaacgccaaaggtgcagtagcagtggtggtatcaatcctgatattcaggaatcctgtctcagtgactggaatgttaggttactcgctcactgtctgtggagttatcctctacagcgaagccaagaaacgaagcaaataa

SEQ ID NO: 29339 - protein, 308 aa, Arabidopsis thaliana
  misc_feature (1)..(308): Ceres Seq. ID no. 4812829
MKIAANGRFFTIGLVASWYSSNIGVLLLNKYLLSNYGFKYPIFLTMCHMTACSLLSYVAIAWMKMVPMQTIRSRVQFLKIAALSLVFCVSVVFGNISLRFLPVSFNQAIGATTPFFTAVFAYLITFKREAWLTYFTLVPVVTGVVIASGSEPSFHLFGFIMCIAATAARALKSVLQGILLSSEGEKLNSMNLLLYMAPIAVVFLLPATLIMEKNVVGITIALARDDFRIVWYLLFNSALAYFVNLTNFLVTKHTSALTLQVLGNAKGAVAVVVSILIFRNPVSVTGMLGYSLTVCGVILYSEAKKRSK

SEQ ID NO: 29340 - protein, 263 aa, Arabidopsis thaliana
  misc_feature (1)..(263): Ceres Seq. ID no. 4812830
MCHMTACSLLSYVAIAWMKMVPMQTIRSRVQFLKIAALSLVFCVSVVFGNISLRFLPVSFNQAIGATTPFFTAVFAYLITFKREAWLTYFTLVPVVTGVVIASGSEPSFHLFGFIMCIAATAARALKSVLQGILLSSEGEKLNSMNLLLYMAPIAVVFLLPATLIMEKNVVGITIALARDDFRIVWYLLFNSALAYFVNLTNFLVTKHTSALTLQVLGNAKGAVAVVVSILIFRNPVSVTGMLGYSLTVCGVILYSEAKKRSK

SEQ ID NO: 29341 - protein, 260 aa, Arabidopsis thaliana
  misc_feature (1)..(260): Ceres Seq. ID no. 4812831
MTACSLLSYVAIAWMKMVPMQTIRSRVQFLKIAALSLVFCVSVVFGNISLRFLPVSFNQAIGATTPFFTAVFAYLITFKREAWLTYFTLVPVVTGVVIASGSEPSFHLFGFIMCIAATAARALKSVLQGILLSSEGEKLNSMNLLLYMAPIAVVFLLPATLIMEKNVVGITIALARDDFRIVWYLLFNSALAYFVNLTNFLVTKHTSALTLQVLGNAKGAVAVVVSILIFRNPVSVTGMLGYSLTVCGVILYSEAKKRSK

SEQ ID NO: 29342 - DNA, 633 bp, Arabidopsis thaliana
  misc_feature (1)..(633): Ceres Seq. ID no. 4812890
atggctggccagactgatcctcatatttcactgttttctccacaagaggttgagtttatggcagaggacgagctggtcgagattgttcctaatatgaacatggagcaactcaatttcatcagtggcgatttcggtcggttcattcctcagattccgacaaaggtgcctctgtggcttgcagtggcactgaagaggagaggaaaatgcactttccggcctccggggtggatgtctgttgataatttgactcagatcttggaagcagaacgtgaatctcagtcgacattccaggcattaccatttagttacgtggagattgccagactactttttgaccatgcacgtgacgatattccagacatgtatatggtgagatccctagtcgaggacatcagagatgtacggcttcacaaacttgagactaacttaggatcatttcaaggtacatctgcagtaaagatctctaatgtatcggcaatggaagtaaacatagtacgcccatttgtgataagagccttagaagcattttataagcatgacaagccagaggctgatgtagacagagacaccagaagtagtagacaacagcgtgaaaccaacaatgaaccaaggagacctctaaggcaacgctag

SEQ ID NO: 29343 - protein, 210 aa, Arabidopsis thaliana
  misc_feature (1)..(210): Ceres Seq. ID no. 4812891
MAGQTDPHISLFSPQEVEFMAEDELVEIVPNMNMEQLNFISGDFGRFIPQIPTKVPLWLAVALKRRGKCTFRPPGWMSVDNLTQILEAERESQSTFQALPFSYVEIARLLFDHARDDIPDMYMVRSLVEDIRDVRLHKLETNLGSFQGTSAVKISNVSAMEVNIVRPFVIRALEAFYKHDKPEADVDRDTRSSRQQRETNNEPRRPLRQR

SEQ ID NO: 29344 - protein, 191 aa, Arabidopsis thaliana
  misc_feature (1)..(191): Ceres Seq. ID no. 4812892
MAEDELVEIVPNMNMEQLNFISGDFGRFIPQIPTKVPLWLAVALKRRGKCTFRPPGWMSVDNLTQILEAERESQSTFQALPFSYVEIARLLFDHARDDIPDMYMVRSLVEDIRDVRLHKLETNLGSFQGTSAVKISNVSAMEVNIVRPFVIRALEAFYKHDKPEADVDRDTRSSRQQRETNNEPRRPLRQR

SEQ ID NO: 29345 - protein, 179 aa, Arabidopsis thaliana
  misc_feature (1)..(179): Ceres Seq. ID no. 4812893
MNMEQLNFISGDFGRFIPQIPTKVPLWLAVALKRRGKCTFRPPGWMSVDNLTQILEAERESQSTFQALPFSYVEIARLLFDHARDDIPDMYMVRSLVEDIRDVRLHKLETNLGSFQGTSAVKISNVSAMEVNIVRPFVIRALEAFYKHDKPEADVDRDTRSSRQQRETNNEPRRPLRQR

SEQ ID NO: 29346 - DNA, 1137 bp, Arabidopsis thaliana
  misc_feature (1)..(1137): Ceres Seq. ID no. 4813440
atggttagtgtctcactcgctgacaacaacgaagagaaatcgactgatctgaagaaattcaaaggaggagtaactgatcactcgattagtaaggcaaatgataatgatcacgacgatgatgatcatgatcaagacgatgataatgatggagatcacgatgacgatgaccatgacgatgataatgatcatgacgatgataataatgatcatgatgatgatgataataatgatgataataatgatggagacgatgaccatgatgatgataataacgatgatggtgatgacgaaaagaagacgttgagggtacacgagctaaagaaggggaatctaacggtcaaatttacaaaccggggtgcttctatcatgtctctccttttccccaatataaatgccagtaaaaaggaaaaggccgctgcaaacgatggcaaaaacacgatccatggtgggacgaaagagtctagcgatgtgatttggagagttaagaaacacaaacataatggcaaaaaaccttatattgttttcacatacacaacaagtcctgatggcgatcaagggaaacttgaagtcactgtgacatataagctggtaggagaaaacagattgaaaatggtgatgcaagcaaaggctaaagagaaaactactccgttgaatttggttcatcgttcttattggaatcttggtggtcataacaatgaagatatcttctctgaagaaattcaaattctcggttccggttatactcatctcgacgataatctcactccaaccgggaaaatcctcgccgttaaaggaacacccttcgattttcgccaactccgacctattaaagacaacatcaatgagcttaagacagggtatggtataaattattgtctagatggtgttgcaaataagatgagaaaagtcgtggagcttgtggacaataaatcgaagataaaaatggagttatctacagaccaatccggtctaaggttgaaaaccactaaaccaaaaaatggatcggttcataaagcttactctggtttatgtctagaatcacatgcaatcaattaccaatatcgttcttcgcagataattgaaccgggggaaacttataagcatactatgctctttaagttttcttttgttccgtaa

SEQ ID NO: 29347 - protein, 378 aa, Arabidopsis thaliana
  misc_feature (1)..(378): Ceres Seq. ID no. 4813441
MVSVSLADNNEEKSTDLKKFKGGVTDHSISKANDNDHDDDDHDQDDDNDGDHDDDDHDDDNDHDDDNNDHDDDDNNDDNNDGDDDHDDDNNDDGDDEKKTLRVHELKKGNLTVKFTNRGASIMSLLFPNINASKKEKAAANDGKNTIHGGTKESSDVIWRVKKHKHNGKKPYIVFTYTTSPDGDQGKLEVTVTYKLVGENRLKMVMQAKAKEKTTPLNLVHRSYWNLGGHNNEDIFSEEIQILGSGYTHLDDNLTPTGKILAVKGTPFDFRQLRPIKDNINELKTGYGINYCLDGVANKMRKVVELVDNKSKIKMELSTDQSGLRLKTTKPKNGSVHKAYSGLCLESHAINYQYRSSQIIEPGETYKHTMLFKFSFVP

SEQ ID NO: 29348 - protein, 256 aa, Arabidopsis thaliana
  misc_feature (1)..(256): Ceres Seq. ID no. 4813442
MSLLFPNINASKKEKAAANDGKNTIHGGTKESSDVIWRVKKHKHNGKKPYIVFTYTTSPDGDQGKLEVTVTYKLVGENRLKMVMQAKAKEKTTPLNLVHRSYWNLGGHNNEDIFSEEIQILGSGYTHLDDNLTPTGKILAVKGTPFDFRQLRPIKDNINELKTGYGINYCLDGVANKMRKVVELVDNKSKIKMELSTDQSGLRLKTTKPKNGSVHKAYSGLCLESHAINYQYRSSQIIEPGETYKHTMLFKFSFVP

SEQ ID NO: 29349 - DNA, 1392 bp, Arabidopsis thaliana
  misc_feature (1)..(1392): Ceres Seq. ID no. 4813637
atggagaaaaggaacgacaaatccgagccgttgctgctgccggagaatggatccgacgtctcagaagaagcatcatggatggtttatctaagcacgatcattgccgtttgcggttcctacgagtttggaacatgcgtgggatactccgctccaacacagtttgggattatggaagagcttaatttatcatattcccagttttcggttttcggatcgatattgaatatgggagcagtgctcggcgccattacatcggggaagatttctgatttcatcggtcggaaaggggccatgcggttgtcttcagtgatctctgccatcggctggctgataatttacttggccaagggtgacgtacctttggatttcggaagatttctaacgggttatggttgcggtaccctttcctttgtggtaccggtcttcatcgccgaaattagtccgagaaaattgagaggagccttagcgacgcttaaccagctctttatcgtaatcggattagcttctatgttcctcataggcgccgtcgtaaattggagaactcttgcactaaccggagttgcaccgtgcgtggttctattctttgggacttggttcatccctgaatcacccagatggctggaaatggttggccgccacagtgattttgaaattgcgttgcaaaaactgaggggtcctcaggccaatatcacaagagaagccggggaaattcaggagtacttagcgagtcttgctcacctcccgaaagccacattgatggaccttattgacaaaaagaatattcgatttgtgatagttggagttggtttgatgtttttccaacaattcgttggaattaatggcgttatcttctacgcacaacaaatattcgtatcagcaggagcatccccaactcttggaagcattctatactcgatcgaacaagtcgttctcacagcactaggcgcaacattgctaattgatcggcttggaagaaggccacttcttatggcttcagctgttgggatgctgattggatgtttgctcatcggaaattcatttcttttgaaggctcatggtttagcacttgacatcattccggctctggcagttagtggtgtcttggtctacatcggttcgttctctattggaatgggtgcaatcccatgggttataatgtctgagatatttccaataaatttgaaaggaactgccggaggacttgtcactgtagtaaattggctaagttcatggcttgtctcattcactttcaactttctcatgatttggagccctcatggtacattttatgtgtatggtggggtatgtgtattggctattatcttcatagcaaaacttgttcctgaaactaaaggcagaaccttggaagagattcaagcaatgatgatgtaa

SEQ ID NO: 29350 - protein, 463 aa, Arabidopsis thaliana
  misc_feature (1)..(463): Ceres Seq. ID no. 4813638
MEKRNDKSEPLLLPENGSDVSEEASWMVYLSTIIAVCGSYEFGTCVGYSAPTQFGIMEELNLSYSQFSVFGSILNMGAVLGAITSGKISDFIGRKGAMRLSSVISAIGWLIIYLAKGDVPLDFGRFLTGYGCGTLSFVVPVFIAEISPRKLRGALATLNQLFIVIGLASMFLIGAVVNWRTLALTGVAPCVVLFFGTWFIPESPRWLEMVGRHSDFEIALQKLRGPQANITREAGEIQEYLASLAHLPKATLMDLIDKKNIRFVIVGVGLMFFQQFVGINGVIFYAQQIFVSAGASPTLGSILYSIEQVVLTALGATLLIDRLGRRPLLMASAVGMLIGCLLIGNSFLLKAHGLALDIIPALAVSGVLVYIGSFSIGMGAIPWVIMSEIFPINLKGTAGGLVTVVNWLSSWLVSFTFNFLMIWSPHGTFYVYGGVCVLAIIFIAKLVPETKGRTLEEIQAMMM

SEQ ID NO: 29351 - protein, 437 aa, Arabidopsis thaliana
  misc_feature (1)..(437): Ceres Seq. ID no. 4813639
MVYLSTIIAVCGSYEFGTCVGYSAPTQFGIMEELNLSYSQFSVFGSILNMGAVLGAITSGKISDFIGRKGAMRLSSVISAIGWLIIYLAKGDVPLDFGRFLTGYGCGTLSFVVPVFIAEISPRKLRGALATLNQLFIVIGLASMFLIGAVVNWRTLALTGVAPCVVLFFGTWFIPESPRWLEMVGRHSDFEIALQKLRGPQANITREAGEIQEYLASLAHLPKATLMDLIDKKNIRFVIVGVGLMFFQQFVGINGVIFYAQQIFVSAGASPTLGSILYSIEQVVLTALGATLLIDRLGRRPLLMASAVGMLIGCLLIGNSFLLKAHGLALDIIPALAVSGVLVYIGSFSIGMGAIPWVIMSEIFPINLKGTAGGLVTVVNWLSSWLVSFTFNFLMIWSPHGTFYVYGGVCVLAIIFIAKLVPETKGRTLEEIQAMMM

SEQ ID NO: 29352 - protein, 407 aa, Arabidopsis thaliana
  misc_feature (1)..(407): Ceres Seq. ID no. 4813640
MEELNLSYSQFSVFGSILNMGAVLGAITSGKISDFIGRKGAMRLSSVISAIGWLIIYLAKGDVPLDFGRFLTGYGCGTLSFVVPVFIAEISPRKLRGALATLNQLFIVIGLASMFLIGAVVNWRTLALTGVAPCVVLFFGTWFIPESPRWLEMVGRHSDFEIALQKLRGPQANITREAGEIQEYLASLAHLPKATLMDLIDKKNIRFVIVGVGLMFFQQFVGINGVIFYAQQIFVSAGASPTLGSILYSIEQVVLTALGATLLIDRLGRRPLLMASAVGMLIGCLLIGNSFLLKAHGLALDIIPALAVSGVLVYIGSFSIGMGAIPWVIMSEIFPINLKGTAGGLVTVVNWLSSWLVSFTFNFLMIWSPHGTFYVYGGVCVLAIIFIAKLVPETKGRTLEEIQAMMM

SEQ ID NO: 29353 - DNA, 1626 bp, Arabidopsis thaliana
  misc_feature (1)..(1626): Ceres Seq. ID no. 4813656
atgaataaacaagatgttatgaaacttcaggggagagttactgttacagggaacattgacccagctcttctggttaagaaacttagcaaatcaggcaaacatgccgagatcttaggcggtggtggaggaggaggcggcggaggtggaaaggggtttcctaatctgaatgggcaatttgcaaatctcaacatgggtggaaacaataagcctaaaggtggaaaagagagtaaccaagtcaagggtaaagctggtggtggcggtggaggaggtcagaatcatggacatggtcagccaatgcaattgaatcctcaacagattcaacagatgatgatgatgaaggctgctcacggtggtggtggtggtggtcagatgaagatgccgcctatggcagctaaggatcagaagaagtcagttaagtttgctgatgatgaagacgatgagtttagtgaagatgattatgatgatgaggatttcagtgaagatgattatgatgatgatgagttcgatgatgatgaagatgatgatgatgagatgggtcatggtcatggacatggaggaggtgggggtaatcacatgcctcctaataagatgatgatgcctaacaagatgatgcctcagatgggtggtcatcatggtaatggtggtggacctaagggtcccaatgagataatgatgatgatgaatgggttcaaaggcggaggcggtggaggaaagaaaggcggtggtggcgggtttgagattccggtgcagatgaagggaatgggtgagggtaaaaatggaaaggatggtaaaaagggtaaaggaggagagaagggtaagaaagaagggaaagagaataaaggtgggggcaaaaccggaaaaacagatgccaaaagtggtggtggtggccttctagggtttttcaaaaagggtaaaagtgggaacggagatgagaagaagagcgctgggaagaaagatggccatgggggtaataaggtcaaatctcatggtgggggaggaggagttcagcattatgatagtgggcctaaaaaaggtggtggtgggaccaaaggaggaggccatgggggccttgacattgatgagctcatgaaacacagcaaaggaggaggaggaggaggtaacaagggcaatcataatcatagcgccaaagggattggtggtggcccaatgggtccaggcggtccgatgggtccaggcggtccgatgggtcaaggtggtccgatgggtatgatgggtccaggtggtccgatgagtatgatgggtccaggcggtcctatgggtccaatgggtggccaaggcggctcttacccagcggttcaaggcttgccaatgagtggaggtggaggatattatccagggccgcctcaggcaagtcagcaaatgaaccaacaacaatatatgcaaatgatgatgaaccaacagcagcaacaacaacaacaacaacaagctgtagctcatggtggctatggcggtggtcacggtggcgacatgtaccatccgatgatgtacgctcggccttatcctgcagttaattatgctcaccctccaccaatgccgcctcctcactcggattcttatactcatatgttcagcgatgagaatccaggtagttgtagtattatgtga

SEQ ID NO: 29354 - protein, 541 aa, Arabidopsis thaliana
  misc_feature (1)..(541): Ceres Seq. ID no. 4813657
MNKQDVMKLQGRVTVTGNIDPALLVKKLSKSGKHAEILGGGGGGGGGGGKGFPNLNGQFANLNMGGNNKPKGGKESNQVKGKAGGGGGGGQNHGHGQPMQLNPQQIQQMMMMKAAHGGGGGGQMKMPPMAAKDQKKSVKFADDEDDEFSEDDYDDEDFSEDDYDDDEFDDDEDDDDEMGHGHGHGGGGGNHMPPNKMMMPNKMMPQMGGHHGNGGGPKGPNEIMMMMNGFKGGGGGGKKGGGGGFEIPVQMKGMGEGKNGKDGKKGKGGEKGKKEGKENKGGGKTGKTDAKSGGGGLLGFFKKGKSGNGDEKKSAGKKDGHGGNKVKSHGGGGGVQHYDSGPKKGGGGTKGGGHGGLDIDELMKHSKGGGGGGNKGNHNHSAKGIGGGPMGPGGPMGPGGPMGQGGPMGMMGPGGPMSMMGPGGPMGPMGGQGGSYPAVQGLPMSGGGGYYPGPPQASQQMNQQQYMQMMMNQQQQQQQQQQAVAHGGYGGGHGGDMYHPMMYARPYPAVNYAHPPPMPPPHSDSYTHMFSDENPGSCSIM

SEQ ID NO: 29355 - protein, 535 aa, Arabidopsis thaliana
  misc_feature (1)..(535): Ceres Seq. ID no. 4813658
MKLQGRVTVTGNIDPALLVKKLSKSGKHAEILGGGGGGGGGGGKGFPNLNGQFANLNMGGNNKPKGGKESNQVKGKAGGGGGGGQNHGHGQPMQLNPQQIQQMMMMKAAHGGGGGGQMKMPPMAAKDQKKSVKFADDEDDEFSEDDYDDEDFSEDDYDDDEFDDDEDDDDEMGHGHGHGGGGGNHMPPNKMMMPNKMMPQMGGHHGNGGGPKGPNEIMMMMNGFKGGGGGGKKGGGGGFEIPVQMKGMGEGKNGKDGKKGKGGEKGKKEGKENKGGGKTGKTDAKSGGGGLLGFFKKGKSGNGDEKKSAGKKDGHGGNKVKSHGGGGGVQHYDSGPKKGGGGTKGGGHGGLDIDELMKHSKGGGGGGNKGNHNHSAKGIGGGPMGPGGPMGPGGPMGQGGPMGMMGPGGPMSMMGPGGPMGPMGGQGGSYPAVQGLPMSGGGGYYPGPPQASQQMNQQQYMQMMMNQQQQQQQQQQAVAHGGYGGGHGGDMYHPMMYARPYPAVNYAHPPPMPPPHSDSYTHMFSDENPGSCSIM

SEQ ID NO: 29356 - protein, 478 aa, Arabidopsis thaliana
  misc_feature (1)..(478): Ceres Seq. ID no. 4813659
MGGNNKPKGGKESNQVKGKAGGGGGGGQNHGHGQPMQLNPQQIQQMMMMKAAHGGGGGGQMKMPPMAAKDQKKSVKFADDEDDEFSEDDYDDEDFSEDDYDDDEFDDDEDDDDEMGHGHGHGGGGGNHMPPNKMMMPNKMMPQMGGHHGNGGGPKGPNEIMMMMNGFKGGGGGGKKGGGGGFEIPVQMKGMGEGKNGKDGKKGKGGEKGKKEGKENKGGGKTGKTDAKSGGGGLLGFFKKGKSGNGDEKKSAGKKDGHGGNKVKSHGGGGGVQHYDSGPKKGGGGTKGGGHGGLDIDELMKHSKGGGGGGNKGNHNHSAKGIGGGPMGPGGPMGPGGPMGQGGPMGMMGPGGPMSMMGPGGPMGPMGGQGGSYPAVQGLPMSGGGGYYPGPPQASQQMNQQQYMQMMMNQQQQQQQQQQAVAHGGYGGGHGGDMYHPMMYARPYPAVNYAHPPPMPPPHSDSYTHMFSDENPGSCSIM

SEQ ID NO: 29357 - DNA, 1440 bp, Arabidopsis thaliana
  misc_feature (1)..(1440): Ceres Seq. ID no. 4813961
atggcgggaatcccagatcatatccaagaccaacatcttgtggaggaggtatatgctttttatgattttgttacattgaaaaactttattcttaaagagtttttgttactctacttacaggatcaaccctttgatctggaagattggcttccaatcacagcatcaaggaatgccaattggtattattcagctttccacaacgtcactgccattgttggtgctggcgttctcggtcttccttacgccatgtcagagcttggatggggacctggggttgtggtgttgatcctgtcatgggtgatcacgttatacaccctctggcaaatgattgagatgcatgagatgtttgaagggcaacggttcgataggtaccatgagctgggtcaggcagcctttggtaaaaagcttggtttgtacatcatcgtgcccctacaactacttgtcgagatcagtgtgtgcatagtctatatggtcactggaggtaaatccctgaagaatgtacatgaccttgctttgggagatggtgacaagtgcacaaagcttagaattcaacacttcattttgatctttgcctcttcacagttcgtgctctcccttcttaagaacttcaactccatttctggtgtctccttggtagctgctgtcatgtctgtcagctattctacaattgcttgggtagcctcgctgaggaagggtgccaccaccgggagtgtagagtacggctatagaaaaagaacaacctcagtgccattagccttcttaagtgcactgggtgaaatggcttttgcgtacgcaggtcataacgttgttttggaaattcaagcaacgatcccatcaacaccagagaacccatcaaaacgacccatgtggaagggagcggttgtagcctatatcattgtagctttctgctacttccctgtggcacttgtaggtttcaagacctttggaaacagtgttgaagagagcatcctcgaatcactaacaaaaccaacggcacttgtcattgtggccaacatgtttgtggtcatacatctcttgggaagctaccaggtgtatgcgatgcccgtgtttgacatgatcgaatctgtaatgataaggatatggcacttcagtccaacaagagttctacggtttaccatccgatggacttttgtggccgccacgatgggaatagcggtcggtttaccgtattacagcgcattgctgtcattttttgggggatttgtgttcgccccgaccacatactttatcccatgcatcatgtggctgatcctaaagaaaccaaagagatttagtctctcatggtgtatgaactggttttgcatcatttttgggcttgtgctgatgatcatagcacctattgggggactggccaaactaatctataatattcaaaagggcactctacctaattcaagatgcaacttacctaaacactga

SEQ ID NO: 29358 - protein, 479 aa, Arabidopsis thaliana
  misc_feature (1)..(479): Ceres Seq. ID no. 4813962
MAGIPDHIQDQHLVEEVYAFYDFVTLKNFILKEFLLLYLQDQPFDLEDWLPITASRNANWYYSAFHNVTAIVGAGVLGLPYAMSELGWGPGVVVLILSWVITLYTLWQMIEMHEMFEGQRFDRYHELGQAAFGKKLGLYIIVPLQLLVEISVCIVYMVTGGKSLKNVHDLALGDGDKCTKLRIQHFILIFASSQFVLSLLKNFNSISGVSLVAAVMSVSYSTIAWVASLRKGATTGSVEYGYRKRTTSVPLAFLSALGEMAFAYAGHNVVLEIQATIPSTPENPSKRPMWKGAVVAYIIVAFCYFPVALVGFKTFGNSVEESILESLTKPTALVIVANMFVVIHLLGSYQVYAMPVFDMIESVMIRIWHFSPTRVLRFTIRWTFVAATMGIAVGLPYYSALLSFFGGFVFAPTTYFIPCIMWLILKKPKRFSLSWCMNWFCIIFGLVLMIIAPIGGLAKLIYNIQKGTLPNSRCNLPKH

SEQ ID NO: 29359 - protein, 397 aa, Arabidopsis thaliana
  misc_feature (1)..(397): Ceres Seq. ID no. 4813963
MSELGWGPGVVVLILSWVITLYTLWQMIEMHEMFEGQRFDRYHELGQAAFGKKLGLYIIVPLQLLVEISVCIVYMVTGGKSLKNVHDLALGDGDKCTKLRIQHFILIFASSQFVLSLLKNFNSISGVSLVAAVMSVSYSTIAWVASLRKGATTGSVEYGYRKRTTSVPLAFLSALGEMAFAYAGHNVVLEIQATIPSTPENPSKRPMWKGAVVAYIIVAFCYFPVALVGFKTFGNSVEESILESLTKPTALVIVANMFVVIHLLGSYQVYAMPVFDMIESVMIRIWHFSPTRVLRFTIRWTFVAATMGIAVGLPYYSALLSFFGGFVFAPTTYFIPCIMWLILKKPKRFSLSWCMNWFCIIFGLVLMIIAPIGGLAKLIYNIQKGTLPNSRCNLPKH

SEQ ID NO: 29360 - protein, 371 aa, Arabidopsis thaliana
  misc_feature (1)..(371): Ceres Seq. ID no. 4813964
MIEMHEMFEGQRFDRYHELGQAAFGKKLGLYIIVPLQLLVEISVCIVYMVTGGKSLKNVHDLALGDGDKCTKLRIQHFILIFASSQFVLSLLKNFNSISGVSLVAAVMSVSYSTIAWVASLRKGATTGSVEYGYRKRTTSVPLAFLSALGEMAFAYAGHNVVLEIQATIPSTPENPSKRPMWKGAVVAYIIVAFCYFPVALVGFKTFGNSVEESILESLTKPTALVIVANMFVVIHLLGSYQVYAMPVFDMIESVMIRIWHFSPTRVLRFTIRWTFVAATMGIAVGLPYYSALLSFFGGFVFAPTTYFIPCIMWLILKKPKRFSLSWCMNWFCIIFGLVLMIIAPIGGLAKLIYNIQKGTLPNSRCNLPKH

SEQ ID NO: 29361 - DNA, 1329 bp, Arabidopsis thaliana
  misc_feature (1)..(1329): Ceres Seq. ID no. 4814217
atgtttacatctcctcacttgattgatgtgagggaaagattccgaatagatggcttggatatatctgaggaaaagtttctacagtacttctgggaatgttggaagttattgaaggagaaagctgtagatggtcttaccatgcctcctctttttcagtttctcacagtattggcatttaagatttttgtttgtgaaaaggttgatgttgctgtcattgaagttggacttgggggaaaacttgactcgacaaatgtgattcaaaaacctgttgtctgtggcattgcttctcttgggatggatcatatggacatattgggaaatacgctagctgatattgcctttcataaggctgggattttcaagcctcaaatccccgccttcacagtaccacaactctctgaagcaatggatgttcttcagaaaacagctaataatctcgaggtaactatagtagcgcctcttgaacctaaaaagttggacggagttacgcttggcttgtctggggatcatcagctagtaaatgcaggtcttgctgtttctctttcaagatgctggcttcaaagaaccgggaattggaagaagatatttccaaatgaaagcaaggaaactgagattcccgtggcattttgtcgtggtcttgcaacggcacgtcttcatgggagagctcaagttgttcatgatgtagtttcagatccgcaggactcatcagactcgatggaaactccatgcggtgatctgatcttttacttggatggtgctcacagtccagagagcatggaggcttgtggtcgatggttctcttctgcagtcagaggagacaaaagcttatccactgctattcttctgttcaactgcatggaagtgagagaccctcaagtcttacttccaaagctggtcaccacttgcgcttcctcaggcactcatttctcaagagcgctttttgtcccgagcatgtctacttacaacaaagtcatttcgggtgcatcagcgattccttcagatacacgtagaaaggatttgacttggcaattcagactacaaagactatgggagaaatcaatccaagggactgatgcggggcttgaccatacactgaaacccgatggaataaccgccttaccacctcatgatttcctgtgcggagatgcacctcaatgtggtggacctgcagggacaccggtcacttccagtgccgtaatgccttcacttccattgactataaactggctaagagactgcgtacgccgaaacccttcactgaaactagaggttctggtcacaggatcgctacatcttgttggagatgtgctcaggttgctaaagagatga

SEQ ID NO: 29362 - protein, 442 aa, Arabidopsis thaliana
  misc_feature (1)..(442): Ceres Seq. ID no. 4814218
MFTSPHLIDVRERFRIDGLDISEEKFLQYFWECWKLLKEKAVDGLTMPPLFQFLTVLAFKIFVCEKVDVAVIEVGLGGKLDSTNVIQKPVVCGIASLGMDHMDILGNTLADIAFHKAGIFKPQIPAFTVPQLSEAMDVLQKTANNLEVTIVAPLEPKKLDGVTLGLSGDHQLVNAGLAVSLSRCWLQRTGNWKKIFPNESKETEIPVAFCRGLATARLHGRAQVVHDVVSDPQDSSDSMETPCGDLIFYLDGAHSPESMEACGRWFSSAVRGDKSLSTAILLFNCMEVRDPQVLLPKLVTTCASSGTHFSRALFVPSMSTYNKVISGASAIPSDTRRKDLTWQFRLQRLWEKSIQGTDAGLDHTLKPDGITALPPHDFLCGDAPQCGGPAGTPVTSSAVMPSLPLTINWLRDCVRRNPSLKLEVLVTGSLHLVGDVLRLLKR

SEQ ID NO: 29363 - protein, 396 aa, Arabidopsis thaliana
  misc_feature (1)..(396): Ceres Seq. ID no. 4814219
MPPLFQFLTVLAFKIFVCEKVDVAVIEVGLGGKLDSTNVIQKPVVCGIASLGMDHMDILGNTLADIAFHKAGIFKPQIPAFTVPQLSEAMDVLQKTANNLEVTIVAPLEPKKLDGVTLGLSGDHQLVNAGLAVSLSRCWLQRTGNWKKIFPNESKETEIPVAFCRGLATARLHGRAQVVHDVVSDPQDSSDSMETPCGDLIFYLDGAHSPESMEACGRWFSSAVRGDKSLSTAILLFNCMEVRDPQVLLPKLVTTCASSGTHFSRALFVPSMSTYNKVISGASAIPSDTRRKDLTWQFRLQRLWEKSIQGTDAGLDHTLKPDGITALPPHDFLCGDAPQCGGPAGTPVTSSAVMPSLPLTINWLRDCVRRNPSLKLEVLVTGSLHLVGDVLRLLKR

SEQ ID NO: 29364 - protein, 344 aa, Arabidopsis thaliana
  misc_feature (1)..(344): Ceres Seq. ID no. 4814220
MDHMDILGNTLADIAFHKAGIFKPQIPAFTVPQLSEAMDVLQKTANNLEVTIVAPLEPKKLDGVTLGLSGDHQLVNAGLAVSLSRCWLQRTGNWKKIFPNESKETEIPVAFCRGLATARLHGRAQVVHDVVSDPQDSSDSMETPCGDLIFYLDGAHSPESMEACGRWFSSAVRGDKSLSTAILLFNCMEVRDPQVLLPKLVTTCASSGTHFSRALFVPSMSTYNKVISGASAIPSDTRRKDLTWQFRLQRLWEKSIQGTDAGLDHTLKPDGITALPPHDFLCGDAPQCGGPAGTPVTSSAVMPSLPLTINWLRDCVRRNPSLKLEVLVTGSLHLVGDVLRLLKR

SEQ ID NO: 29365 - DNA, 471 bp, Arabidopsis thaliana
  misc_feature (1)..(471): Ceres Seq. ID no. 4814435
atgcgttcaggagagaaaaacatggattctgtattaaccaataagaacccaattatttatccgaagagaacacggcgttatcgtactgatcagagcagtaccgatgagttttcatctacaaatcgtataagagatatcaaagatccagagcatcctgaactttctttggaagatctcaatgttcttactgaagaatcagttgaagttgatgatcacaagagttacgttagaattacattcactccaactcttcctcattgtcacttgccaacccatattggtctttgcatcttagtcaaacttgtgcaaagcttacctgctagattcaaggttgatgtgagagtagcaccagggagtcatgataaagagacgacagtcaataaacaacttggggataaagaacgtgtgactgcagcattagagaatcccgagttggtggctctgcttaataaaatgatgcaagtgtgttag

SEQ ID NO: 29366 - protein, 156 aa, Arabidopsis thaliana
  misc_feature (1)..(156): Ceres Seq. ID no. 4814436
MRSGEKNMDSVLTNKNPIIYPKRTRRYRTDQSSTDEFSSTNRIRDIKDPEHPELSLEDLNVLTEESVEVDDHKSYVRITFTPTLPHCHLPTHIGLCILVKLVQSLPARFKVDVRVAPGSHDKETTVNKQLGDKERVTAALENPELVALLNKMMQVC

SEQ ID NO: 29367 - protein, 149 aa, Arabidopsis thaliana
  misc_feature (1)..(149): Ceres Seq. ID no. 4814437
MDSVLTNKNPIIYPKRTRRYRTDQSSTDEFSSTNRIRDIKDPEHPELSLEDLNVLTEESVEVDDHKSYVRITFTPTLPHCHLPTHIGLCILVKLVQSLPARFKVDVRVAPGSHDKETTVNKQLGDKERVTAALENPELVALLNKMMQVC

SEQ ID NO: 29368 - DNA, 2055 bp, Arabidopsis thaliana
  misc_feature (1)..(2055): Ceres Seq. ID no. 4814586
atgactacgactaggcggaaaaatacacattggtgtcatacttgtagacgaggaatccatcttcaaggagaaggcagaagagaaggagcttgcatttactgtggtaacacctttcttgaaaggctatatgagaatgttgaactaagcccttttgatttattcggattagcctacgaagaagctcgtaaccgtcgcaacaacagaagatcggttataggagaacaactaagttttgaagagttgtttaaccggctcccagcactacaagaccgtcgtggtcctcctccagcatcactagccgcgattaactcattgcaaaagatcaaaatcaggcagaagcatctcggtttagatccctattgtccggtttgccaagaccagtttgaaatcggatcagatgcaagaaaaatgccgtgtaaacatatctaccattctgaatgtatactcccgtggttagtccagcgtaatacttgccccgtctgccgcaaagaacttccacaagaccgaaataatagccggaaaaatccattgtggcatctgtggccgttcagtttgcttttgtcaatgggtaaaaccgaggatgatgtgagtctccgtgtcgccggcggcgaagctaccggcgattcgacggtgaggaatgctcggtgtgggtgttgcaaatggatctcaagcttcgttgggttcaaatgtttattcgtgctgcttttatcagtcgctttgtttctttcggctttgtttttgttgcttccgtttcctatggatcgtgaggattcgaatcttgatcccagatttagaggtcatgctatagtggccagttttagcatcaatagatcggcttcttttcttaatgaaaatacattgcagcttcagaatgacatctttcaagagatgagctacatttccatcaaagtaactatcctggctgttgagccgtcagatgaattgaacataacaaaggttgtgtttggaattgaccctgatactggataccgagaaatcttacctctgtccctgagttctatcaaagagatgtttgaatcggtgctcataaatcaatctactctccagcttacaaaatccttgtttggggaaaccttcctttttgaagtgctaaaatttccaggaggaatcactgtgattccaccacaaagtgctttccctctgcagaaattcaagattgttttcaactttaccctaaactactctattcaccagatacagataaacttcaatacccttgctagtcaactcaaaaatgggctgaatctcgcaccatacgagaatttgtatgtaagcttatcgaactcagaagggtcgaccgtgtctcccccgacaactgttcactcatcagttttgctaagagtcgggacttcaaattcaagcccaaggttgaaacaactgactgataccatcacaggttcacgctcgaaaaaccttggcctgaataataccatatttggtaaggtcaagcaagttcgtctgtcatctttcttgccaaacagcagtgatagtagcaccaaatctccatcaccctcacctagtccccattcgaagcatcaccatcaccatcaccatcaccatcaccaccaccaccatcaccatcacaaccatcatcaccaccaccaccacaatcttagcccgaaaatggctcccgaggtttcacctgtggcctctcctgctcctcacagaagccgtaagagagctccatctgcacctccaccctgcaacccagggaatagagtacatttcaaggagaaacgcgtgcagttttcatccacacctgcgcctgctccttctgctggggcaccacatcatcagctgcactcaccggccccaatttctgcagccaagtctcatatagttccaatctctgcccctctaccacatgtggtgtttgcccatgcagctcaaccacccataacggaaccacgggaaccacatgcaaacgaagttgctcatcctcaaccgcagtcctcttcatcagcgattgaggttttaccagctatgccatggattgtccttctcatgctgatagtggcctggcttcatgaataa

SEQ ID NO: 29369 - protein, 684 aa, Arabidopsis thaliana
  misc_feature (1)..(684): Ceres Seq. ID no. 4814587
MTTTRRKNTHWCHTCRRGIHLQGEGRREGACIYCGNTFLERLYENVELSPFDLFGLAYEEARNRRNNRRSVIGEQLSFEELFNRLPALQDRRGPPPASLAAINSLQKIKIRQKHLGLDPYCPVCQDQFEIGSDARKMPCKHIYHSECILPWLVQRNTCPVCRKELPQDRNNSRKNPLWHLWPFSLLLSMGKTEDDVSLRVAGGEATGDSTVRNARCGCCKWISSFVGFKCLFVLLLSVALFLSALFLLLPFPMDREDSNLDPRFRGHAIVASFSINRSASFLNENTLQLQNDIFQEMSYISIKVTILAVEPSDELNITKVVFGIDPDTGYREILPLSLSSIKEMFESVLINQSTLQLTKSLFGETFLFEVLKFPGGITVIPPQSAFPLQKFKIVFNFTLNYSIHQIQINFNTLASQLKNGLNLAPYENLYVSLSNSEGSTVSPPTTVHSSVLLRVGTSNSSPRLKQLTDTITGSRSKNLGLNNTIFGKVKQVRLSSFLPNSSDSSTKSPSPSPSPHSKHHHHHHHHHHHHHHHHHNHHHHHHHNLSPKMAPEVSPVASPAPHRSRKRAPSAPPPCNPGNRVHFKEKRVQFSSTPAPAPSAGAPHHQLHSPAPISAAKSHIVPISAPLPHVVFAHAAQPPITEPREPHANEVAHPQPQSSSSAIEVLPAMPWIVLLMLIVAWLHE

SEQ ID NO: 29370 - protein, 548 aa, Arabidopsis thaliana
  misc_feature (1)..(548): Ceres Seq. ID no. 4814588
MPCKHIYHSECILPWLVQRNTCPVCRKELPQDRNNSRKNPLWHLWPFSLLLSMGKTEDDVSLRVAGGEATGDSTVRNARCGCCKWISSFVGFKCLFVLLLSVALFLSALFLLLPFPMDREDSNLDPRFRGHAIVASFSINRSASFLNENTLQLQNDIFQEMSYISIKVTILAVEPSDELNITKVVFGIDPDTGYREILPLSLSSIKEMFESVLINQSTLQLTKSLFGETFLFEVLKFPGGITVIPPQSAFPLQKFKIVFNFTLNYSIHQIQINFNTLASQLKNGLNLAPYENLYVSLSNSEGSTVSPPTTVHSSVLLRVGTSNSSPRLKQLTDTITGSRSKNLGLNNTIFGKVKQVRLSSFLPNSSDSSTKSPSPSPSPHSKHHHHHHHHHHHHHHHHHNHHHHHHHNLSPKMAPEVSPVASPAPHRSRKRAPSAPPPCNPGNRVHFKEKRVQFSSTPAPAPSAGAPHHQLHSPAPISAAKSHIVPISAPLPHVVFAHAAQPPITEPREPHANEVAHPQPQSSSSAIEVLPAMPWIVLLMLIVAWLHE

SEQ ID NO: 29371 - protein, 496 aa, Arabidopsis thaliana
  misc_feature (1)..(496): Ceres Seq. ID no. 4814589
MGKTEDDVSLRVAGGEATGDSTVRNARCGCCKWISSFVGFKCLFVLLLSVALFLSALFLLLPFPMDREDSNLDPRFRGHAIVASFSINRSASFLNENTLQLQNDIFQEMSYISIKVTILAVEPSDELNITKVVFGIDPDTGYREILPLSLSSIKEMFESVLINQSTLQLTKSLFGETFLFEVLKFPGGITVIPPQSAFPLQKFKIVFNFTLNYSIHQIQINFNTLASQLKNGLNLAPYENLYVSLSNSEGSTVSPPTTVHSSVLLRVGTSNSSPRLKQLTDTITGSRSKNLGLNNTIFGKVKQVRLSSFLPNSSDSSTKSPSPSPSPHSKHHHHHHHHHHHHHHHHHNHHHHHHHNLSPKMAPEVSPVASPAPHRSRKRAPSAPPPCNPGNRVHFKEKRVQFSSTPAPAPSAGAPHHQLHSPAPISAAKSHIVPISAPLPHVVFAHAAQPPITEPREPHANEVAHPQPQSSSSAIEVLPAMPWIVLLMLIVAWLHE

SEQ ID NO: 29372 - DNA, 3399 bp, Arabidopsis thaliana
  misc_feature (1)..(3399): Ceres Seq. ID no. 4814732
atggtggctcagcagctccaagagagatgcggcggcacttctcaagaagatccagttgagaccaccaagtctctgatctgtgctctcaattacatttctcgtgaccttcctttgcctcctcacctcttcaccgccgtttcttcaatctaccatggcgcttcttcttcttctctctctgactccgatgtctctccgccgctacctacttcgccgcctgcgaataaagctccctatggagctgatttgatgggtgaattcgaggatgcacttttgaagcagagaccagattgtgaatcaggctctcgattgatacaattactggataatcggaataagagtcatatccaacgccgcttatctgaacttgaagggggatgctttgtgcttactctttgtgtttttgaatcagaattaccttctactagaggtgaagatttgcaggcaaagtgcttacttgagctttatgggcttaagctacgggaattgcaaggcaaggttcgaaccgcggtgagctcggaattctggctacgtctgaactgtgcagatgtcagtagccaagtatttgactggggcatgatgcggttgcctcgtccattttatggggttggagatccttttgctatggaagctgatgatcagttcagaaagaagcgtgacgctgagctttcaatcttcgtgattggcattgctgatgtgttaaaagtctttgttcagaggttatcacgtttagaagaagaggagaagaatctgattgaaactgccaagaggaaattctttgcagaagtactcaatgcagtacgtgaattccagttgcaaattcaggcgactcaaaaacgccgtaggcaaaggaatgatggtgtgcaggcttggcatgggagacaaagacaacgcgctacccgtgctgaaaagttgaggctcatggcccttaagtccgatgatcaagaggcatacatgaaactagtaaaggagagtaaaaatgaaagactaaccactcttttagaggagacaaacaaactccttgctaatttgggagctgctgttcaacgtcagaaagatgctaaacttccggaaggcattgatctacttaaagactcagaatctgacttgtctgaacttgatgctccaagaagtgaaccattgcaggatctgcttcctgatcaggatatagatattactgagtctgacaataacgatgactctaatgatttactagaaggacagaggcagtataactcggctatccattcaatacaagagaaggtgacggagcagccctcgcttctagaaggtggggaactacgatcctatcaattagaagggcttcaatggatggtttctctattcaacaataacctcaatggaatattagctgatgagatgggtttgggaaaaactattcaaacaatttctctgattgcgtatcttctggagaataaaggtgtgcctgggccttatcttatagttgctccaaaagctgtgctaccaaattgggtaaacgagtttgcaacatgggtaccaagcattgcagcttttctgtatgatggacgtttagaggaaaggaaagcaataagggaaaaaattgcaggagaaggaaaatttaatgtgttgataacccattatgatcttatcatgagagataaagcatttttaaagaaaattgagtggtactacatgattgttgatgaaggacatcggctgaagaaccacgaatctgctctagcaaagactttattaacaggctatcgtataaaacgcagacttctgttgaccgggacacccatacagaatagccttcaagaactatggtcattgcttaattttctccttcctcacatctttaactcggttcagaacttcgaggaatggtttaatgctcctttcgctgaccgtggtaatgtcagtctcacggatgaagaggagctcttgattattcaccgcctgcatcatgttataaggccgtttatactgagaaggaaaaaggacgaagtagagaaattccttcctggaaagacacaggtcatattgaagtgtgatatgtcggcgtggcagaaagtgtattacaaacaagttacagacatgggcagggttggccttcaaacaggatctgggaaatcaaagagtctgcaaaatctaacgatgcaattaagaaagtgttgtaaccatccttatctatttgttggaggagactacaatatgtggaagaaacctgagattgtgagagcttcagggaaatttgaactccttgatcgtctccttccaaaactgcgcaaggctggacataggattcttctcttctcccaaatgacccgtctcattgacgttcttgagatatacttgacacttaatgattacaaataccttagactcgatggtaccacaaagacagatcaaagagggcttttactgaagcaattcaacgagccagattctccctactttatgtttcttttgagcacgcgtgctggaggtctcggtttgaacttgcaaactgcagacactgttattatctttgacagtgattggaacccacaaatggaccaacaggccgaggatcgagctcatcgcatagggcagaagaaggaagtcagagtgtttgttttggttagcgttggctctgttgaagaagtaatattggagcgtgcaaagcaaaagatgggcattgacgccaaagtcatacaagctggacttttcaacacaacttccactgcacaagacagaagagagatgcttgaagagattatgcgtaaaggaacaagctcgctcgggacagatgtccccagtgagagagaaataaaccggctagcggctcgtagtgaggatgaattttggatgtttgagcgaatggatgaggagagacgaaggaaggagaattacagagcccgtctgatgcaagagcaagaagtccctgagtgggcgtacactactcagacccaagaggagaagttgaacaacggaaagttccattttggtagtgtcacaggtaagcgaaaacgtaaagagattgtttacagcgacacactaagcgagttacagtggctgaaagccgtggagagcggtgaagacctgtcaaaactctcaatgagatataataggagagaggagaacgcaagcaacacaaagacatcaacgagcaaaaaagtgatagaatctatccaaactgtgagtgatgggacgagcgaggaggatgaagaagagcaagaagaagaaagagcgaaggagatgagtggaaaacagagagtggacaagtctgaagaggaagaagaagaaggtgaagaagagaatgatggaaaggcaatattcaagtggaatactcataagaagaaaaggtctagatactcttttacgtgttcttcgtctgactctagagctcaaagttccaatggaagtagacgaaaatga

SEQ ID NO: 29373 - protein, 1132 aa, Arabidopsis thaliana
  misc_feature (1)..(1132): Ceres Seq. ID no. 4814733
MVAQQLQERCGGTSQEDPVETTKSLICALNYISRDLPLPPHLFTAVSSIYHGASSSSLSDSDVSPPLPTSPPANKAPYGADLMGEFEDALLKQRPDCESGSRLIQLLDNRNKSHIQRRLSELEGGCFVLTLCVFESELPSTRGEDLQAKCLLELYGLKLRELQGKVRTAVSSEFWLRLNCADVSSQVFDWGMMRLPRPFYGVGDPFAMEADDQFRKKRDAELSIFVIGIADVLKVFVQRLSRLEEEEKNLIETAKRKFFAEVLNAVREFQLQIQATQKRRRQRNDGVQAWHGRQRQRATRAEKLRLMALKSDDQEAYMKLVKESKNERLTTLLEETNKLLANLGAAVQRQKDAKLPEGIDLLKDSESDLSELDAPRSEPLQDLLPDQDIDITESDNNDDSNDLLEGQRQYNSAIHSIQEKVTEQPSLLEGGELRSYQLEGLQWMVSLFNNNLNGILADEMGLGKTIQTISLIAYLLENKGVPGPYLIVAPKAVLPNWVNEFATWVPSIAAFLYDGRLEERKAIREKIAGEGKFNVLITHYDLIMRDKAFLKKIEWYYMIVDEGHRLKNHESALAKTLLTGYRIKRRLLLTGTPIQNSLQELWSLLNFLLPHIFNSVQNFEEWFNAPFADRGNVSLTDEEELLIIHRLHHVIRPFILRRKKDEVEKFLPGKTQVILKCDMSAWQKVYYKQVTDMGRVGLQTGSGKSKSLQNLTMQLRKCCNHPYLFVGGDYNMWKKPEIVRASGKFELLDRLLPKLRKAGHRILLFSQMTRLIDVLEIYLTLNDYKYLRLDGTTKTDQRGLLLKQFNEPDSPYFMFLLSTRAGGLGLNLQTADTVIIFDSDWNPQMDQQAEDRAHRIGQKKEVRVFVLVSVGSVEEVILERAKQKMGIDAKVIQAGLFNTTSTAQDRREMLEEIMRKGTSSLGTDVPSEREINRLAARSEDEFWMFERMDEERRRKENYRARLMQEQEVPEWAYTTQTQEEKLNNGKFHFGSVTGKRKRKEIVYSDTLSELQWLKAVESGEDLSKLSMRYNRREENASNTKTSTSKKVIESIQTVSDGTSEEDEEEQEEERAKEMSGKQRVDKSEEEEEEGEEENDGKAIFKWNTHKKKRSRYSFTCSSSDSRAQSSNGSRRK

SEQ ID NO: 29374 - protein, 1050 aa, Arabidopsis thaliana
  misc_feature (1)..(1050): Ceres Seq. ID no. 4814734
MGEFEDALLKQRPDCESGSRLIQLLDNRNKSHIQRRLSELEGGCFVLTLCVFESELPSTRGEDLQAKCLLELYGLKLRELQGKVRTAVSSEFWLRLNCADVSSQVFDWGMMRLPRPFYGVGDPFAMEADDQFRKKRDAELSIFVIGIADVLKVFVQRLSRLEEEEKNLIETAKRKFFAEVLNAVREFQLQIQATQKRRRQRNDGVQAWHGRQRQRATRAEKLRLMALKSDDQEAYMKLVKESKNERLTTLLEETNKLLANLGAAVQRQKDAKLPEGIDLLKDSESDLSELDAPRSEPLQDLLPDQDIDITESDNNDDSNDLLEGQRQYNSAIHSIQEKVTEQPSLLEGGELRSYQLEGLQWMVSLFNNNLNGILADEMGLGKTIQTISLIAYLLENKGVPGPYLIVAPKAVLPNWVNEFATWVPSIAAFLYDGRLEERKAIREKIAGEGKFNVLITHYDLIMRDKAFLKKIEWYYMIVDEGHRLKNHESALAKTLLTGYRIKRRLLLTGTPIQNSLQELWSLLNFLLPHIFNSVQNFEEWFNAPFADRGNVSLTDEEELLIIHRLHHVIRPFILRRKKDEVEKFLPGKTQVILKCDMSAWQKVYYKQVTDMGRVGLQTGSGKSKSLQNLTMQLRKCCNHPYLFVGGDYNMWKKPEIVRASGKFELLDRLLPKLRKAGHRILLFSQMTRLIDVLEIYLTLNDYKYLRLDGTTKTDQRGLLLKQFNEPDSPYFMFLLSTRAGGLGLNLQTADTVIIFDSDWNPQMDQQAEDRAHRIGQKKEVRVFVLVSVGSVEEVILERAKQKMGIDAKVIQAGLFNTTSTAQDRREMLEEIMRKGTSSLGTDVPSEREINRLAARSEDEFWMFERMDEERRRKENYRARLMQEQEVPEWAYTTQTQEEKLNNGKFHFGSVTGKRKRKEIVYSDTLSELQWLKAVESGEDLSKLSMRYNRREENASNTKTSTSKKVIESIQTVSDGTSEEDEEEQEEERAKEMSGKQRVDKSEEEEEEGEEENDGKAIFKWNTHKKKRSRYSFTCSSSDSRAQSSNGSRRK

SEQ ID NO: 29375 - protein, 941 aa, Arabidopsis thaliana
  misc_feature (1)..(941): Ceres Seq. ID no. 4814735
MMRLPRPFYGVGDPFAMEADDQFRKKRDAELSIFVIGIADVLKVFVQRLSRLEEEEKNLIETAKRKFFAEVLNAVREFQLQIQATQKRRRQRNDGVQAWHGRQRQRATRAEKLRLMALKSDDQEAYMKLVKESKNERLTTLLEETNKLLANLGAAVQRQKDAKLPEGIDLLKDSESDLSELDAPRSEPLQDLLPDQDIDITESDNNDDSNDLLEGQRQYNSAIHSIQEKVTEQPSLLEGGELRSYQLEGLQWMVSLFNNNLNGILADEMGLGKTIQTISLIAYLLENKGVPGPYLIVAPKAVLPNWVNEFATWVPSIAAFLYDGRLEERKAIREKIAGEGKFNVLITHYDLIMRDKAFLKKIEWYYMIVDEGHRLKNHESALAKTLLTGYRIKRRLLLTGTPIQNSLQELWSLLNFLLPHIFNSVQNFEEWFNAPFADRGNVSLTDEEELLIIHRLHHVIRPFILRRKKDEVEKFLPGKTQVILKCDMSAWQKVYYKQVTDMGRVGLQTGSGKSKSLQNLTMQLRKCCNHPYLFVGGDYNMWKKPEIVRASGKFELLDRLLPKLRKAGHRILLFSQMTRLIDVLEIYLTLNDYKYLRLDGTTKTDQRGLLLKQFNEPDSPYFMFLLSTRAGGLGLNLQTADTVIIFDSDWNPQMDQQAEDRAHRIGQKKEVRVFVLVSVGSVEEVILERAKQKMGIDAKVIQAGLFNTTSTAQDRREMLEEIMRKGTSSLGTDVPSEREINRLAARSEDEFWMFERMDEERRRKENYRARLMQEQEVPEWAYTTQTQEEKLNNGKFHFGSVTGKRKRKEIVYSDTLSELQWLKAVESGEDLSKLSMRYNRREENASNTKTSTSKKVIESIQTVSDGTSEEDEEEQEEERAKEMSGKQRVDKSEEEEEEGEEENDGKAIFKWNTHKKKRSRYSFTCSSSDSRAQSSNGSRRK

SEQ ID NO: 29376 - DNA, 1269 bp, Arabidopsis thaliana
  misc_feature (1)..(1269): Ceres Seq. ID no. 4814752
atggcggatttgttacccatttacctcattattttggcatttctatgcactgtcggagccattgctttggctttattccatatctacaagcacctattgaactatacggaacccatttatcagagatatattgtgcgcattgtcttcatggtcccggtttatgccttgatgtcattcttggctctcgttttgcccaagagctctatatattttaactctatccgtgaagtttacgaagcatgggtgatatataattttctatcgctgtgtttggcctgggttggaggcccaggttcggtagttataagtttaactggtcgctctctgaagccatcttggcatctcatgacgtgttgcatcccaccactaccattagacgggcgttttattagacgatgcaagcaaggttgtctgcaatttgttattctaaagccaatcctagttgctgtcacacttgtgctttatgcaaaagggaaatacaaggatggaaattttagccctgatcaatcctatctctatcttaccatcatctatacaatatcatacactgtagctctgtacgcgctggtcctcttttatgtggcatgcaaagatctgcttcagccattcaatccagtcccaaaatttgtgattataaagtctgttgtctttctaacctattggcagggtgttctagttttcctttttgctaaatctggatttataagggatgaagaagaagcagccctcttccaaaattttataatatgtgtggaaatgcttattgctgcagctgctcatttctatgcatttccgtacaaggaatatgcagaggccaatgttggaggagctcgcagtttctcaggaagtctggcacatgctcttatgctaaacgatttctaccatgatactgttcaccagtttgcaccaacatatcacgattatgtgctctataatcataatgatgggggtgaggaagggacaaggaagtaccgagcacgaacatttgtgccaactggtcaggaaatggatgctgttagaaagaacaaacacatgtttggaaacaagatagatggtgtttcggtctccagtcaatcttcagaaacaagcacacccaaaacctctggtgtaacttatgatcctgcacgccctgagagcatgaaatcttccttgctggtagatgcctcggactctgtttccacaatgtatgacatgtcgctcattgacattgatatatcgagctaccctagcaaggtaccttctgcaaatataagtggaggacctaaatag

SEQ ID NO: 29377 - protein, 422 aa, Arabidopsis thaliana
  misc_feature (1)..(422): Ceres Seq. ID no. 4814753
MADLLPIYLIILAFLCTVGAIALALFHIYKHLLNYTEPIYQRYIVRIVFMVPVYALMSFLALVLPKSSIYFNSIREVYEAWVIYNFLSLCLAWVGGPGSVVISLTGRSLKPSWHLMTCCIPPLPLDGRFIRRCKQGCLQFVILKPILVAVTLVLYAKGKYKDGNFSPDQSYLYLTIIYTISYTVALYALVLFYVACKDLLQPFNPVPKFVIIKSVVFLTYWQGVLVFLFAKSGFIRDEEEAALFQNFIICVEMLIAAAAHFYAFPYKEYAEANVGGARSFSGSLAHALMLNDFYHDTVHQFAPTYHDYVLYNHNDGGEEGTRKYRARTFVPTGQEMDAVRKNKHMFGNKIDGVSVSSQSSETSTPKTSGVTYDPARPESMKSSLLVDASDSVSTMYDMSLIDIDISSYPSKVPSANISGGPK

SEQ ID NO: 29378 - protein, 373 aa, Arabidopsis thaliana
  misc_feature (1)..(373): Ceres Seq. ID no. 4814754
MVPVYALMSFLALVLPKSSIYFNSIREVYEAWVIYNFLSLCLAWVGGPGSVVISLTGRSLKPSWHLMTCCIPPLPLDGRFIRRCKQGCLQFVILKPILVAVTLVLYAKGKYKDGNFSPDQSYLYLTIIYTISYTVALYALVLFYVACKDLLQPFNPVPKFVIIKSVVFLTYWQGVLVFLFAKSGFIRDEEEAALFQNFIICVEMLIAAAAHFYAFPYKEYAEANVGGARSFSGSLAHALMLNDFYHDTVHQFAPTYHDYVLYNHNDGGEEGTRKYRARTFVPTGQEMDAVRKNKHMFGNKIDGVSVSSQSSETSTPKTSGVTYDPARPESMKSSLLVDASDSVSTMYDMSLIDIDISSYPSKVPSANISGGPK

SEQ ID NO: 29379 - protein, 366 aa, Arabidopsis thaliana
  misc_feature (1)..(366): Ceres Seq. ID no. 4814755
MSFLALVLPKSSIYFNSIREVYEAWVIYNFLSLCLAWVGGPGSVVISLTGRSLKPSWHLMTCCIPPLPLDGRFIRRCKQGCLQFVILKPILVAVTLVLYAKGKYKDGNFSPDQSYLYLTIIYTISYTVALYALVLFYVACKDLLQPFNPVPKFVIIKSVVFLTYWQGVLVFLFAKSGFIRDEEEAALFQNFIICVEMLIAAAAHFYAFPYKEYAEANVGGARSFSGSLAHALMLNDFYHDTVHQFAPTYHDYVLYNHNDGGEEGTRKYRARTFVPTGQEMDAVRKNKHMFGNKIDGVSVSSQSSETSTPKTSGVTYDPARPESMKSSLLVDASDSVSTMYDMSLIDIDISSYPSKVPSANISGGPK

SEQ ID NO: 29380 - DNA, 1437 bp, Arabidopsis thaliana
  misc_feature (1)..(1437): Ceres Seq. ID no. 4814854
atgtccgggtccgaatctgtgtatcggaaacgccaaccaatggatatggatggttaccacaaacggagcgccggtttaaacccttgtaaacactccggtttctcacattcatcaagacccatggctccaggaatttaccgttacccagaagtgaaatcttcgttgcggagacaagttcatgcgcctgtgcggatactcaatagcggtcgagatcgtagcacacgacaaggttctggtaatgtgttgggaacctttctcacaaggaacaatgacatgtggaaaagaaatgcacttgattcgtctttacgctatagaacggatagagaagtaattgatgttgatgatgagcttggagatgttgaaatgatatctgatgatacaagtagggagggtgtcgaaaacgtggctatggaggtggacgaggtggaagagaaggcggagatgggaaatggattgttttctgaggttgccagtctgaaaaatgggagcttgagggtgggtgaatgttctaaagctaatagtagttcactcgttgtgaatcgccctgtgactgatgtcacaagttttgaagcatacagaaaggttcttgagagtgctgtgaaccggacttctaaactgaaagacagaggctttgttgatttttttaaagagagaggtcgtgctttactacgaagcttgtcttccttttggagacaagatgaagaaccagtagaggttgtacaacgtgaggcatttgtacctctttctagagaggaggagacagcagtcaggcgtgcattctcagctaatgattcaaacatcttggttactcataagaactcaaatattgatattaccgggaaaatcttgaggtgccttaaaccaggcaaatggttgaacgatgaggtcattaatctttatatggtattgctgaaagaaagggaagctagagaaccaaagaagtttcttaaatgtcattttttcaatacatttttcttcactaagttagttaattcggcgactggatacaactatggtgcagtgagaagatggacttcaatgaagaggttgggctaccatctcaaagactgtgacaagatatttatccctatccatatgaacatccactggactttggctgtaattaatataaaggaccagaaattccagtatcttgactctttcaaaggaagggagcctaaaatcctcgatgcactggctagatactttgtcgatgaagtgagggataagagtgaagtagaccttgatgtaagtcgatggagacaagaatttgtccaggaccttccaatgcagagaaatggattcgattgtggaatgtttatggtgaaatacatcgacttctatagcagaggtctggatctttgtttcactcaggaacaaatgccatatttccgggctaggacagcaaaggagattctgcaactgaaagccgagtga

SEQ ID NO: 29381 - protein, 478 aa, Arabidopsis thaliana
  misc_feature (1)..(478): Ceres Seq. ID no. 4814855
MSGSESVYRKRQPMDMDGYHKRSAGLNPCKHSGFSHSSRPMAPGIYRYPEVKSSLRRQVHAPVRILNSGRDRSTRQGSGNVLGTFLTRNNDMWKRNALDSSLRYRTDREVIDVDDELGDVEMISDDTSREGVENVAMEVDEVEEKAEMGNGLFSEVASLKNGSLRVGECSKANSSSLVVNRPVTDVTSFEAYRKVLESAVNRTSKLKDRGFVDFFKERGRALLRSLSSFWRQDEEPVEVVQREAFVPLSREEETAVRRAFSANDSNILVTHKNSNIDITGKILRCLKPGKWLNDEVINLYMVLLKEREAREPKKFLKCHFFNTFFFTKLVNSATGYNYGAVRRWTSMKRLGYHLKDCDKIFIPIHMNIHWTLAVINIKDQKFQYLDSFKGREPKILDALARYFVDEVRDKSEVDLDVSRWRQEFVQDLPMQRNGFDCGMFMVKYIDFYSRGLDLCFTQEQMPYFRARTAKEILQLKAE

SEQ ID NO: 29382 - protein, 465 aa, Arabidopsis thaliana
  misc_feature (1)..(465): Ceres Seq. ID no. 4814856
MDMDGYHKRSAGLNPCKHSGFSHSSRPMAPGIYRYPEVKSSLRRQVHAPVRILNSGRDRSTRQGSGNVLGTFLTRNNDMWKRNALDSSLRYRTDREVIDVDDELGDVEMISDDTSREGVENVAMEVDEVEEKAEMGNGLFSEVASLKNGSLRVGECSKANSSSLVVNRPVTDVTSFEAYRKVLESAVNRTSKLKDRGFVDFFKERGRALLRSLSSFWRQDEEPVEVVQREAFVPLSREEETAVRRAFSANDSNILVTHKNSNIDITGKILRCLKPGKWLNDEVINLYMVLLKEREAREPKKFLKCHFFNTFFFTKLVNSATGYNYGAVRRWTSMKRLGYHLKDCDKIFIPIHMNIHWTLAVINIKDQKFQYLDSFKGREPKILDALARYFVDEVRDKSEVDLDVSRWRQEFVQDLPMQRNGFDCGMFMVKYIDFYSRGLDLCFTQEQMPYFRARTAKEILQLKAE

SEQ ID NO: 29383 - protein, 463 aa, Arabidopsis thaliana
  misc_feature (1)..(463): Ceres Seq. ID no. 4814857
MDGYHKRSAGLNPCKHSGFSHSSRPMAPGIYRYPEVKSSLRRQVHAPVRILNSGRDRSTRQGSGNVLGTFLTRNNDMWKRNALDSSLRYRTDREVIDVDDELGDVEMISDDTSREGVENVAMEVDEVEEKAEMGNGLFSEVASLKNGSLRVGECSKANSSSLVVNRPVTDVTSFEAYRKVLESAVNRTSKLKDRGFVDFFKERGRALLRSLSSFWRQDEEPVEVVQREAFVPLSREEETAVRRAFSANDSNILVTHKNSNIDITGKILRCLKPGKWLNDEVINLYMVLLKEREAREPKKFLKCHFFNTFFFTKLVNSATGYNYGAVRRWTSMKRLGYHLKDCDKIFIPIHMNIHWTLAVINIKDQKFQYLDSFKGREPKILDALARYFVDEVRDKSEVDLDVSRWRQEFVQDLPMQRNGFDCGMFMVKYIDFYSRGLDLCFTQEQMPYFRARTAKEILQLKAE

SEQ ID NO: 29384 - DNA, 1458 bp, Arabidopsis thaliana
  misc_feature (1)..(1458): Ceres Seq. ID no. 4814877
atggatagataccagagagtcgctaaaccgaaaccagagtctccgattaacgagaatgagatccgtatcaccagtaaaggccttatccgaaactacatcagttatgccaccagtcttcttcaggagaaaagtgttaaagacattgtgttgaaggcaatggggcaggcaatcagcaagactgtggctatctctgagatactaaaaaataaaatcccaggtttgcatcaagatattgcaatcagttctattagcattactgatgtctgggagcctactgaggagggtttgtttccggtggagttgacgcgccatgtttccatgatttcaatcacattgtcattgagcgagctaaacaaagattctcctgggtatcaagctccagcacagtcagatcagtctaagcctcaatatcagccacaacaagggagacaagcccgcctaccatacaatgcttatggtgaaggtaatgccttaaactttcttgacgatttaaatctgtcaatgttgattcgtatgggagagggagaggtcgtggcagagggagaagcaggggaagaggtggatatggaaactaccaagggagttatgaaggaaaagaccaagggaactatcaagaagattatcaaggtattgttttgccatagaaggcgatcatttcgtctaatgacaatgaaggtgggtattcaaactcgggcagaggccgtggacgtggtggacgaagctatggctatcgtgattctggatatcagggtggcagaggcgggtatggtggtgggagagatggtggatatggtggtgggagagatgacgggtatggggaaaggagaaatgacgggtatggggaaaggagaaatgacaggtatggtggaggaagagacgacgggtatggtggagggagagatgacggatatggtggaggcagaaacgatggatatgggggaagaagaggcggatttcgtggcggtcgtggtggaggcagagatgaaggatacggtggcggccgaggtggatatggaggtagaagtggcggccaaggtgatgggtatggcggaggcagaggtgacgggtatggtggaggcagaggtgacgggtatggtggaggcagaggtgatggctatggtggtggccgagttgataggtatgatggaggaagacgtgatggctatggtggaggccgatatgatggctatggtgggggtaaaagtgatggttatggaggtggccgaggcggataccgtggaggtagaggcggatatggtcgtggacgtggaaggatgggtaatggtggtcgttcaagggatggtgctagtaaccaaaacgaagcctaagctgtttcatatcccattttctaagctgtatgggttagctgctgcatatttttccgttgccttaaagacccttcaaattcttagcacaatcccaaggggtttgatatgttttaaaaaaggttatggttaa

SEQ ID NO: 29385 - protein, 485 aa, Arabidopsis thaliana
  misc_feature (1)..(485): Ceres Seq. ID no. 4814878
MDRYQRVAKPKPESPINENEIRITSKGLIRNYISYATSLLQEKSVKDIVLKAMGQAISKTVAISEILKNKIPGLHQDIAISSISITDVWEPTEEGLFPVELTRHVSMISITLSLSELNKDSPGYQAPAQSDQSKPQYQPQQGRQARLPYNAYGEGNALNFLDDLNLSMLIRMGEGEVVAEGEAGEEVDMETTKGVMKEKTKGTIKKIIKVLFCHRRRSFRLMTMKVGIQTRAEAVDVVDEAMAIVILDIRVAEAGMVVGEMVDMVVGEMTGMGKGEMTGMGKGEMTGMVEEETTGMVEGEMTDMVEAETMDMGEEEADFVAVVVEAEMKDTVAAEVDMEVEVAAKVMGMAEAEVTGMVEAEVTGMVEAEVMAMVVAELIGMMEEDVMAMVEADMMAMVGVKVMVMEVAEADTVEVEADMVVDVEGWVMVVVQGMVLVTKTKPKLFHIPFSKLYGLAAAYFSVALKTLQILSTIPRGLICFKKGYG

SEQ ID NO: 29386 - protein, 433 aa, Arabidopsis thaliana
  misc_feature (1)..(433): Ceres Seq. ID no. 4814879
MGQAISKTVAISEILKNKIPGLHQDIAISSISITDVWEPTEEGLFPVELTRHVSMISITLSLSELNKDSPGYQAPAQSDQSKPQYQPQQGRQARLPYNAYGEGNALNFLDDLNLSMLIRMGEGEVVAEGEAGEEVDMETTKGVMKEKTKGTIKKIIKVLFCHRRRSFRLMTMKVGIQTRAEAVDVVDEAMAIVILDIRVAEAGMVVGEMVDMVVGEMTGMGKGEMTGMGKGEMTGMVEEETTGMVEGEMTDMVEAETMDMGEEEADFVAVVVEAEMKDTVAAEVDMEVEVAAKVMGMAEAEVTGMVEAEVTGMVEAEVMAMVVAELIGMMEEDVMAMVEADMMAMVGVKVMVMEVAEADTVEVEADMVVDVEGWVMVVVQGMVLVTKTKPKLFHIPFSKLYGLAAAYFSVALKTLQILSTIPRGLICFKKGYG

SEQ ID NO: 29387 - protein, 379 aa, Arabidopsis thaliana
  misc_feature (1)..(379): Ceres Seq. ID no. 4814880
MISITLSLSELNKDSPGYQAPAQSDQSKPQYQPQQGRQARLPYNAYGEGNALNFLDDLNLSMLIRMGEGEVVAEGEAGEEVDMETTKGVMKEKTKGTIKKIIKVLFCHRRRSFRLMTMKVGIQTRAEAVDVVDEAMAIVILDIRVAEAGMVVGEMVDMVVGEMTGMGKGEMTGMGKGEMTGMVEEETTGMVEGEMTDMVEAETMDMGEEEADFVAVVVEAEMKDTVAAEVDMEVEVAAKVMGMAEAEVTGMVEAEVTGMVEAEVMAMVVAELIGMMEEDVMAMVEADMMAMVGVKVMVMEVAEADTVEVEADMVVDVEGWVMVVVQGMVLVTKTKPKLFHIPFSKLYGLAAAYFSVALKTLQILSTIPRGLICFKKGYG

SEQ ID NO: 29388 - DNA, 1947 bp, Arabidopsis thaliana
  misc_feature (1)..(1947): Ceres Seq. ID no. 4814881
atgaacattggatccaagacattggtcgaacaacgtttctctcgcggatttgcatcagtacgacgagtatctcgagcttcttcttcttcttcttcttctccttcctctccacatgttgatttgctctcttttattaaagcttcacttgataaacttgaaggtccttcccatcattggttgaatcgagactttgggaataaacagcttttcaaggacaaaggaacttatgtagttctagctggacatttgctagacggaacaagtgatctgagtggtttctttgagaaactaaagttgcttcagcagaggtctccgggtgtctgtttcatgggcatccacttcagtgatcaagctcgaatcgctgatgatcgaactgctctagctgagttgattttgaaggaatacctcacttttcctgtgctactttccgaaaaagaatttcccaagacaagtggggaagtacgttacatcgtgtttaaagattttaagaatcctctaatctacgaagagaaggatcttgatattgcttctgtagttaaagctcttgacagcctcctcactcaagatactgagaaatccaagtctgtcagacttttcacgaacacttggtcaaaacaagcagaggctatcaaggaatcacatttcccttctttctttcaggatttgttactttactttccaggttgtatctctgcagacgaagttggagaccgtctgtttctttctgataccaaccatcatcgtattattattttcgaaaacagtgggaagattgtagacagtattggttgtttcccaggttttgaggatggagattttgaatctgcaaagatgttacgtcctacagggaccctttacgacgaagcggaggattgtctttacattgtagattctgaggttattaagaaaactggtggcttatggtcttggataatggagaaaatgggtcttggaaaagatgacgatacaacagttgatgctgataccaaatcagaagaatttgatgcacgctctcttttgtttccatggcatatactgaagcgtgacgatgagagtcttttagtcattaacaaaagcttttcgaagttatggataataaattttgcttcaggagagatcgaagaagttgtggaagggttttcgaagataattgagatctgcggtcaatcaatcacagagaagctatcagtgttggaacatatgccttctaactggttgcaacagcaaactgcggctatcgcctcatttaaggagcagccaagtgcttcccttttgtcttcttttactaaacttggagacgacattgtcatgacagatataggtaaaattagcatacggttgaacatagagattcctccatgcacggagcttgttgaaccgatacaagaaagctgcatatggcgacagacaagaggcgcaatcagtgaattctcgagtgctggaagtgcagttgaaccttcagaaaagattggagtttcacaacaatggtatgatgaattagacagcctcgccaaagaaatagccaaccctgaagcagctgaggaagaggaagaagaagatgttaacccctctgaggttgacagagaagaagatggacgtatccacattgattgtcctgtcaaaacaagtcctggctcaagtgagcttattgtttatgcagctttgtatttaagactagcgagaaacgaagagacagaaagtgcgacccaggaagaactggcgagaaaaatagcaaagattttaaagccagtacggaacattacaactatgaaggaagatttgtttgtgaatttgttgtccaagtcaaagagagaattgagagacattgtcttcataaagccgatgcatgtgcggataaggttagactcgaaggatcatccaaaagccgataactcaagagacgtaatcttgactgactcctctgttgaggttgatgtctctctctga

SEQ ID NO: 29389 - protein, 648 aa, Arabidopsis thaliana
  misc_feature (1)..(648): Ceres Seq. ID no. 4814882
MNIGSKTLVEQRFSRGFASVRRVSRASSSSSSSPSSPHVDLLSFIKASLDKLEGPSHHWLNRDFGNKQLFKDKGTYVVLAGHLLDGTSDLSGFFEKLKLLQQRSPGVCFMGIHFSDQARIADDRTALAELILKEYLTFPVLLSEKEFPKTSGEVRYIVFKDFKNPLIYEEKDLDIASVVKALDSLLTQDTEKSKSVRLFTNTWSKQAEAIKESHFPSFFQDLLLYFPGCISADEVGDRLFLSDTNHHRIIIFENSGKIVDSIGCFPGFEDGDFESAKMLRPTGTLYDEAEDCLYIVDSEVIKKTGGLWSWIMEKMGLGKDDDTTVDADTKSEEFDARSLLFPWHILKRDDESLLVINKSFSKLWIINFASGEIEEVVEGFSKIIEICGQSITEKLSVLEHMPSNWLQQQTAAIASFKEQPSASLLSSFTKLGDDIVMTDIGKISIRLNIEIPPCTELVEPIQESCIWRQTRGAISEFSSAGSAVEPSEKIGVSQQWYDELDSLAKEIANPEAAEEEEEEDVNPSEVDREEDGRIHIDCPVKTSPGSSELIVYAALYLRLARNEETESATQEELARKIAKILKPVRNITTMKEDLFVNLLSKSKRELRDIVFIKPMHVRIRLDSKDHPKADNSRDVILTDSSVEVDVSL

SEQ ID NO: 29390 - protein, 539 aa, Arabidopsis thaliana
  misc_feature (1)..(539): Ceres Seq. ID no. 4814883
MGIHFSDQARIADDRTALAELILKEYLTFPVLLSEKEFPKTSGEVRYIVFKDFKNPLIYEEKDLDIASVVKALDSLLTQDTEKSKSVRLFTNTWSKQAEAIKESHFPSFFQDLLLYFPGCISADEVGDRLFLSDTNHHRIIIFENSGKIVDSIGCFPGFEDGDFESAKMLRPTGTLYDEAEDCLYIVDSEVIKKTGGLWSWIMEKMGLGKDDDTTVDADTKSEEFDARSLLFPWHILKRDDESLLVINKSFSKLWIINFASGEIEEVVEGFSKIIEICGQSITEKLSVLEHMPSNWLQQQTAAIASFKEQPSASLLSSFTKLGDDIVMTDIGKISIRLNIEIPPCTELVEPIQESCIWRQTRGAISEFSSAGSAVEPSEKIGVSQQWYDELDSLAKEIANPEAAEEEEEEDVNPSEVDREEDGRIHIDCPVKTSPGSSELIVYAALYLRLARNEETESATQEELARKIAKILKPVRNITTMKEDLFVNLLSKSKRELRDIVFIKPMHVRIRLDSKDHPKADNSRDVILTDSSVEVDVSL

SEQ ID NO: 29391 - protein, 371 aa, Arabidopsis thaliana
  misc_feature (1)..(371): Ceres Seq. ID no. 4814884
MLRPTGTLYDEAEDCLYIVDSEVIKKTGGLWSWIMEKMGLGKDDDTTVDADTKSEEFDARSLLFPWHILKRDDESLLVINKSFSKLWIINFASGEIEEVVEGFSKIIEICGQSITEKLSVLEHMPSNWLQQQTAAIASFKEQPSASLLSSFTKLGDDIVMTDIGKISIRLNIEIPPCTELVEPIQESCIWRQTRGAISEFSSAGSAVEPSEKIGVSQQWYDELDSLAKEIANPEAAEEEEEEDVNPSEVDREEDGRIHIDCPVKTSPGSSELIVYAALYLRLARNEETESATQEELARKIAKILKPVRNITTMKEDLFVNLLSKSKRELRDIVFIKPMHVRIRLDSKDHPKADNSRDVILTDSSVEVDVSL

SEQ ID NO: 29392 - DNA, 840 bp, Arabidopsis thaliana
  misc_feature (1)..(840): Ceres Seq. ID no. 4815026
atggcggcgactatggcagattataatgatcagatcgtcaatgagacctctttttacaaccgaatggttctgagtcaccttttgccggtgaatctatgggaacctttaccacatttcctccagacatggctccggaactacctcgccggaaacatactctacttcatctccggcttcctctggtgcttctacatctattaccttaaactcaacgtttacgtccccaaagaatccattcctacgagaaaggcaatgcttttgcaaatatacgtggcaatgaaggctatgccttggtacactcttcttccagctgtctctgagtatatgatcgagcatggttggaccaaatgttactctacacttgaccatttcaactggttcctctgtttcctctacatagctctctatcttgttttagttgagtttatgatttattgggttcacaaagagcttcatgacattaaatttctctataagcatctccatgctacccatcatatgtacaacaagcaaaacacactctctccatttgccgggctcgcattccatccgctggacgggatacttcaggctataccgcacgtgatagcgctgtttatagtgccgattcatctcataacacatctgagtcttttgtttttggaagggatatggacagcaagcatccatgattgcatacatggtaacatctggcctataatgggtgcaggataccataccatacaccatacaacatacaagcataactatggtcattataccatatggatggactggatgtttggctctcttatggttcctttagcagaaaaagacagtttcaaggagaaagaaaagtga

SEQ ID NO: 29393 - protein, 279 aa, Arabidopsis thaliana
  misc_feature (1)..(279): Ceres Seq. ID no. 4815027
MAATMADYNDQIVNETSFYNRMVLSHLLPVNLWEPLPHFLQTWLRNYLAGNILYFISGFLWCFYIYYLKLNVYVPKESIPTRKAMLLQIYVAMKAMPWYTLLPAVSEYMIEHGWTKCYSTLDHFNWFLCFLYIALYLVLVEFMIYWVHKELHDIKFLYKHLHATHHMYNKQNTLSPFAGLAFHPLDGILQAIPHVIALFIVPIHLITHLSLLFLEGIWTASIHDCIHGNIWPIMGAGYHTIHHTTYKHNYGHYTIWMDWMFGSLMVPLAEKDSFKEKEK

SEQ ID NO: 29394 - protein, 275 aa, Arabidopsis thaliana
  misc_feature (1)..(275): Ceres Seq. ID no. 4815028
MADYNDQIVNETSFYNRMVLSHLLPVNLWEPLPHFLQTWLRNYLAGNILYFISGFLWCFYIYYLKLNVYVPKESIPTRKAMLLQIYVAMKAMPWYTLLPAVSEYMIEHGWTKCYSTLDHFNWFLCFLYIALYLVLVEFMIYWVHKELHDIKFLYKHLHATHHMYNKQNTLSPFAGLAFHPLDGILQAIPHVIALFIVPIHLITHLSLLFLEGIWTASIHDCIHGNIWPIMGAGYHTIHHTTYKHNYGHYTIWMDWMFGSLMVPLAEKDSFKEKEK

SEQ ID NO: 29395 - protein, 258 aa, Arabidopsis thaliana
  misc_feature (1)..(258): Ceres Seq. ID no. 4815029
MVLSHLLPVNLWEPLPHFLQTWLRNYLAGNILYFISGFLWCFYIYYLKLNVYVPKESIPTRKAMLLQIYVAMKAMPWYTLLPAVSEYMIEHGWTKCYSTLDHFNWFLCFLYIALYLVLVEFMIYWVHKELHDIKFLYKHLHATHHMYNKQNTLSPFAGLAFHPLDGILQAIPHVIALFIVPIHLITHLSLLFLEGIWTASIHDCIHGNIWPIMGAGYHTIHHTTYKHNYGHYTIWMDWMFGSLMVPLAEKDSFKEKEK

SEQ ID NO: 29396 - DNA, 1236 bp, Arabidopsis thaliana
  misc_feature (1)..(1236): Ceres Seq. ID no. 4815034
atggctcttctcttgaactcgacgataacggtggctatgaagcagaatccgctggtcgcggtatcttttccgcggactacttgcttgggatctagtttttctcctcctcgtcttcttcgagtttcgtgtgttgccacaaaccctagcaagacgagtgaagaaacagacaagaaaaagtttcgacccatcaaagaagtaccaaaccaagtgacccacacaataacacaagagaaactggagatcttcaaatcaatggagaattgggcccaagaaaacttattatcttacctcaaacccgtcgaagcttcctggcaaccacaagactttttgccggaaaccaacgacgaagaccgattctacgaacaagtaaaagagctaagagatcgaacaaaagagatccctgacgattactttgtagttcttgtcggagatatgatcaccgaagaagctttaccaacttatcaaactactttgaacactctcgacggcgtaaaagacgagaccggtggtagtctaacgccgtgggcggtttgggttcgagcatggacggcggaggaaaatcgacacggtgatttgttgaataagtatctttacttatcaggtcgtgttgacatgcgacatgttgaaaagactattcaatatcttatcggatccggcatggactccaaatttgagaacaatccctataatggcttcatctatacttcttttcaagagagagccactttcatctcccatggcaacacggcgaagctagccacaacctacggcgacacaactctcgccaaaatctgcggaacaatcgcggcggatgagaagcggcatgagacggcgtatacacggatcgtcgagaagcttttcgagatcgatcccgatggtaccgtacaagctctagcgagtatgatgaggaagcgaatcacgatgccggctcatctgatgcacgacggtcgcgacgacgatctgttcgatcattacgctgcggtggcgcagagaatcggagtttataccgcgacggattacgcagggattttggagtttttgttgcggcggtgggaggtggagaagttagggatgggtttgtccggcgaaggaaggagagcacaggattatctgtgtaccttgccgcagaggatcaggaggttagaggaaagagctaacgatagagtcaaacttgcgtcaaagtcaaaaccttctgtttccttcagctggatttatgggagagaagttgaactataa

SEQ ID NO: 29397 - protein, 411 aa, Arabidopsis thaliana
  misc_feature (1)..(411): Ceres Seq. ID no. 4815035
MALLLNSTITVAMKQNPLVAVSFPRTTCLGSSFSPPRLLRVSCVATNPSKTSEETDKKKFRPIKEVPNQVTHTITQEKLEIFKSMENWAQENLLSYLKPVEASWQPQDFLPETNDEDRFYEQVKELRDRTKEIPDDYFVVLVGDMITEEALPTYQTTLNTLDGVKDETGGSLTPWAVWVRAWTAEENRHGDLLNKYLYLSGRVDMRHVEKTIQYLIGSGMDSKFENNPYNGFIYTSFQERATFISHGNTAKLATTYGDTTLAKICGTIAADEKRHETAYTRIVEKLFEIDPDGTVQALASMMRKRITMPAHLMHDGRDDDLFDHYAAVAQRIGVYTATDYAGILEFLLRRWEVEKLGMGLSGEGRRAQDYLCTLPQRIRRLEERANDRVKLASKSKPSVSFSWIYGREVEL

SEQ ID NO: 29398 - protein, 399 aa, Arabidopsis thaliana
  misc_feature (1)..(399): Ceres Seq. ID no. 4815036
MKQNPLVAVSFPRTTCLGSSFSPPRLLRVSCVATNPSKTSEETDKKKFRPIKEVPNQVTHTITQEKLEIFKSMENWAQENLLSYLKPVEASWQPQDFLPETNDEDRFYEQVKELRDRTKEIPDDYFVVLVGDMITEEALPTYQTTLNTLDGVKDETGGSLTPWAVWVRAWTAEENRHGDLLNKYLYLSGRVDMRHVEKTIQYLIGSGMDSKFENNPYNGFIYTSFQERATFISHGNTAKLATTYGDTTLAKICGTIAADEKRHETAYTRIVEKLFEIDPDGTVQALASMMRKRITMPAHLMHDGRDDDLFDHYAAVAQRIGVYTATDYAGILEFLLRRWEVEKLGMGLSGEGRRAQDYLCTLPQRIRRLEERANDRVKLASKSKPSVSFSWIYGREVEL

SEQ ID NO: 29399 - protein, 327 aa, Arabidopsis thaliana
  misc_feature (1)..(327): Ceres Seq. ID no. 4815037
MENWAQENLLSYLKPVEASWQPQDFLPETNDEDRFYEQVKELRDRTKEIPDDYFVVLVGDMITEEALPTYQTTLNTLDGVKDETGGSLTPWAVWVRAWTAEENRHGDLLNKYLYLSGRVDMRHVEKTIQYLIGSGMDSKFENNPYNGFIYTSFQERATFISHGNTAKLATTYGDTTLAKICGTIAADEKRHETAYTRIVEKLFEIDPDGTVQALASMMRKRITMPAHLMHDGRDDDLFDHYAAVAQRIGVYTATDYAGILEFLLRRWEVEKLGMGLSGEGRRAQDYLCTLPQRIRRLEERANDRVKLASKSKPSVSFSWIYGREVEL

SEQ ID NO: 29400 - DNA, 1281 bp, Arabidopsis thaliana
  misc_feature (1)..(1281): Ceres Seq. ID no. 4815194
atggttaggatttcagttttagtgtgtttggttcttttggttacaataggagtcatggttagtgtctcactcgctgacaacaacgaagagaaatcgactgatctgaagaaattcaaaggaggagtaactgatcactcgattagtaaggcaaatgataatgatcacgacgatgatgatcatgatcaagacgatgataatgatggagatcacgatgacgatgaccatgacgatgataatgatcatgacgatgataataatgatcatgatgatgatgataataatgatgataataatgatggagacgatgaccatgatgatgataataacgatgatggtgatgacgaaaagaagacgttgagggtacacgagctaaagaaggggaatctaacggtcaaatttacaaaccggggtgcttctatcatgtctctccttttccccaatataaatggaaaattagaggacattgttctgggatatgacagcgtcaatgaccacatgattgacacggtattttgtggagtgacgttggcacgtgtagccagtaaaaaggaaaaggccgctgcaaacgatggcaaaaacacgatccatggtgggacgaaagagtctagcgatgtgatttggagagttaagaaacacaaacataatggcaaaaaaccttatattgttttcacatacacaacaagtcctgatggcgatcaagggaaacttgaagtcactgtgacatataagctggtaggagaaaacagattgaaaatggtgatgcaagcaaaggctaaagagaaaactactccgttgaatttggttcatcgttcttattggaatcttggtggtcataacaatgaagatatcttctctgaagaaattcaaattctcggttccggttatactcatctcgacgataatctcactccaaccgggaaaatcctcgccgttaaaggaacacccttcgattttcgccaactccgacctattaaagacaacatcaatgagcttaagacagggtatggtataaattattgtctagatggtgttgcaaataagatgagaaaagtcgtggagcttgtggacaataaatcgaagataaaaatggagttatctacagaccaatccggtctaaggttgaaaaccactaaaccaaaaaatggatcggttcataaagcttactctggtttatgtctagaatcacatgcaatcaattaccaatatcgttcttcgcagataattgaaccgggggaaacttataagcatactatgctctttaagttttcttttgttccgtaa

SEQ ID NO: 29401 - protein, 426 aa, Arabidopsis thaliana
  misc_feature (1)..(426): Ceres Seq. ID no. 4815195
MVRISVLVCLVLLVTIGVMVSVSLADNNEEKSTDLKKFKGGVTDHSISKANDNDHDDDDHDQDDDNDGDHDDDDHDDDNDHDDDNNDHDDDDNNDDNNDGDDDHDDDNNDDGDDEKKTLRVHELKKGNLTVKFTNRGASIMSLLFPNINGKLEDIVLGYDSVNDHMIDTVFCGVTLARVASKKEKAAANDGKNTIHGGTKESSDVIWRVKKHKHNGKKPYIVFTYTTSPDGDQGKLEVTVTYKLVGENRLKMVMQAKAKEKTTPLNLVHRSYWNLGGHNNEDIFSEEIQILGSGYTHLDDNLTPTGKILAVKGTPFDFRQLRPIKDNINELKTGYGINYCLDGVANKMRKVVELVDNKSKIKMELSTDQSGLRLKTTKPKNGSVHKAYSGLCLESHAINYQYRSSQIIEPGETYKHTMLFKFSFVP

SEQ ID NO: 29402 - protein, 408 aa, Arabidopsis thaliana
  misc_feature (1)..(408): Ceres Seq. ID no. 4815196
MVSVSLADNNEEKSTDLKKFKGGVTDHSISKANDNDHDDDDHDQDDDNDGDHDDDDHDDDNDHDDDNNDHDDDDNNDDNNDGDDDHDDDNNDDGDDEKKTLRVHELKKGNLTVKFTNRGASIMSLLFPNINGKLEDIVLGYDSVNDHMIDTVFCGVTLARVASKKEKAAANDGKNTIHGGTKESSDVIWRVKKHKHNGKKPYIVFTYTTSPDGDQGKLEVTVTYKLVGENRLKMVMQAKAKEKTTPLNLVHRSYWNLGGHNNEDIFSEEIQILGSGYTHLDDNLTPTGKILAVKGTPFDFRQLRPIKDNINELKTGYGINYCLDGVANKMRKVVELVDNKSKIKMELSTDQSGLRLKTTKPKNGSVHKAYSGLCLESHAINYQYRSSQIIEPGETYKHTMLFKFSFVP

SEQ ID NO: 29403 - protein, 286 aa, Arabidopsis thaliana
  misc_feature (1)..(286): Ceres Seq. ID no. 4815197
MSLLFPNINGKLEDIVLGYDSVNDHMIDTVFCGVTLARVASKKEKAAANDGKNTIHGGTKESSDVIWRVKKHKHNGKKPYIVFTYTTSPDGDQGKLEVTVTYKLVGENRLKMVMQAKAKEKTTPLNLVHRSYWNLGGHNNEDIFSEEIQILGSGYTHLDDNLTPTGKILAVKGTPFDFRQLRPIKDNINELKTGYGINYCLDGVANKMRKVVELVDNKSKIKMELSTDQSGLRLKTTKPKNGSVHKAYSGLCLESHAINYQYRSSQIIEPGETYKHTMLFKFSFVP

SEQ ID NO: 29404 - DNA, 1380 bp, Arabidopsis thaliana
  misc_feature (1)..(1380): Ceres Seq. ID no. 4815714
atgttcattgcaatggcagatttcaagcttcttttgcttatactcatccttctatctctctttgaacttgatctacttcactttcaccatgacttcttctctccttttccggtcaagatcggtttactcctgatatccatcttcttctatgcctactcaaccacccggtctaaaccggtttacctagtggatttctcatgtcaccaacccacggattcttgcaaaatctcatccgaaacgttcttcaacatggccaaaggcgctcaactctacaccgaagaaacaatccaattcatgacgaggatactaaaccggtccggtttaggagacgatacgtactccccacgttgcatgttaacctctccaccaactccatcaatgtacgaggcgagacatgaatccgaattagtcatcttcggagctcttaactcactatttaagaaaaccggaatcgaaccgagagaagtcggaatcttcatcgtaaactgcagcttgtttaaccctaacccatctctctcgtccatgatcgtaaaccggtacaagcttaaaaccgacgtcaaaacttacaatctctccggaatctccgtggacctcgccacaaatctactaaaggcaaaccctaatacctacgcagttattgttagtacggagaacatgactctaagcatgtatcgaggcaacgaccggtcaatgttagtccctaactgtctattccgagtaggtggcgctgcggttatgctctcaaaccggagtcaagaccgagtccggtctaagtacgaattgactcatattgtaaggactcacaaaggctctagcgataaacactacacttgtgctgaacaaaaagaagatagtaaaggtatcgttggagtcgcactctctaaagaactaacggttgttgctggtgacacgttaaagacgaatctaacagcacttggtccgcttgttttgcctttatctgaaaaactccggtttatcctctttttggtaaagagtaagcttttccggttaaaggttagtccatatgttccggattttaaactatgtttcaagcatttctgtattcacgctggtggtagagcgttacttgacgcggttgaaaaaggtcttggacttagtgagtttgatcttgagccgtctcggatgactttgcaccgctttggaaacacttcaagctcgtcgctgtggtacgagctggcttacgtggaggctaaatgtcgggtcaaacgaggagatagggtttggcagttggcgtttgggtcgggttttaaatgtaatagtattgtgtggagagcattgagaacgattccggctaacgagtcattggtgggtaacccgtggggtgactcggttcataagtatccagttcacgtgacctaa

SEQ ID NO: 29405 - protein, 459 aa, Arabidopsis thaliana
  misc_feature (1)..(459): Ceres Seq. ID no. 4815715
MFIAMADFKLLLLILILLSLFELDLLHFHHDFFSPFPVKIGLLLISIFFYAYSTTRSKPVYLVDFSCHQPTDSCKISSETFFNMAKGAQLYTEETIQFMTRILNRSGLGDDTYSPRCMLTSPPTPSMYEARHESELVIFGALNSLFKKTGIEPREVGIFIVNCSLFNPNPSLSSMIVNRYKLKTDVKTYNLSGISVDLATNLLKANPNTYAVIVSTENMTLSMYRGNDRSMLVPNCLFRVGGAAVMLSNRSQDRVRSKYELTHIVRTHKGSSDKHYTCAEQKEDSKGIVGVALSKELTVVAGDTLKTNLTALGPLVLPLSEKLRFILFLVKSKLFRLKVSPYVPDFKLCFKHFCIHAGGRALLDAVEKGLGLSEFDLEPSRMTLHRFGNTSSSSLWYELAYVEAKCRVKRGDRVWQLAFGSGFKCNSIVWRALRTIPANESLVGNPWGDSVHKYPVHVT

SEQ ID NO: 29406 - protein, 455 aa, Arabidopsis thaliana
  misc_feature (1)..(455): Ceres Seq. ID no. 4815716
MADFKLLLLILILLSLFELDLLHFHHDFFSPFPVKIGLLLISIFFYAYSTTRSKPVYLVDFSCHQPTDSCKISSETFFNMAKGAQLYTEETIQFMTRILNRSGLGDDTYSPRCMLTSPPTPSMYEARHESELVIFGALNSLFKKTGIEPREVGIFIVNCSLFNPNPSLSSMIVNRYKLKTDVKTYNLSGISVDLATNLLKANPNTYAVIVSTENMTLSMYRGNDRSMLVPNCLFRVGGAAVMLSNRSQDRVRSKYELTHIVRTHKGSSDKHYTCAEQKEDSKGIVGVALSKELTVVAGDTLKTNLTALGPLVLPLSEKLRFILFLVKSKLFRLKVSPYVPDFKLCFKHFCIHAGGRALLDAVEKGLGLSEFDLEPSRMTLHRFGNTSSSSLWYELAYVEAKCRVKRGDRVWQLAFGSGFKCNSIVWRALRTIPANESLVGNPWGDSVHKYPVHVT

SEQ ID NO: 29407 - protein, 376 aa, Arabidopsis thaliana
  misc_feature (1)..(376): Ceres Seq. ID no. 4815717
MAKGAQLYTEETIQFMTRILNRSGLGDDTYSPRCMLTSPPTPSMYEARHESELVIFGALNSLFKKTGIEPREVGIFIVNCSLFNPNPSLSSMIVNRYKLKTDVKTYNLSGISVDLATNLLKANPNTYAVIVSTENMTLSMYRGNDRSMLVPNCLFRVGGAAVMLSNRSQDRVRSKYELTHIVRTHKGSSDKHYTCAEQKEDSKGIVGVALSKELTVVAGDTLKTNLTALGPLVLPLSEKLRFILFLVKSKLFRLKVSPYVPDFKLCFKHFCIHAGGRALLDAVEKGLGLSEFDLEPSRMTLHRFGNTSSSSLWYELAYVEAKCRVKRGDRVWQLAFGSGFKCNSIVWRALRTIPANESLVGNPWGDSVHKYPVHVT

SEQ ID NO: 29408 - DNA, 2715 bp, Arabidopsis thaliana
  misc_feature (1)..(2715): Ceres Seq. ID no. 4815826
atgagtttggttggaagagttgggagtttgatttctcaaggggtttactctgtagcgacaccatttcatccctttggtggtgctattgatgtcatcgttgttcaacaacaagatggttctttccgtagcacgccttggtatgttaggtttggtaagttccaaggtgttctcaaaggcgctgagaagtttgtcaggatttctgttaatggaaccgaagctgattttcacatgtatcttgataattctggtgaagcatatttcatcagggaagttgatcctgcagctaatgacaccaacaatttgatttccgggtctgagaataacaatggtaatcagaataacggtgttacttatcgacttgagcacagtttatcggactctggtactggagaattacgagagggtttcgaccctttgagtcggcttgagaggacagagtctgattgtaataggaggttttatgattttcaggatgatcctccttcgccaacctcagaatatggaagtgctcgatttgacaatctaaatgtggaaagttatggggattctcaaggctcagattctgaagtggttttggtcagtattgatggacatatactaacagcccctgtgtcagttgctgagcaggaggctgagaatttacggttaaatactcctcagtttcatttggcccctggtgatgggactgagttttgtgaaggtaatactgagtttgcttcatcagagactccgtgggatactgaatatatcgacaaagtggaggagtcatctgatactgctaatattgcatctgataaagtagatgccattaatgatgagcgtaatgatttggattcccattctcgtgataatgccgaaaaagattctcatgatgctgaaagagatcttcttgggagctgtctggagcagtcagagctgaccaaaactagtgagaatgtgaagtctgaggaaccaggtcctacttttgaggatcggaatctaaaagaaggtgagtttccacttcgcaccattatggaaaatgatagaagtgaagatgaagttactattgaatcaatagatactcttgttgatagttttgaatcttctacaacccaaataacaatagaagaagtgaaaacaaccgaaggatccagaatatccgttgattctaatgctgattcagaatgtaaggatgaacaaacatctgcagaaactgccatcttgtttaacaaccaggaatccagtatatccgttgattctaatgctgattcagaatgtaaggatgaacagccacgaatatctgcagaaactgccatcttgattaacaaccaggaaggtgggattatagaatcggaagaccaggattctgagagagtctctatagattcaacgagggaggaagttgataaggataacgaggacaggaagactgtagtttcagtgggtgtgacttctagtgtcgacgaaggagaacccgatacagatcagagatatgagttatcactttgcaaggatgagcttcgtcagggtatgggacttagcgcagctgctgaagtctttgatgcacatatgatctccaaggaagaatatataaattcggccacatcaattcttgaaagtgaaaatctggttgttaggattagagaaacgtatatgccatggacgaaagctgctcgaattgtgcttgggaaagctgtgtttgatctagacttagatatccagccagatgatgtgatttctgtggaggaaaatgaatcgcctaagcccaaggatgatgaaactacaataactccttcttcatctggaacaagatggagactctggccgattccttttagaagggttaaaactgttgagcatacgggaagtaactcctcaagcgaagaagatctgtttgttgattccgaacctggcttacagaactcaccggaaacacaatcaaccacagagagtcgccatgagtctccgcgtagacaacttgtgagaactaatgtccctaccaatgaacagatcgcatctctgaatctgaaagatggtcagaatatgataacatttagtttctcaacaagagttcttggaacacaacaggtcgatgctcacatttaccggtggagatgggacaccaagatagtgatttcagatgttgatggaactataactaaatctgatgtgttaggtcagttcatgcccttcattggaaaggactggacccaatccggtgtagccaagcttttttctgccataaaggagaatggatatcagttactgtttttgagcgctcgtgccatcgttcaggcatatctaacaagaaatttcttaaataatctgaagcaggacggaaaagctctgccaaccggtcctgtggtcatttcaccagatggcctatttccagcattgtaccgtgaagtgataagaagagcacctcatgagttcaagatcgcatgtttggaggatatcaggaaactcttcccaacggattacaacccgttctatgccggatttggaaatagagacacagatgagctgagttacagaaaactcggaatcccaaagggaaagatattcataatcaacccaaagggagaagtggcaacaggacatcgcatagatgtcaagaaatcttacacttcacttcatactcttgtcaacgacatgtttcctccaacttcacttgttgagcaggaagattataacccatggaatttctggaaactgccaatagaagaggttgaatga

SEQ ID NO: 29409 - protein, 904 aa, Arabidopsis thaliana
  misc_feature (1)..(904): Ceres Seq. ID no. 4815827
MSLVGRVGSLISQGVYSVATPFHPFGGAIDVIVVQQQDGSFRSTPWYVRFGKFQGVLKGAEKFVRISVNGTEADFHMYLDNSGEAYFIREVDPAANDTNNLISGSENNNGNQNNGVTYRLEHSLSDSGTGELREGFDPLSRLERTESDCNRRFYDFQDDPPSPTSEYGSARFDNLNVESYGDSQGSDSEVVLVSIDGHILTAPVSVAEQEAENLRLNTPQFHLAPGDGTEFCEGNTEFASSETPWDTEYIDKVEESSDTANIASDKVDAINDERNDLDSHSRDNAEKDSHDAERDLLGSCLEQSELTKTSENVKSEEPGPTFEDRNLKEGEFPLRTIMENDRSEDEVTIESIDTLVDSFESSTTQITIEEVKTTEGSRISVDSNADSECKDEQTSAETAILFNNQESSISVDSNADSECKDEQPRISAETAILINNQEGGIIESEDQDSERVSIDSTREEVDKDNEDRKTVVSVGVTSSVDEGEPDTDQRYELSLCKDELRQGMGLSAAAEVFDAHMISKEEYINSATSILESENLVVRIRETYMPWTKAARIVLGKAVFDLDLDIQPDDVISVEENESPKPKDDETTITPSSSGTRWRLWPIPFRRVKTVEHTGSNSSSEEDLFVDSEPGLQNSPETQSTTESRHESPRRQLVRTNVPTNEQIASLNLKDGQNMITFSFSTRVLGTQQVDAHIYRWRWDTKIVISDVDGTITKSDVLGQFMPFIGKDWTQSGVAKLFSAIKENGYQLLFLSARAIVQAYLTRNFLNNLKQDGKALPTGPVVISPDGLFPALYREVIRRAPHEFKIACLEDIRKLFPTDYNPFYAGFGNRDTDELSYRKLGIPKGKIFIINPKGEVATGHRIDVKKSYTSLHTLVNDMFPPTSLVEQEDYNPWNFWKLPIEEVE

SEQ ID NO: 29410 - protein, 828 aa, Arabidopsis thaliana
  misc_feature (1)..(828): Ceres Seq. ID no. 4815828
MYLDNSGEAYFIREVDPAANDTNNLISGSENNNGNQNNGVTYRLEHSLSDSGTGELREGFDPLSRLERTESDCNRRFYDFQDDPPSPTSEYGSARFDNLNVESYGDSQGSDSEVVLVSIDGHILTAPVSVAEQEAENLRLNTPQFHLAPGDGTEFCEGNTEFASSETPWDTEYIDKVEESSDTANIASDKVDAINDERNDLDSHSRDNAEKDSHDAERDLLGSCLEQSELTKTSENVKSEEPGPTFEDRNLKEGEFPLRTIMENDRSEDEVTIESIDTLVDSFESSTTQITIEEVKTTEGSRISVDSNADSECKDEQTSAETAILFNNQESSISVDSNADSECKDEQPRISAETAILINNQEGGIIESEDQDSERVSIDSTREEVDKDNEDRKTVVSVGVTSSVDEGEPDTDQRYELSLCKDELRQGMGLSAAAEVFDAHMISKEEYINSATSILESENLVVRIRETYMPWTKAARIVLGKAVFDLDLDIQPDDVISVEENESPKPKDDETTITPSSSGTRWRLWPIPFRRVKTVEHTGSNSSSEEDLFVDSEPGLQNSPETQSTTESRHESPRRQLVRTNVPTNEQIASLNLKDGQNMITFSFSTRVLGTQQVDAHIYRWRWDTKIVISDVDGTITKSDVLGQFMPFIGKDWTQSGVAKLFSAIKENGYQLLFLSARAIVQAYLTRNFLNNLKQDGKALPTGPVVISPDGLFPALYREVIRRAPHEFKIACLEDIRKLFPTDYNPFYAGFGNRDTDELSYRKLGIPKGKIFIINPKGEVATGHRIDVKKSYTSLHTLVNDMFPPTSLVEQEDYNPWNFWKLPIEEVE

SEQ ID NO: 29411 - protein, 567 aa, Arabidopsis thaliana
  misc_feature (1)..(567): Ceres Seq. ID no. 4815829
MENDRSEDEVTIESIDTLVDSFESSTTQITIEEVKTTEGSRISVDSNADSECKDEQTSAETAILFNNQESSISVDSNADSECKDEQPRISAETAILINNQEGGIIESEDQDSERVSIDSTREEVDKDNEDRKTVVSVGVTSSVDEGEPDTDQRYELSLCKDELRQGMGLSAAAEVFDAHMISKEEYINSATSILESENLVVRIRETYMPWTKAARIVLGKAVFDLDLDIQPDDVISVEENESPKPKDDETTITPSSSGTRWRLWPIPFRRVKTVEHTGSNSSSEEDLFVDSEPGLQNSPETQSTTESRHESPRRQLVRTNVPTNEQIASLNLKDGQNMITFSFSTRVLGTQQVDAHIYRWRWDTKIVISDVDGTITKSDVLGQFMPFIGKDWTQSGVAKLFSAIKENGYQLLFLSARAIVQAYLTRNFLNNLKQDGKALPTGPVVISPDGLFPALYREVIRRAPHEFKIACLEDIRKLFPTDYNPFYAGFGNRDTDELSYRKLGIPKGKIFIINPKGEVATGHRIDVKKSYTSLHTLVNDMFPPTSLVEQEDYNPWNFWKLPIEEVE

SEQ ID NO: 29412 - DNA, 1317 bp, Arabidopsis thaliana
  misc_feature (1)..(1317): Ceres Seq. ID no. 4815930
atgacacttgctagcgattttggttttccatccgctatatcttcatcttttacaattctagaagagagataccacaataactttcctaacactttgtgtgtttcatcaggacaggaatcgatgaataacaaccccgtcccctgtcaggtgtttcctctggtctctggtggtagttctggtgggaatttgttttcatcttcttccggattctgcaatggtgtctatgtttcatcttcctcccaggcacggccatctgtttctaccgtgccaagagacagaattactgttgctcacgtctctggtgaagggcagaggcaggaatgccctgtggaaacacattccttgcaattgatcaatcaacctcaagaacagaaaattatgacttggtcttcagaccagattcggggcttcttcgattttcctgttccagatccacaagcagcgagcagcagaactatggtttcatccaaggaagtgctttcaaaatgcgaatggccagactgggcggatcagttgatctctgatgatagtcttgaaccaaattggtcggagcttctaggtgatcctaatgtactcaatctatattcaaaggttcaaacacagtcttctgatatagcaaggcaagagatcgtctttagaaatcagcatcaggtggatccatcaatggagccgtttaatgccaaaagcccaccagctagttcaatgacatctaagcaaagaatgcgttggacaccagaacttcatgaagcatttgtcgaagctatcaatcagctcggtggtagtgaacgagccacccctaaggctgttttgaagctcatcaatagccctgggttgaccgtttatcatgtcaaaagccatttgcagaaatacagaactgcaaggtataaaccagagctttccaaagatacagtaaagaatttgaaaaccattgaagatatcaaatctcttgacttgaagacgagcattgaaatcactgaagctctccggttacagatgaaagttcaaaaacaactccacgagcaacttgagatccaaagatcactgcagttacaaatcgaagaacaaggtcggtatcttcagatgatgattgagaaacaacagaagatgcaagagaacaaaaaagactctacttcctcatcatcaatgccagaagctgacccttcagctccatcaccaaacctttcacaacctttcctccataaagcaaccaattcagaaccatcaataactcagaaactgcagaatggttctagcacaatggatcaaagtgaatctacttctgggactagtaatagaaaacgggttagagaagattag

SEQ ID NO: 29413 - protein, 438 aa, Arabidopsis thaliana
  misc_feature (1)..(438): Ceres Seq. ID no. 4815931
MTLASDFGFPSAISSSFTILEERYHNNFPNTLCVSSGQESMNNNPVPCQVFPLVSGGSSGGNLFSSSSGFCNGVYVSSSSQARPSVSTVPRDRITVAHVSGEGQRQECPVETHSLQLINQPQEQKIMTWSSDQIRGFFDFPVPDPQAASSRTMVSSKEVLSKCEWPDWADQLISDDSLEPNWSELLGDPNVLNLYSKVQTQSSDIARQEIVFRNQHQVDPSMEPFNAKSPPASSMTSKQRMRWTPELHEAFVEAINQLGGSERATPKAVLKLINSPGLTVYHVKSHLQKYRTARYKPELSKDTVKNLKTIEDIKSLDLKTSIEITEALRLQMKVQKQLHEQLEIQRSLQLQIEEQGRYLQMMIEKQQKMQENKKDSTSSSSMPEADPSAPSPNLSQPFLHKATNSEPSITQKLQNGSSTMDQSESTSGTSNRKRVRED

SEQ ID NO: 29414 - protein, 398 aa, Arabidopsis thaliana
  misc_feature (1)..(398): Ceres Seq. ID no. 4815932
MNNNPVPCQVFPLVSGGSSGGNLFSSSSGFCNGVYVSSSSQARPSVSTVPRDRITVAHVSGEGQRQECPVETHSLQLINQPQEQKIMTWSSDQIRGFFDFPVPDPQAASSRTMVSSKEVLSKCEWPDWADQLISDDSLEPNWSELLGDPNVLNLYSKVQTQSSDIARQEIVFRNQHQVDPSMEPFNAKSPPASSMTSKQRMRWTPELHEAFVEAINQLGGSERATPKAVLKLINSPGLTVYHVKSHLQKYRTARYKPELSKDTVKNLKTIEDIKSLDLKTSIEITEALRLQMKVQKQLHEQLEIQRSLQLQIEEQGRYLQMMIEKQQKMQENKKDSTSSSSMPEADPSAPSPNLSQPFLHKATNSEPSITQKLQNGSSTMDQSESTSGTSNRKRVRED

SEQ ID NO: 29415 - protein, 312 aa, Arabidopsis thaliana
  misc_feature (1)..(312): Ceres Seq. ID no. 4815933
MTWSSDQIRGFFDFPVPDPQAASSRTMVSSKEVLSKCEWPDWADQLISDDSLEPNWSELLGDPNVLNLYSKVQTQSSDIARQEIVFRNQHQVDPSMEPFNAKSPPASSMTSKQRMRWTPELHEAFVEAINQLGGSERATPKAVLKLINSPGLTVYHVKSHLQKYRTARYKPELSKDTVKNLKTIEDIKSLDLKTSIEITEALRLQMKVQKQLHEQLEIQRSLQLQIEEQGRYLQMMIEKQQKMQENKKDSTSSSSMPEADPSAPSPNLSQPFLHKATNSEPSITQKLQNGSSTMDQSESTSGTSNRKRVRED

SEQ ID NO: 29416 - DNA, 1626 bp, Arabidopsis thaliana
  misc_feature (1)..(1626): Ceres Seq. ID no. 4816070
atggagaaaagctcatattttctgtttggtggaacaaacttcaataagaagaagtttgctcctgattttgctaaattcaagaattctacggaggatgatgattccaataagaaagtgaacttctttgtggaagaagaagaggacactgaacagccggaggcggagaaagttattgtgtcctctaagaagaggaaacgaagatcttctaattctgtgccagttgaaggattcgatgtgttcaagagctcaaagaaggcacgtgctaaaggtaaagcagaagaacaaatcacaaagaatgagattgtagagaatcccaagaaggaacttaatcgtcaaatggagcgagatgctttgtcgaggaaacagtacagcattcatgtttccggtaacaatattccaccgccgcttaaaagtttcgcagagttgtcatccaggtatggctgtgaaggatacatattacgcaatttggctgaactaggatttaaagagcctaccccaatccaaagacaggctattccaattctcctatcgggtcgtgaatgctttgcctgtgctccgactgggtcaggaaaaacctttgcttttatttgtcccatgcttataaaactcaagcgcccttcaactgatggaataagagctgttatcctttctcctgctcgggaactggctgcccaaacagctagagaaggaaagaaacttattaaaggaagcaatttccacattagattgatgactaaaccccttgtcaaaacagctgacttctcaaagctgtggtgtgatgttctcatatcaacgccgatgcggttgaaaagagcaatcaaggctaaaaagattgacttaagcaaggtcgagtaccttgtccttgatgaatctgacaagctgtttgagcagagcttgttaaagcagatagattgtgtggttaaggcttgttcaaatccttcgatcatacgttcattgttcagtgctactttgcccgattctgttgaagaacttgcacgttccataatgcatgatgctgttcgtgttatcattggccgaaaaaacacagcatctgaaaccgtcaagcaaaagctggtttttgctggaagtgaagaagggaaacttcttgctcttcgccaaagctttgcagagagtctgaatccaccggtactgatctttgtacaaagcaaagaacgagcaaaagaactctatgatgaactgaaatgtgaaaacatcagagccggagtcatccattccgatctccctccgggagagcgggaaaatgcagttgatcaattcagagcgggagaaaaatgggttttgatagccactgatgtgattgccagaggtatggatttcaaaggcatcaactgcgtgataaactatgatttcccggattcagcttctgcatacatccacaggattggacggtctgggagagcgggaaggagcggagaagcgataactttctacacggaacaagatgtgcctttcctaaggaacatagccaacacaatgatgtcatcaggctgtgaggttccatcgtggatcatgtctttgaagaagaagaaatggaggaagcataggccgagacgtgattctatatctactaaaccaaaagccgataaaaacgatacagatgagtaa

SEQ ID NO: 29417 - protein, 541 aa, Arabidopsis thaliana
  misc_feature (1)..(541): Ceres Seq. ID no. 4816071
MEKSSYFLFGGTNFNKKKFAPDFAKFKNSTEDDDSNKKVNFFVEEEEDTEQPEAEKVIVSSKKRKRRSSNSVPVEGFDVFKSSKKARAKGKAEEQITKNEIVENPKKELNRQMERDALSRKQYSIHVSGNNIPPPLKSFAELSSRYGCEGYILRNLAELGFKEPTPIQRQAIPILLSGRECFACAPTGSGKTFAFICPMLIKLKRPSTDGIRAVILSPARELAAQTAREGKKLIKGSNFHIRLMTKPLVKTADFSKLWCDVLISTPMRLKRAIKAKKIDLSKVEYLVLDESDKLFEQSLLKQIDCVVKACSNPSIIRSLFSATLPDSVEELARSIMHDAVRVIIGRKNTASETVKQKLVFAGSEEGKLLALRQSFAESLNPPVLIFVQSKERAKELYDELKCENIRAGVIHSDLPPGERENAVDQFRAGEKWVLIATDVIARGMDFKGINCVINYDFPDSASAYIHRIGRSGRAGRSGEAITFYTEQDVPFLRNIANTMMSSGCEVPSWIMSLKKKKWRKHRPRRDSISTKPKADKNDTDE

SEQ ID NO: 29418 - protein, 429 aa, Arabidopsis thaliana
  misc_feature (1)..(429): Ceres Seq. ID no. 4816072
MERDALSRKQYSIHVSGNNIPPPLKSFAELSSRYGCEGYILRNLAELGFKEPTPIQRQAIPILLSGRECFACAPTGSGKTFAFICPMLIKLKRPSTDGIRAVILSPARELAAQTAREGKKLIKGSNFHIRLMTKPLVKTADFSKLWCDVLISTPMRLKRAIKAKKIDLSKVEYLVLDESDKLFEQSLLKQIDCVVKACSNPSIIRSLFSATLPDSVEELARSIMHDAVRVIIGRKNTASETVKQKLVFAGSEEGKLLALRQSFAESLNPPVLIFVQSKERAKELYDELKCENIRAGVIHSDLPPGERENAVDQFRAGEKWVLIATDVIARGMDFKGINCVINYDFPDSASAYIHRIGRSGRAGRSGEAITFYTEQDVPFLRNIANTMMSSGCEVPSWIMSLKKKKWRKHRPRRDSISTKPKADKNDTDE

SEQ ID NO: 29419 - protein, 343 aa, Arabidopsis thaliana
  misc_feature (1)..(343): Ceres Seq. ID no. 4816073
MLIKLKRPSTDGIRAVILSPARELAAQTAREGKKLIKGSNFHIRLMTKPLVKTADFSKLWCDVLISTPMRLKRAIKAKKIDLSKVEYLVLDESDKLFEQSLLKQIDCVVKACSNPSIIRSLFSATLPDSVEELARSIMHDAVRVIIGRKNTASETVKQKLVFAGSEEGKLLALRQSFAESLNPPVLIFVQSKERAKELYDELKCENIRAGVIHSDLPPGERENAVDQFRAGEKWVLIATDVIARGMDFKGINCVINYDFPDSASAYIHRIGRSGRAGRSGEAITFYTEQDVPFLRNIANTMMSSGCEVPSWIMSLKKKKWRKHRPRRDSISTKPKADKNDTDE

SEQ ID NO: 29420 - DNA, 702 bp, Arabidopsis thaliana
  misc_feature (1)..(702): Ceres Seq. ID no. 4816221
atgtcaatcccaccatcttcaggttcttcttcttcatcttcctcgtctcagtacacatacgcagctaattcttactattccgctccgtatcagcctccacagccttacgcggcggcgccttcgcctgctgtaccggcgcctgtggcatccattcccggagctacggtctatcctcagcctgttggaccggttcctgccgtctacgcttaccctcagtaccaacaggcacatcaattgttccaaagagatgcacagacaattacaccagaagctcttgagaatgtaaaagctgctttggcaagtagtgaaaccgaacacaaagcagaaactaaaaagagagccattcctcgtaaagctgctggacagtcttgggaggatcctactctttcagaatggccagaaaatgactatcgtctgttctgtggtgatcttgggaacgaagtgaatgatgatgttctttccaaagcatttgctagattccccaccttcaatatggccaaggtcattagagataagcggactggtaaaaccaagggttatgggtttgtgagtttcttaaatcctgcggatctagcagcagccttaaaagaaatgaatggtaagtatgttggaaatcgtccgataaaactacgaaagagtagctggaaagagagaacagatcaggaggctgctgaaagacaaaaggcaacatcacagcaataa

SEQ ID NO: 29421 - protein, 233 aa, Arabidopsis thaliana
  misc_feature (1)..(233): Ceres Seq. ID no. 4816222
MSIPPSSGSSSSSSSSQYTYAANSYYSAPYQPPQPYAAAPSPAVPAPVASIPGATVYPQPVGPVPAVYAYPQYQQAHQLFQRDAQTITPEALENVKAALASSETEHKAETKKRAIPRKAAGQSWEDPTLSEWPENDYRLFCGDLGNEVNDDVLSKAFARFPTFNMAKVIRDKRTGKTKGYGFVSFLNPADLAAALKEMNGKYVGNRPIKLRKSSWKERTDQEAAERQKATSQQ

SEQ ID NO: 29422 - DNA, 2085 bp, Arabidopsis thaliana
  misc_feature (1)..(2085): Ceres Seq. ID no. 4816279
atggctatgcctagggcaacctctggtcccgcttacccggagaggttctacgctgctgcatcttatgtcggtctcgacggatctgattcgtcggcgaaaaacgtcatctcgaaattccccgatgatactgcactacttctctatgcgctataccagcaggctactgtaggaccatgcaacactccgaaacctagtgcctggagaccagtggagcaaagcaaatggaaaaggagatgtcttagatttcatcaattactagagcgtaagaatccaaatgcattagggaaacgggaaaggagtactttagtttggcaggggctcggaaccatgccctccattgaggcaatgcgtctctttgtgaaaattctggaggaagatgatcctggttggtattcgagggcatctaatgatattccagatcctgttgtagatgtccaaattaatagagcaaaagatgagcctgttgttgagaatgggagcacatttagtgagacaaaaacaatttctacggagaatggacgtttggctgaaacccaagataaagatgtagtctcagaagactcaaatactgtttctgtatataaccagtggactgcaccccaaacatcaggtcagcgtccaaaagctcgttacgagcatggcgcagcagttattcaagataagatgtatatatatggtggaaatcacaatggccgttaccttggtgatcttcatgttctagatttaaaaagttggacttggtcaagagttgaaaccaaggttgcaacagaatctcaggaaacatcaactccgacattgttagctccttgtgctggtcattctttgatagcatgggacaacaagctgctgtctatcggtggtcacacaaaggatccctcagaatctatgcaagtgaaggtctttgatccccataccattacatggtcaatgttaaagacatatggaaaaccaccggtttcacgtggaggccagtcagttacaatggtgggtaaaaccttggtgatatttggcgggcaagatgcaaagagatcacttctgaacgatttgcatatacttgacctagacacgatgacctgggatgagatagatgccgtgggtgtatctccatctccgaggtctgatcatgctgctgcagtgcatgcagaacggttccttcttatctttggtggcggctcacatgcaacctgtttcgatgacctgcatgtccttgatttgcaaactatggagtggtcaagaccagcacagcaaggtgatgcaccaactccaagagctggacatgctggcgtgacaattggggagaactggtttattgttggtggcggtgataacaagagtggggcatcggagagtgttgtactaaacatgtcaactcttgcatggtcggtcgttgcttcagttcaaggacgtgtacctcttgctagcgagggattaagtttagtggtgagttcatacaatggtgaagatgtactagtcgcttttggtggatacaatggacgttacaataacgaaattaatcttcttaaaccaagccacaaatcaacattgcaaacaaagactctggaagcgcctttgccaggtagtctttctgctgttaataatgccacaaccagagacattgagtctgaggttgaggtgagccaagaaggcagggtacgggaaattgtcatggacaatgttaaccctggatcaaaggttgaaggaaacagcgaacgcattattgcgactattaaatctgagaaggaagagctggaggcatcactgaacaaagagaggatgcagactctccaactaaggcaagagttaggagaagcagaattacgaaacacagatttgtacaaggaacttcaatctgttcgtggccaacttgcagccgaacaatcaaggtgtttcaaactggaggttgatgttgcagagctaagacaaaagcttcaaacattggaaacactacagaaggaactcgaactcctgcaacgtcaaaaggctgcctcagaacaagctgcaatgaacgctaaacgacagggctcgggtggcgtatggggctggctcgctggaagccctcaggaaaaagatgatgattcgccttga

SEQ ID NO: 29423 - protein, 694 aa, Arabidopsis thaliana
  misc_feature (1)..(694): Ceres Seq. ID no. 4816280
MAMPRATSGPAYPERFYAAASYVGLDGSDSSAKNVISKFPDDTALLLYALYQQATVGPCNTPKPSAWRPVEQSKWKRRCLRFHQLLERKNPNALGKRERSTLVWQGLGTMPSIEAMRLFVKILEEDDPGWYSRASNDIPDPVVDVQINRAKDEPVVENGSTFSETKTISTENGRLAETQDKDVVSEDSNTVSVYNQWTAPQTSGQRPKARYEHGAAVIQDKMYIYGGNHNGRYLGDLHVLDLKSWTWSRVETKVATESQETSTPTLLAPCAGHSLIAWDNKLLSIGGHTKDPSESMQVKVFDPHTITWSMLKTYGKPPVSRGGQSVTMVGKTLVIFGGQDAKRSLLNDLHILDLDTMTWDEIDAVGVSPSPRSDHAAAVHAERFLLIFGGGSHATCFDDLHVLDLQTMEWSRPAQQGDAPTPRAGHAGVTIGENWFIVGGGDNKSGASESVVLNMSTLAWSVVASVQGRVPLASEGLSLVVSSYNGEDVLVAFGGYNGRYNNEINLLKPSHKSTLQTKTLEAPLPGSLSAVNNATTRDIESEVEVSQEGRVREIVMDNVNPGSKVEGNSERIIATIKSEKEELEASLNKERMQTLQLRQELGEAELRNTDLYKELQSVRGQLAAEQSRCFKLEVDVAELRQKLQTLETLQKELELLQRQKAASEQAAMNAKRQGSGGVWGWLAGSPQEKDDDSP

SEQ ID NO: 29424 - protein, 692 aa, Arabidopsis thaliana
  misc_feature (1)..(692): Ceres Seq. ID no. 4816281
MPRATSGPAYPERFYAAASYVGLDGSDSSAKNVISKFPDDTALLLYALYQQATVGPCNTPKPSAWRPVEQSKWKRRCLRFHQLLERKNPNALGKRERSTLVWQGLGTMPSIEAMRLFVKILEEDDPGWYSRASNDIPDPVVDVQINRAKDEPVVENGSTFSETKTISTENGRLAETQDKDVVSEDSNTVSVYNQWTAPQTSGQRPKARYEHGAAVIQDKMYIYGGNHNGRYLGDLHVLDLKSWTWSRVETKVATESQETSTPTLLAPCAGHSLIAWDNKLLSIGGHTKDPSESMQVKVFDPHTITWSMLKTYGKPPVSRGGQSVTMVGKTLVIFGGQDAKRSLLNDLHILDLDTMTWDEIDAVGVSPSPRSDHAAAVHAERFLLIFGGGSHATCFDDLHVLDLQTMEWSRPAQQGDAPTPRAGHAGVTIGENWFIVGGGDNKSGASESVVLNMSTLAWSVVASVQGRVPLASEGLSLVVSSYNGEDVLVAFGGYNGRYNNEINLLKPSHKSTLQTKTLEAPLPGSLSAVNNATTRDIESEVEVSQEGRVREIVMDNVNPGSKVEGNSERIIATIKSEKEELEASLNKERMQTLQLRQELGEAELRNTDLYKELQSVRGQLAAEQSRCFKLEVDVAELRQKLQTLETLQKELELLQRQKAASEQAAMNAKRQGSGGVWGWLAGSPQEKDDDSP

SEQ ID NO: 29425 - protein, 585 aa, Arabidopsis thaliana
  misc_feature (1)..(585): Ceres Seq. ID no. 4816282
MPSIEAMRLFVKILEEDDPGWYSRASNDIPDPVVDVQINRAKDEPVVENGSTFSETKTISTENGRLAETQDKDVVSEDSNTVSVYNQWTAPQTSGQRPKARYEHGAAVIQDKMYIYGGNHNGRYLGDLHVLDLKSWTWSRVETKVATESQETSTPTLLAPCAGHSLIAWDNKLLSIGGHTKDPSESMQVKVFDPHTITWSMLKTYGKPPVSRGGQSVTMVGKTLVIFGGQDAKRSLLNDLHILDLDTMTWDEIDAVGVSPSPRSDHAAAVHAERFLLIFGGGSHATCFDDLHVLDLQTMEWSRPAQQGDAPTPRAGHAGVTIGENWFIVGGGDNKSGASESVVLNMSTLAWSVVASVQGRVPLASEGLSLVVSSYNGEDVLVAFGGYNGRYNNEINLLKPSHKSTLQTKTLEAPLPGSLSAVNNATTRDIESEVEVSQEGRVREIVMDNVNPGSKVEGNSERIIATIKSEKEELEASLNKERMQTLQLRQELGEAELRNTDLYKELQSVRGQLAAEQSRCFKLEVDVAELRQKLQTLETLQKELELLQRQKAASEQAAMNAKRQGSGGVWGWLAGSPQEKDDDSP

SEQ ID NO: 29426 - DNA, 766 bp, Arabidopsis thaliana
  misc_feature (1)..(766): Ceres Seq. ID no. 4899815
tcaagtcgattgagaaaggggtgcaattcattgaaagcaaacaaacgcctgatggttcatggcatggaaactggggtatctgtttcatctacgctacttggtttgctctgagcggcctagcagccgctggtaaaacttacaaaagttgcctggctgtgcgcaaaggtgtagatttcctgcttgcgatacaggaagaagatggaggttggggcgaaagccatctgtcatgccctgagcagagatacataccattagaagggaacagatcaaacctagtgcaaaccgcatgggctatgatgggtttgattcatgccggacaggccgagagagatcctacacctcttcaccgtgctgcgaaacttatcatcacttcacaacttgaaaatggggactttccgcaacaggaaatattaggagtgttcatgaatacatgcatgctacactatgctacgtacagaaacatcttcccactatgggcactcgcggaatatcggaaagctgccttcgcaactcatcaagatctttagctctttcttaatagtcaatctttaaaagagatttggctcttctttaataatattatacacaattctgtagatatgaaagacaaaataatattattaggagacttgatgttcttaatctgagagactggggttgagatttgcgttaagcaaaatgtcaggagatttgatgttcttttgcattaaagacggtgaacagttatgatcacaagaaaggtaatgaaagactgttttgttttcgt

SEQ ID NO: 29427 - protein, 174 aa, Arabidopsis thaliana
  misc_feature (1)..(174): Ceres Seq. ID no. 4899816
KSIEKGVQFIESKQTPDGSWHGNWGICFIYATWFALSGLAAAGKTYKSCLAVRKGVDFLLAIQEEDGGWGESHLSCPEQRYIPLEGNRSNLVQTAWAMMGLIHAGQAERDPTPLHRAAKLIITSQLENGDFPQQEILGVFMNTCMLHYATYRNIFPLWALAEYRKAAFATHQDL

SEQ ID NO: 29428 - DNA, 2085 bp, Arabidopsis thaliana
  misc_feature (1)..(2085): Ceres Seq. ID no. 4902421
atgcctttaacgagatcaaagagtcttccggcgacggagaacggtggatccgatcgggagacactccaatcaggaagatcagtggctgggattctctataaatggactaattacggaaaaggatggagatctagatggttcctcctccgcgacggaatcttatcgtattccaagatccgaagaccggagaatgtcaatctcttatctccttccgatgatctgaggttaatcggagatatttccaccgatcgtctcttgagaatgaagagttgtagtggccgtagtcgtcggaaacatcacaaaaacattggcattgttcatctcaagcaggtttcatcttaccgagaaagcaagtctgatcatagaaagttttatatctttactgcaaccaagactctgcatctgaggactgattctagaagtgatagagcagcatggttacaagctttagcatctaccaggggcatagttcctctccagtcaattaatggggatttctccttcgtatcaccaaaggatttatccatatctaccgagagactaaagaaacggttgtttgaagagggaatgaacgagagtcttgtaaaagagtgcgagcagatcgtggattcagagttctgtgaagttcaagaacagattaaacttcttcacgaagagcggaaaaagttgcttgatgctttgaggcagctagagatggccaaccttgaagctgaagcctcagggatccatgacgatgtctaccaattaagaaatcacaagtattccagcttaggacgtggaaaatatagtgaatgcagtacaagtgcttcatctgatgataagcaagagtttgaggatatctctgaggaagacgaggcttccttccatgacacaaaggagtcatttggtgaacctgatgttggttctgtgctcacgcattttaagagacgaacaaagcttcctgatccagcagagaaagagagaggtgtcagtctctggtctatgatcaaagacaatgttggaaaggatctcacacgagtttgtcttcctgtttatttcaatgaaccaatatcttccctccaaaagtgttttgaagacttggagtactcttatctcttggaccaagcatatgaatacggaaaatccgggaagagtctccttagagccctcaatgtcgctgcttttgcagtctctggttatgcttccaccgaaggacgacactgtaaacctttcaaccctttgctcggagaaacatatgaagctgactttcctgaaaagggaattcgtttcttctctgagaaggttagccaccatccaacagttatcgcctgccattgcgaaggtaaagggtggaagttctggggcgacacaaacctccggtcgaagttttgggggagatcgatccaacttgaacccgttggaatcttgactctcgagtttgatgatggagaaattttccagtggagcaaagtaacaacaactatatacaatatcctacttggtaaactgtactgcgatcaccatgggataatgaaaatccgtggaaatcgccaatattcttgtatgttaaagttcaaggagcaatcgattcttgatagaaatccccaccaggttaatggttttgtagaagatgtaactggaaaaaaggctgcgacggtatttggtaaatggaatgatagcctttattatgttgctggtgatggaatcaacaaggcaagcgcctcattactgtggaaagcgacaaaggcaccacctaatgtcaccagatacaactttacatcattcgcgatgacgctaaatgaattgatacctggtttggaggaaaagctgcctccaacagattctaggctccgaccagatcaacgacacttggagaacggtgaatatgagaaggcaaatgaagagaaacaaagattagagagaagacaaagaatgtcacggcaaattcaggaaagtgggtggagaccgagatggttcgagcctcaaggagagagtgaaagctataagtatacgggcggttattgggaagcacgagatgttaaaagttgggatgattgccctaacatatttggagagttcaccgaagaggttgcagattgtgcttaa

SEQ ID NO: 29429 - protein, 694 aa, Arabidopsis thaliana
  misc_feature (1)..(694): Ceres Seq. ID no. 4902422
MPLTRSKSLPATENGGSDRETLQSGRSVAGILYKWTNYGKGWRSRWFLLRDGILSYSKIRRPENVNLLSPSDDLRLIGDISTDRLLRMKSCSGRSRRKHHKNIGIVHLKQVSSYRESKSDHRKFYIFTATKTLHLRTDSRSDRAAWLQALASTRGIVPLQSINGDFSFVSPKDLSISTERLKKRLFEEGMNESLVKECEQIVDSEFCEVQEQIKLLHEERKKLLDALRQLEMANLEAEASGIHDDVYQLRNHKYSSLGRGKYSECSTSASSDDKQEFEDISEEDEASFHDTKESFGEPDVGSVLTHFKRRTKLPDPAEKERGVSLWSMIKDNVGKDLTRVCLPVYFNEPISSLQKCFEDLEYSYLLDQAYEYGKSGKSLLRALNVAAFAVSGYASTEGRHCKPFNPLLGETYEADFPEKGIRFFSEKVSHHPTVIACHCEGKGWKFWGDTNLRSKFWGRSIQLEPVGILTLEFDDGEIFQWSKVTTTIYNILLGKLYCDHHGIMKIRGNRQYSCMLKFKEQSILDRNPHQVNGFVEDVTGKKAATVFGKWNDSLYYVAGDGINKASASLLWKATKAPPNVTRYNFTSFAMTLNELIPGLEEKLPPTDSRLRPDQRHLENGEYEKANEEKQRLERRQRMSRQIQESGWRPRWFEPQGESESYKYTGGYWEARDVKSWDDCPNIFGEFTEEVADCA

SEQ ID NO: 29430 - protein, 607 aa, Arabidopsis thaliana
  misc_feature (1)..(607): Ceres Seq. ID no. 4902423
MKSCSGRSRRKHHKNIGIVHLKQVSSYRESKSDHRKFYIFTATKTLHLRTDSRSDRAAWLQALASTRGIVPLQSINGDFSFVSPKDLSISTERLKKRLFEEGMNESLVKECEQIVDSEFCEVQEQIKLLHEERKKLLDALRQLEMANLEAEASGIHDDVYQLRNHKYSSLGRGKYSECSTSASSDDKQEFEDISEEDEASFHDTKESFGEPDVGSVLTHFKRRTKLPDPAEKERGVSLWSMIKDNVGKDLTRVCLPVYFNEPISSLQKCFEDLEYSYLLDQAYEYGKSGKSLLRALNVAAFAVSGYASTEGRHCKPFNPLLGETYEADFPEKGIRFFSEKVSHHPTVIACHCEGKGWKFWGDTNLRSKFWGRSIQLEPVGILTLEFDDGEIFQWSKVTTTIYNILLGKLYCDHHGIMKIRGNRQYSCMLKFKEQSILDRNPHQVNGFVEDVTGKKAATVFGKWNDSLYYVAGDGINKASASLLWKATKAPPNVTRYNFTSFAMTLNELIPGLEEKLPPTDSRLRPDQRHLENGEYEKANEEKQRLERRQRMSRQIQESGWRPRWFEPQGESESYKYTGGYWEARDVKSWDDCPNIFGEFTEEVADCA

SEQ ID NO: 29431 - protein, 505 aa, Arabidopsis thaliana
  misc_feature (1)..(505): Ceres Seq. ID no. 4902424
MNESLVKECEQIVDSEFCEVQEQIKLLHEERKKLLDALRQLEMANLEAEASGIHDDVYQLRNHKYSSLGRGKYSECSTSASSDDKQEFEDISEEDEASFHDTKESFGEPDVGSVLTHFKRRTKLPDPAEKERGVSLWSMIKDNVGKDLTRVCLPVYFNEPISSLQKCFEDLEYSYLLDQAYEYGKSGKSLLRALNVAAFAVSGYASTEGRHCKPFNPLLGETYEADFPEKGIRFFSEKVSHHPTVIACHCEGKGWKFWGDTNLRSKFWGRSIQLEPVGILTLEFDDGEIFQWSKVTTTIYNILLGKLYCDHHGIMKIRGNRQYSCMLKFKEQSILDRNPHQVNGFVEDVTGKKAATVFGKWNDSLYYVAGDGINKASASLLWKATKAPPNVTRYNFTSFAMTLNELIPGLEEKLPPTDSRLRPDQRHLENGEYEKANEEKQRLERRQRMSRQIQESGWRPRWFEPQGESESYKYTGGYWEARDVKSWDDCPNIFGEFTEEVADCA

SEQ ID NO: 29432 - DNA, 970 bp, Arabidopsis thaliana
  misc_feature (1)..(970): Ceres Seq. ID no. 4902493
gaacaggatctgttctataggctcgtacctctgtttccttgatttctaaggagacaggccctaaaccctggttgatgaaccatgaccgtgcggtcagagcgtgattgatggctacgatcgtcttcggacgcatccggtgctgtagaggatcgttactcggcttggtcttccttgccggggtggtcgcacggcggtctgacagaaaacaagagataaggttgaagagtgaagcaaagcttagtaatggcttcaatgcacgaagctctgttctcttctcggcttcttcaagtcaattcttctttttccttccgttgcgctcttccaattatctcttcaccagctgcagtatcttgcgcaatcaaatcgacccagttttttaaacagcgttgtagaaccaaagtgagggacttttctctatcttcactgtcccggagagggttcgtttgcagagctgctgagtacaagtttccggatcccatacctgaattcgccgaagctgagactgagaaatttagggaccatatgttaaacaaactatcaaaaagagatctttttgaagactctgttgatgaaattgttggagtctgcactgagatcttcgagacgttcttgcgcagtgagtatggaggacctggtacactcttggtgatacctttcattgacatggcagatactctcaacgaaagggaattgcctggaggtccacaagccgcccgagcagctattaaatgggctcaggatcatgtagacaaggactggaaggaatggaccggcactgattagtcccctgggagcattaagtataatccgtgagttatttagtttagtagtggggtagcagatgtgtcattgtaaaactctgattactatgtcgtgaagcacttaatctttgatcaaaaactgtttggtgtaaacttgtccaaacgactggaaacaagaaaaagaaaagatggcaaaagctttttattgt

SEQ ID NO: 29433 - protein, 179 aa, Arabidopsis thaliana
  misc_feature (1)..(179): Ceres Seq. ID no. 4902494
MASMHEALFSSRLLQVNSSFSFRCALPIISSPAAVSCAIKSTQFFKQRCRTKVRDFSLSSLSRRGFVCRAAEYKFPDPIPEFAEAETEKFRDHMLNKLSKRDLFEDSVDEIVGVCTEIFETFLRSEYGGPGTLLVIPFIDMADTLNERELPGGPQAARAAIKWAQDHVDKDWKEWTGTD

SEQ ID NO: 29434 - protein, 176 aa, Arabidopsis thaliana
  misc_feature (1)..(176): Ceres Seq. ID no. 4902495
MHEALFSSRLLQVNSSFSFRCALPIISSPAAVSCAIKSTQFFKQRCRTKVRDFSLSSLSRRGFVCRAAEYKFPDPIPEFAEAETEKFRDHMLNKLSKRDLFEDSVDEIVGVCTEIFETFLRSEYGGPGTLLVIPFIDMADTLNERELPGGPQAARAAIKWAQDHVDKDWKEWTGTD

SEQ ID NO: 29435 - protein, 90 aa, Arabidopsis thaliana
  misc_feature (1)..(90): Ceres Seq. ID no. 4902496
MATIVFGRIRCCRGSLLGLVFLAGVVARRSDRKQEIRLKSEAKLSNGFNARSSVLFSASSSQFFFFLPLRSSNYLFTSCSILRNQIDPVF

SEQ ID NO: 29436 - DNA, 1068 bp, Arabidopsis thaliana
  misc_feature (1)..(1068): Ceres Seq. ID no. 4903808
cccccacaccttctctttctcttagcatactctgctcttcctctctctgttgttctctgttccaaaggctttgagaaaaaatggagttcgagaaccggtacggacttgcaacgtcgcagaagtacgactgtctcttgttcgatttggacgatactctttatcctcttagctccggaatcgcaagagaatgtgggaacaacatcaaagattacatgaccgagaaactcggtatacctaaggacaaaatcgtcgaattgtctgatcttctatacaagaactatggaacaacaatggctggtcttagggcgatcggatatgaatttgactacgatgagtaccacagcttcgtccacggtcgtttaccctatgacaacataaaacccgaccttgttcttcgcagcctcttgcttagcctccctctccgcaaagtcatctttaccaacgcggacagagttcacgcggccaaggcgttgaagaagttgggattagaggattgtttcgaaggaatcatatgtttcgaaacgctaaacctcatgcacacaaacgctgcgtctaacaattccgagatttttgatatcgttggacattttaaccggtctgaaccggtcggttcacttcccaaaacgcctgttgtgtgtaaaccatctgaatctgctatcgagaaagctcttgaaatcgccaatattgatcctaaccgaacgctgttctttgaggacagtgtccgaaacgtacaagctggaaaacgcgttggtctttacacggttctggttggtaaatcgaccaaagtcaaaggagcggattacgcgttggaaaacattcacaacatgaaagaggcgataccggagttatgggaatccgacaggaaatcgtcggatgttggatattccggcaaggtcgccgttgagacttctgttagagcttaggaggagtactgtttcgccgttgtacctaattttccaccactgtcattttcattttcttttttcaaatgacgtaatgtcatttttgttttttttttcgacttgtgtttataaaagattaataaaaaatgagaaaataatttccatc

SEQ ID NO: 29437 - protein, 280 aa, Arabidopsis thaliana
  misc_feature (1)..(280): Ceres Seq. ID no. 4903809
MEFENRYGLATSQKYDCLLFDLDDTLYPLSSGIARECGNNIKDYMTEKLGIPKDKIVELSDLLYKNYGTTMAGLRAIGYEFDYDEYHSFVHGRLPYDNIKPDLVLRSLLLSLPLRKVIFTNADRVHAAKALKKLGLEDCFEGIICFETLNLMHTNAASNNSEIFDIVGHFNRSEPVGSLPKTPVVCKPSESAIEKALEIANIDPNRTLFFEDSVRNVQAGKRVGLYTVLVGKSTKVKGADYALENIHNMKEAIPELWESDRKSSDVGYSGKVAVETSVRA

SEQ ID NO: 29438 - protein, 236 aa, Arabidopsis thaliana
  misc_feature (1)..(236): Ceres Seq. ID no. 4903810
MTEKLGIPKDKIVELSDLLYKNYGTTMAGLRAIGYEFDYDEYHSFVHGRLPYDNIKPDLVLRSLLLSLPLRKVIFTNADRVHAAKALKKLGLEDCFEGIICFETLNLMHTNAASNNSEIFDIVGHFNRSEPVGSLPKTPVVCKPSESAIEKALEIANIDPNRTLFFEDSVRNVQAGKRVGLYTVLVGKSTKVKGADYALENIHNMKEAIPELWESDRKSSDVGYSGKVAVETSVRA

SEQ ID NO: 29439 - protein, 210 aa, Arabidopsis thaliana
  misc_feature (1)..(210): Ceres Seq. ID no. 4903811
MAGLRAIGYEFDYDEYHSFVHGRLPYDNIKPDLVLRSLLLSLPLRKVIFTNADRVHAAKALKKLGLEDCFEGIICFETLNLMHTNAASNNSEIFDIVGHFNRSEPVGSLPKTPVVCKPSESAIEKALEIANIDPNRTLFFEDSVRNVQAGKRVGLYTVLVGKSTKVKGADYALENIHNMKEAIPELWESDRKSSDVGYSGKVAVETSVRA

SEQ ID NO: 29440 - DNA, 1248 bp, Arabidopsis thaliana
  misc_feature (1)..(1248): Ceres Seq. ID no. 4903820
attctaaagatttttctctccggagacgttaagagaagaaacagccaacggattagggatcttaccgttctgcgattcgccgagtttgaagctttttttagagacttcaatggtgagccaaggaatggtatctcttacaaagtctctatgcactatgactccaagagtccgtctcaagaatccgaatatgttgcagaaactaaagactggatcttgtaatttccgtttcagaaatctccgtgtcttatgcacaccaaagctgtctcagtgggaaccgtcacctttcattcatgcttctgcagaagaagctgctgatatagtattggacaaaaccgcgaatgtgttcgaatctattgtctccgagagtgcagaggaagagaaagtagatatgtcagcgcaacaacgaactaattctcaagttcaggtacttaaatggccaatatggcttttgggtccatctgttctcctcacaagcggtatggcgcctactttatggcttccgttgtcatcggtttttctcggttccaacgtggttagtctactttctttgatcggtctagattgcattttcaatcttggagcaacccttttcctcttaatggctgattcttgcgcacgtcctaaagacccatcacagtcctgcaacagcaaaccaccatttagctataagttctggaacatgttttcactcataatcgggtttctagtcccaatgttacttctcttcggatcccaatctggccttctcgcttctctccagccccagattcctttcctctcgtccgctgttatcctcttcccgtacttcattctccttgctgttcagacattaacagagatcctcacatggcactggcaatcaccggtctggctagtcacaccagttgtctacgaggcttaccgaatcttgcaactgatgagagggttgacacttagtgcagaggtcaacgcaccggtttgggtggttcatatgcttcgtgggcttgtctcttggtgggtattgatcttgggaatgcaactcatgagagttgcttggtttgctggttttgcatctagaacaacaacaggtcagcaaccacaatctgttgcttctaagtaaagacagataaatgtttcttcgtttagtttttaaagtcatgtcaaagatttgtaactctttcttcactgtatagcttttattattcgtgggttggtgataaggattaaaaaaaaacacatattctttatgatcatattcgctcttttagt

SEQ ID NO: 29441 - protein, 329 aa, Arabidopsis thaliana
  misc_feature (1)..(329): Ceres Seq. ID no. 4903821
MVSQGMVSLTKSLCTMTPRVRLKNPNMLQKLKTGSCNFRFRNLRVLCTPKLSQWEPSPFIHASAEEAADIVLDKTANVFESIVSESAEEEKVDMSAQQRTNSQVQVLKWPIWLLGPSVLLTSGMAPTLWLPLSSVFLGSNVVSLLSLIGLDCIFNLGATLFLLMADSCARPKDPSQSCNSKPPFSYKFWNMFSLIIGFLVPMLLLFGSQSGLLASLQPQIPFLSSAVILFPYFILLAVQTLTEILTWHWQSPVWLVTPVVYEAYRILQLMRGLTLSAEVNAPVWVVHMLRGLVSWWVLILGMQLMRVAWFAGFASRTTTGQQPQSVASK

SEQ ID NO: 29442 - protein, 324 aa, Arabidopsis thaliana
  misc_feature (1)..(324): Ceres Seq. ID no. 4903822
MVSLTKSLCTMTPRVRLKNPNMLQKLKTGSCNFRFRNLRVLCTPKLSQWEPSPFIHASAEEAADIVLDKTANVFESIVSESAEEEKVDMSAQQRTNSQVQVLKWPIWLLGPSVLLTSGMAPTLWLPLSSVFLGSNVVSLLSLIGLDCIFNLGATLFLLMADSCARPKDPSQSCNSKPPFSYKFWNMFSLIIGFLVPMLLLFGSQSGLLASLQPQIPFLSSAVILFPYFILLAVQTLTEILTWHWQSPVWLVTPVVYEAYRILQLMRGLTLSAEVNAPVWVVHMLRGLVSWWVLILGMQLMRVAWFAGFASRTTTGQQPQSVASK

SEQ ID NO: 29443 - protein, 314 aa, Arabidopsis thaliana
  misc_feature (1)..(314): Ceres Seq. ID no. 4903823
MTPRVRLKNPNMLQKLKTGSCNFRFRNLRVLCTPKLSQWEPSPFIHASAEEAADIVLDKTANVFESIVSESAEEEKVDMSAQQRTNSQVQVLKWPIWLLGPSVLLTSGMAPTLWLPLSSVFLGSNVVSLLSLIGLDCIFNLGATLFLLMADSCARPKDPSQSCNSKPPFSYKFWNMFSLIIGFLVPMLLLFGSQSGLLASLQPQIPFLSSAVILFPYFILLAVQTLTEILTWHWQSPVWLVTPVVYEAYRILQLMRGLTLSAEVNAPVWVVHMLRGLVSWWVLILGMQLMRVAWFAGFASRTTTGQQPQSVASK

SEQ ID NO: 29444 - DNA, 1151 bp, Arabidopsis thaliana
  misc_feature (1)..(1151): Ceres Seq. ID no. 4903859
tcgccgcaaaatttgttctccggaagagaatggattttcttaaggcaacgattatagttgccctaatttgcaatttcgcctcactggcgtcttctgttcctttcatagttctgcatggaattggggataaatgcagtaatgcaggagtgacacaattcacagagcttttaagcgattggtctggttctcaaggatattgcttggagattgggaatggctcatgggactcatggactatgcctctccttgatcagacatcagttgtttgtgagaaggtgaaaagtatgccagagcttagtgacggttacagcattgtggggctttctcagggtaacatgattggtcgagctctcattgagttttgcgatggagcaccacctgttaagagttttgtttcggtagcgggtcctcatgctggcactgcatcgattccgttctgtggtgctacctggatttgcatcatgttggacagtatgatcaaagcagagatctatagcgactatatgcaggaacatttggctcctagcggttttctcaaaatcccaactgacatagcgggttacatggaaggctgtaggtttctcccaaagctaaacaacgaacttccagtcaaaaactcgacttataaggagaggttctcgagtttggagaatcttgtgcttattatgtttgagcatgacacaatattgatacctaaagaaacctcatggtttggatattatcctgatgggtctttcaagaccattcttccgccgcaagagaccaagctatatactgaagactggattggtttgagaaccttagatgaagctggaaaagtgaagttcgttaacgtctctggaaatcatcttcagatatctcatacagacatgaagaagcatatagtgccatacctctgtgataaatcatcgtcgtcatcatccacaacaatggcagtttccggatcatcttcctcacaccagtggcttccaagtgtagggaacattattatggatcttattggtccagaagtggatcagcttcagcttgtgctacgtcatgtgtaaatctgatgtcctgtgttgttgtttgttctcttactaaacacgatcgtctcgtgatatgtttgtaacttgaagataaaacaagaaaactgttccaaaatccctctc

SEQ ID NO: 29445 - protein, 347 aa, Arabidopsis thaliana
  misc_feature (1)..(347): Ceres Seq. ID no. 4903860
AAKFVLRKRMDFLKATIIVALICNFASLASSVPFIVLHGIGDKCSNAGVTQFTELLSDWSGSQGYCLEIGNGSWDSWTMPLLDQTSVVCEKVKSMPELSDGYSIVGLSQGNMIGRALIEFCDGAPPVKSFVSVAGPHAGTASIPFCGATWICIMLDSMIKAEIYSDYMQEHLAPSGFLKIPTDIAGYMEGCRFLPKLNNELPVKNSTYKERFSSLENLVLIMFEHDTILIPKETSWFGYYPDGSFKTILPPQETKLYTEDWIGLRTLDEAGKVKFVNVSGNHLQISHTDMKKHIVPYLCDKSSSSSSTTMAVSGSSSSHQWLPSVGNIIMDLIGPEVDQLQLVLRHV

SEQ ID NO: 29446 - protein, 338 aa, Arabidopsis thaliana
  misc_feature (1)..(338): Ceres Seq. ID no. 4903861
MDFLKATIIVALICNFASLASSVPFIVLHGIGDKCSNAGVTQFTELLSDWSGSQGYCLEIGNGSWDSWTMPLLDQTSVVCEKVKSMPELSDGYSIVGLSQGNMIGRALIEFCDGAPPVKSFVSVAGPHAGTASIPFCGATWICIMLDSMIKAEIYSDYMQEHLAPSGFLKIPTDIAGYMEGCRFLPKLNNELPVKNSTYKERFSSLENLVLIMFEHDTILIPKETSWFGYYPDGSFKTILPPQETKLYTEDWIGLRTLDEAGKVKFVNVSGNHLQISHTDMKKHIVPYLCDKSSSSSSTTMAVSGSSSSHQWLPSVGNIIMDLIGPEVDQLQLVLRHV

SEQ ID NO: 29447 - protein, 269 aa, Arabidopsis thaliana
  misc_feature (1)..(269): Ceres Seq. ID no. 4903862
MPLLDQTSVVCEKVKSMPELSDGYSIVGLSQGNMIGRALIEFCDGAPPVKSFVSVAGPHAGTASIPFCGATWICIMLDSMIKAEIYSDYMQEHLAPSGFLKIPTDIAGYMEGCRFLPKLNNELPVKNSTYKERFSSLENLVLIMFEHDTILIPKETSWFGYYPDGSFKTILPPQETKLYTEDWIGLRTLDEAGKVKFVNVSGNHLQISHTDMKKHIVPYLCDKSSSSSSTTMAVSGSSSSHQWLPSVGNIIMDLIGPEVDQLQLVLRHV

SEQ ID NO: 29448 - DNA, 1344 bp, Arabidopsis thaliana
  misc_feature (1)..(1344): Ceres Seq. ID no. 4904003
aaaatccagctgataaataaataatttttctcttgtcgtcatattaaaaaaaagaaagattatctgtatttcaagtttcatgagcgtttgccaccacaacattgtcttttcggggttttagtcatacttaatggcttccaattcggagaaaaatcctcttctttcagatgagaaacccaaatcgacggaggagaataagagttctaagccggaatcagcttctgggagttcaacttcatcagctatgcctggcttgaatttcaatgcttttgatttctctaatatggctagtattctcaacgatcctagcatcagagaaatggctgagcaaatagctaaagatcctgcgtttaaccaattggctgagcagcttcagagatctattcctaacgctggccaggaaggtggtttccctaactttgatcctcaacagtatgtcaatacaatgcaacaggttatgcataaccctgagtttaagacaatggccgagaaacttggtaccgccttagttcaggatccacaaatgtctccttttttggatgctttctcgaatcctgaaacagcagaacactttactgagcgtatggcgcggatgaaagaagatccagagttgaaacctatactagatgagattgatgctggtggtccttctgccatgatgaagtactggaatgatccagaagtgctgaaaaagctgggtgaagcaatgggtatgcctgttgctggcttaccagaccagactgtttcagctgaacctgaggtagcagaagaaggtgaagaagaagagtctattgttcaccaaactgccagtcttggtgatgttgagggtttgaaagctgccttggcatctggtggtaacaaagatgaagaagattctgaaggaaggacagcattgcattttgcttgtggatacggcgagttgaaatgtgctcaagttcttatcgatgctggagcaagtgttaatgcggttgacaaaaacaagaacacacctctgcattatgctgctggttacgggaggaaagagtgtgtaagccttctcctggagaatggtgctgcagtcactctgcaaaacctagacgagaagacgccaattgatgtagcgaagctcaacagccagctggaggtggtgaagctgcttgagaaggatgctttcctttgagctctgctggttaaaggaaagctctaagctcatattgtctttgaggcatttgtcttgtgtgtgtcctgaaccagtttcacaggctttttgtgtacactttttattagttcctctcttcttctaaatttgtctcttatgttgttttaaaagtcaataaagaaagaaatagcaatcaatgatttaat

SEQ ID NO: 29449 - protein, 342 aa, Arabidopsis thaliana
  misc_feature (1)..(342): Ceres Seq. ID no. 4904004
MASNSEKNPLLSDEKPKSTEENKSSKPESASGSSTSSAMPGLNFNAFDFSNMASILNDPSIREMAEQIAKDPAFNQLAEQLQRSIPNAGQEGGFPNFDPQQYVNTMQQVMHNPEFKTMAEKLGTALVQDPQMSPFLDAFSNPETAEHFTERMARMKEDPELKPILDEIDAGGPSAMMKYWNDPEVLKKLGEAMGMPVAGLPDQTVSAEPEVAEEGEEEESIVHQTASLGDVEGLKAALASGGNKDEEDSEGRTALHFACGYGELKCAQVLIDAGASVNAVDKNKNTPLHYAAGYGRKECVSLLLENGAAVTLQNLDEKTPIDVAKLNSQLEVVKLLEKDAFL

SEQ ID NO: 29450 - protein, 304 aa, Arabidopsis thaliana
  misc_feature (1)..(304): Ceres Seq. ID no. 4904005
MPGLNFNAFDFSNMASILNDPSIREMAEQIAKDPAFNQLAEQLQRSIPNAGQEGGFPNFDPQQYVNTMQQVMHNPEFKTMAEKLGTALVQDPQMSPFLDAFSNPETAEHFTERMARMKEDPELKPILDEIDAGGPSAMMKYWNDPEVLKKLGEAMGMPVAGLPDQTVSAEPEVAEEGEEEESIVHQTASLGDVEGLKAALASGGNKDEEDSEGRTALHFACGYGELKCAQVLIDAGASVNAVDKNKNTPLHYAAGYGRKECVSLLLENGAAVTLQNLDEKTPIDVAKLNSQLEVVKLLEKDAFL

SEQ ID NO: 29451 - protein, 291 aa, Arabidopsis thaliana
  misc_feature (1)..(291): Ceres Seq. ID no. 4904006
MASILNDPSIREMAEQIAKDPAFNQLAEQLQRSIPNAGQEGGFPNFDPQQYVNTMQQVMHNPEFKTMAEKLGTALVQDPQMSPFLDAFSNPETAEHFTERMARMKEDPELKPILDEIDAGGPSAMMKYWNDPEVLKKLGEAMGMPVAGLPDQTVSAEPEVAEEGEEEESIVHQTASLGDVEGLKAALASGGNKDEEDSEGRTALHFACGYGELKCAQVLIDAGASVNAVDKNKNTPLHYAAGYGRKECVSLLLENGAAVTLQNLDEKTPIDVAKLNSQLEVVKLLEKDAFL

SEQ ID NO: 29452 - DNA, 971 bp, Arabidopsis thaliana
  misc_feature (1)..(971): Ceres Seq. ID no. 4905361
aacacatctctctctctctctctctctttctctctttttatatttttgtgtcccaatctcttcttcatttctgtttggttgccgagaaaacgcaggaaacttttctgcaaaaaaactcggtgaccatattcaaaactttcccacgttaattctctcttctttgttttgtttcagattcattacttttctccaaaaaactttcttcaagatctgttcttttaaataattatggcggaagaacatcgatgcgagacgcctgaaggtcaccgtctctgcgttaacaactgcggtttcttcggaagctcagcgacaatgaatctatgttcaaactgttacggcgatctctgtctcaaacaacaacaacaagcttccatgaaatcaaccgtcgaatcatctctctctccggtgatcgcacctgttctcgaaaactacgcggcggagttagagatcccgacgacgaagaagacagaggagaaaaaaccgattcaaattccgacggagcaaccgtctccgccgcaacggccgaatcgatgcaccgtatgtaggaaacgggtcgggttaaccgggtttatgtgtcggtgtgggacgactttttgtgggagtcataggtatccggaggttcatggttgtacgtttgatttcaaatcggcgggacgtgaagagatcgcgaaagctaatccgttggttattgcggcgaagcttcagaaaatatgaatcggagccgttgaccgatttctatctttaccctgagaaaatttcgattgtctcggtggatctcagccgttcattatgttattgtattacggacacgtgtcgcaagattaaggttgagatggtttcgtaactttttaattattttctttgtttatttccgaagaaattaaagtttttatgattgtgtggcttttgcttgtaaaaaaaaaaagggtttctctttgggaaaaagaaaagaaaatatatgaaattgtgtc

SEQ ID NO: 29453 - protein, 161 aa, Arabidopsis thaliana
  misc_feature (1)..(161): Ceres Seq. ID no. 4905362
MAEEHRCETPEGHRLCVNNCGFFGSSATMNLCSNCYGDLCLKQQQQASMKSTVESSLSPVIAPVLENYAAELEIPTTKKTEEKKPIQIPTEQPSPPQRPNRCTVCRKRVGLTGFMCRCGTTFCGSHRYPEVHGCTFDFKSAGREEIAKANPLVIAAKLQKI

SEQ ID NO: 29454 - protein, 133 aa, Arabidopsis thaliana
  misc_feature (1)..(133): Ceres Seq. ID no. 4905363
MNLCSNCYGDLCLKQQQQASMKSTVESSLSPVIAPVLENYAAELEIPTTKKTEEKKPIQIPTEQPSPPQRPNRCTVCRKRVGLTGFMCRCGTTFCGSHRYPEVHGCTFDFKSAGREEIAKANPLVIAAKLQKI

SEQ ID NO: 29455 - protein, 113 aa, Arabidopsis thaliana
  misc_feature (1)..(113): Ceres Seq. ID no. 4905364
MKSTVESSLSPVIAPVLENYAAELEIPTTKKTEEKKPIQIPTEQPSPPQRPNRCTVCRKRVGLTGFMCRCGTTFCGSHRYPEVHGCTFDFKSAGREEIAKANPLVIAAKLQKI

SEQ ID NO: 29456 - DNA, 1070 bp, Arabidopsis thaliana
  misc_feature (1)..(1070): Ceres Seq. ID no. 4905418
attacatgtaaatatctctcattaatacaacctcacgaagaaaaccatttgttttcttagagagagccaagaatattaaaagagatatagagaaaagatttgctttaataatgccaacgtcgatacagtttcagagatcctccaccgccgcagaagcagccaacgccaccgtaagaaactatccccaccaccatcagaaacaggttcaaaaagtgagcctcacgcgcgggatggctgatgtgccggagcacgtggagctttcccacacgcacgtggttggtccttctcagtgcttctccgtcgtggtacaagacgtggaggctccggtttccacagtctggtcgatcctaagccgcttcgaacaccctcaagcgtacaaacacttcgtgaaaagctgccacgtggttatcggagacggtcgagaggttgggtcggtgagagaggtcagagtcgtctctggtctccccgcggcgtttagcttagagcggcttgagatcatggacgatgatcgccacgtcatcagtttcagcgtcgttggtggggaccacagactcatgaactacaagtcggtgacgacggtgcatgagtcggaggaggactccgacggcaagaagaggacacgtgtcgttgagtcatacgtcgttgacgtaccggcgggtaacgataaggaagagacttgtagctttgctgatactatagtacggtgcaacttgcaatcgctggctaaactcgccgagaacacttctaaattctcgtaattacattttttcaatctttttatttttattttattttctatatttctctctttcaaaatttatcttttatttttgggattctcgaggtggttttggattttaagatttaagtatttaactatcgtcggggatttttcgaaactaaaacaaaaaacaagaattatatcaaacaagatggttttggtttttcgaagttagggtttttagggtctgttaaatgtatgtctcaacgatactttggttttacccttaaaaccatttcttcttgtacagctctcgtagctttattatataaacattgattgtttagtt

SEQ ID NO: 29457 - protein, 215 aa, Arabidopsis thaliana
  misc_feature (1)..(215): Ceres Seq. ID no. 4905419
MPTSIQFQRSSTAAEAANATVRNYPHHHQKQVQKVSLTRGMADVPEHVELSHTHVVGPSQCFSVVVQDVEAPVSTVWSILSRFEHPQAYKHFVKSCHVVIGDGREVGSVREVRVVSGLPAAFSLERLEIMDDDRHVISFSVVGGDHRLMNYKSVTTVHESEEDSDGKKRTRVVESYVVDVPAGNDKEETCSFADTIVRCNLQSLAKLAENTSKFS

SEQ ID NO: 29458 - protein, 175 aa, Arabidopsis thaliana
  misc_feature (1)..(175): Ceres Seq. ID no. 4905420
MADVPEHVELSHTHVVGPSQCFSVVVQDVEAPVSTVWSILSRFEHPQAYKHFVKSCHVVIGDGREVGSVREVRVVSGLPAAFSLERLEIMDDDRHVISFSVVGGDHRLMNYKSVTTVHESEEDSDGKKRTRVVESYVVDVPAGNDKEETCSFADTIVRCNLQSLAKLAENTSKFS

SEQ ID NO: 29459 - DNA, 1035 bp, Arabidopsis thaliana
  misc_feature (1)..(1035): Ceres Seq. ID no. 4905610
aatgtgattaagtaaagtgagggagaagcaacgagagatagagatagagagatcaagatgagaggatctgatcagaagattctactgatggttatggtggttgtagcagttgtagctgcggctcaaggccaagaagagactactggattcgtgacatggggtaacaattactaccagacatggggacatcaagctttggttattaataaaacctctgagctccagctcaccctcgataaaaactctgggtccgggtttgaatcccaattgatttacggatcaggatacttcaacgtaagaatcaaggcacctcaaactacgtctacgggagtcattacttccttctatttaatctcccgttcaagccgccatgatgagctctgtttccagatcttgggaaagaatgggccaccgtatttgctgaatacgaatatgtatctgtacggtgaaggaggcaaagatcagaggtttcgtctctggtttgatccaacaaaagattaccattcctacagttttctttggaaccctaatcaacttgtgttttatgttgacgatacaccgatcagggtgtacagcaagaatccagatgtttactacccatcggtgcagacaatgttcctaatgggaagtgtgcaaaacggatcgataattgacccgaagcagatgccttacattgctaagttccaggcatcaaagattgaagggtgtaagactgagttcatgggaatagataaatgcactgatcctaagttctggtggaatcgcaaacagctaagctctaaagagaagacactgtacctaaacgcaaggaagacgtacctggattatgactattgttctgacagacagcgatatccaaaggtgcctcaagaatgtggaagttacacttagagaaagatcaatacctgtcacagggttaagcctacaaaacaattatcttgaaaaaataacttatgttactgtaagatgctttatgataagccttttctatcaaataacaacattattgtcatcaatgctagatacattactatg

SEQ ID NO: 29460 - protein, 277 aa, Arabidopsis thaliana
  misc_feature (1)..(277): Ceres Seq. ID no. 4905611
MRGSDQKILLMVMVVVAVVAAAQGQEETTGFVTWGNNYYQTWGHQALVINKTSELQLTLDKNSGSGFESQLIYGSGYFNVRIKAPQTTSTGVITSFYLISRSSRHDELCFQILGKNGPPYLLNTNMYLYGEGGKDQRFRLWFDPTKDYHSYSFLWNPNQLVFYVDDTPIRVYSKNPDVYYPSVQTMFLMGSVQNGSIIDPKQMPYIAKFQASKIEGCKTEFMGIDKCTDPKFWWNRKQLSSKEKTLYLNARKTYLDYDYCSDRQRYPKVPQECGSYT

SEQ ID NO: 29461 - protein, 267 aa, Arabidopsis thaliana
  misc_feature (1)..(267): Ceres Seq. ID no. 4905612
MVMVVVAVVAAAQGQEETTGFVTWGNNYYQTWGHQALVINKTSELQLTLDKNSGSGFESQLIYGSGYFNVRIKAPQTTSTGVITSFYLISRSSRHDELCFQILGKNGPPYLLNTNMYLYGEGGKDQRFRLWFDPTKDYHSYSFLWNPNQLVFYVDDTPIRVYSKNPDVYYPSVQTMFLMGSVQNGSIIDPKQMPYIAKFQASKIEGCKTEFMGIDKCTDPKFWWNRKQLSSKEKTLYLNARKTYLDYDYCSDRQRYPKVPQECGSYT

SEQ ID NO: 29462 - protein, 265 aa, Arabidopsis thaliana
  misc_feature (1)..(265): Ceres Seq. ID no. 4905613
MVVVAVVAAAQGQEETTGFVTWGNNYYQTWGHQALVINKTSELQLTLDKNSGSGFESQLIYGSGYFNVRIKAPQTTSTGVITSFYLISRSSRHDELCFQILGKNGPPYLLNTNMYLYGEGGKDQRFRLWFDPTKDYHSYSFLWNPNQLVFYVDDTPIRVYSKNPDVYYPSVQTMFLMGSVQNGSIIDPKQMPYIAKFQASKIEGCKTEFMGIDKCTDPKFWWNRKQLSSKEKTLYLNARKTYLDYDYCSDRQRYPKVPQECGSYT

SEQ ID NO: 29463 - DNA, 830 bp, Arabidopsis thaliana
  misc_feature (1)..(830): Ceres Seq. ID no. 4905806
aacacataacaacaacaaagaaccaaataaaagaaaaaaattctataagtaatctttattttgctaaagaaaacatagaaatctgtttgcaaagaagaagatatgggaaacagtttacggtgttgtttggcttgtgtacttccatgtggagctttagatttgatccgtatcgtacatctcaacggccacgtcgacgagatcactagtccaatgaccgccggcgagattcttcaggcgaatcctaaccatgtcttaagcaaaccttgttctcaaggagttgtgcgtaagatcttgatcttgtctcctgaatctgagcttaagcgtggaagcatctattttcttatcccggatacttctatgccggagaagaagaaaacaaagaagagaaaagagctccgatgccggaaaaagcctcttgaaagcggcaacgatattaatagtgatcatgtgagtactaataaggatcttgatggtcattgtttgacgttgtgtgagaaatatttggaagatgttatgttgtcggagaagatgagttcggccggtaaagagaatcgtcaccgtcggaaacatagccggtcggcgtcagtgtccacgtggcggcctcaccttgatagcatcactgaggatcttaattaaattagtacttcttctttttttcacaccttgttaattatgtctctattttcttaaattcttttttttttttttggatccggaatcggatttttatttaacatgcccggtgagaaaatttcaaatattttatttattatgaagttaaaaccaaaactatgtactgttctcatgtggataagatctatgttaaattg

SEQ ID NO: 29464 - protein, 177 aa, Arabidopsis thaliana
  misc_feature (1)..(177): Ceres Seq. ID no. 4905807
MGNSLRCCLACVLPCGALDLIRIVHLNGHVDEITSPMTAGEILQANPNHVLSKPCSQGVVRKILILSPESELKRGSIYFLIPDTSMPEKKKTKKRKELRCRKKPLESGNDINSDHVSTNKDLDGHCLTLCEKYLEDVMLSEKMSSAGKENRHRRKHSRSASVSTWRPHLDSITEDLN

SEQ ID NO: 29465 - protein, 141 aa, Arabidopsis thaliana
  misc_feature (1)..(141): Ceres Seq. ID no. 4905808
MTAGEILQANPNHVLSKPCSQGVVRKILILSPESELKRGSIYFLIPDTSMPEKKKTKKRKELRCRKKPLESGNDINSDHVSTNKDLDGHCLTLCEKYLEDVMLSEKMSSAGKENRHRRKHSRSASVSTWRPHLDSITEDLN

SEQ ID NO: 29466 - protein, 92 aa, Arabidopsis thaliana
  misc_feature (1)..(92): Ceres Seq. ID no. 4905809
MPEKKKTKKRKELRCRKKPLESGNDINSDHVSTNKDLDGHCLTLCEKYLEDVMLSEKMSSAGKENRHRRKHSRSASVSTWRPHLDSITEDLN

SEQ ID NO: 29467 - DNA, 1060 bp, Arabidopsis thaliana
  misc_feature (1)..(1060): Ceres Seq. ID no. 4905826
atgatctgatctgatctcccaaaaagtcccaaatccaaatctacgaatctccgtctcctccgtcgcattttccgaggtagagagagagatcaaaccaaagagacacagagagagtatccaccgatggaatccgcagcaacggctgttgtacctccggcagccgccgccaccaccgccaccgccaccgatgataatctccaatcaagcgactcatcatctcccgccgacgccgttaaccgattgatccacgccttttcgcagcgacaacaacatcttctcgacaaaacggttcctcacgttctctatcgatggatcgcatgtctctgtgttgtattgatctacatcgttcgtgtttactttgtggaaggcttctacatcatcacttacgccatcggcatctaccttttgaatctcatcattgcttttctatctcctcaagaagatcccgaagcttctctcacttccggtggttctcttcctactcggagatccgatgagtatcgtcctttcgttcgccgtctccctgagttcaaattctggttatcgatcataagggctttcatcatcggatttatgatgacgttcttcgaggtgtttgatgtacctgtattctggccaatacttctcttctactgggtgatgttgtttttccttacgatgaggaaacagatacagcatatgatcaaatacagatatgtccctttctcttttgggaaaaagcagtatggaaagaaaccggctccaacagagagcagtgaatgatcaatcaaaactgttcaggtcagcaattttacagtcttttgagagaagtagcatttgaaaaggtcggtcttttgttctcttttgatggcctatatctttgttagggatgaagtagagatagacatattttgctcttttatcatcctgactattttactggtttcacctgaactcaatgtacaatcttatttttttacatccttttttcagtgagaaaataatgtttcatacttgacccttttgtaatcatcatggtggaaaactaaagactaatcagtaatcactgtccggttctatc

SEQ ID NO: 29468 - protein, 212 aa, Arabidopsis thaliana
  misc_feature (1)..(212): Ceres Seq. ID no. 4905827
MESAATAVVPPAAAATTATATDDNLQSSDSSSPADAVNRLIHAFSQRQQHLLDKTVPHVLYRWIACLCVVLIYIVRVYFVEGFYIITYAIGIYLLNLIIAFLSPQEDPEASLTSGGSLPTRRSDEYRPFVRRLPEFKFWLSIIRAFIIGFMMTFFEVFDVPVFWPILLFYWVMLFFLTMRKQIQHMIKYRYVPFSFGKKQYGKKPAPTESSE

SEQ ID NO: 29469 - DNA, 1652 bp, Arabidopsis thaliana
  misc_feature (1)..(1652): Ceres Seq. ID no. 4905980
attatagaatatctaataatgaagaatcggtttcaaaattaataatgactgattataattacattgacaacatgcagggactaataacaattacactcacagcatcgtttcctcaactccacccagcatcatgcaacagccaggacccactcagttgcggcggtccgaataagctccagatcggagttttgctattgggactctgtttcctctccgtagggagtggaggaatacgaccttgtagcatcccttttggggttgatcagtttgaccaacgaactgaggaaggggttaaaggagtggccagtttcttcaactggtattacatgactttcactgtggttctgatcattacacagaccgtagttgtgtatatccaggatcaagtcagttggattatcggttttagtatccctaccggactcatggctcttgcggttgttatgttttttgccggaatgaagcgttatgtctacgttaaaccagaaggaagtatattctctgggatcgctcaagttatcgtggcagctcgtaagaagcgaaagctgaaacttccggcggaagatgacggcactgtcacctattacgacccagccatcaagtctagcgtgttatccaagttacaccgcagtaaccaattcaggtgtcttgacaaagccgcggtggttatagaaggtgacctaacacccgagggacctcccgcagacaagtggcggttatgcagcgtccaagaagtggaagaagtgaagtgtttgatccgaattgttcctatctggtcggccggaataatctcactcgcggccatgacaacacaaggcactttcacggtctctcaagctttgaaaatggatcgaaacttaggtcctaaattcgagattccggctggttcactctccgtcatctctctcctcacaatcggcatctttcttcccttctacgaccgcgtttttgtaccattcatgcggcgaatcaccggccataaatccggaatcacactcctccaaaggataggaacagggatcgttttcgcgatcttttctatgatcgttgcgggcattgtggagcgtatgagacgcatacgctccatcaatgccggagatccaacgggaatgactccaatgtcggtgttttggctttcgccgcagctaattctcatgggactatgtgaagcattcaatatcatcggacaaattgagttcttcaacagtcagtttccagagcacatgagaagtatcgctaactctctcttctctttatcgttcgccggttcgagctaccttagtagtttccttgtgactgtcgttcataaattctccggtgggcatgatcgtccggattggctaaacaagaatctcaacgcgggaaaattggattacttctattatctgattgcggttttgggtgtggttaatctggtttacttttggtattgtgctcggggataccggtacaaggtcggtttaccgattgaagactttgaggaggacaagtcctccgatgatgttgagatgacttcgaagaaatcgatgaaatgatttaatagactatccttagggacaacaagaagattgtcgatgttgtttgaataattactatgacaatgtatgtatcataatatgtaagaactagaatatttaataaaattttacctt

SEQ ID NO: 29470 - protein, 510 aa, Arabidopsis thaliana
  misc_feature (1)..(510): Ceres Seq. ID no. 4905981
YRISNNEESVSKLIMTDYNYIDNMQGLITITLTASFPQLHPASCNSQDPLSCGGPNKLQIGVLLLGLCFLSVGSGGIRPCSIPFGVDQFDQRTEEGVKGVASFFNWYYMTFTVVLIITQTVVVYIQDQVSWIIGFSIPTGLMALAVVMFFAGMKRYVYVKPEGSIFSGIAQVIVAARKKRKLKLPAEDDGTVTYYDPAIKSSVLSKLHRSNQFRCLDKAAVVIEGDLTPEGPPADKWRLCSVQEVEEVKCLIRIVPIWSAGIISLAAMTTQGTFTVSQALKMDRNLGPKFEIPAGSLSVISLLTIGIFLPFYDRVFVPFMRRITGHKSGITLLQRIGTGIVFAIFSMIVAGIVERMRRIRSINAGDPTGMTPMSVFWLSPQLILMGLCEAFNIIGQIEFFNSQFPEHMRSIANSLFSLSFAGSSYLSSFLVTVVHKFSGGHDRPDWLNKNLNAGKLDYFYYLIAVLGVVNLVYFWYCARGYRYKVGLPIEDFEEDKSSDDVEMTSKKSMK

SEQ ID NO: 29471 - protein, 496 aa, Arabidopsis thaliana
  misc_feature (1)..(496): Ceres Seq. ID no. 4905982
MTDYNYIDNMQGLITITLTASFPQLHPASCNSQDPLSCGGPNKLQIGVLLLGLCFLSVGSGGIRPCSIPFGVDQFDQRTEEGVKGVASFFNWYYMTFTVVLIITQTVVVYIQDQVSWIIGFSIPTGLMALAVVMFFAGMKRYVYVKPEGSIFSGIAQVIVAARKKRKLKLPAEDDGTVTYYDPAIKSSVLSKLHRSNQFRCLDKAAVVIEGDLTPEGPPADKWRLCSVQEVEEVKCLIRIVPIWSAGIISLAAMTTQGTFTVSQALKMDRNLGPKFEIPAGSLSVISLLTIGIFLPFYDRVFVPFMRRITGHKSGITLLQRIGTGIVFAIFSMIVAGIVERMRRIRSINAGDPTGMTPMSVFWLSPQLILMGLCEAFNIIGQIEFFNSQFPEHMRSIANSLFSLSFAGSSYLSSFLVTVVHKFSGGHDRPDWLNKNLNAGKLDYFYYLIAVLGVVNLVYFWYCARGYRYKVGLPIEDFEEDKSSDDVEMTSKKSMK

SEQ ID NO: 29472 - protein, 487 aa, Arabidopsis thaliana
  misc_feature (1)..(487): Ceres Seq. ID no. 4905983
MQGLITITLTASFPQLHPASCNSQDPLSCGGPNKLQIGVLLLGLCFLSVGSGGIRPCSIPFGVDQFDQRTEEGVKGVASFFNWYYMTFTVVLIITQTVVVYIQDQVSWIIGFSIPTGLMALAVVMFFAGMKRYVYVKPEGSIFSGIAQVIVAARKKRKLKLPAEDDGTVTYYDPAIKSSVLSKLHRSNQFRCLDKAAVVIEGDLTPEGPPADKWRLCSVQEVEEVKCLIRIVPIWSAGIISLAAMTTQGTFTVSQALKMDRNLGPKFEIPAGSLSVISLLTIGIFLPFYDRVFVPFMRRITGHKSGITLLQRIGTGIVFAIFSMIVAGIVERMRRIRSINAGDPTGMTPMSVFWLSPQLILMGLCEAFNIIGQIEFFNSQFPEHMRSIANSLFSLSFAGSSYLSSFLVTVVHKFSGGHDRPDWLNKNLNAGKLDYFYYLIAVLGVVNLVYFWYCARGYRYKVGLPIEDFEEDKSSDDVEMTSKKSMK

SEQ ID NO: 29473 - DNA, 978 bp, Arabidopsis thaliana
  misc_feature (1)..(978): Ceres Seq. ID no. 4906235
aaagaacaagaaaaaagggtgttgttacgatggcatcgagtgataaggttccggtggcgtgtccggcaagcagtggagatggaaaggagccaatgggaaatccgacgaaaaccactacggcgatgctagagaaaggaacggctatgatgcaatcgatgaaaccgatcaggcaaatgagcctccacgtgtgttcattcgcttgctatagccatgatcccggtcgtcagatcgaagttcatatttacggccaccgtgtaaaccaggatttcctccaatgtgctgtctacgattccaattcctctaaggctcatctcatagggatcgaatatatagtgtcggaaaagttattcgaaagtctctcaccggaggaacaaaagctttggcactcgcatgattacgaggttcatgattttcgatacattgtccgatatgtttattatttatctgaaaaacgaaaatgatcgaatgagagttgtttttagatccaaatggctcttctagtaactccaagggtccctgagctcgttgcgaaaccggagcttaaaaatcttgccaaatcttacgggaaattttggtgtacatggcagattgaccgaggggataaattaccactaggtgtaccatcactaatggtatcgccacaagacgtgaatctcgggagaatcaaaccggagttggtgaaaaagagagatgaagaacatggaatctcgactgaatcgttgaagccgtcaagagatgggatctgtggaccagagaagaagaacctggttgctgattattgggttaggtttaggaaaggctttgcgcttgatgttgttgaaacagatatgaagagaacagctcccttcccctaacttttgtgtgtgctttttttctcagacattaattatataagttttcgtaagcttacactagatgggttgtgtacttattatgttatggagtatgataatgtcataaacatgagaattttttcgc

SEQ ID NO: 29474 - protein, 143 aa, Arabidopsis thaliana
  misc_feature (1)..(143): Ceres Seq. ID no. 4906236
MASSDKVPVACPASSGDGKEPMGNPTKTTTAMLEKGTAMMQSMKPIRQMSLHVCSFACYSHDPGRQIEVHIYGHRVNQDFLQCAVYDSNSSKAHLIGIEYIVSEKLFESLSPEEQKLWHSHDYEVHDFRYIVRYVYYLSEKRK

SEQ ID NO: 29475 - protein, 122 aa, Arabidopsis thaliana
  misc_feature (1)..(122): Ceres Seq. ID no. 4906237
MGNPTKTTTAMLEKGTAMMQSMKPIRQMSLHVCSFACYSHDPGRQIEVHIYGHRVNQDFLQCAVYDSNSSKAHLIGIEYIVSEKLFESLSPEEQKLWHSHDYEVHDFRYIVRYVYYLSEKRK

SEQ ID NO: 29476 - protein, 152 aa, Arabidopsis thaliana
  misc_feature (1)..(152): Ceres Seq. ID no. 4906238
RTRKKGVVTMASSDKVPVACPASSGDGKEPMGNPTKTTTAMLEKGTAMMQSMKPIRQMSLHVCSFACYSHDPGRQIEVHIYGHRVNQDFLQCAVYDSNSSKAHLIGIEYIVSEKLFESLSPEEQKLWHSHDYEVHDFRYIVRYVYYLSEKRK

SEQ ID NO: 29477 - DNA, 751 bp, Arabidopsis thaliana
  misc_feature (1)..(751): Ceres Seq. ID no. 4906360
agaactcagatttgaagcaaaacatcaatcggagaaggaagaaagaaaagatgggagctttagggaagctaatcgacgtagctctcttcgtatactttgtttcaatggcgataattgcgccgctcatcgacgggcaaacctcacttccttcaggaatatatccagcgtttctcaccgatctgaaaagcaagtacattgccgattttggagattacttgctcatggagaagccgcatttcctagttggactcgtttggcatgagcttctgttcttatggccgctctccattgctaacgtctacgccattcttgccggaaagtcgtggtttggtaccacctgcttgttgtatggagcttccctcgtcacttccatggctgcaatcctaggagatatgataggttcagggaaggcatctgatcgattgctaatgatgtatgtgcctttcatgggttttgggattctggctgttcttcgtggcttagtttatcgatccaccaaaaacactggatcttctggcaagagatccactatcatgcccagaagaaagctggcctgagattcaaaaaaaaaaaaaagcagttgatttttctctctggaagacttactcatcctttttctgtatatgcctagaaagaggtgtttatttttccttgtgaaaactttattgctttctgatttatgtggaattcttgtttgttgactcagcaacaatgaaatgtttacttggttgatataaaattcattcttgac

SEQ ID NO: 29478 - protein, 184 aa, Arabidopsis thaliana
  misc_feature (1)..(184): Ceres Seq. ID no. 4906361
NSDLKQNINRRRKKEKMGALGKLIDVALFVYFVSMAIIAPLIDGQTSLPSGIYPAFLTDLKSKYIADFGDYLLMEKPHFLVGLVWHELLFLWPLSIANVYAILAGKSWFGTTCLLYGASLVTSMAAILGDMIGSGKASDRLLMMYVPFMGFGILAVLRGLVYRSTKNTGSSGKRSTIMPRRKLA

SEQ ID NO: 29479 - protein, 168 aa, Arabidopsis thaliana
  misc_feature (1)..(168): Ceres Seq. ID no. 4906362
MGALGKLIDVALFVYFVSMAIIAPLIDGQTSLPSGIYPAFLTDLKSKYIADFGDYLLMEKPHFLVGLVWHELLFLWPLSIANVYAILAGKSWFGTTCLLYGASLVTSMAAILGDMIGSGKASDRLLMMYVPFMGFGILAVLRGLVYRSTKNTGSSGKRSTIMPRRKLA

SEQ ID NO: 29480 - protein, 150 aa, Arabidopsis thaliana
  misc_feature (1)..(150): Ceres Seq. ID no. 4906363
MAIIAPLIDGQTSLPSGIYPAFLTDLKSKYIADFGDYLLMEKPHFLVGLVWHELLFLWPLSIANVYAILAGKSWFGTTCLLYGASLVTSMAAILGDMIGSGKASDRLLMMYVPFMGFGILAVLRGLVYRSTKNTGSSGKRSTIMPRRKLA

SEQ ID NO: 29481 - DNA, 752 bp, Arabidopsis thaliana
  misc_feature (1)..(752): Ceres Seq. ID no. 4906628
attaattttgacatgcgtgatgatctttcaaaataaaaaggaaacggaggatttggctagggacgttcgagaccgcagaggaggcagcaagagcatacgacgaggccgccgttttaatgagcggccgcaacgccaaaaccaactttcccctcaacaacaacaacaccggagaaacttccgagggcaaaaccgatatttcagcttcgtccacaatgtcatcctcaacatcatcttcatcgctctcttccatcctcagcgccaaactgaggaaatgctgcaagtctccttccccatccctcacctgcctccgtcttgacacagccagctcccatatcggcgtctggcagaaacgggccggttcaaagtctgactccagctgggtcatgacggtggagctaggtcccgcaagctcctcccaagagactactagtaaagcttcacaagacgctattcttgctccgaccactgaagttgaaattggtggcagcagagaagaagtattggatgaggaagaaaaggttgctttgcaaatgatagaggagcttctcaatacaaactaaatcttatttgcttatatatatgtacctattttcattgctgatttacagccaaaataatcaattataccgtgtattttatagatgttttatattaaaaggttgttagctatatattgtttctctttttccacatttgtatctaataaagtattggtgtttgtaactaaaatccagaagtgacctttttctttc

SEQ ID NO: 29482 - protein, 147 aa, Arabidopsis thaliana
  misc_feature (1)..(147): Ceres Seq. ID no. 4906629
MSGRNAKTNFPLNNNNTGETSEGKTDISASSTMSSSTSSSSLSSILSAKLRKCCKSPSPSLTCLRLDTASSHIGVWQKRAGSKSDSSWVMTVELGPASSSQETTSKASQDAILAPTTEVEIGGSREEVLDEEEKVALQMIEELLNTN

SEQ ID NO: 29483 - protein, 115 aa, Arabidopsis thaliana
  misc_feature (1)..(115): Ceres Seq. ID no. 4906630
MSSSTSSSSLSSILSAKLRKCCKSPSPSLTCLRLDTASSHIGVWQKRAGSKSDSSWVMTVELGPASSSQETTSKASQDAILAPTTEVEIGGSREEVLDEEEKVALQMIEELLNTN

SEQ ID NO: 29484 - protein, 104 aa, Arabidopsis thaliana
  misc_feature (1)..(104): Ceres Seq. ID no. 4906631
LILTCVMIFQNKKETEDLARDVRDRRGGSKSIRRGRRFNERPQRQNQLSPQQQQHRRNFRGQNRYFSFVHNVILNIIFIALFHPQRQTEEMLQVSFPIPHLPPS

SEQ ID NO: 29485 - DNA, 940 bp, Arabidopsis thaliana
  misc_feature (1)..(940): Ceres Seq. ID no. 4907228
atagaatataaaagttgctaaatttgattaaagatatggacaaagttccaagattttttgtttcttaatcttaaaatgttttatgttattacttggttttggttttggtaggagttctcggtgatggatttatggctcgtgatttaactatagagaacacggcaggagcagatgcgcaccaagcggttgcgtttagatcagacagtgatttttcggtacttgaaaactgcgagtttcttgggaaccaagacactctttatgctcactctctccgtcagttctacaaacaatgtcgaatccaaggcaacgtagacttcatctttggtaactcagctgccgtattccaagattgtgatatcctaatcgcttcaaaacactccaaactcgagcaaggcggtgcaaacaacgcgatcacagcacacgggaggattgatgcgtcgcagtccacgggatttgtgtttttgaactgttcgattaacggaacagaggaatacatgaaggagtttcaagctaaccctgaagggcataagaacttcttgggaagaccgtggaaggagttttcgaggacggtttttgtaaactgtaatcttgagtctttgattagtcctgatggatggatgccttggaacggggatttcgcattgaagactttgtattacggtgagtataagaatacgggtccgggatcggttagatcgagtagggttccatggagtagtgagataccagagaagcatgttgatgtttactctgttgccaattttattcaggctgatgagtgggcttccacgactgcttgatttttgtaaaggaaacatgaggttttaggattttgaaaagaagagaagagaagtcgtcattgtaactttattgtagtgtcaaatattagtgtggtttctttatcgctcattggggattcataatagattaataattgaag

SEQ ID NO: 29486 - protein, 222 aa, Arabidopsis thaliana
  misc_feature (1)..(222): Ceres Seq. ID no. 4907229
MARDLTIENTAGADAHQAVAFRSDSDFSVLENCEFLGNQDTLYAHSLRQFYKQCRIQGNVDFIFGNSAAVFQDCDILIASKHSKLEQGGANNAITAHGRIDASQSTGFVFLNCSINGTEEYMKEFQANPEGHKNFLGRPWKEFSRTVFVNCNLESLISPDGWMPWNGDFALKTLYYGEYKNTGPGSVRSSRVPWSSEIPEKHVDVYSVANFIQADEWASTTA

SEQ ID NO: 29487 - DNA, 1706 bp, Arabidopsis thaliana
  misc_feature (1)..(1706): Ceres Seq. ID no. 4907601
aaaaaaggcttctctgtgttgttctctgtggtcattcttctttcttttcacttcttcttcttcttcgctcttcttctcactgtcgggttccatttggcgcgaaaagttcttcactttttccagcttttttttgttctctgacagtttttttttttgtttggttacaaataaagatgccagtaagtgtggcactagttttgctgttgacattgagcagtgtgattctgattaatgggagaagttacggcgtcggaaacatatgcgatcgtggtcggagaccgagcgagagaccacacagtgtcaaaatcactgattttggtgctgtgggagatgggaaaacgttgaacacacttgcgtttcaaaatgctgtcttttatctaaagtctttcgctgataaaggtggtgctcagctttatgttcctccgggacggtggctcaccggaagtttcaacctcaccagtcatctcactctctttctcgagaaagacgccgtcatacttgcctcacaggatccatcgcattggcaagtcacggatgccttaccgtcatatgggcggggtattgatctaccagggaagagatacatgagtttgataaacggtgacatgctacatgatgtagtagtaacaggtgataacggtaccatagatgggcaaggccttgtttggtgggatcggtttaattctcattctttagagtacagtcgccctcaccttgtcgagtttgtctctgccgaaaatgtcattgtatcaaatcttacattcttgaacgctccggcttatactatccattcagtttattgtcgcaatttatacattcatagagtaacggctaatacttgtccagaatctccttataccatcggtattgtcccagattcttctgaaaatgtgtgtatccaagaatctagtatcaacatggggtatgatgccatttctcttaaaagtggttgtgatgaatacggtttatcgtatgcaagacctactgctaatgtccagataagaaatgtttaccttagagcagcttctggttcctccatttcctttggtagtgaaatgtctggtggtatatctgatgttgaggtcagtgatgctcacatacacaactcgttatccgggattgcctttagaacaacaaatggaagaggtggttatattaaggagattgatatttccaacatccatatggttaatgttggtactgcatttctagccaacggtagcttcggtactcatccggattctggtttcgatgaaaatgcttacccgcttgtgagtcacatcaggttacatgacattgttggagaaaacataagcactgctggatatttctttggaacgaaagagtctcctttcacttcgattttgttatcgaatatctctctgtcgattaaaaactcggcttcccctgctgattcttggcaatgctcatatgttgacgggtcttcggaattcgtagtccctgaaccgtgccttgagctgaagagttttgatagttactatggtagagctgaggccttatgaaaccaaacttcattaggaatgatgattcatatttgtttaagagagagcaaatggttctgattcttttcttttccccaaaaataaaccacagtgtgtagaattattacctgttccttgttggtgttgttgtccctgttatttgcagcttgtgagattaatatatcttgtacaggttcatttctt

SEQ ID NO: 29488 - protein, 506 aa, Arabidopsis thaliana
  misc_feature (1)..(506): Ceres Seq. ID no. 4907602
KRLLCVVLCGHSSFFSLLLLLRSSSHCRVPFGAKSSSLFPAFFCSLTVFFFVWLQIKMPVSVALVLLLTLSSVILINGRSYGVGNICDRGRRPSERPHSVKITDFGAVGDGKTLNTLAFQNAVFYLKSFADKGGAQLYVPPGRWLTGSFNLTSHLTLFLEKDAVILASQDPSHWQVTDALPSYGRGIDLPGKRYMSLINGDMLHDVVVTGDNGTIDGQGLVWWDRFNSHSLEYSRPHLVEFVSAENVIVSNLTFLNAPAYTIHSVYCRNLYIHRVTANTCPESPYTIGIVPDSSENVCIQESSINMGYDAISLKSGCDEYGLSYARPTANVQIRNVYLRAASGSSISFGSEMSGGISDVEVSDAHIHNSLSGIAFRTTNGRGGYIKEIDISNIHMVNVGTAFLANGSFGTHPDSGFDENAYPLVSHIRLHDIVGENISTAGYFFGTKESPFTSILLSNISLSIKNSASPADSWQCSYVDGSSEFVVPEPCLELKSFDSYYGRAEAL

SEQ ID NO: 29489 - protein, 449 aa, Arabidopsis thaliana
  misc_feature (1)..(449): Ceres Seq. ID no. 4907603
MPVSVALVLLLTLSSVILINGRSYGVGNICDRGRRPSERPHSVKITDFGAVGDGKTLNTLAFQNAVFYLKSFADKGGAQLYVPPGRWLTGSFNLTSHLTLFLEKDAVILASQDPSHWQVTDALPSYGRGIDLPGKRYMSLINGDMLHDVVVTGDNGTIDGQGLVWWDRFNSHSLEYSRPHLVEFVSAENVIVSNLTFLNAPAYTIHSVYCRNLYIHRVTANTCPESPYTIGIVPDSSENVCIQESSINMGYDAISLKSGCDEYGLSYARPTANVQIRNVYLRAASGSSISFGSEMSGGISDVEVSDAHIHNSLSGIAFRTTNGRGGYIKEIDISNIHMVNVGTAFLANGSFGTHPDSGFDENAYPLVSHIRLHDIVGENISTAGYFFGTKESPFTSILLSNISLSIKNSASPADSWQCSYVDGSSEFVVPEPCLELKSFDSYYGRAEAL

SEQ ID NO: 29490 - protein, 312 aa, Arabidopsis thaliana
  misc_feature (1)..(312): Ceres Seq. ID no. 4907604
MSLINGDMLHDVVVTGDNGTIDGQGLVWWDRFNSHSLEYSRPHLVEFVSAENVIVSNLTFLNAPAYTIHSVYCRNLYIHRVTANTCPESPYTIGIVPDSSENVCIQESSINMGYDAISLKSGCDEYGLSYARPTANVQIRNVYLRAASGSSISFGSEMSGGISDVEVSDAHIHNSLSGIAFRTTNGRGGYIKEIDISNIHMVNVGTAFLANGSFGTHPDSGFDENAYPLVSHIRLHDIVGENISTAGYFFGTKESPFTSILLSNISLSIKNSASPADSWQCSYVDGSSEFVVPEPCLELKSFDSYYGRAEAL

SEQ ID NO: 29491 - DNA, 725 bp, Arabidopsis thaliana
  misc_feature (1)..(725): Ceres Seq. ID no. 4907605
acactactctaaccgttttttttcttctctcaaatctcaaaatctcaatttcttcaacaatgtcatcgaagaacggagttgttcgtagctgtttaggatcaatggacgacatcaaaaaagtcttccaacgattcgacaaaaacggcgacgggaaaatctccgtcgacgagctcaaagaagtgatccgcgctctctcaccaacagcatcaccagaagaaacagtaacgatgatgaaacaattcgatctagacggtaacggattcatagatctggacgaattcgtcgcgcttttccaaatcggaatcggaggaggaggtaacaatcgaaacgacgtaagcgatttgaaagaagcgtttgagttatatgatttggatggtaatggaaggatctcggcgaaagagcttcattcagtgatgaagaatttgggtgagaagtgctctgtgcaagattgtaagaagatgattagtaaagttgatattgatggtgatggttgtgttaattttgatgagtttaagaagatgatgagtaatggtggtggtgcttgaggatttggaagatttcgccggagattagattagtcgacggtgatgattcgtattagcagattaattttagtgacggcgattaaaaaccctagaagtatgtggtgattgatgaatattgattttaacggttgtttctatatcttctgctctttttataattaatatgctttgttgagtgtt

SEQ ID NO: 29492 - protein, 180 aa, Arabidopsis thaliana
  misc_feature (1)..(180): Ceres Seq. ID no. 4907606
TTLTVFFLLSNLKISISSTMSSKNGVVRSCLGSMDDIKKVFQRFDKNGDGKISVDELKEVIRALSPTASPEETVTMMKQFDLDGNGFIDLDEFVALFQIGIGGGGNNRNDVSDLKEAFELYDLDGNGRISAKELHSVMKNLGEKCSVQDCKKMISKVDIDGDGCVNFDEFKKMMSNGGGA

SEQ ID NO: 29493 - protein, 161 aa, Arabidopsis thaliana
  misc_feature (1)..(161): Ceres Seq. ID no. 4907607
MSSKNGVVRSCLGSMDDIKKVFQRFDKNGDGKISVDELKEVIRALSPTASPEETVTMMKQFDLDGNGFIDLDEFVALFQIGIGGGGNNRNDVSDLKEAFELYDLDGNGRISAKELHSVMKNLGEKCSVQDCKKMISKVDIDGDGCVNFDEFKKMMSNGGGA

SEQ ID NO: 29494 - protein, 147 aa, Arabidopsis thaliana
  misc_feature (1)..(147): Ceres Seq. ID no. 4907608
MDDIKKVFQRFDKNGDGKISVDELKEVIRALSPTASPEETVTMMKQFDLDGNGFIDLDEFVALFQIGIGGGGNNRNDVSDLKEAFELYDLDGNGRISAKELHSVMKNLGEKCSVQDCKKMISKVDIDGDGCVNFDEFKKMMSNGGGA

SEQ ID NO: 29495 - DNA, 801 bp, Arabidopsis thaliana
  misc_feature (1)..(801): Ceres Seq. ID no. 4907656
aggctccaatgtcgctggacttagctcgttgatcatcgtacaaaaagcttgctcgtagctatcagctccccggagaagaagatggtgcggaaacagtttcaacaggctaaaactggaatagaggcattgaagtcaatggatgctaacaactacttgaagaaggttggattagggcgtgacgatatgttcttttggaaacaagtgggaaaagcattgctatgcacttacacaatctttggtatggcttggatttacaatgaaacgtctcctttaggttggtggacgctgaagccaagaccaaaggaagagagagaattggctcatttgtatgagcggcgtgagtttccttatcctggtgatacagaggctatggaggattttgttgcaaaggggggaatgattggtactgcaattggaccgaaaggaattgttgagtccgaaggtgaggctgataattaccagaaggaaatggagaagaagaagtttgataaagaggctcagaaactgtggttgagaatgaggaatgaggttattactgaacttcaagagaaagggcataatcttgaataaggaagtgcaatagggttttgataaataaaaaagctgtgtgtaatttagggtgtgtatcagttagactaaggattcaaccactcgtacaagtgtttctgtctacgtatagctgaaagtactatactggttgatgttcttgctcttggggaagtagctcttgtcctttattggtggcttgattcatgttttggcttaaaccctttggaatataacttgatgctttttgccccc

SEQ ID NO: 29496 - protein, 162 aa, Arabidopsis thaliana
  misc_feature (1)..(162): Ceres Seq. ID no. 4907657
MVRKQFQQAKTGIEALKSMDANNYLKKVGLGRDDMFFWKQVGKALLCTYTIFGMAWIYNETSPLGWWTLKPRPKEERELAHLYERREFPYPGDTEAMEDFVAKGGMIGTAIGPKGIVESEGEADNYQKEMEKKKFDKEAQKLWLRMRNEVITELQEKGHNLE

SEQ ID NO: 29497 - protein, 144 aa, Arabidopsis thaliana
  misc_feature (1)..(144): Ceres Seq. ID no. 4907658
MDANNYLKKVGLGRDDMFFWKQVGKALLCTYTIFGMAWIYNETSPLGWWTLKPRPKEERELAHLYERREFPYPGDTEAMEDFVAKGGMIGTAIGPKGIVESEGEADNYQKEMEKKKFDKEAQKLWLRMRNEVITELQEKGHNLE

SEQ ID NO: 29498 - protein, 128 aa, Arabidopsis thaliana
  misc_feature (1)..(128): Ceres Seq. ID no. 4907659
MFFWKQVGKALLCTYTIFGMAWIYNETSPLGWWTLKPRPKEERELAHLYERREFPYPGDTEAMEDFVAKGGMIGTAIGPKGIVESEGEADNYQKEMEKKKFDKEAQKLWLRMRNEVITELQEKGHNLE

SEQ ID NO: 29499 - DNA, 1387 bp, Arabidopsis thaliana
  misc_feature (1)..(1387): Ceres Seq. ID no. 4908231
tcgttagctctctcaatgaggagcccgatttagggtttcctccattggttatatcaattcgatcatctccacaaagctctcgaagactctttcggtgatctcatcttcttcttcttgtttagcctcctggaggttactttgtttgttactagttccaaaacatgccgaaagagaggaaagaacggtccgtatctcttgataagtataaacgatcgccactgtgttgtgaggcaagccttgctttgaagccgagtgagaaacaagttaaggaatgggaagaggctcgttgtcctgtttgtatggaacatcctcacaatgggattcttctcatttgttcttcttatgaaaatggttgtcgaccttacatgtgcgacactagccatcggcattctaactgtttcgatcagttccgcaaagcttctaaagagaaaccttctttgtctttacttcgtgaggaagaggaaagtaatgaaccaactgagatggaagatgtggattcagactcaactgctgtaaatctattaggagaagctgcatctgagataacagttgtggatttaagtgatggtgagagaggagaagaagaagtagaagaagatcaagaaaaaaacaaaccacaaaagcttacttgtccgttatgtcgtggacatataaaagaatgggtagttgttaaagcagctcgatgtttcatgaactcaaaacatagaagctgttcttgtgagacttgtgatttcagtggaagctattccgatctgagaaagcacgcaaggcttctacatccaggagttaggccatcagaagcagatccagagagacagagaagctggaggaggctagaaaggcagagcgatttaggggatttacttagcacactccaatcttcttttggaggagatgaaataagtaacgatgatgggtttctatttgctgatactcgcttgcttacagtgtactttctcatccgcgtgtttagaccagaatcgagtggctcaaggagtagtagctggtctggtacatctagagctaggacacatacaagtgggagaagaagatcttcaagacctgcaagtctttggggagagagctatgaaggtaatacaggaacatcacctagagatgaggagaataatcaatcttctgatgaacaagtgtctggaactcggagacgtcgttctagaagaagaactgtcattgatgatgatgatgaagaagaagaaccgtgatgctctgcagtttggaaatttggtctttggagtttatgataaaatgggggaaaccttgtagtaataaccccacttatgaaaccctattatgtaaaatttctttggagattgaaaaaagtttctactattgggaaacaaaatgttcaatatttcattaccgttta

SEQ ID NO: 29500 - protein, 353 aa, Arabidopsis thaliana
  misc_feature (1)..(353): Ceres Seq. ID no. 4908232
MPKERKERSVSLDKYKRSPLCCEASLALKPSEKQVKEWEEARCPVCMEHPHNGILLICSSYENGCRPYMCDTSHRHSNCFDQFRKASKEKPSLSLLREEEESNEPTEMEDVDSDSTAVNLLGEAASEITVVDLSDGERGEEEVEEDQEKNKPQKLTCPLCRGHIKEWVVVKAARCFMNSKHRSCSCETCDFSGSYSDLRKHARLLHPGVRPSEADPERQRSWRRLERQSDLGDLLSTLQSSFGGDEISNDDGFLFADTRLLTVYFLIRVFRPESSGSRSSSWSGTSRARTHTSGRRRSSRPASLWGESYEGNTGTSPRDEENNQSSDEQVSGTRRRRSRRRTVIDDDDEEEEP

SEQ ID NO: 29501 - protein, 307 aa, Arabidopsis thaliana
  misc_feature (1)..(307): Ceres Seq. ID no. 4908233
MEHPHNGILLICSSYENGCRPYMCDTSHRHSNCFDQFRKASKEKPSLSLLREEEESNEPTEMEDVDSDSTAVNLLGEAASEITVVDLSDGERGEEEVEEDQEKNKPQKLTCPLCRGHIKEWVVVKAARCFMNSKHRSCSCETCDFSGSYSDLRKHARLLHPGVRPSEADPERQRSWRRLERQSDLGDLLSTLQSSFGGDEISNDDGFLFADTRLLTVYFLIRVFRPESSGSRSSSWSGTSRARTHTSGRRRSSRPASLWGESYEGNTGTSPRDEENNQSSDEQVSGTRRRRSRRRTVIDDDDEEEEP

SEQ ID NO: 29502 - protein, 285 aa, Arabidopsis thaliana
  misc_feature (1)..(285): Ceres Seq. ID no. 4908234
MCDTSHRHSNCFDQFRKASKEKPSLSLLREEEESNEPTEMEDVDSDSTAVNLLGEAASEITVVDLSDGERGEEEVEEDQEKNKPQKLTCPLCRGHIKEWVVVKAARCFMNSKHRSCSCETCDFSGSYSDLRKHARLLHPGVRPSEADPERQRSWRRLERQSDLGDLLSTLQSSFGGDEISNDDGFLFADTRLLTVYFLIRVFRPESSGSRSSSWSGTSRARTHTSGRRRSSRPASLWGESYEGNTGTSPRDEENNQSSDEQVSGTRRRRSRRRTVIDDDDEEEEP

SEQ ID NO: 29503 - DNA, 1763 bp, Arabidopsis thaliana
  misc_feature (1)..(1763): Ceres Seq. ID no. 4908352
atttttcacttctatcgataaccaaacgaaaaaaaacatggccatctctttcctctgtttttgcctcattaccctcgcttcgttaatctttttcgccaagaagattaaacacttgaaatggaatcttcctccaagccctccaaagtttccggtcatcggaaatttacaccagattggagaattgcctcacaggtcacttcaacatctcgccgaaagatacggacctgtgatgcttcttcactttgggtttgtccctgtaactgtggtctcatcaagagaagcagctgaagaagtgctcagaactcatgacctagactgttgcagcaggcctaaacttgtcgggacaaggttactctcgcggaattttaaagatgtctgttttacgccatacggtaacgagtggaaggcgcggcgtaagtttgccctgcgtgagcttttctgtttgaaaaaggttcagtcctttaggcatatccgagaggaagaatgtaactttctggtcaagcaactgtcggaatccgcggttaatcgctctccggtcgatttgagcaaatcacttttctggctaaccgctagtatctttttcagagttgccttaggacagaattttcatgagagcaattttatcgataaagaaaagatcgaagagctcgtgttcgaagctgagactgccctagcaagtttcacttgttctgatttcttccctgttgccggacttggatggcttgttgattggttttccggacaacacaagagactcaacgatgttttttacaagctcgatgctctgtttcaacatgtcatagatgatcatttaaatccaggaagatcaaaagagcacgaagacatcatcgattcaatgttggatgcgattcataaagaaggaaaagatagttccttagagctcataatagatcatattaaggggtttctcgcggtaatcaagagttatttaaacacattaaaattgtaattggatcgaaatctttaacttacttttcttgtgggttgttagaatatatttcttgcagggatagacacaggggccctcaccatgatatgggcaatgacggagctcgttaaaaacccgaaacttataaagaaagttcaaggcgagatccgagaacaacttggcagcaataaggcgagaatcaccgaggaagatatcgataaagttccttacttgaagatggtaatcaaagaaacattcaggttacacccggcagctcctcttatacttccaagagaaacaatggctcacatcaaagttcaagggtatgatattcctcccaagaggcggatcttggtcaatgtttcggctatcggaagagatcccaaactctggacaaacccggaagagtttgaccctgagaggtttatggatagctctgttgattataggggacaacattacgagctcttaccatttgggtccggtcgaaggatatgtcccgggatgccaatggggattgctgccgtcgaattgggactcttgaacttactttacttcttcgattggaagttgcctgatgggatgacacataaagatattgatactgaagaagctggtactcttacaatcgtcaagaaagtacctctccagctcgttccagttcgagttcagtgatcagaccaaactccaaacggtttggaccaaaccttttgaataaatatatcatgcaaatcatgtaagcttctctgatgatgtatgaagtatatttttcagtaaaatactaaattgaacgttcatttgcgtttgaggaatg

SEQ ID NO: 29504 - protein, 322 aa, Arabidopsis thaliana
  misc_feature (1)..(322): Ceres Seq. ID no. 4908353
FFTSIDNQTKKNMAISFLCFCLITLASLIFFAKKIKHLKWNLPPSPPKFPVIGNLHQIGELPHRSLQHLAERYGPVMLLHFGFVPVTVVSSREAAEEVLRTHDLDCCSRPKLVGTRLLSRNFKDVCFTPYGNEWKARRKFALRELFCLKKVQSFRHIREEECNFLVKQLSESAVNRSPVDLSKSLFWLTASIFFRVALGQNFHESNFIDKEKIEELVFEAETALASFTCSDFFPVAGLGWLVDWFSGQHKRLNDVFYKLDALFQHVIDDHLNPGRSKEHEDIIDSMLDAIHKEGKDSSLELIIDHIKGFLAVIKSYLNTLKL

SEQ ID NO: 29505 - protein, 310 aa, Arabidopsis thaliana
  misc_feature (1)..(310): Ceres Seq. ID no. 4908354
MAISFLCFCLITLASLIFFAKKIKHLKWNLPPSPPKFPVIGNLHQIGELPHRSLQHLAERYGPVMLLHFGFVPVTVVSSREAAEEVLRTHDLDCCSRPKLVGTRLLSRNFKDVCFTPYGNEWKARRKFALRELFCLKKVQSFRHIREEECNFLVKQLSESAVNRSPVDLSKSLFWLTASIFFRVALGQNFHESNFIDKEKIEELVFEAETALASFTCSDFFPVAGLGWLVDWFSGQHKRLNDVFYKLDALFQHVIDDHLNPGRSKEHEDIIDSMLDAIHKEGKDSSLELIIDHIKGFLAVIKSYLNTLKL

SEQ ID NO: 29506 - protein, 246 aa, Arabidopsis thaliana
  misc_feature (1)..(246): Ceres Seq. ID no. 4908355
MLLHFGFVPVTVVSSREAAEEVLRTHDLDCCSRPKLVGTRLLSRNFKDVCFTPYGNEWKARRKFALRELFCLKKVQSFRHIREEECNFLVKQLSESAVNRSPVDLSKSLFWLTASIFFRVALGQNFHESNFIDKEKIEELVFEAETALASFTCSDFFPVAGLGWLVDWFSGQHKRLNDVFYKLDALFQHVIDDHLNPGRSKEHEDIIDSMLDAIHKEGKDSSLELIIDHIKGFLAVIKSYLNTLKL

SEQ ID NO: 29507 - DNA, 1044 bp, Arabidopsis thaliana
  misc_feature (1)..(1044): Ceres Seq. ID no. 4908555
ctccgatttagatagaaacaacaatcctccggtggtcactcgctaatctccgtttgatctcgccgacactcgagccttttaccgatgaaggatggagattccttaccaataagcacttcttccgtcgcggcgacgacggtgaccggaaagaaggaaaccggttattccgctctcttctcgaaaggccggtacaagttttgggccttagctgcgattctgttactcgctttctggtcaatgctcactggcacggtcaatctccgttggtctgccggtaacattaaccatttcaccgacgatctcgtctttcccatccacgaggatctcgatgttcttgtgagtcttcttcttcttcttcgcgatctgttttctgatttctgtgaattacgtttgatttgtgttgtgttgatgaggttattaggaaatggaggagagggagaaagtggtgaagcacatgtgggatgtgtataacaatggccgtcgtatcagattacctaggttttggcaagaggccttcgaggctgcttacgaggagcttaccagtgatgtacctgatgtggttgaggctgccatttccgagatcgctaggatgtctattcgctccattgttatagatccgcctccgcttcattccacgaatgtacgagaattgacaaagactctaaaacttgcggacaaaggaagagcaactcaaatatcaaaaccaagcagccgtcgattgaaatagctatggaggctttacgaaaaaggtagtgtagcagtcagccgtcgtggcgtgaccatacatatacttgatgtcagaaagatcaatcaacctcatccctagaatatatgtccatcattagtgttattttttcttccactaggggcattaatcctttcactatcatcatcatctcttctataaacaaaattttgaggaagctttttatccacaccttattagctctgaacggtaatgtcttttattttggatttatgaaatatttcatatgtagttagcccatacatttaaataccttccaatgaattttctagttatat

SEQ ID NO: 29508 - protein, 128 aa, Arabidopsis thaliana
  misc_feature (1)..(128): Ceres Seq. ID no. 4908556
MKDGDSLPISTSSVAATTVTGKKETGYSALFSKGRYKFWALAAILLLAFWSMLTGTVNLRWSAGNINHFTDDLVFPIHEDLDVLVSLLLLLRDLFSDFCELRLICVVLMRLLGNGGEGESGEAHVGCV

SEQ ID NO: 29509 - protein, 100 aa, Arabidopsis thaliana
  misc_feature (1)..(100): Ceres Seq. ID no. 4908557
MEEREKVVKHMWDVYNNGRRIRLPRFWQEAFEAAYEELTSDVPDVVEAAISEIARMSIRSIVIDPPPLHSTNVRELTKTLKLADKGRATQISKPSSRRLK

SEQ ID NO: 29510 - protein, 90 aa, Arabidopsis thaliana
  misc_feature (1)..(90): Ceres Seq. ID no. 4908558
MWDVYNNGRRIRLPRFWQEAFEAAYEELTSDVPDVVEAAISEIARMSIRSIVIDPPPLHSTNVRELTKTLKLADKGRATQISKPSSRRLK

SEQ ID NO: 29511 - DNA, 820 bp, Arabidopsis thaliana
  misc_feature (1)..(820): Ceres Seq. ID no. 4908848
attttcagattcaccgttttagaaattaaatcctctctataagaacctctccaaaaaccctaatttgtcatcatcactttcacaatcttcttcatcgatttctctcttccaaatctcccaaaagatgtcgaaccctagagttttcttcgacatgagtctcagcggtactcccatcggacggatcgagatggagcttttcgctgatacaaccccaaacacggcggagaatttccgtgctctctgtaccggcgagaaaggaatgggaaagctaggtaagccacttcacttcaaaggatcgatcttccaccgtgtgattcccggattcatgtgtcaaggaggtgatttcaccgccaagaacggaaccggtggtgaatcgatctacggtgctaagttcaaggacgagaactttatcaagaagcatacaggagctgggattctctcaatggctaactctggtcctaacactaacggatctcagttcttcatctgtaccgataagacgtcgtggttagatggtaagcacgttgtgtttggacaagttgttaaaggcttggacgtcgtgaaggcgattgagaaagttggatctgattctggaaagacttccaaagtcgttaccatcactgattgtggtcagctttcttagatctgagtgagaaagtgagagactttgatctttatgagtaataatggtgtcttttgctttcggttgttcttcctcttaccttaatggattattctgtttagggtttgagttttcgtttcagagtttgtaacaaaacccttttgtgttttctggggtttgaaataattatgagcttac

SEQ ID NO: 29512 - protein, 172 aa, Arabidopsis thaliana
  misc_feature (1)..(172): Ceres Seq. ID no. 4908849
MSNPRVFFDMSLSGTPIGRIEMELFADTTPNTAENFRALCTGEKGMGKLGKPLHFKGSIFHRVIPGFMCQGGDFTAKNGTGGESIYGAKFKDENFIKKHTGAGILSMANSGPNTNGSQFFICTDKTSWLDGKHVVFGQVVKGLDVVKAIEKVGSDSGKTSKVVTITDCGQLS

SEQ ID NO: 29513 - protein, 163 aa, Arabidopsis thaliana
  misc_feature (1)..(163): Ceres Seq. ID no. 4908850
MSLSGTPIGRIEMELFADTTPNTAENFRALCTGEKGMGKLGKPLHFKGSIFHRVIPGFMCQGGDFTAKNGTGGESIYGAKFKDENFIKKHTGAGILSMANSGPNTNGSQFFICTDKTSWLDGKHVVFGQVVKGLDVVKAIEKVGSDSGKTSKVVTITDCGQLS

SEQ ID NO: 29514 - protein, 151 aa, Arabidopsis thaliana
  misc_feature (1)..(151): Ceres Seq. ID no. 4908851
MELFADTTPNTAENFRALCTGEKGMGKLGKPLHFKGSIFHRVIPGFMCQGGDFTAKNGTGGESIYGAKFKDENFIKKHTGAGILSMANSGPNTNGSQFFICTDKTSWLDGKHVVFGQVVKGLDVVKAIEKVGSDSGKTSKVVTITDCGQLS

SEQ ID NO: 29515 - DNA, 1348 bp, Arabidopsis thaliana
  misc_feature (1)..(1348): Ceres Seq. ID no. 4908863
atctatcttctccacgttactaccacctaacctctcatccaccttttctcctttaagcatatttcatttcatctccgaaaggaattgtatcgttcctcacacacgcctctcatctcttatccattcttgtccttttttcagctcaacaagaatggataattgtactggagaaaatcccatggcttctcagttgaacattctccgatgcccgttcttgaggaacatcaatgagcccactaacctctctttctcttcatccttgccttttcccatccctgcaagagctgggaaaggacctatatttgaagatggtcccaattttgatacggcgtttaggcttttccatggccaagatggagttgtccctctctctgacaccgctcgaactgaagcccagaagcctgtgcctgtattccatccacttgctgctaaggcggccactattagtctctcatcctttggatctggagggccttttggatttgatgcattttctgacatgtttaaaaatcaaaagaagaagtcagattcatccaaaaataagggaggaaaccacgaagccatgggcgacgaatggcttaaaacaggaaactgcccaatagcaaaatcatatcgagctgtaagtggtgtggcaccacttgtggcaaagatcctgcaaccccctccaggcatgaaatttaaatgccctcaagcaatagtcacagctcgagcagcgatatcaaaaacacctttcgccaagaacctccgtccacaacctttaccagctaaagtactagtgatcgggatgctgggcatggcgttaaatgtgcctttaggggtctggagagagcacactgaaaagttttcggcatcttggtttatagctcttcacgcagcggttccattcataggaatactgagaaagtcagtgttgatgcctaaaacagctatggtattcaccatagcagcatcagttttgggacaggtgattgggtcaagagcagagaggcggagactcaagtctgtagctgagaagaagttgacattggaggtaccaaatccgtcttctgttgaagcagatcagatgcaatttgccggagtttcatcagatggaagatgcggtgataaagtggtgatgaagtggaatcccatgatgcttgatgttgcaagccctgtgtcttccggagcagctactgttgtctgctaaaaggattttgtaattctcttcgaggatttatatatataattgtttttcttgtatttttttcggctgattgtatttaaaaagtttcttaatgtttgagaaaaacaagaataaagccattttttaaactgttaattgtattttaatgtaaaagacttgtttgat

SEQ ID NO: 29516 - protein, 394 aa, Arabidopsis thaliana
  misc_feature (1)..(394): Ceres Seq. ID no. 4908864
SIFSTLLPPNLSSTFSPLSIFHFISERNCIVPHTRLSSLIHSCPFFSSTRMDNCTGENPMASQLNILRCPFLRNINEPTNLSFSSSLPFPIPARAGKGPIFEDGPNFDTAFRLFHGQDGVVPLSDTARTEAQKPVPVFHPLAAKAATISLSSFGSGGPFGFDAFSDMFKNQKKKSDSSKNKGGNHEAMGDEWLKTGNCPIAKSYRAVSGVAPLVAKILQPPPGMKFKCPQAIVTARAAISKTPFAKNLRPQPLPAKVLVIGMLGMALNVPLGVWREHTEKFSASWFIALHAAVPFIGILRKSVLMPKTAMVFTIAASVLGQVIGSRAERRRLKSVAEKKLTLEVPNPSSVEADQMQFAGVSSDGRCGDKVVMKWNPMMLDVASPVSSGAATVVC

SEQ ID NO: 29517 - protein, 344 aa, Arabidopsis thaliana
  misc_feature (1)..(344): Ceres Seq. ID no. 4908865
MDNCTGENPMASQLNILRCPFLRNINEPTNLSFSSSLPFPIPARAGKGPIFEDGPNFDTAFRLFHGQDGVVPLSDTARTEAQKPVPVFHPLAAKAATISLSSFGSGGPFGFDAFSDMFKNQKKKSDSSKNKGGNHEAMGDEWLKTGNCPIAKSYRAVSGVAPLVAKILQPPPGMKFKCPQAIVTARAAISKTPFAKNLRPQPLPAKVLVIGMLGMALNVPLGVWREHTEKFSASWFIALHAAVPFIGILRKSVLMPKTAMVFTIAASVLGQVIGSRAERRRLKSVAEKKLTLEVPNPSSVEADQMQFAGVSSDGRCGDKVVMKWNPMMLDVASPVSSGAATVVC

SEQ ID NO: 29518 - protein, 335 aa, Arabidopsis thaliana
  misc_feature (1)..(335): Ceres Seq. ID no. 4908866
MASQLNILRCPFLRNINEPTNLSFSSSLPFPIPARAGKGPIFEDGPNFDTAFRLFHGQDGVVPLSDTARTEAQKPVPVFHPLAAKAATISLSSFGSGGPFGFDAFSDMFKNQKKKSDSSKNKGGNHEAMGDEWLKTGNCPIAKSYRAVSGVAPLVAKILQPPPGMKFKCPQAIVTARAAISKTPFAKNLRPQPLPAKVLVIGMLGMALNVPLGVWREHTEKFSASWFIALHAAVPFIGILRKSVLMPKTAMVFTIAASVLGQVIGSRAERRRLKSVAEKKLTLEVPNPSSVEADQMQFAGVSSDGRCGDKVVMKWNPMMLDVASPVSSGAATVVC

SEQ ID NO: 29519 - DNA, 513 bp, Arabidopsis thaliana
  misc_feature (1)..(513): Ceres Seq. ID no. 4909179
ggaggaggattcggaggtggagccggtaaaggagttgacggtggcttcggaaaaggagttgacggtggagccggtaaaggagttgacggtggagccgggaaaggatttgatggaggagttggcaaaggagttgacggtggagccggaaaaggatttgatggaggagtcggcaaaggatttgagggaggaatcggaaaaggaattgagggaggagtcggaaaaggatttgacggtggagcaggtaaaggagttgacggtggagccattggaggaatcggcggaggagccggtaaagaaattggtggaggaattggcggcggaggtcactgagaatttgtttaaccgtaatgtgcattgatgaggagctaaaatccaatgcatgtcatttaagaaaactaattcgttatatatgtaacaataactgaaatgtatgtcgtttctctttagtttgttttactctttgaatatgattgtatcttgcttcttcgtgcaagtaaagtgaataaaacgatt

SEQ ID NO: 29520 - protein, 118 aa, Arabidopsis thaliana
  misc_feature (1)..(118): Ceres Seq. ID no. 4909180
EEDSEVEPVKELTVASEKELTVEPVKELTVEPGKDLMEELAKELTVEPEKDLMEESAKDLREESEKELREESEKDLTVEQVKELTVEPLEESAEEPVKKLVEELAAEVTENLFNRNVH

SEQ ID NO: 29521 - protein, 109 aa, Arabidopsis thaliana
  misc_feature (1)..(109): Ceres Seq. ID no. 4909181
GGGFGGGAGKGVDGGFGKGVDGGAGKGVDGGAGKGFDGGVGKGVDGGAGKGFDGGVGKGFEGGIGKGIEGGVGKGFDGGAGKGVDGGAIGGIGGGAGKEIGGGIGGGGH

SEQ ID NO: 29522 - protein, 82 aa, Arabidopsis thaliana; identical to SEQ ID NO: 2346
  misc_feature (1)..(82): Ceres Seq. ID no. 4909182

SEQ ID NO: 29523 - DNA, 815 bp, Arabidopsis thaliana
  misc_feature (1)..(815): Ceres Seq. ID no. 4909291
aattgtcttatctttcgacttttcttcttcttcttcttaagagatttttctccaagaaagttcgctccttttctctgttcttaacaaaaaagtctcggtttttttctctttgttttgggtactagcgtgatgtcttctgagaatgatttcgttgagttttcttctatgttcgagagaattatacaaggaagaggtgatggtctctctcgatttttgccggtgattgtagctttagccgccagagaagacgatgatgaccaaggatctaccgatcaaacaacgagacggggagatccgttgagtccaaggttcgtgatgatcggatcgcgatcgggactcgacgatttctttagcgacggtggaaaacaagggaggtcgccggcgttgaagtcagaagtggagaatatgccacgtgtcgtgatcggagaagataaggagaaatatggtggttcttgcgcgatttgtttggatgagtggtctaaaggtgacgtggcggcggagatgccttgtaaacataagtttcactcaaagtgtgtggaggagtggttagggaggcacgccacgtgtcctatgtgtaggtatgagatgcctgttgaagaagttgaagaagagaagaagattgggatttggattggtttctccattaacgccggcgacagaagaaactaagaagacggaggaagaagaagttaaaagtgactcgaaccctcaagatgcaacatggggctaggtttaggtttaggtttgctagaatgttttgtatagtttcgttttcgtttactgaaatcaatttcgaattcaataaaattggttgc

SEQ ID NO: 29524 - protein, 179 aa, Arabidopsis thaliana
  misc_feature (1)..(179): Ceres Seq. ID no. 4909292
MSSENDFVEFSSMFERIIQGRGDGLSRFLPVIVALAAREDDDDQGSTDQTTRRGDPLSPRFVMIGSRSGLDDFFSDGGKQGRSPALKSEVENMPRVVIGEDKEKYGGSCAICLDEWSKGDVAAEMPCKHKFHSKCVEEWLGRHATCPMCRYEMPVEEVEEEKKIGIWIGFSINAGDRRN

SEQ ID NO: 29525 - protein, 167 aa, Arabidopsis thaliana
  misc_feature (1)..(167): Ceres Seq. ID no. 4909293
MFERIIQGRGDGLSRFLPVIVALAAREDDDDQGSTDQTTRRGDPLSPRFVMIGSRSGLDDFFSDGGKQGRSPALKSEVENMPRVVIGEDKEKYGGSCAICLDEWSKGDVAAEMPCKHKFHSKCVEEWLGRHATCPMCRYEMPVEEVEEEKKIGIWIGFSINAGDRRN

SEQ ID NO: 29526 - protein, 117 aa, Arabidopsis thaliana
  misc_feature (1)..(117): Ceres Seq. ID no. 4909294
MIGSRSGLDDFFSDGGKQGRSPALKSEVENMPRVVIGEDKEKYGGSCAICLDEWSKGDVAAEMPCKHKFHSKCVEEWLGRHATCPMCRYEMPVEEVEEEKKIGIWIGFSINAGDRRN

SEQ ID NO: 29527 - DNA, 1096 bp, Arabidopsis thaliana
  misc_feature (1)..(1096): Ceres Seq. ID no. 4909790
ttcggtttcatttccacgagatctctttggctttcttgttgagatctttccacaagaaagtttagttgttttcttcttcctgtgatttcttcgcctaattttttctggatttaaaaacacgagaagtcaaggtgaaatattatcgaagtctctgaatctgtttttgaatggaaccatcatctggaaccggtcctgagaagagaccaaccgttgacttggtcaaggatagaaatggaacggatcagattcttcttcagaatcctagaggcgcctctgtaaagattagtttacatggaggacaagttctttcatggaagactgacaagggtgatgaattgttattcaacagcaccaaggccaacttgaagcctccccatccggtacgaggaggaatccctatatgctttcctcagtttggaactcggggatcacttgagcaacacgggtttgcaagaaacaagatgtggcttgtagaaaacaatccacctgctttaccttcatttgactcaactggaaaagcctatgttgatttggtgcttaagtcatctgatgaagatacgatgaggatctggccttacagctttgagtttcatctgagagtctcattggcattagatgggaacctaacactgatatcacgagtcagaaacatcaattcaaagccttttagcttttccattgcttaccacacttacttctccatttccgatattagtgaagttagacttgaagggctggaaactcttgactatcttgataatatgcatgatagagagcggttcacagagcaaggcgatgcattaacctttgaatcagagatcgatagagtgtacctaaattctaaagacgtggttgccattttcgaccatgagagaaaacgcacattcctcatcaagaaagaaggtctacctgatgtcgtggtatggaatccatgggagaagaaagcgagagcattgacggatttgggagatgatgagtatagacacatgttgtgtgtggatggagcagccattgagaaacccatcaccttgaaaccgggtgaagaatggaccgggaaattacatctctcgcttgttctttccacctaaaacccggt

SEQ ID NO: 29528 - protein, 306 aa, Arabidopsis thaliana
  misc_feature (1)..(306): Ceres Seq. ID no. 4909791
MEPSSGTGPEKRPTVDLVKDRNGTDQILLQNPRGASVKISLHGGQVLSWKTDKGDELLFNSTKANLKPPHPVRGGIPICFPQFGTRGSLEQHGFARNKMWLVENNPPALPSFDSTGKAYVDLVLKSSDEDTMRIWPYSFEFHLRVSLALDGNLTLISRVRNINSKPFSFSIAYHTYFSISDISEVRLEGLETLDYLDNMHDRERFTEQGDALTFESEIDRVYLNSKDVVAIFDHERKRTFLIKKEGLPDVVVWNPWEKKARALTDLGDDEYRHMLCVDGAAIEKPITLKPGEEWTGKLHLSLVLST

SEQ ID NO: 29529 - protein, 208 aa, Arabidopsis thaliana
  misc_feature (1)..(208): Ceres Seq. ID no. 4909792
MWLVENNPPALPSFDSTGKAYVDLVLKSSDEDTMRIWPYSFEFHLRVSLALDGNLTLISRVRNINSKPFSFSIAYHTYFSISDISEVRLEGLETLDYLDNMHDRERFTEQGDALTFESEIDRVYLNSKDVVAIFDHERKRTFLIKKEGLPDVVVWNPWEKKARALTDLGDDEYRHMLCVDGAAIEKPITLKPGEEWTGKLHLSLVLST

SEQ ID NO: 29530 - protein, 175 aa, Arabidopsis thaliana
  misc_feature (1)..(175): Ceres Seq. ID no. 4909793
MRIWPYSFEFHLRVSLALDGNLTLISRVRNINSKPFSFSIAYHTYFSISDISEVRLEGLETLDYLDNMHDRERFTEQGDALTFESEIDRVYLNSKDVVAIFDHERKRTFLIKKEGLPDVVVWNPWEKKARALTDLGDDEYRHMLCVDGAAIEKPITLKPGEEWTGKLHLSLVLST

SEQ ID NO: 29531 - DNA, 428 bp, Arabidopsis thaliana
  misc_feature (1)..(428): Ceres Seq. ID no. 4909822
aagcaaaacgcaaaaaccaaagatgggtgagatgatcaaagccagacgcatactcctcttctccatcgtattcctcttcttcttctctcaggcctttcttttgtgttcagctgagggtgagcatggctcaagaaatctcgcagtggtgatgaagaaaagggtgaaatacagaggacctcgcaacacaacaacatcctctgcagcctcaactattatgttcccaggctccttccatattggtgctgcttcctctttactccttgctcttcttttataagctcccttgtagtgatcattattgtactgtttgacaatgattcatgtaatttgcttttctcgattgattttgtagaaatttctcaaatggtctaaaattctgtttgtaaattatttgctctgtttcaaaagtatatggtcacttgtcccac

SEQ ID NO: 29532 - protein, 91 aa, Arabidopsis thaliana
  misc_feature (1)..(91): Ceres Seq. ID no. 4909823
SKTQKPKMGEMIKARRILLFSIVFLFFFSQAFLLCSAEGEHGSRNLAVVMKKRVKYRGPRNTTTSSAASTIMFPGSFHIGAASSLLLALLL

SEQ ID NO: 29533 - protein, 84 aa, Arabidopsis thaliana
  misc_feature (1)..(84): Ceres Seq. ID no. 4909824
MGEMIKARRILLFSIVFLFFFSQAFLLCSAEGEHGSRNLAVVMKKRVKYRGPRNTTTSSAASTIMFPGSFHIGAASSLLLALLL

SEQ ID NO: 29534 - protein, 81 aa, Arabidopsis thaliana
  misc_feature (1)..(81): Ceres Seq. ID no. 4909825
MIKARRILLFSIVFLFFFSQAFLLCSAEGEHGSRNLAVVMKKRVKYRGPRNTTTSSAASTIMFPGSFHIGAASSLLLALLL

SEQ ID NO: 29535 - DNA, 1247 bp, Arabidopsis thaliana
  misc_feature (1)..(1247): Ceres Seq. ID no. 4909884
ttgaaactcttgactggttctaaacacagctcattatatgtctatttagtattttacacattggtttcagacggctcttaaaggtctctctagcttcatgtcaaccatctaaaccaaccaccattaatgttcctctgcccattttcaagaaattagaaatcatttttctctaagttcttgatcgtcgccatgaacgatcttatctcaagctcattcaagagatacacagacttaaaccaccaggtccaactcgatgacatcgagtctcaaaatgtttctcttgattcaggcaacctcgatgagttctttggatatgtcgagagtgttaaagaagacatgaaagctgtcgacgagattcataagcgtctccaagatgctaatgaagagtccaagaccgtacatgattccaaggccgtgaagaagcttcgtgctcgtatggattcgagtgttacagaggtcttgaaacgtgtcaagatgataaagactaagcttgtagctttggagaaatcaaatgctgcgcagaggaaagtcgctggttgtggtcctggctcgtctgctgatcggaccagaacatcggtcgttagtggattggggaagaagcttaaagacatgatggatgattttcagagactacgaaccaaaatggctactgaatacaaagaaacggtcgagagaaggtacttcactgtaacggggcaaaaagcggacgaagagacggtcgagaagctcatatcgagcggagagagcgaacgttttctccaaaaagcaatacaagagcaaggtcgcggacaggtcatggacacattatcagagattcaagaacgacacgacacggtcaaggagatagaacggagtctgttagagctgcaccaagtgttcctcgacatggctgctcttgtcgaagctcaagggaatatgctcaatgacattgaatcaaatgtctcaaaggcgagctctttcgtcatgagagggactgatcaattgcatggggctaaagtacttcagaggaacaacaggaaatgggcttgtatcgccactatcctcgctattgtagttgttattgtgattcttttcccaatcctctttaacactctacttcgaccttgatttcaaaatgtaacttattgttttctccaaactccttttgttagagccctttcgatttcttgtattgaatccagagctgaagcgagagtttaatttgaagctctctctaaccattcttgctactgtaattgctttatatc

SEQ ID NO: 29536 - protein, 305 aa, Arabidopsis thaliana
  misc_feature (1)..(305): Ceres Seq. ID no. 4909885
MNDLISSSFKRYTDLNHQVQLDDIESQNVSLDSGNLDEFFGYVESVKEDMKAVDEIHKRLQDANEESKTVHDSKAVKKLRARMDSSVTEVLKRVKMIKTKLVALEKSNAAQRKVAGCGPGSSADRTRTSVVSGLGKKLKDMMDDFQRLRTKMATEYKETVERRYFTVTGQKADEETVEKLISSGESERFLQKAIQEQGRGQVMDTLSEIQERHDTVKEIERSLLELHQVFLDMAALVEAQGNMLNDIESNVSKASSFVMRGTDQLHGAKVLQRNNRKWACIATILAIVVVIVILFPILFNTLLRP

SEQ ID NO: 29537 - protein, 256 aa, Arabidopsis thaliana
  misc_feature (1)..(256): Ceres Seq. ID no. 4909886
MKAVDEIHKRLQDANEESKTVHDSKAVKKLRARMDSSVTEVLKRVKMIKTKLVALEKSNAAQRKVAGCGPGSSADRTRTSVVSGLGKKLKDMMDDFQRLRTKMATEYKETVERRYFTVTGQKADEETVEKLISSGESERFLQKAIQEQGRGQVMDTLSEIQERHDTVKEIERSLLELHQVFLDMAALVEAQGNMLNDIESNVSKASSFVMRGTDQLHGAKVLQRNNRKWACIATILAIVVVIVILFPILFNTLLRP

SEQ ID NO: 29538 - protein, 223 aa, Arabidopsis thaliana
  misc_feature (1)..(223): Ceres Seq. ID no. 4909887
MDSSVTEVLKRVKMIKTKLVALEKSNAAQRKVAGCGPGSSADRTRTSVVSGLGKKLKDMMDDFQRLRTKMATEYKETVERRYFTVTGQKADEETVEKLISSGESERFLQKAIQEQGRGQVMDTLSEIQERHDTVKEIERSLLELHQVFLDMAALVEAQGNMLNDIESNVSKASSFVMRGTDQLHGAKVLQRNNRKWACIATILAIVVVIVILFPILFNTLLRP

SEQ ID NO: 29539 - DNA, 1304 bp, Arabidopsis thaliana
  misc_feature (1)..(1304): Ceres Seq. ID no. 4909966
atcttataaccatccttcaatctccttcttcctctaaaactcttctaaagaagaaaacagaggaacgagaagaagaagaagagtgaacaatgaagaacggatcagggaacacgaacacaaaactaatccttcttcatccttacatccaaaaacaaacgagcacgactcgtttatggcttctcgctttcgtctctttcttcaccatagtttttctcctcactcttctctacactagagacacaatcccttccaaaaacacctccgtcgccgcagccgtagctgcagtcgtcaccggaggatccacaccttcagcatcatctcccatctccaactccaacttaccaactagtgcaatcaacgctttgcttcactacgcgtcaagatccaacgatagtttccacatgtcttacggagagatgaaatcaatctctgacgtcctccgccgctgcgctccaccgtgtaatcttctcgttttcggactcacacacgagactctcctttggaagtcgttaaaccacaacggtagaacagtgttcatcgaggagaatcgttactacgcggcttacttcgaagaaatccacccggagatcgacgttttcgacgttcaatacacgacaaaagctcacgaagctggagagctcgtcaccgcggctaaagaagccgcgggaaacgagtgtcgtcctgtgcaaaatcttctcttctcagattgtaaattaggtctcaatgatttgcctaatcatgtctacgatgttgattgggatgtaatctttgtggacgggccacgtggcgatgctcacgaaggaccggggaggatgtcgtcgattttcacggcggcggttcttgctcggagcaaaaagggcgggactccgaagacgcatgtgtttgtgcatgactattatagagacgttgagaggctttgtggtgatgagttcttgtgccgagagaatcttgttgagtctaatgatttgcttgcacactacgtgttggataagatggataaaaacagcacaaagttttgcaatggtcgtaagaaacgttcggtttcgtctttgtcttaaaagtgatgccagaagacttcatacgtacatttgcttattgtaagaaataaagttttttccttgaagttttgctttttgtgctggtgtaaattttcgatcttggatttattgaagactttaatttaatctcttttttttttttttttttttctcaaaggccaaagcaatcaatttgatgaaacatctagggatatatataaccaaatgtaaactgaacttttgaaccaaaatcaatattttattcat

SEQ ID NO: 29540 - protein, 322 aa, Arabidopsis thaliana
  misc_feature (1)..(322): Ceres Seq. ID no. 4909967
MKNGSGNTNTKLILLHPYIQKQTSTTRLWLLAFVSFFTIVFLLTLLYTRDTIPSKNTSVAAAVAAVVTGGSTPSASSPISNSNLPTSAINALLHYASRSNDSFHMSYGEMKSISDVLRRCAPPCNLLVFGLTHETLLWKSLNHNGRTVFIEENRYYAAYFEEIHPEIDVFDVQYTTKAHEAGELVTAAKEAAGNECRPVQNLLFSDCKLGLNDLPNHVYDVDWDVIFVDGPRGDAHEGPGRMSSIFTAAVLARSKKGGTPKTHVFVHDYYRDVERLCGDEFLCRENLVESNDLLAHYVLDKMDKNSTKFCNGRKKRSVSSLS

SEQ ID NO: 29541 - protein, 218 aa, Arabidopsis thaliana
  misc_feature (1)..(218): Ceres Seq. ID no. 4909968
MSYGEMKSISDVLRRCAPPCNLLVFGLTHETLLWKSLNHNGRTVFIEENRYYAAYFEEIHPEIDVFDVQYTTKAHEAGELVTAAKEAAGNECRPVQNLLFSDCKLGLNDLPNHVYDVDWDVIFVDGPRGDAHEGPGRMSSIFTAAVLARSKKGGTPKTHVFVHDYYRDVERLCGDEFLCRENLVESNDLLAHYVLDKMDKNSTKFCNGRKKRSVSSLS

SEQ ID NO: 29542 - protein, 213 aa, Arabidopsis thaliana
  misc_feature (1)..(213): Ceres Seq. ID no. 4909969
MKSISDVLRRCAPPCNLLVFGLTHETLLWKSLNHNGRTVFIEENRYYAAYFEEIHPEIDVFDVQYTTKAHEAGELVTAAKEAAGNECRPVQNLLFSDCKLGLNDLPNHVYDVDWDVIFVDGPRGDAHEGPGRMSSIFTAAVLARSKKGGTPKTHVFVHDYYRDVERLCGDEFLCRENLVESNDLLAHYVLDKMDKNSTKFCNGRKKRSVSSLS

SEQ ID NO: 29543 - DNA, 1209 bp, Arabidopsis thaliana
  misc_feature (1)..(1209): Ceres Seq. ID no. 4910017
agaaaaaaaatggcggaactgttgttggtggaaactccaatcccacagcaaaagcactacgaatccaaaccattcccggcggtgatatcaccaccgtctgcttcgattccaattcctgctctgtctctcccactattcactcaaactatcaaaactcagaaacactatctcgattctctcttgcacgaatccggagcagtgctattcagaggttttccggtgaattccgccgatgatttcaacgacgtcgttgaagctttcggtttcgatgagcttccttacgtcggaggcgctgctcctcgcactagcgtcgtcggtcgtgtcttcactgctaatgaatctcctcctgatcagaagattccttttcaccacgagatggctcaggtattgatcaaaatcagatttgggtttatgtgaatttgattttttacatctaaagttttgagctttattgaatttgattgatggtgtttgttaggttcgtgagtttccatcaaagttgttcttttactgtgagattgagcctaagtgtggtggagagactccaattgtgttgagtcatgttgtgtatgagagaatgaaagataaacatccagagtttgttcagagattagaggaacatggtttgctttatgttagggttttaggtgaagatgatgatccttcatctcccattggacgtggttggaaatctacattcttaacccatgacaagaaccttgctgagcaaagggcggttgatttgggaatgaaactggaatggacagaggatggtggagccaagacggtaatgggtccgattccggctatcaaatatgacgagtcgagaaaccgtaaagtatggtttaacagcatggtagctgcttatacgggatgggaggataagcggaatgatccaagaaaggctgtgacttttggggatggaaagcctttacctgcggatatagtccatgattgtcttaggattcttgaagaggaatgtgttgctgttccgtggcagagaggagatgttttgcttatagataactgggcggttcttcattctcgaagaccgtttgatcctcctcgtcgagttcttgcatcactctgcaaatagattatgttgtctttcatgcataaatcaaagctttggatttcgaatttagaggcaacaacaacactgtacatattttggatacatatatgtgggtacatagtaacccatttcct

SEQ ID NO: 29544 - protein, 172 aa, Arabidopsis thaliana
  misc_feature (1)..(172): Ceres Seq. ID no. 4910018
MKDKHPEFVQRLEEHGLLYVRVLGEDDDPSSPIGRGWKSTFLTHDKNLAEQRAVDLGMKLEWTEDGGAKTVMGPIPAIKYDESRNRKVWFNSMVAAYTGWEDKRNDPRKAVTFGDGKPLPADIVHDCLRILEEECVAVPWQRGDVLLIDNWAVLHSRRPFDPPRRVLASLCK

SEQ ID NO: 29545 - protein, 138 aa, Arabidopsis thaliana
  misc_feature (1)..(138): Ceres Seq. ID no. 4910019
RKKMAELLLVETPIPQQKHYESKPFPAVISPPSASIPIPALSLPLFTQTIKTQKHYLDSLLHESGAVLFRGFPVNSADDFNDVVEAFGFDELPYVGGAAPRTSVVGRVFTANESPPDQKIPFHHEMAQVLIKIRFGFM

SEQ ID NO: 29546 - protein, 135 aa, Arabidopsis thaliana
  misc_feature (1)..(135): Ceres Seq. ID no. 4910020
MAELLLVETPIPQQKHYESKPFPAVISPPSASIPIPALSLPLFTQTIKTQKHYLDSLLHESGAVLFRGFPVNSADDFNDVVEAFGFDELPYVGGAAPRTSVVGRVFTANESPPDQKIPFHHEMAQVLIKIRFGFM

SEQ ID NO: 29547 - DNA, 1453 bp, Arabidopsis thaliana
  misc_feature (1)..(1453): Ceres Seq. ID no. 4912006
aaaagaaaattgtcaatttcgaaaaatgttgagcacaagctctgatcttcatggccgtcttctccgattatcagaaccaatagcagagattcttagacgtacacagtacacaccgcaagagagcagcaaagtatccaccaaagatatactcttgtccttgttaccaaacacttcgtcttctcgtctcgccaatgaagaatcgatcaaaagtctcgcgcttgcttgtgcccttctcgcttcttcacgttcatccactcacgaacttctctcatggattccagaaaacctctctgtcatgggggaatctacattttgggagatttcaagggattgtttcagtgatttttctagcaacagtaatgctgagaagcttgtggaattggtagaggatagtgagaagatcgaaatgttgccgatagttttgccggagttaaaagatggaatcgaaaagagttcacttggtaaaggcagtgatgcagaggatgtttcagctgcaatggctagaacacctgttggttatgctatacttgctgctcaccagctcaggtggtttgttactcaggttaaaaaaccgaatttggtgaaattttgtaacttggtggttccttgtgctttgacagcacttgatcattggtctcctgaagtcaaagggcagggtatgataacctttgttcatcttgctaaaaatgtgagttccggtgatcttggtttgtatggagatgtggttcttgatgcgtgttgccagaatatagcttccgatgatgagatttggatacatgtggtagagttatctgtgcttcttgttactaaaatccacccaaataatcctcgaagcccgtggtatgagaagatcatgaatgagatgctcgggcatttggaacgccaaccaagaaataaggagcgacgtatcacttggctaagatttgttgagccactcttgaactctctagggcttttcttacttgctcattttcgacgtatcttccctcttttctttcagtggatgcattcagacgacgccgaaacagttctgttggttcttgagagactggagacagttgtgaggttgacgtggattagacactcacctgtgttcccaagattggtggatgagcttgtttccttgtacaaagagtcatcgatgcgtaaggatcgcgatgatattagacctcttatcctccgtatcttgatgctactccgccagtgcaaaggtctacggtttgagtcagcgtggagtcaataccaggaggatccaaatctgagtactgttagtcaacatatatggactagttcaagttgatctcaagagcgtatgtttgactaaaacagccatttttttttctaattttcgatattagtttggtctaggcctagtgatgcaagtaattactggcgaatcctcgaatttttgtaagcatttggctcttgactcttcttaagctaatctgatttg

SEQ ID NO: 29548 - protein, 432 aa, Arabidopsis thaliana
  misc_feature (1)..(432): Ceres Seq. ID no. 4912007
KENCQFRKMLSTSSDLHGRLLRLSEPIAEILRRTQYTPQESSKVSTKDILLSLLPNTSSSRLANEESIKSLALACALLASSRSSTHELLSWIPENLSVMGESTFWEISRDCFSDFSSNSNAEKLVELVEDSEKIEMLPIVLPELKDGIEKSSLGKGSDAEDVSAAMARTPVGYAILAAHQLRWFVTQVKKPNLVKFCNLVVPCALTALDHWSPEVKGQGMITFVHLAKNVSSGDLGLYGDVVLDACCQNIASDDEIWIHVVELSVLLVTKIHPNNPRSPWYEKIMNEMLGHLERQPRNKERRITWLRFVEPLLNSLGLFLLAHFRRIFPLFFQWMHSDDAETVLLVLERLETVVRLTWIRHSPVFPRLVDELVSLYKESSMRKDRDDIRPLILRILMLLRQCKGLRFESAWSQYQEDPNLSTVSQHIWTSSS

SEQ ID NO: 29549 - protein, 424 aa, Arabidopsis thaliana
  misc_feature (1)..(424): Ceres Seq. ID no. 4912008
MLSTSSDLHGRLLRLSEPIAEILRRTQYTPQESSKVSTKDILLSLLPNTSSSRLANEESIKSLALACALLASSRSSTHELLSWIPENLSVMGESTFWEISRDCFSDFSSNSNAEKLVELVEDSEKIEMLPIVLPELKDGIEKSSLGKGSDAEDVSAAMARTPVGYAILAAHQLRWFVTQVKKPNLVKFCNLVVPCALTALDHWSPEVKGQGMITFVHLAKNVSSGDLGLYGDVVLDACCQNIASDDEIWIHVVELSVLLVTKIHPNNPRSPWYEKIMNEMLGHLERQPRNKERRITWLRFVEPLLNSLGLFLLAHFRRIFPLFFQWMHSDDAETVLLVLERLETVVRLTWIRHSPVFPRLVDELVSLYKESSMRKDRDDIRPLILRILMLLRQCKGLRFESAWSQYQEDPNLSTVSQHIWTSSS

SEQ ID NO: 29550 - protein, 334 aa, Arabidopsis thaliana
  misc_feature (1)..(334): Ceres Seq. ID no. 4912009
MGESTFWEISRDCFSDFSSNSNAEKLVELVEDSEKIEMLPIVLPELKDGIEKSSLGKGSDAEDVSAAMARTPVGYAILAAHQLRWFVTQVKKPNLVKFCNLVVPCALTALDHWSPEVKGQGMITFVHLAKNVSSGDLGLYGDVVLDACCQNIASDDEIWIHVVELSVLLVTKIHPNNPRSPWYEKIMNEMLGHLERQPRNKERRITWLRFVEPLLNSLGLFLLAHFRRIFPLFFQWMHSDDAETVLLVLERLETVVRLTWIRHSPVFPRLVDELVSLYKESSMRKDRDDIRPLILRILMLLRQCKGLRFESAWSQYQEDPNLSTVSQHIWTSSS

SEQ ID NO: 29551 - DNA, 443 bp, Arabidopsis thaliana
  misc_feature (1)..(443): Ceres Seq. ID no. 4915222
ttaatgaaattaattttacttgtttttcctctctctttttttcgttttttaggttatggcctcaagtggatctaatgtgaagtggagccagaaacgttatggaccaggaagcctgaaacgtacccaatgcccatcggaatgtgataggaggtgtaaaaagacacagtaccacaaggcttgcattacgttctgcaacaaatgctgcaggaagtgtctctgtgtgcctccgggttactatgggaacaaacaagtttgctcctgctacaacaactggaaaactcaagagggtggaccaaaatgcccttgaaaaaatctcccttcgttccctttttataataaaaattttcaactataactaaatttcctttgatcaatgttttatctactttattcctaatgttgtaatgttatgtcactccttttcggattttgttctaaatcct

SEQ ID NO: 29552 - protein, 83 aa, Arabidopsis thaliana
  misc_feature (1)..(83): Ceres Seq. ID no. 4915223
MASSGSNVKWSQKRYGPGSLKRTQCPSECDRRCKKTQYHKACITFCNKCCRKCLCVPPGYYGNKQVCSCYNNWKTQEGGPKCP

SEQ ID NO: 29553 - protein, 45 aa, Arabidopsis thaliana
  misc_feature (1)..(45): Ceres Seq. ID no. 4915224
MLQEVSLCASGLLWEQTSLLLLQQLENSRGWTKMPLKKSPFVPFL

SEQ ID NO: 29554 - DNA, 3918 bp, Arabidopsis thaliana
  misc_feature (1)..(3918): Ceres Seq. ID no. 4916082
atgcttgaggaggctgattcaaagtttaagttcattgttagtcagcttattaagtcggctgggttttctattgaagaaagtggatattggtttgagatagttgctaggttatgctgggaggctgcttctatgttgaagccagctattgacggcaaatcagttgatcccactgagtatatcaaagtgaaatgcatagcaactggttcttgcgttgacagtgaagttttcaaaggcctggttttcaaaaaacatgctgctcttaaacacatggcaactaagtatgagcatcctagaataatgttagtcgaaggagtactgggtcatccgataagtggattttcgtctctccaatcagtgaatcaggacaatgagtatctactgaagtatgtgaagcctgttgttgatatcatagaagcttccaagcctgacgtgatgctggtggaaaagtctgtttcacgtgatatccaaaagactattcttgataaaggggtcactctggtgtttgacatgaagctccaccgtctacagaggatttctcgatgcattggttcaccaattctttcagttgactctctgtctagtcagaagttaaagcattgtgattcctttcgtatcgagaaaattgtcgaggagcataatgccgcgggtgaatccgacaagaagccaactaaaacactgatgtttttagagggttgccctacccgccttggctgcacgattttacttaaaggatgccacagcgagaggttgaaaaaggtcaaagaagtagtacaatattcatttatcctggcatatcatctaatgctggaggcttctttcctcgctgaccggcatacaatgttctcaaccatctttgcaaaagaagctacatcatgtgttgtggaaatagaaaatttttcaccatctccttctcctcgtgaatctccctctgaagcagttgatattcctgtgtctaatggattcgatgaacaaactattcagattaatggggaagcagatggtgagaaagttggaacttgggaatcagatggagatcatgtgttctctcacgagccatataatccagttatttttactgggttctcatctttatctgccagattaagtaaatatttaggctttgttcaaaatccggagtcagttccagtttctgtggatacagatgtatcgactaccagcaatcttgattcgattagggaatctgaggaagatactgcagaaaagaatgaggataaacaacctcttttacttgatcctgagctcccagtaaactcgagttcagatgatggagacaacaagtcgcaaacggaaaatgatattgagagcaccttggagtctcagagtatattggttttagtgtcaaagaggaatgccctcagggggataatgtgtgatcaaaggcatttttcacacatcaagttttacaagcactttgatgttcccttggaaaaattcctgcgcgatatgtttaatcagagaaatctatgccaaacgtgtgttgaatttccagaagcacatctttactattatgctcatcaaaataagcaactaacaatccaaatcaagcgaattccagtagcaaaaggtttggctggtgaggcaaaaggaaaaatctggatgtggagtcgttgtggaaagtgtaaaacaaagaatgcgtcccggaaatccacaaaacgagtgctgatatcaactgctgctcgtagcttgtcatttggaaagtttttggagctcagcttttctcagcaaacttttctgaacagatcgtctagctgtgggcactctttcgacagtgacttccttcacttctttggattaggctccatggttgctatgctcagttactcccaagtcgcatcctacacagtgtctctaccacccatgaagctggaatctagcattttaataaaagcaggttggcttgagaaagaatttcaaacagtattcactaaagggatctccttgttcgaggacgctgctggttttcttaagagactaagatcacaattcacaaattcagatctcagatatcagcgtgcacgcaaactcctttctaacattgaggagttgctgaagcacgagcgttgcatatttgaggaaaacatcaagaactcgttcgacaaggctaaaaccatagatgatgtttcacacagactgctccgcttaaaccgcatgaggtgggaacttctgcttcaagctctcatctggaactaccggttgcagtcgctggttttatctgatcgtttgctaccttcaagtgatgagacgaagatatatgaacaaggtttgaagactgtttccgaggctggaatgaccagatatgaaaatgataacaaagtttctgattctggtagcaatggaggcatagacactccacttgttgaacacaaggatataccaatcgctggagcgtctgttggggacaatgatcagatggcagaatcctatgtgcctgaagataatgaatcgcaaactttgtgcagctccagtcccgatacaacctctcccatcaacaatcattttgacactcatttggctgttaatgtacattcaaccaatggacaagaagcggacaaatcaattccagttactggagagtctttggatgatgaggtttctacctctaatgggccacacatcttaggttgggatgaatggttttggctgccatttgaggaactacgctcgaagcggattgttgatattgagaaggaatacttgttgaaattcgagtatgttaacaactttacccaagaaaacctacagacggtgaaccagataatcaccgaggaaagttctcgtctgcgcatctcgttgagggatgatgattttattgtgtcagactatgaagacgagctgtccagcctaattgcttgtgcacttgcccatctgaacaatgaagagagcaaaaagcctctttcaaggtgtatacatggatctcttcaagggttcttagataataatcaggattctaagcaaactgaccgagacgtttcccgtttctcgagtgagagtacaaatcggttggaaacactaccccctccagaggtcctcgttacttttgggtcagtcaaatcagttggaaaacccaagtactctatcgtgtccctgtatgcagatgatttccgtgacctcagaaaacgctgttgttcatcagagcttgactatatagcttcactaagccgctgtaagccatgggatgccaaaggtgggaagagcaaatccgtgttcgctaagactttggatgataggttcatcgtaaaagagatcaagaagacagagtacgaatcatttgtgacttttgctacggagtatttcaaatacatgaaggactcgtatgatttaggcaaccagacttgtcttgccaaagttcttgggatccatcaggtaactgtaaggcagccaaagggtggcgggaaagagatacggcacgacctgatggtcatggagaatctgagttttagcagaaaagttactcgccagtatgatctcaaaggcgctctacatgctcgtttcacagccacttctgctaatggcgaagacgatgttctattggatcagaactttgtcaacgacatgaacaaatccccgctttacgttagcaaaacatcaaaacaaaatctccaaagagcggtttataacgacaccagcttcctaaccagtataaacgtgatggactactcgctgctggttggagttgatgatgagaatcatgagctagtgtgtgggatcatcgattatctgagacaatacacatgggacaagcagttagagacatgggtgaaatcgtctttggtggtaccaaagaatgtgcagccgacagtgatcagcccgattgattacaagacaaggttcaggaaattcatgaaaacgcatttcttgtgcgtccctgaccagtggtgcgaccaaggagactcgtaa

SEQ ID NO: 29555 - protein, 1305 aa, Arabidopsis thaliana
  misc_feature (1)..(1305): Ceres Seq. ID no. 4916083
MLEEADSKFKFIVSQLIKSAGFSIEESGYWFEIVARLCWEAASMLKPAIDGKSVDPTEYIKVKCIATGSCVDSEVFKGLVFKKHAALKHMATKYEHPRIMLVEGVLGHPISGFSSLQSVNQDNEYLLKYVKPVVDIIEASKPDVMLVEKSVSRDIQKTILDKGVTLVFDMKLHRLQRISRCIGSPILSVDSLSSQKLKHCDSFRIEKIVEEHNAAGESDKKPTKTLMFLEGCPTRLGCTILLKGCHSERLKKVKEVVQYSFILAYHLMLEASFLADRHTMFSTIFAKEATSCVVEIENFSPSPSPRESPSEAVDIPVSNGFDEQTIQINGEADGEKVGTWESDGDHVFSHEPYNPVIFTGFSSLSARLSKYLGFVQNPESVPVSVDTDVSTTSNLDSIRESEEDTAEKNEDKQPLLLDPELPVNSSSDDGDNKSQTENDIESTLESQSILVLVSKRNALRGIMCDQRHFSHIKFYKHFDVPLEKFLRDMFNQRNLCQTCVEFPEAHLYYYAHQNKQLTIQIKRIPVAKGLAGEAKGKIWMWSRCGKCKTKNASRKSTKRVLISTAARSLSFGKFLELSFSQQTFLNRSSSCGHSFDSDFLHFFGLGSMVAMLSYSQVASYTVSLPPMKLESSILIKAGWLEKEFQTVFTKGISLFEDAAGFLKRLRSQFTNSDLRYQRARKLLSNIEELLKHERCIFEENIKNSFDKAKTIDDVSHRLLRLNRMRWELLLQALIWNYRLQSLVLSDRLLPSSDETKIYEQGLKTVSEAGMTRYENDNKVSDSGSNGGIDTPLVEHKDIPIAGASVGDNDQMAESYVPEDNESQTLCSSSPDTTSPINNHFDTHLAVNVHSTNGQEADKSIPVTGESLDDEVSTSNGPHILGWDEWFWLPFEELRSKRIVDIEKEYLLKFEYVNNFTQENLQTVNQIITEESSRLRISLRDDDFIVSDYEDELSSLIACALAHLNNEESKKPLSRCIHGSLQGFLDNNQDSKQTDRDVSRFSSESTNRLETLPPPEVLVTFGSVKSVGKPKYSIVSLYADDFRDLRKRCCSSELDYIASLSRCKPWDAKGGKSKSVFAKTLDDRFIVKEIKKTEYESFVTFATEYFKYMKDSYDLGNQTCLAKVLGIHQVTVRQPKGGGKEIRHDLMVMENLSFSRKVTRQYDLKGALHARFTATSANGEDDVLLDQNFVNDMNKSPLYVSKTSKQNLQRAVYNDTSFLTSINVMDYSLLVGVDDENHELVCGIIDYLRQYTWDKQLETWVKSSLVVPKNVQPTVISPIDYKTRFRKFMKTHFLCVPDQWCDQGDS

SEQ ID NO: 29556 - protein, 1262 aa, Arabidopsis thaliana
  misc_feature (1)..(1262): Ceres Seq. ID no. 4916084
MLKPAIDGKSVDPTEYIKVKCIATGSCVDSEVFKGLVFKKHAALKHMATKYEHPRIMLVEGVLGHPISGFSSLQSVNQDNEYLLKYVKPVVDIIEASKPDVMLVEKSVSRDIQKTILDKGVTLVFDMKLHRLQRISRCIGSPILSVDSLSSQKLKHCDSFRIEKIVEEHNAAGESDKKPTKTLMFLEGCPTRLGCTILLKGCHSERLKKVKEVVQYSFILAYHLMLEASFLADRHTMFSTIFAKEATSCVVEIENFSPSPSPRESPSEAVDIPVSNGFDEQTIQINGEADGEKVGTWESDGDHVFSHEPYNPVIFTGFSSLSARLSKYLGFVQNPESVPVSVDTDVSTTSNLDSIRESEEDTAEKNEDKQPLLLDPELPVNSSSDDGDNKSQTENDIESTLESQSILVLVSKRNALRGIMCDQRHFSHIKFYKHFDVPLEKFLRDMFNQRNLCQTCVEFPEAHLYYYAHQNKQLTIQIKRIPVAKGLAGEAKGKIWMWSRCGKCKTKNASRKSTKRVLISTAARSLSFGKFLELSFSQQTFLNRSSSCGHSFDSDFLHFFGLGSMVAMLSYSQVASYTVSLPPMKLESSILIKAGWLEKEFQTVFTKGISLFEDAAGFLKRLRSQFTNSDLRYQRARKLLSNIEELLKHERCIFEENIKNSFDKAKTIDDVSHRLLRLNRMRWELLLQALIWNYRLQSLVLSDRLLPSSDETKIYEQGLKTVSEAGMTRYENDNKVSDSGSNGGIDTPLVEHKDIPIAGASVGDNDQMAESYVPEDNESQTLCSSSPDTTSPINNHFDTHLAVNVHSTNGQEADKSIPVTGESLDDEVSTSNGPHILGWDEWFWLPFEELRSKRIVDIEKEYLLKFEYVNNFTQENLQTVNQIITEESSRLRISLRDDDFIVSDYEDELSSLIACALAHLNNEESKKPLSRCIHGSLQGFLDNNQDSKQTDRDVSRFSSESTNRLETLPPPEVLVTFGSVKSVGKPKYSIVSLYADDFRDLRKRCCSSELDYIASLSRCKPWDAKGGKSKSVFAKTLDDRFIVKEIKKTEYESFVTFATEYFKYMKDSYDLGNQTCLAKVLGIHQVTVRQPKGGGKEIRHDLMVMENLSFSRKVTRQYDLKGALHARFTATSANGEDDVLLDQNFVNDMNKSPLYVSKTSKQNLQRAVYNDTSFLTSINVMDYSLLVGVDDENHELVCGIIDYLRQYTWDKQLETWVKSSLVVPKNVQPTVISPIDYKTRFRKFMKTHFLCVPDQWCDQGDS

SEQ ID NO: 29557 - protein, 1216 aa, Arabidopsis thaliana
  misc_feature (1)..(1216): Ceres Seq. ID no. 4916085
MATKYEHPRIMLVEGVLGHPISGFSSLQSVNQDNEYLLKYVKPVVDIIEASKPDVMLVEKSVSRDIQKTILDKGVTLVFDMKLHRLQRISRCIGSPILSVDSLSSQKLKHCDSFRIEKIVEEHNAAGESDKKPTKTLMFLEGCPTRLGCTILLKGCHSERLKKVKEVVQYSFILAYHLMLEASFLADRHTMFSTIFAKEATSCVVEIENFSPSPSPRESPSEAVDIPVSNGFDEQTIQINGEADGEKVGTWESDGDHVFSHEPYNPVIFTGFSSLSARLSKYLGFVQNPESVPVSVDTDVSTTSNLDSIRESEEDTAEKNEDKQPLLLDPELPVNSSSDDGDNKSQTENDIESTLESQSILVLVSKRNALRGIMCDQRHFSHIKFYKHFDVPLEKFLRDMFNQRNLCQTCVEFPEAHLYYYAHQNKQLTIQIKRIPVAKGLAGEAKGKIWMWSRCGKCKTKNASRKSTKRVLISTAARSLSFGKFLELSFSQQTFLNRSSSCGHSFDSDFLHFFGLGSMVAMLSYSQVASYTVSLPPMKLESSILIKAGWLEKEFQTVFTKGISLFEDAAGFLKRLRSQFTNSDLRYQRARKLLSNIEELLKHERCIFEENIKNSFDKAKTIDDVSHRLLRLNRMRWELLLQALIWNYRLQSLVLSDRLLPSSDETKIYEQGLKTVSEAGMTRYENDNKVSDSGSNGGIDTPLVEHKDIPIAGASVGDNDQMAESYVPEDNESQTLCSSSPDTTSPINNHFDTHLAVNVHSTNGQEADKSIPVTGESLDDEVSTSNGPHILGWDEWFWLPFEELRSKRIVDIEKEYLLKFEYVNNFTQENLQTVNQIITEESSRLRISLRDDDFIVSDYEDELSSLIACALAHLNNEESKKPLSRCIHGSLQGFLDNNQDSKQTDRDVSRFSSESTNRLETLPPPEVLVTFGSVKSVGKPKYSIVSLYADDFRDLRKRCCSSELDYIASLSRCKPWDAKGGKSKSVFAKTLDDRFIVKEIKKTEYESFVTFATEYFKYMKDSYDLGNQTCLAKVLGIHQVTVRQPKGGGKEIRHDLMVMENLSFSRKVTRQYDLKGALHARFTATSANGEDDVLLDQNFVNDMNKSPLYVSKTSKQNLQRAVYNDTSFLTSINVMDYSLLVGVDDENHELVCGIIDYLRQYTWDKQLETWVKSSLVVPKNVQPTVISPIDYKTRFRKFMKTHFLCVPDQWCDQGDS

SEQ ID NO: 29558 - DNA, 1503 bp, Arabidopsis thaliana
  misc_feature (1)..(1503): Ceres Seq. ID no. 4916105
atgtatattaaaactggctacttgccttacgcccggatggtttttgatatgatggatgcgaagaacattgttgcttggaattcactcgtctcgggactttcgtacgcttgtcttctaaaggatgctgaagctttgatgattagaatggagaaggaagggatcaaacctgatgctattacatggaacagtcttgcttctgggtatgcgactttggggaaacctgagaaggcattagatgtgatagggaagatgaaggagaaaggtgtggcccctaacgtggtttcatggacagccattttttcaggatgttccaaaaatggaaacttcaggaatgctctcaaagttttcattaaaatgcaggaagaaggtgttggtccgaacgcagcaactatgtccaccttgcttaagatattaggttgcttaagtctactacacagtggcaaagaggttcacggtttctgtttgaggaaaaatttgatctgcgatgcatatgttgcaactgcactagtagatatgtatggaaaatcaggggatctgcaaagtgcgattgagattttctggggcattaagaacaaatcgctagcttcttggaactgtatgctcatgggttatgccatgtttgggcgaggcgaagaagggatcgcggctttcagtgtgatgcttgaagcgggcatggaaccagatgctataacgtttacctctgtcttgtctgtctgtaagaactcaggtcttgtccaagaagggtggaaatactttgatcttatgaggtctcgttatggtataatcccgaccatcgaacactgctcttgcatggtagatctgctcgggagatcgggttatcttgatgaagcctgggacttcattcaaacaatgtcattaaaacccgatgcaactatttggggtgcttttctttcatcttgtaagattcatagagacctagaactcgcggaaatcgcttggaagaggcttcaagtactagaaccacacaattcagctaactacatgatgatgataaacttgtacagtaatttgaacagatgggaagatgttgaacgtatacggaacttaatgaggaataacagggtgagagtccaggatctgtggagctggattcagatagatcaaacggttcacatcttctatgcggagggaaaaacacatcctgatgaaggagatatatactttgagctgtacaaattagtctctgagatgaagaaatcaggttatgtgccagacacaagctgtatacaccaagacataagtgattcagagaaagagaagctgcttatgggacatacagagaagttagcaatgacgtatggccttatcaagaagaaaggcttagctcctataagagtggtcaaaaacacgaatatatgttctgatagccacaccgtagccaaatacatgtcggttttgagaaaccgtgagattgttttacaagaaggggcaagggttcatcatttcagagacggaaaatgttcctgcaacgactcttggtga

SEQ ID NO: 29559 - protein, 500 aa, Arabidopsis thaliana
  misc_feature (1)..(500): Ceres Seq. ID no. 4916106
MYIKTGYLPYARMVFDMMDAKNIVAWNSLVSGLSYACLLKDAEALMIRMEKEGIKPDAITWNSLASGYATLGKPEKALDVIGKMKEKGVAPNVVSWTAIFSGCSKNGNFRNALKVFIKMQEEGVGPNAATMSTLLKILGCLSLLHSGKEVHGFCLRKNLICDAYVATALVDMYGKSGDLQSAIEIFWGIKNKSLASWNCMLMGYAMFGRGEEGIAAFSVMLEAGMEPDAITFTSVLSVCKNSGLVQEGWKYFDLMRSRYGIIPTIEHCSCMVDLLGRSGYLDEAWDFIQTMSLKPDATIWGAFLSSCKIHRDLELAEIAWKRLQVLEPHNSANYMMMINLYSNLNRWEDVERIRNLMRNNRVRVQDLWSWIQIDQTVHIFYAEGKTHPDEGDIYFELYKLVSEMKKSGYVPDTSCIHQDISDSEKEKLLMGHTEKLAMTYGLIKKKGLAPIRVVKNTNICSDSHTVAKYMSVLRNREIVLQEGARVHHFRDGKCSCNDSW

SEQ ID NO: 29560 - protein, 488 aa, Arabidopsis thaliana
  misc_feature (1)..(488): Ceres Seq. ID no. 4916107
MVFDMMDAKNIVAWNSLVSGLSYACLLKDAEALMIRMEKEGIKPDAITWNSLASGYATLGKPEKALDVIGKMKEKGVAPNVVSWTAIFSGCSKNGNFRNALKVFIKMQEEGVGPNAATMSTLLKILGCLSLLHSGKEVHGFCLRKNLICDAYVATALVDMYGKSGDLQSAIEIFWGIKNKSLASWNCMLMGYAMFGRGEEGIAAFSVMLEAGMEPDAITFTSVLSVCKNSGLVQEGWKYFDLMRSRYGIIPTIEHCSCMVDLLGRSGYLDEAWDFIQTMSLKPDATIWGAFLSSCKIHRDLELAEIAWKRLQVLEPHNSANYMMMINLYSNLNRWEDVERIRNLMRNNRVRVQDLWSWIQIDQTVHIFYAEGKTHPDEGDIYFELYKLVSEMKKSGYVPDTSCIHQDISDSEKEKLLMGHTEKLAMTYGLIKKKGLAPIRVVKNTNICSDSHTVAKYMSVLRNREIVLQEGARVHHFRDGKCSCNDSW

SEQ ID NO: 29561 - protein, 484 aa, Arabidopsis thaliana
  misc_feature (1)..(484): Ceres Seq. ID no. 4916108
MMDAKNIVAWNSLVSGLSYACLLKDAEALMIRMEKEGIKPDAITWNSLASGYATLGKPEKALDVIGKMKEKGVAPNVVSWTAIFSGCSKNGNFRNALKVFIKMQEEGVGPNAATMSTLLKILGCLSLLHSGKEVHGFCLRKNLICDAYVATALVDMYGKSGDLQSAIEIFWGIKNKSLASWNCMLMGYAMFGRGEEGIAAFSVMLEAGMEPDAITFTSVLSVCKNSGLVQEGWKYFDLMRSRYGIIPTIEHCSCMVDLLGRSGYLDEAWDFIQTMSLKPDATIWGAFLSSCKIHRDLELAEIAWKRLQVLEPHNSANYMMMINLYSNLNRWEDVERIRNLMRNNRVRVQDLWSWIQIDQTVHIFYAEGKTHPDEGDIYFELYKLVSEMKKSGYVPDTSCIHQDISDSEKEKLLMGHTEKLAMTYGLIKKKGLAPIRVVKNTNICSDSHTVAKYMSVLRNREIVLQEGARVHHFRDGKCSCNDSW

SEQ ID NO: 29562 - DNA, 2028 bp, Arabidopsis thaliana
  misc_feature (1)..(2028): Ceres Seq. ID no. 4916239
atggaagtagattgtcggcgttattacgtacgtcttcttcaatcatgcagcagcagaaatcgcgaaactttatggagacaaaccaatggattgctcttgaagaagggttttcttagttcaattgtcattgttgctaaccatctcctccaaatgtactcccggtctggtaaaatgggaattgcgcggaacttgttcgacgaaatgcctgatagaaactatttctcgtggaacactatgattgaagggtacatgaattctggggaaaagggaacgtctttgaggttttttgatatgatgccagaaagagatgggtactcttggaacgtggttgtttccgggtttgctaaagctggtgagctaagtgtcgctaggaggttattcaatgccatgccggaaaaagatgttgtgacgttgaactctctgcttcatggatatattttaaacggttatgcagaggaagctctgaggttgtttaaagaattgaattttagcgctgatgcgatcacattgacgacagttcttaaagcttgtgctgagttagaagctttgaaatgtgggaagcagatacatgctcagattctgatcggtggtgttgaatgtgactcgaaaatgaatagttctttagttaatgtgtatgcaaagtgtggtgatttgagaatggcaagctatatgctggagcagattagggaacctgatgaccattctctatctgccttaatttcaggttatgcaaattgtgggagagtgaatgagtctagaggacttttcgataggaaaagtaacagatgtgtaattctatggaactctatgatttcaggctatattgctaacaatatgaaaatggaggcattggttcttttcaatgagatgaggaatgaaacccgggaagattctcgtacgctggcagcggttataaatgcttgcatcggtttgggcttcctagagactggtaaacaaatgcattgtcatgcttgtaaatttgggttaattgatgacattgttgtagctagcactttgcttgacatgtactccaagtgtggaagcccaatggaagcttgcaaacttttcagtgaggtcgaatcctatgacactatcttacttaacagtatgatcaaggtatatttcagctgcggaagaatcgatgatgcaaaacgggtatttgagagaattgaaaataagagcttgatttcttggaactcaatgactaacggattcagtcaaaatggttgtactgttgaaactttagagtatttccatcagatgcataagctggatttgcctacagatgaggttagcctctctagtgtcattagtgcgtgtgcaagtatatcttctctcgaactcggtgagcaagtttttgcgagggcaactattgttggtcttgactctgatcaagtagtatcatcttctctcattgatctctactgcaagtgtggattcgttgagcatggcaggagagtattcgatacaatggttaaatcagatgaagtaccatggaactcaatgatatcaggttatgctacgaatggtcaaggatttgaagcgattgacttgttcaagaaaatgagtgttgctggtataagacctactcagatcacttttatggttgttctaacagcatgcaattactgtggtttagtcgaagagggacgaaaattgtttgagtcaatgaaggttgatcatggttttgttccagataaagagcatttttcatgtatggttgatcttttggctcgtgctggttatgtggaagaagctataaatcttgtagaagagatgcctttcgatgtggatggaagcatgtggtcatctattctaagaggatgtgtagcaaatggatataaagccatgggaaagaaagctgctgagaagattatagagcttgaacctgagaactcagttgcttatgtgcagttgtccgctatattcgcaacctcgggagattgggaaagctcggcgcttgtaagaaaactgatgagggagaacaatgtgacaaagaatccaggttctagttggactgattgttga

SEQ ID NO: 29563 - protein, 675 aa, Arabidopsis thaliana; identical to SEQ ID NO: 27730
  misc_feature (1)..(675): Ceres Seq. ID no. 4916240

SEQ ID NO: 29564 - protein, 625 aa, Arabidopsis thaliana; identical to SEQ ID NO: 27731
  misc_feature (1)..(625): Ceres Seq. ID no. 4916241

SEQ ID NO: 29565 - protein, 618 aa, Arabidopsis thaliana
  misc_feature (1)..(618): Ceres Seq. ID no. 4916242
MGIARNLFDEMPDRNYFSWNTMIEGYMNSGEKGTSLRFFDMMPERDGYSWNVVVSGFAKAGELSVARRLFNAMPEKDVVTLNSLLHGYILNGYAEEALRLFKELNFSADAITLTTVLKACAELEALKCGKQIHAQILIGGVECDSKMNSSLVNVYAKCGDLRMASYMLEQIREPDDHSLSALISGYANCGRVNESRGLFDRKSNRCVILWNSMISGYIANNMKMEALVLFNEMRNETREDSRTLAAVINACIGLGFLETGKQMHCHACKFGLIDDIVVASTLLDMYSKCGSPMEACKLFSEVESYDTILLNSMIKVYFSCGRIDDAKRVFERIENKSLISWNSMTNGFSQNGCTVETLEYFHQMHKLDLPTDEVSLSSVISACASISSLELGEQVFARATIVGLDSDQVVSSSLIDLYCKCGFVEHGRRVFDTMVKSDEVPWNSMISGYATNGQGFEAIDLFKKMSVAGIRPTQITFMVVLTACNYCGLVEEGRKLFESMKVDHGFVPDKEHFSCMVDLLARAGYVEEAINLVEEMPFDVDGSMWSSILRGCVANGYKAMGKKAAEKIIELEPENSVAYVQLSAIFATSGDWESSALVRKLMRENNVTKNPGSSWTDC

SEQ ID NO: 29566 - DNA, 1632 bp, Arabidopsis thaliana
  misc_feature (1)..(1632): Ceres Seq. ID no. 4916724
atggatactttagcttcaaactcttcggatctcacgaccaagtcaagtctcggaatgtcgtcgtttaccaacatgtatctcctcacaacgcttcaagcccttgcggccctttgcttcttgatgattctcaacaaaataaagtcatcttcacgaaacaagaagttgcatcctctcccgccaggacccaccggttttccaattgttggaatgattccggcgatgcttaaaaaccgtccagttttccggtggctccacagcctcatgaaggagcttaacacggagatagcttgtgtgcgtctaggaaacactcacgtgatccctgtgacatgtcctaagattgcacgtgagatcttcaagcaacaagacgcactctttgcgtcaagaccactcacttatgctcaaaagattctctctaacggctacaaaacctgcgtgatcacaccgtttggcgaacaattcaagaagatgaggaaagtgatcatgacagagattgtttgtccagcgagacaccgttggctacacgacaatagagctgaggaaaccgatcacttgaccgcttggctctacaacatggttaagaactctgaaccagtcgatctccgttttgttacgaggcattattgtggaaatgcaatcaagaggcttatgttcgggacgaggacgttctcggagaaaaccgaagccgatggtggaccgactttggaagatatcgagcatatggatgctatgttcgaggggttagggtttacgtttgcgttttgtatatcggattatctaccgatgcttacgggattggatctaaacggacatgaaaagattatgagagaatccagtgcaattatggataaatatcacgatcctataattgatgagaggattaagatgtggagagaaggtaagagaactcagatcgaagattttctagacattttcatctctatcaaggacgaagctggccagcctttgcttaccgctgatgaaatcaaaccaaccattaaggaacttgtaatggcggcgccagacaacccatcaaacgccgtggaatgggccattgcggagatgataaacaaaccggagatcctccacaaagctatggaagagatcgatagagtcgtcggaaaagaaagattcgtccaagaatccgatataccaaaacttaactatgttaaagctattatccgagaagctttccgtcttcatcccgtcgccgccttcaacctcccacacgtggcactctctgatacgaccgtcgcaggttaccatattcctaaaggaagtcaagttttacttagccgttacggtcttggtcgtaaccccaaggtttggtctgatccacttagcttcaaaccagaaaggcatctcaatgagtgttcggaagtgactttgacggagaatgatctccgttttatctcgtttagtaccggaaagagaggatgtgctgctccggcgttaggtacggcgataacgaccatgatgctagcgaggcttttgcaagggtttaagtggaaactagcaggaagtgagacacgtgtcgagcttatggaatcgagtcatgatatgtttctttcgaagcctttggtgttggtcggagaattgagattgtcggaggacctttacccaatggtgaagtga

SEQ ID NO: 29567 - protein, 543 aa, Arabidopsis thaliana; identical to SEQ ID NO: 28133
  misc_feature (1)..(543): Ceres Seq. ID no. 4916725

SEQ ID NO: 29568 - protein, 525 aa, Arabidopsis thaliana; identical to SEQ ID NO: 28134
  misc_feature (1)..(525): Ceres Seq. ID no. 4916726

SEQ ID NO: 29569 - protein, 519 aa, Arabidopsis thaliana
  misc_feature (1)..(519): Ceres Seq. ID no. 4916727
MYLLTTLQALAALCFLMILNKIKSSSRNKKLHPLPPGPTGFPIVGMIPAMLKNRPVFRWLHSLMKELNTEIACVRLGNTHVIPVTCPKIAREIFKQQDALFASRPLTYAQKILSNGYKTCVITPFGEQFKKMRKVIMTEIVCPARHRWLHDNRAEETDHLTAWLYNMVKNSEPVDLRFVTRHYCGNAIKRLMFGTRTFSEKTEADGGPTLEDIEHMDAMFEGLGFTFAFCISDYLPMLTGLDLNGHEKIMRESSAIMDKYHDPIIDERIKMWREGKRTQIEDFLDIFISIKDEAGQPLLTADEIKPTIKELVMAAPDNPSNAVEWAIAEMINKPEILHKAMEEIDRVVGKERFVQESDIPKLNYVKAIIREAFRLHPVAAFNLPHVALSDTTVAGYHIPKGSQVLLSRYGLGRNPKVWSDPLSFKPERHLNECSEVTLTENDLRFISFSTGKRGCAAPALGTAITTMMLARLLQGFKWKLAGSETRVELMESSHDMFLSKPLVLVGELRLSEDLYPMVK

SEQ ID NO: 29570 - DNA, 1095 bp, Arabidopsis thaliana
  misc_feature (1)..(1095): Ceres Seq. ID no. 4916967
atgaaggaagaacaatgggcaccagtgatagtaatgttaatatcaagtgttgcaatgggatcagtgaacgctctcgttaagaaagcacttgatgttggtgttaaccatatgatctttggtgcttatagaatggctatttctgctctaatcttggttccgttttcttatatttgggagaggaaaacaaggccacaactaacgttcatgcttttgtgcgaacatttcatcagcggattacttggggcaagtttgatgcaatttttctttttacttgggctttcgtacacgtcagcaactgtttcgatggctctagttagcatgttacctgctatcacctttgcgttagcccttattttccggatagagaatgcgcaaaacctaaagagcaaagcaggcgtgctcaaagtaatgggaaccctaatttgcataatgggagcaatgttgttgacattttacaaaggcccagagttatcaaaccctcattctcatccacaagctcgtcacaacaacaacaataacaatggtcacgaccaaacaaagaaatggcttctaggctgtctttatttagtcattgggacagtgttgttgtctctatggatgttgtttcaagggaaattaagctttaagtatcctggaaataaatactcaagcacttgtctcatgtcagtcttcgcatcatttcaatgtgctattttgagtctttataaaagtagagacgtcaaagattggatcattgaagataaattcgtcattttggtcaccctttacgctggaatagtgggacaagcgatgtcgacagtggtaacgtcatggtccataaaaatgacaggagcagttttcgtctcaacattcagccccgtcagcctcgtcgccgctacgttattcgatttcctcatcttacactctcctttataccttggcagcatacttggatcagtagtgactataactggcctctacgtttttctttggggaaggaagaatgagacagatcagtctgtttcgaagactttgaacagttcccagttttctcagaataaggataacgaagaccatacaatagcaaatcataaggatactaatttgcccgtttga

SEQ ID NO: 29571 - protein, 364 aa, Arabidopsis thaliana
  misc_feature (1)..(364): Ceres Seq. ID no. 4916968
MKEEQWAPVIVMLISSVAMGSVNALVKKALDVGVNHMIFGAYRMAISALILVPFSYIWERKTRPQLTFMLLCEHFISGLLGASLMQFFFLLGLSYTSATVSMALVSMLPAITFALALIFRIENAQNLKSKAGVLKVMGTLICIMGAMLLTFYKGPELSNPHSHPQARHNNNNNNGHDQTKKWLLGCLYLVIGTVLLSLWMLFQGKLSFKYPGNKYSSTCLMSVFASFQCAILSLYKSRDVKDWIIEDKFVILVTLYAGIVGQAMSTVVTSWSIKMTGAVFVSTFSPVSLVAATLFDFLILHSPLYLGSILGSVVTITGLYVFLWGRKNETDQSVSKTLNSSQFSQNKDNEDHTIANHKDTNLPV

SEQ ID NO: 29572 - protein, 353 aa, Arabidopsis thaliana
  misc_feature (1)..(353): Ceres Seq. ID no. 4916969
MLISSVAMGSVNALVKKALDVGVNHMIFGAYRMAISALILVPFSYIWERKTRPQLTFMLLCEHFISGLLGASLMQFFFLLGLSYTSATVSMALVSMLPAITFALALIFRIENAQNLKSKAGVLKVMGTLICIMGAMLLTFYKGPELSNPHSHPQARHNNNNNNGHDQTKKWLLGCLYLVIGTVLLSLWMLFQGKLSFKYPGNKYSSTCLMSVFASFQCAILSLYKSRDVKDWIIEDKFVILVTLYAGIVGQAMSTVVTSWSIKMTGAVFVSTFSPVSLVAATLFDFLILHSPLYLGSILGSVVTITGLYVFLWGRKNETDQSVSKTLNSSQFSQNKDNEDHTIANHKDTNLPV

SEQ ID NO: 29573 - protein, 346 aa, Arabidopsis thaliana
  misc_feature (1)..(346): Ceres Seq. ID no. 4916970
MGSVNALVKKALDVGVNHMIFGAYRMAISALILVPFSYIWERKTRPQLTFMLLCEHFISGLLGASLMQFFFLLGLSYTSATVSMALVSMLPAITFALALIFRIENAQNLKSKAGVLKVMGTLICIMGAMLLTFYKGPELSNPHSHPQARHNNNNNNGHDQTKKWLLGCLYLVIGTVLLSLWMLFQGKLSFKYPGNKYSSTCLMSVFASFQCAILSLYKSRDVKDWIIEDKFVILVTLYAGIVGQAMSTVVTSWSIKMTGAVFVSTFSPVSLVAATLFDFLILHSPLYLGSILGSVVTITGLYVFLWGRKNETDQSVSKTLNSSQFSQNKDNEDHTIANHKDTNLPV

SEQ ID NO: 29574 - DNA, 687 bp, Arabidopsis thaliana
  misc_feature (1)..(687): Ceres Seq. ID no. 4916971
atggcgagagagaagaagacgtgtgtagagtgtgggcacaaggttaaatctttgttcatacaatactctcctggaaattttcgtctcatgaaatgcgagaattgcgaagaagtagcagacgaatatgtcgagtgtgagctattgattattttcatcgacttgattcttcacaaaacaaaggcttatagacacttactctacaatgttgttaatcaagaatctgcaaatgttcagcatctattatggaaattggtcttggcttatcttcttctagatacttatagaagcttgctactgagaagaaccaatgacggatcaaatgtgtctatgagctttctttttgaatctctagaggttctggtcaatgtactatctgcgaatttcgcatttgttttctcatttgcatttgctgctaagttgatgctggttatgccaagagggaaagagattcttttaacgatcttaatctcgagttacgtcaagatctttctatttgctatgccggtctgggaattcccagtttctgtgatcttcatcgtagatatgctcgttttaacctcaaacgcagttgctcttaaagtgatgactgaatcagcaacgagcagatgcttagcagtgtgtttcattgcacactcaattagattcttggtggatcagatctctggacacttaggatctgtcatgtaa

SEQ ID NO: 29575 - protein, 228 aa, Arabidopsis thaliana; identical to SEQ ID NO: 28555
  misc_feature (1)..(228): Ceres Seq. ID no. 4916972

SEQ ID NO: 29576 - protein, 199 aa, Arabidopsis thaliana; identical to SEQ ID NO: 28556
  misc_feature (1)..(199): Ceres Seq. ID no. 4916973

SEQ ID NO: 29577 - protein, 119 aa, Arabidopsis thaliana
  misc_feature (1)..(119): Ceres Seq. ID no. 4916974
MSFLFESLEVLVNVLSANFAFVFSFAFAAKLMLVMPRGKEILLTILISSYVKIFLFAMPVWEFPVSVIFIVDMLVLTSNAVALKVMTESATSRCLAVCFIAHSIRFLVDQISGHLGSVM

SEQ ID NO: 29578 - DNA, 627 bp, Arabidopsis thaliana
  misc_feature (1)..(627): Ceres Seq. ID no. 4917031
atgaccagctcagtcgtagtagccggcgccggtgacaagaacaatggtatcgtggtccagcagcaaccaccatgtgtggctcgtgagcaagaccaatacatgccaatcgcaaacgtcataagaatcatgcgtaaaaccttaccgtctcacgccaaaatctctgacgacgccaaagaaacgattcaagaatgtgtctccgagtacatcagcttcgtgaccggtgaagccaacgagcgttgccaacgtgagcaacgtaagaccataactgctgaagatatcctttgggctatgagcaagcttgggttcgataactacgtggaccccctcaccgtgttcattaaccggtaccgtgagatagagaccgatcgtggttctgcacttagaggtgagccaccgtcgttgagacaaacctatggaggaaatggtattgggtttcacggcccatctcatggcctacctcctccgggtccttatggttatggtatgttggaccaatccatggttatgggaggtggtcggtactaccaaaacgggtcgtcgggtcaagatgaatccagtgttggtggtggctcttcgtcttccattaacggaatgccggcttttgaccattatggtcagtataagtga

SEQ ID NO: 29579 - protein, 208 aa, Arabidopsis thaliana
  misc_feature (1)..(208): Ceres Seq. ID no. 4917032
MTSSVVVAGAGDKNNGIVVQQQPPCVAREQDQYMPIANVIRIMRKTLPSHAKISDDAKETIQECVSEYISFVTGEANERCQREQRKTITAEDILWAMSKLGFDNYVDPLTVFINRYREIETDRGSALRGEPPSLRQTYGGNGIGFHGPSHGLPPPGPYGYGMLDQSMVMGGGRYYQNGSSGQDESSVGGGSSSSINGMPAFDHYGQYK

SEQ ID NO: 29580 - protein, 175 aa, Arabidopsis thaliana
  misc_feature (1)..(175): Ceres Seq. ID no. 4917033
MPIANVIRIMRKTLPSHAKISDDAKETIQECVSEYISFVTGEANERCQREQRKTITAEDILWAMSKLGFDNYVDPLTVFINRYREIETDRGSALRGEPPSLRQTYGGNGIGFHGPSHGLPPPGPYGYGMLDQSMVMGGGRYYQNGSSGQDESSVGGGSSSSINGMPAFDHYGQYK

SEQ ID NO: 29581 - protein, 166 aa, Arabidopsis thaliana
  misc_feature (1)..(166): Ceres Seq. ID no. 4917034
MRKTLPSHAKISDDAKETIQECVSEYISFVTGEANERCQREQRKTITAEDILWAMSKLGFDNYVDPLTVFINRYREIETDRGSALRGEPPSLRQTYGGNGIGFHGPSHGLPPPGPYGYGMLDQSMVMGGGRYYQNGSSGQDESSVGGGSSSSINGMPAFDHYGQYK

SEQ ID NO: 29582 - DNA, 681 bp, Arabidopsis thaliana
  misc_feature (1)..(681): Ceres Seq. ID no. 4917212
atgaattcatttcctgcacaaaaccttatgctatctgctacaaacgcaaacaaggactcaggcttgcgtacgtctaatgctcattggttacattcatgtatcgccgttccaaagaccacaggcattgatctttctcaggaacctcctgctgaaggtgtgatggtgcctcaatctcatttgtttcctcctcctattagagattccagaaacgatactgaaactgtgaaacagaagtccgtaaatcagtctccttcgaaagctttgaagccaaaaccgcaaaggaagaaacgctctgtatccaacaagtcaaagaaaacacctagcataccagaaacaaaacgtgagaaaaagaatctggacatcaacattgacatctcaagctttgatacttctggggttcctcctcctgtatgttcatgtacaggcgtttcaagggtttgctacaaatggggcatgggcggttggcaatcctcatgttgtaccatcagcatatcgacatacccactacccatgagcacaacaagacctggagctcgtcttgcaggaagaaaaatgagcaatggtgcttatgttaagctccttgcgaggcttgcggacgaaggctatgacctctctcaccctcttgatctcaagaaccattgggccagacacggtactaacaagtttgtgaccatcaagtag

SEQ ID NO: 29583 - protein, 226 aa, Arabidopsis thaliana
  misc_feature (1)..(226): Ceres Seq. ID no. 4917213
MNSFPAQNLMLSATNANKDSGLRTSNAHWLHSCIAVPKTTGIDLSQEPPAEGVMVPQSHLFPPPIRDSRNDTETVKQKSVNQSPSKALKPKPQRKKRSVSNKSKKTPSIPETKREKKNLDINIDISSFDTSGVPPPVCSCTGVSRVCYKWGMGGWQSSCCTISISTYPLPMSTTRPGARLAGRKMSNGAYVKLLARLADEGYDLSHPLDLKNHWARHGTNKFVTIK

SEQ ID NO: 29584 - protein, 217 aa, Arabidopsis thaliana
  misc_feature (1)..(217): Ceres Seq. ID no. 4917214
MLSATNANKDSGLRTSNAHWLHSCIAVPKTTGIDLSQEPPAEGVMVPQSHLFPPPIRDSRNDTETVKQKSVNQSPSKALKPKPQRKKRSVSNKSKKTPSIPETKREKKNLDINIDISSFDTSGVPPPVCSCTGVSRVCYKWGMGGWQSSCCTISISTYPLPMSTTRPGARLAGRKMSNGAYVKLLARLADEGYDLSHPLDLKNHWARHGTNKFVTIK

SEQ ID NO: 29585 - protein, 173 aa, Arabidopsis thaliana
  misc_feature (1)..(173): Ceres Seq. ID no. 4917215
MVPQSHLFPPPIRDSRNDTETVKQKSVNQSPSKALKPKPQRKKRSVSNKSKKTPSIPETKREKKNLDINIDISSFDTSGVPPPVCSCTGVSRVCYKWGMGGWQSSCCTISISTYPLPMSTTRPGARLAGRKMSNGAYVKLLARLADEGYDLSHPLDLKNHWARHGTNKFVTIK

SEQ ID NO: 29586 - DNA, 489 bp, Arabidopsis thaliana
  misc_feature (1)..(489): Ceres Seq. ID no. 4917233
atgaatcggttaccgtcgtctgaagacggagacgatgaagaattcagtcacgatgatggctctgctcctccgcgaaagaaactccgtctaaccagagaacagtcacgtcttcttgaagatagtttcagacagaatcatacccttaatcccaaacaaaaggaagtacttgccaagcatttgatgctacggccaagacaaattgaagtttggtttcaaaaccgtagagcaaggagcaaattgaagcaaaccgagatggaatgcgagtatctcaaaaggtggtttggttcattaacggaagaaaaccacaggctccatagagaagtagaagagcttagagccatgaaggttggcccaacaacggtgaactctgcctcgagccttactatgtgtcctcgctgcgagcgagttacccctgccgcgagcccttcgagggcggtggtgccggttccggctaagaaaacgtttccgccgcaagagcgtgatcgttga

SEQ ID NO: 29587 - protein, 162 aa, Arabidopsis thaliana
  misc_feature (1)..(162): Ceres Seq. ID no. 4917234
MNRLPSSEDGDDEEFSHDDGSAPPRKKLRLTREQSRLLEDSFRQNHTLNPKQKEVLAKHLMLRPRQIEVWFQNRRARSKLKQTEMECEYLKRWFGSLTEENHRLHREVEELRAMKVGPTTVNSASSLTMCPRCERVTPAASPSRAVVPVPAKKTFPPQERDR

SEQ ID NO: 29588 - protein, 102 aa, Arabidopsis thaliana
  misc_feature (1)..(102): Ceres Seq. ID no. 4917235
MLRPRQIEVWFQNRRARSKLKQTEMECEYLKRWFGSLTEENHRLHREVEELRAMKVGPTTVNSASSLTMCPRCERVTPAASPSRAVVPVPAKKTFPPQERDR

SEQ ID NO: 29589 - DNA, 1431 bp, Arabidopsis thaliana
  misc_feature (1)..(1431): Ceres Seq. ID no. 4917266
atggttttcttcaagatcctctttatctctttaatggcaggattagccatgaaaggatctaagatcaacgtagaagatctccaaaagttctccctccaccatacacagaacaacctccaaaccataagccttctattgtttcttgtcgtttttgtgtggatcctctacatgttaacccgacctaaacccgtttaccttgttgatttctcctgctaccttccaccgtcgcatctcaaggtcagtatccaaaccctaatgggacacgcaagacgtgcaagagaagcaggcatgtgttggaagaacaaagagagcgaccatttagttgacttccaggagaagattcttgaacgttccggtcttggtcaagaaacctacatccccgagggtcttcagtgcttcccacttcagcaaggcatgggtgcttcacgtaaagagacggaagaagtaatcttcggagctcttgacaatctttttcgcaacaccggtgtaaaacctgatgatatcggtatattggtggtgaattctagcacgtttaatccaactccatcactcgcctccatgattgtgaacaagtacaaactcagagacaacatcaagagtttgaatcttggagggatgggttgcagtgccggagttatagctgttgatgtcgctaagggattactacaagttcataggaacacttatgctattgtagtaagcacagagaacatcactcagaacttatacttggggaaaaacaaatcaatgctagtcacaaactgtttgttccgcgttggtggtgctgcggttctgctttcaaacagatctagagaccgtaaccgcgccaaatacgagcttgttcacaccgtacggatccataccggatcagatgataggtcgttcgaatgtgcgacacaagaagaggatgaagatggtataattggagttaccttgacaaagaatctacctatggtggctgcaaggactcttaagataaatatcgcaactttgggtcctcttgtacttccattaaaagagaagctagccttctttattacttttgtcaagaagaagtatttcaagccagagttaaggaattatacaccagatttcaagcttgcctttgagcatttctgtatccacgctggtggaagagctctaatagatgagctggagaagaaccttaagctttctccgttacacgtagaggcgtcaagaatgacactacacaggtttggtaacacttcttctagctcaatctggtacgagttagcttatacagaagctaaaggaaggatgaaggaaggagataggatttggcagattgctttggggtcaggttttaagtgtaacagttcagtatgggtggctctgcgagacgttaagccttcagctaacagtccatgggaagactgtatggatagatatccggttgagattgatatttaa

SEQ ID NO: 29590 - protein, 476 aa, Arabidopsis thaliana; identical to SEQ ID NO: 28629
  misc_feature (1)..(476): Ceres Seq. ID no. 4917267

SEQ ID NO: 29591 - protein, 465 aa, Arabidopsis thaliana; identical to SEQ ID NO: 28630
  misc_feature (1)..(465): Ceres Seq. ID no. 4917268

SEQ ID NO: 29592 - protein, 460 aa, Arabidopsis thaliana
  misc_feature (1)..(460): Ceres Seq. ID no. 4917269
MKGSKINVEDLQKFSLHHTQNNLQTISLLLFLVVFVWILYMLTRPKPVYLVDFSCYLPPSHLKVSIQTLMGHARRAREAGMCWKNKESDHLVDFQEKILERSGLGQETYIPEGLQCFPLQQGMGASRKETEEVIFGALDNLFRNTGVKPDDIGILVVNSSTFNPTPSLASMIVNKYKLRDNIKSLNLGGMGCSAGVIAVDVAKGLLQVHRNTYAIVVSTENITQNLYLGKNKSMLVTNCLFRVGGAAVLLSNRSRDRNRAKYELVHTVRIHTGSDDRSFECATQEEDEDGIIGVTLTKNLPMVAARTLKINIATLGPLVLPLKEKLAFFITFVKKKYFKPELRNYTPDFKLAFEHFCIHAGGRALIDELEKNLKLSPLHVEASRMTLHRFGNTSSSSIWYELAYTEAKGRMKEGDRIWQIALGSGFKCNSSVWVALRDVKPSANSPWEDCMDRYPVEIDI

SEQ ID NO: 29593 - DNA, 1146 bp, Arabidopsis thaliana
  misc_feature (1)..(1146): Ceres Seq. ID no. 4917476
atggagcaaaaagttttcccatttcaagttttagtttccgctaccaaagattttcacccgacccataaactcggtgaaggtggtttcggtcccgtcttcaagggaagattacctgacgggagagacatagcagtgaagaagctatctcaggtttcaaggcaaggcaaaaacgagtttgtgaacgaggctaagttgttggctaaagttcagcatcgcaatgttgttaatctttggggttattgtacacatggagatgataagctcttggtttatgagtatgtcgttaatgagagcctcgacaaggtcctcttcaaatccaacagaaaatcggagatagattggaagcagaggtttgagatcataacaggcattgctcgaggactgctctatctacatgaagacgcgccaaactgcatcatccacagggatattaaggctggcaatattttgctggatgaaaaatgggttcctaagattgcagattttgggatggctagactctatcaggaagatgtaacacatgtcaacactcgtgttgcaggaaccaatggttatatggcgccagagtacgtaatgcacggggttctatcggtaaaggcagacgtattcagctttggggttttggttctggagctcgtaagtggacagaagaactcgagttttagcatgagacaccctgaccagactcttcttgaatgggcatttaagttgtacaagaaaggccggaccatggagatactagaccaagatatagcagcttcagctgatccagatcaagtcaaactctgtgtacagatcggactactctgcgttcaaggcgatccgcatcaaagaccgagcatgagacgggtatctctacttctctctagaaaaccaggacatctagaagaaccggatcatcctggtgtcccgggatctagataccgtcggcgaacacaacgtccttcaggagcagcatcacttggaacattgtcgaccactggttccagcacagattctttcggttcaaacctgaacacaaacacgggaactggtgttagaggtacccccgcatcttctaaagcttcaactcggagtaatgccactagaagtgctggtcagagctctagctcagaccctcacgggaaacgacatatgagttattga

SEQ ID NO: 29594 - protein, 381 aa, Arabidopsis thaliana
  misc_feature (1)..(381): Ceres Seq. ID no. 4917477
MEQKVFPFQVLVSATKDFHPTHKLGEGGFGPVFKGRLPDGRDIAVKKLSQVSRQGKNEFVNEAKLLAKVQHRNVVNLWGYCTHGDDKLLVYEYVVNESLDKVLFKSNRKSEIDWKQRFEIITGIARGLLYLHEDAPNCIIHRDIKAGNILLDEKWVPKIADFGMARLYQEDVTHVNTRVAGTNGYMAPEYVMHGVLSVKADVFSFGVLVLELVSGQKNSSFSMRHPDQTLLEWAFKLYKKGRTMEILDQDIAASADPDQVKLCVQIGLLCVQGDPHQRPSMRRVSLLLSRKPGHLEEPDHPGVPGSRYRRRTQRPSGAASLGTLSTTGSSTDSFGSNLNTNTGTGVRGTPASSKASTRSNATRSAGQSSSSDPHGKRHMSY

SEQ ID NO: 29595 - protein, 218 aa, Arabidopsis thaliana
  misc_feature (1)..(218): Ceres Seq. ID no. 4917478
MARLYQEDVTHVNTRVAGTNGYMAPEYVMHGVLSVKADVFSFGVLVLELVSGQKNSSFSMRHPDQTLLEWAFKLYKKGRTMEILDQDIAASADPDQVKLCVQIGLLCVQGDPHQRPSMRRVSLLLSRKPGHLEEPDHPGVPGSRYRRRTQRPSGAASLGTLSTTGSSTDSFGSNLNTNTGTGVRGTPASSKASTRSNATRSAGQSSSSDPHGKRHMSY

SEQ ID NO: 29596 - protein, 196 aa, Arabidopsis thaliana
  misc_feature (1)..(196): Ceres Seq. ID no. 4917479
MAPEYVMHGVLSVKADVFSFGVLVLELVSGQKNSSFSMRHPDQTLLEWAFKLYKKGRTMEILDQDIAASADPDQVKLCVQIGLLCVQGDPHQRPSMRRVSLLLSRKPGHLEEPDHPGVPGSRYRRRTQRPSGAASLGTLSTTGSSTDSFGSNLNTNTGTGVRGTPASSKASTRSNATRSAGQSSSSDPHGKRHMSY

SEQ ID NO: 29597 - DNA, 1017 bp, Arabidopsis thaliana
  misc_feature (1)..(1017): Ceres Seq. ID no. 4917580
atgtatcctggtcaaatccctgaccttgagcttctcttcctctgccatgatagacccgccatttggaaaagagacttgaagaaaaaacgaaaggatacgtggcctcctccgccgttgtttcactactgtggtcaccgtgatgcatacgacatagttttccctgattggagcttctggggatggcctgagctgaatataaaggagtggaataaattatctgtggcactaaaagaagggaacaaaaaggtgaaatgggaagatagagttccgtacgcttattggaaaggaaaccctcatgtttctcctataagaggagatcttatgagatgtaacttctccgacaagtatgatcctatggttcgtctctatgtccaggattggaggagtgagatagaggcagggttcagaggatcgaacctagaagatcaatgtactcatagatataagatctacatagaaggaaacgcatggtcggtgagcgaaaagtatatactttcgtgtgatagtatgactctgttggttaaaccagagtactacgactttttcttccgaagtatggtcccaatgaagcatttttggcctattagacaaaacaacaaatgtggtgacctcaaatttgcagtcgaatggggcaacaacaacaccgaaaaggcacaaatcatagggagacaaggaagtgagtacatgatgaagaacctaaagatgaagtatgtgtatgattacatgttgtatgtgttacaaggctatgggaaattgatgaagttggatgtgacagtgcctgaaaatgccacggaggtttgttcagagacgatggcttgttcgattactgatggtggacggatcaggcagtgcatggacgactcgttggttatgtctccgagtgtcaaggcggcttgtgatttgccaccttcttatggagactatgagctcaagaagtttcgtaagaaacaagaaagtgcggagagaaaggttgagcagtggaccaataagtattggaacttgagagatccaaaataa

SEQ ID NO: 29598 - protein, 338 aa, Arabidopsis thaliana; identical to SEQ ID NO: 28702
  misc_feature (1)..(338): Ceres Seq. ID no. 4917581

SEQ ID NO: 29599 - protein, 231 aa, Arabidopsis thaliana
  misc_feature (1)..(231): Ceres Seq. ID no. 4917582
MRCNFSDKYDPMVRLYVQDWRSEIEAGFRGSNLEDQCTHRYKIYIEGNAWSVSEKYILSCDSMTLLVKPEYYDFFFRSMVPMKHFWPIRQNNKCGDLKFAVEWGNNNTEKAQIIGRQGSEYMMKNLKMKYVYDYMLYVLQGYGKLMKLDVTVPENATEVCSETMACSITDGGRIRQCMDDSLVMSPSVKAACDLPPSYGDYELKKFRKKQESAERKVEQWTNKYWNLRDPK

SEQ ID NO: 29600 - protein, 220 aa, Arabidopsis thaliana
  misc_feature (1)..(220): Ceres Seq. ID no. 4917583
MVRLYVQDWRSEIEAGFRGSNLEDQCTHRYKIYIEGNAWSVSEKYILSCDSMTLLVKPEYYDFFFRSMVPMKHFWPIRQNNKCGDLKFAVEWGNNNTEKAQIIGRQGSEYMMKNLKMKYVYDYMLYVLQGYGKLMKLDVTVPENATEVCSETMACSITDGGRIRQCMDDSLVMSPSVKAACDLPPSYGDYELKKFRKKQESAERKVEQWTNKYWNLRDPK

SEQ ID NO: 29601 - DNA, 1074 bp, Arabidopsis thaliana
  misc_feature (1)..(1074): Ceres Seq. ID no. 4917600
atggagtatcaggggcttcaaaattgggacggtcttttagacccattggacgacaatctccggcgagagattctccggtacggtcaatttgtcgaatcggcttatcaagcatttgatttcgatccttcctctccaacctacgggacatgccggtttccgaggagcacgttgttagagcgatccggtttacccaactccggttatcgactaacgaagaaccttcgtgccacgtcaggtattaacttgccacgttggattgagaaagcgccaagctggatggctacacaatctagctggattggttacgtggcagtttgccaggacaaagaagagatctcgcggcttgggcgtagagacgtcgtcatctccttccgtggaaccgccacgtgtctcgagtggttagagaaccttcgcgccacgctgactcatctccctaatgggcctactggagcaaatctaaacgggtctaactctgggcccatggttgagagcgggtttttaagcttgtatacttcaggtgttcacagtttgagagacatggtaagagaagagatcgcaaggctactccaatcttacggcgacgagccgttaagtgtaacgataaccggtcacagcctcggcgctgcgatcgcgacactagcagcttacgatatcaaaacgacgtttaaacgtgcgcctatggttaccgtaatatctttcggaggtccacgtgtcggaaacagatgctttcggaaactccttgagaagcaaggcacgaaggttctaagaatcgtgaactccgacgacgtcatcaccaaagttcctggagttgttttagaaaacagagagcaagataacgttaagatgacagcgtcgataatgccgagctggatacagagacgcgtggaggagacgccgtgggtttacgctgaaatcggtaaggagcttcggctgagtagccgtgactcgccgcacttgagcagcatcaatgtggccacgtgtcatgagctgaaaacgtatttacatttggtagacgggtttgtgagctccacgtgtccattcagagaaacagctcggagagttctccatagatga

SEQ ID NO: 29602 - protein, 357 aa, Arabidopsis thaliana
  misc_feature (1)..(357): Ceres Seq. ID no. 4917601
MEYQGLQNWDGLLDPLDDNLRREILRYGQFVESAYQAFDFDPSSPTYGTCRFPRSTLLERSGLPNSGYRLTKNLRATSGINLPRWIEKAPSWMATQSSWIGYVAVCQDKEEISRLGRRDVVISFRGTATCLEWLENLRATLTHLPNGPTGANLNGSNSGPMVESGFLSLYTSGVHSLRDMVREEIARLLQSYGDEPLSVTITGHSLGAAIATLAAYDIKTTFKRAPMVTVISFGGPRVGNRCFRKLLEKQGTKVLRIVNSDDVITKVPGVVLENREQDNVKMTASIMPSWIQRRVEETPWVYAEIGKELRLSSRDSPHLSSINVATCHELKTYLHLVDGFVSSTCPFRETARRVLHR

SEQ ID NO: 29603 - protein, 265 aa, Arabidopsis thaliana
  misc_feature (1)..(265): Ceres Seq. ID no. 4917602
MATQSSWIGYVAVCQDKEEISRLGRRDVVISFRGTATCLEWLENLRATLTHLPNGPTGANLNGSNSGPMVESGFLSLYTSGVHSLRDMVREEIARLLQSYGDEPLSVTITGHSLGAAIATLAAYDIKTTFKRAPMVTVISFGGPRVGNRCFRKLLEKQGTKVLRIVNSDDVITKVPGVVLENREQDNVKMTASIMPSWIQRRVEETPWVYAEIGKELRLSSRDSPHLSSINVATCHELKTYLHLVDGFVSSTCPFRETARRVLHR

SEQ ID NO: 29604 - protein, 197 aa, Arabidopsis thaliana
  misc_feature (1)..(197): Ceres Seq. ID no. 4917603
MVESGFLSLYTSGVHSLRDMVREEIARLLQSYGDEPLSVTITGHSLGAAIATLAAYDIKTTFKRAPMVTVISFGGPRVGNRCFRKLLEKQGTKVLRIVNSDDVITKVPGVVLENREQDNVKMTASIMPSWIQRRVEETPWVYAEIGKELRLSSRDSPHLSSINVATCHELKTYLHLVDGFVSSTCPFRETARRVLHR

SEQ ID NO: 29605 - DNA, 1059 bp, Arabidopsis thaliana
  misc_feature (1)..(1059): Ceres Seq. ID no. 4917604
atgagtttgcttgatgattcttttacaagtgcaatgacacttaccaattcaggtgtgcctcaagtccctgatcgctacgttcttcctccttcgcaaaggccagctcttggttcaagcttaggcaccagcgagactacacttcctgtcattgatctctctcttttgcaccaacctttccttcgatccctcgcaatccacgagattagcatggcctgcaaggagtttggtttctttcaggttataaaccatggaataccatcatcagtggttaacgatgccttagatgcagcaacacagttcttcgacttacctgtggaagagaagatgcttctggtgtctgcaaacgttcatgagccagtcaggtatggcacaagccttaaccattcaacagacagagttcactactggagagatttcatcaagcattactctcatccactctcaaagtggatcgatatgtggccatcaaatcctccatgctacaaggataaagtgggcaagtatgcagaggcaacacatttgctacacaagcagttaatagaagctatctcagaaagcctgggactggagaaaaattacttacaagaagagatagaagaaggctcacaagtcatggcagtgaattgttatccagcatgcccggaacctgaaatggccttgggaatgccaccacactcagacttcagctcactgaccatcttacttcagagtagcaagggactccagataatggactgcaacaaaaactgggtttgtgtgccgtatatagaaggagctttgatagttcagctgggagatcaggtagaggtgatgagcaacggcatatacaagagcgtcattcatcgtgtaacagtgaacaaagaagtcaaaaggctatcttttgcaagtcttcacagtctacctctgcacaagaaaataagtccagcaccaaaactcgtcaacccaaacaatgcaccagcctatggagagtttagtttcaacgattttctgaactacatctcaagcaacgattttatacaagaaagattcattgacacaataaagaaaagcagttcctaa

SEQ ID NO: 29606 - protein, 352 aa, Arabidopsis thaliana; identical to SEQ ID NO: 28713
  misc_feature (1)..(352): Ceres Seq. ID no. 4917605

SEQ ID NO: 29607 - protein, 341 aa, Arabidopsis thaliana; identical to SEQ ID NO: 28714
  misc_feature (1)..(341): Ceres Seq. ID no. 4917606

SEQ ID NO: 29608 - protein, 283 aa, Arabidopsis thaliana
  misc_feature (1)..(283): Ceres Seq. ID no. 4917607
MACKEFGFFQVINHGIPSSVVNDALDAATQFFDLPVEEKMLLVSANVHEPVRYGTSLNHSTDRVHYWRDFIKHYSHPLSKWIDMWPSNPPCYKDKVGKYAEATHLLHKQLIEAISESLGLEKNYLQEEIEEGSQVMAVNCYPACPEPEMALGMPPHSDFSSLTILLQSSKGLQIMDCNKNWVCVPYIEGALIVQLGDQVEVMSNGIYKSVIHRVTVNKEVKRLSFASLHSLPLHKKISPAPKLVNPNNAPAYGEFSFNDFLNYISSNDFIQERFIDTIKKSSS

SEQ ID NO: 29609 - DNA, 1035 bp, Arabidopsis thaliana
  misc_feature (1)..(1035): Ceres Seq. ID no. 4917612
atgtctaaagcttgttggttagttgctgccatcatatttacagcggccacggtggtttacggacaacaagcgccgtgtttcttcgtttttggagactcaatgtccgataatggcaataataataacttgaaatccgaggcaaaagtcaacttttcaccttatggtaatgactttcctaaaggcccgaccggccgtttttcaaatggccgcactatccctgatattatcggtgaattatccggttttaaggattttataccgccattcgccgaagcatcacctgaacaagctcacaccgggatgaactacgcttccggtggaagtggacttcgtgaagaaactagcgaacacttgggagatagaatcagtataagaaagcaactacaaaatcacaagacgtccataacgaaagcgaatgtaccagcagaaagattgcaacaatgtctctacatgatcaacattggaagcaacgattacatcaacaattacttcatgtcaaagccgtacaacactaaacgacgctacactcctaaacaatacgcatattctctcattattatttaccgttcccacttaaagaatttgcaccgtctaggagcgaggaaggtggcagttttcggactcagccagattgggtgcacaccaaagataatgaagtcacacagtgacggtaaaatctgttcccgcgaagtgaatgaagcagtgaagatttttaataagaaccttgacgaccttgtcatggatttcaataagaaggtcagaggtgcaaagtttacctacgtcgatcttttctccggtggagatccccaagccttcattttcctaggatttaaggttggaggtaagagttgttgcacagtaaacccgggggaagaactttgtgtcccaaaccagccggtttgtgcaaacaggactgaatatgtcttttgggatgatcttcacagcacggaagccactaatatggtagtggcgaagggctcgttcgacggaatcataagtaaaccgtatagtatcgcccagcttgcgaaggaatag

SEQ ID NO: 29610 - protein, 344 aa, Arabidopsis thaliana
  misc_feature (1)..(344): Ceres Seq. ID no. 4917613
MSKACWLVAAIIFTAATVVYGQQAPCFFVFGDSMSDNGNNNNLKSEAKVNFSPYGNDFPKGPTGRFSNGRTIPDIIGELSGFKDFIPPFAEASPEQAHTGMNYASGGSGLREETSEHLGDRISIRKQLQNHKTSITKANVPAERLQQCLYMINIGSNDYINNYFMSKPYNTKRRYTPKQYAYSLIIIYRSHLKNLHRLGARKVAVFGLSQIGCTPKIMKSHSDGKICSREVNEAVKIFNKNLDDLVMDFNKKVRGAKFTYVDLFSGGDPQAFIFLGFKVGGKSCCTVNPGEELCVPNQPVCANRTEYVFWDDLHSTEATNMVVAKGSFDGIISKPYSIAQLAKE

SEQ ID NO: 29611 - protein, 311 aa, Arabidopsis thaliana
  misc_feature (1)..(311): Ceres Seq. ID no. 4917614
MSDNGNNNNLKSEAKVNFSPYGNDFPKGPTGRFSNGRTIPDIIGELSGFKDFIPPFAEASPEQAHTGMNYASGGSGLREETSEHLGDRISIRKQLQNHKTSITKANVPAERLQQCLYMINIGSNDYINNYFMSKPYNTKRRYTPKQYAYSLIIIYRSHLKNLHRLGARKVAVFGLSQIGCTPKIMKSHSDGKICSREVNEAVKIFNKNLDDLVMDFNKKVRGAKFTYVDLFSGGDPQAFIFLGFKVGGKSCCTVNPGEELCVPNQPVCANRTEYVFWDDLHSTEATNMVVAKGSFDGIISKPYSIAQLAKE

SEQ ID NO: 29612 - protein, 244 aa, Arabidopsis thaliana
  misc_feature (1)..(244): Ceres Seq. ID no. 4917615
MNYASGGSGLREETSEHLGDRISIRKQLQNHKTSITKANVPAERLQQCLYMINIGSNDYINNYFMSKPYNTKRRYTPKQYAYSLIIIYRSHLKNLHRLGARKVAVFGLSQIGCTPKIMKSHSDGKICSREVNEAVKIFNKNLDDLVMDFNKKVRGAKFTYVDLFSGGDPQAFIFLGFKVGGKSCCTVNPGEELCVPNQPVCANRTEYVFWDDLHSTEATNMVVAKGSFDGIISKPYSIAQLAKE

SEQ ID NO: 29613 - DNA, 1140 bp, Arabidopsis thaliana
  misc_feature (1)..(1140): Ceres Seq. ID no. 4917757
atgggcaagattatcttggttgtttctcttactgctttatgcatttttatgctcaagcacgcaccgagtttcacatcaccaaccgcgttctctcgtagcgaggaaggtgtgactcatgtgttagtcactggtggtgctggatatatcggatcacatgctgcgttgaggctcttaaaagattcataccgtgtaaccattgtggacaatctttctcggggaaatcttggtgccgtcaaggttttacaaggattgttcccagaacccgggaggcttcaatttatttatgctgacttaggagatgccaaagctgttgataaaatcttctcagagaacgcgtttgatgctgttatgcattttgctgcagtagcatatgttggagagagcactctagatcctctaaagtattaccacaacattacatcaaacacattagtagttcttgaagctgtggctagacataaagtgaagaagttgatatattcaagcacatgtgccacttatggagaacctgacaagatgcctattgttgaagttactccacaggtccccattaacccttatggaaaagctaagaagatggctgaagatatgatcctggatttctctaaaaactctgacatggcagtcatgatcctaagatactttaacgtgataggttcagatccagaaggtagactaggagaagctccaaagcccgagctacgtgaacacggacggatttcgggtgcctgtttcgatgcagctcgtggcgtgattccaggccttcaggtcaaaggaacagactacaaaacaggagatggaacttgtgttcgtgactacatagatgttactgaccttgtagatgctcacgtaaaagctctcgagaaagctaagcctagaaatgtgggaatatacaatgtaggtacaggaaaaggaagatcggtgaaagagtttgtggaagcatgtaagaaagcgacaggagtagatatcaaagtagattttttgcctcgaagacctggagattacgcagaggtttacagtgatccagcaaagattctgagagatcttaattggtctgctcgttacactaatcttcaagaaagtcttgaggttgcttggaagtggcaaaagactcatccccatggatatgcttcttcttaa

SEQ ID NO: 29614 - protein, 379 aa, Arabidopsis thaliana
  misc_feature (1)..(379): Ceres Seq. ID no. 4917758
MGKIILVVSLTALCIFMLKHAPSFTSPTAFSRSEEGVTHVLVTGGAGYIGSHAALRLLKDSYRVTIVDNLSRGNLGAVKVLQGLFPEPGRLQFIYADLGDAKAVDKIFSENAFDAVMHFAAVAYVGESTLDPLKYYHNITSNTLVVLEAVARHKVKKLIYSSTCATYGEPDKMPIVEVTPQVPINPYGKAKKMAEDMILDFSKNSDMAVMILRYFNVIGSDPEGRLGEAPKPELREHGRISGACFDAARGVIPGLQVKGTDYKTGDGTCVRDYIDVTDLVDAHVKALEKAKPRNVGIYNVGTGKGRSVKEFVEACKKATGVDIKVDFLPRRPGDYAEVYSDPAKILRDLNWSARYTNLQESLEVAWKWQKTHPHGYASS

SEQ ID NO: 29615 - protein, 363 aa, Arabidopsis thaliana
  misc_feature (1)..(363): Ceres Seq. ID no. 4917759
MLKHAPSFTSPTAFSRSEEGVTHVLVTGGAGYIGSHAALRLLKDSYRVTIVDNLSRGNLGAVKVLQGLFPEPGRLQFIYADLGDAKAVDKIFSENAFDAVMHFAAVAYVGESTLDPLKYYHNITSNTLVVLEAVARHKVKKLIYSSTCATYGEPDKMPIVEVTPQVPINPYGKAKKMAEDMILDFSKNSDMAVMILRYFNVIGSDPEGRLGEAPKPELREHGRISGACFDAARGVIPGLQVKGTDYKTGDGTCVRDYIDVTDLVDAHVKALEKAKPRNVGIYNVGTGKGRSVKEFVEACKKATGVDIKVDFLPRRPGDYAEVYSDPAKILRDLNWSARYTNLQESLEVAWKWQKTHPHGYASS

SEQ ID NO: 29616 - protein, 263 aa, Arabidopsis thaliana
  misc_feature (1)..(263): Ceres Seq. ID no. 4917760
MHFAAVAYVGESTLDPLKYYHNITSNTLVVLEAVARHKVKKLIYSSTCATYGEPDKMPIVEVTPQVPINPYGKAKKMAEDMILDFSKNSDMAVMILRYFNVIGSDPEGRLGEAPKPELREHGRISGACFDAARGVIPGLQVKGTDYKTGDGTCVRDYIDVTDLVDAHVKALEKAKPRNVGIYNVGTGKGRSVKEFVEACKKATGVDIKVDFLPRRPGDYAEVYSDPAKILRDLNWSARYTNLQESLEVAWKWQKTHPHGYASS

SEQ ID NO: 29617 - DNA, 1464 bp, Arabidopsis thaliana
  misc_feature (1)..(1464): Ceres Seq. ID no. 4917893
atggtttcactctttttagtgaagatatttcattgggtctatcagtggagaaatccaaaaactaatggaaaactacctccagggtctatgggctttccgttcattggagagacttttgagttctttaagcctcatgacgctcttcaattttcaacattcatcaaagacagagtccttaggttttttgctgatttctctagcattcatttgtcattttttcggacaagcttatttggagacaaagctataatctcaatggatatggaattgaatctcgagatggcgaaggcaaattccgtccctggtgtcacgaagagcgtaatacgactatttggggagaacaacttgtttttgcagagcaaggagtcccataaacatgttcggaacttgacgttccagttgttgggtccacaaggtttaaaatcaaggatgattgaagacgtggatctcttggctcgcacgtacatggaggaaggagctaggaacggctaccttgacgtaaaggaaacatcaagcaagattttaattggatgccttgcgaagaaagttatgggcgagatggaaccagaggcggcgaaagaactcgccctctgctggagatattttcagagtggctggtttagattctttctcaaccttcctgggacaggtgtctataaaatgatgaaggtgctttttgtgcaatacactgaggctgatatttcgtggcaggcaagaaagaggatgatgaagttactaaggaagacagtgttgacgaagagagcatcaggagaggagttaggggagttcttcaacatcatatttggagaaatggaaggagaaggagaaacgatgagcgtagagaatgcggtcgagtacatatataccttctttttggttgctaatgaaacaacaccaaggattcttgcggctacagtaaagtttataagcgaccaccctaaagtcaagcaagagttacaaagagaacatgaagaaattgttcggggtaaggcagagaaggaaggcggcctaacatgggaagactacaaatcaatgcatttcactcagatggttatcaatgagtcgcttagaatcataagcacagcaccaacagttcttagagtacttgaacatgatttccaagttggtgattatacaattccagctggttggacctttatgggatatcctcatatccatttcaattcagaaaaatacgaagacccttacgcatttaatccatggcgctgggagggaaaggatttgggcgcgatcgtctccaagactttcattcccttcggtgcaggtcgtagactttgtgtaggggctgagtttgctaagatgcagatggccgtttttatccatcatttgtttagatacaggtggtctatgaagtcagggacaacaataattcgaagctttatgcttatgtttccaggtgggtgtgatgttcaaatttcagaagacactgaagtcgataagtga

SEQ ID NO: 29618 - protein, 487 aa, Arabidopsis thaliana
  misc_feature (1)..(487): Ceres Seq. ID no. 4917894
MVSLFLVKIFHWVYQWRNPKTNGKLPPGSMGFPFIGETFEFFKPHDALQFSTFIKDRVLRFFADFSSIHLSFFRTSLFGDKAIISMDMELNLEMAKANSVPGVTKSVIRLFGENNLFLQSKESHKHVRNLTFQLLGPQGLKSRMIEDVDLLARTYMEEGARNGYLDVKETSSKILIGCLAKKVMGEMEPEAAKELALCWRYFQSGWFRFFLNLPGTGVYKMMKVLFVQYTEADISWQARKRMMKLLRKTVLTKRASGEELGEFFNIIFGEMEGEGETMSVENAVEYIYTFFLVANETTPRILAATVKFISDHPKVKQELQREHEEIVRGKAEKEGGLTWEDYKSMHFTQMVINESLRIISTAPTVLRVLEHDFQVGDYTIPAGWTFMGYPHIHFNSEKYEDPYAFNPWRWEGKDLGAIVSKTFIPFGAGRRLCVGAEFAKMQMAVFIHHLFRYRWSMKSGTTIIRSFMLMFPGGCDVQISEDTEVDK

SEQ ID NO: 29619 - protein, 458 aa, Arabidopsis thaliana
  misc_feature (1)..(458): Ceres Seq. ID no. 4917895
MGFPFIGETFEFFKPHDALQFSTFIKDRVLRFFADFSSIHLSFFRTSLFGDKAIISMDMELNLEMAKANSVPGVTKSVIRLFGENNLFLQSKESHKHVRNLTFQLLGPQGLKSRMIEDVDLLARTYMEEGARNGYLDVKETSSKILIGCLAKKVMGEMEPEAAKELALCWRYFQSGWFRFFLNLPGTGVYKMMKVLFVQYTEADISWQARKRMMKLLRKTVLTKRASGEELGEFFNIIFGEMEGEGETMSVENAVEYIYTFFLVANETTPRILAATVKFISDHPKVKQELQREHEEIVRGKAEKEGGLTWEDYKSMHFTQMVINESLRIISTAPTVLRVLEHDFQVGDYTIPAGWTFMGYPHIHFNSEKYEDPYAFNPWRWEGKDLGAIVSKTFIPFGAGRRLCVGAEFAKMQMAVFIHHLFRYRWSMKSGTTIIRSFMLMFPGGCDVQISEDTEVDK

SEQ ID NO: 29620 - protein, 402 aa, Arabidopsis thaliana
  misc_feature (1)..(402): Ceres Seq. ID no. 4917896
MDMELNLEMAKANSVPGVTKSVIRLFGENNLFLQSKESHKHVRNLTFQLLGPQGLKSRMIEDVDLLARTYMEEGARNGYLDVKETSSKILIGCLAKKVMGEMEPEAAKELALCWRYFQSGWFRFFLNLPGTGVYKMMKVLFVQYTEADISWQARKRMMKLLRKTVLTKRASGEELGEFFNIIFGEMEGEGETMSVENAVEYIYTFFLVANETTPRILAATVKFISDHPKVKQELQREHEEIVRGKAEKEGGLTWEDYKSMHFTQMVINESLRIISTAPTVLRVLEHDFQVGDYTIPAGWTFMGYPHIHFNSEKYEDPYAFNPWRWEGKDLGAIVSKTFIPFGAGRRLCVGAEFAKMQMAVFIHHLFRYRWSMKSGTTIIRSFMLMFPGGCDVQISEDTEVDK

SEQ ID NO: 29621 - DNA, 1791 bp, Arabidopsis thaliana
  misc_feature (1)..(1791): Ceres Seq. ID no. 4918992
atgtttcgtggtattctgaaatctgcaaaggatgagaagaagaagatggagtctcaaggcaatggagctgttgctaattcaggaaaatctctggttaatcgccgacgagctaacaaagaaaagaaaatggatttgctacaagatgttgataagcttaagaggaagctgagacaggaggagaatgttcatagagcattggagagagcttttactagacctttaggagctttacctcgtcttccgtcttacctccctcgacatacattggagcttcttgctgaagtagctgttcttgaagaggaagtggttcggttagaggagcaagttgtaaactttagacaaggtttataccaagaagctgtttacatatcttcaaagaggaatctggagagtcctaataacaacagtttgaatgagaattcgcccgttagaagcactaaacaccagagatcgaaatcaatgtcgcaacacgagttcaattctatgatcactcccactaaaaagcatcaacagtctcttagcagaagcatctcaagtaggaaactcttctcctctgatcaaacagttaatgaccgaagtggtcagagagtggtaagtggcaaacaagcgtcgcctaaatcaaatctaagcagtgttactaatactaagccagtagatgtgagagggaaagagaatcagacctctagtaatgcttcaaaagacaagaaaaataaagaatcacctgagaagaagcttggcagattcttgacatctgtgaagaagaagaaacctttgattaagccggaggctgcagcggataaacactcagaatcaaccaaattgcagctagatgatagattagcagatcaggacaaagctcaagagagtgtgtcaggatcatcttcggaagacaagacactgcaaagtggaaatgtagcaaacagagtttcagaggatttactgaaatgtcttgtgactattatcttgaggattagctcgtccaaggacattgtgttggatccatataataactgctcagagtggagaacaagagaacttggtgcatacaagcatttttcgtcggtcgatacatcttcagttgatcttggacgaagaatcaatgcttcatttctgatccatcgtctcaagttcctgcttaataagctttctgttgtcaatctagacggtcttagccaccagcagaagcttgcattctggataaatacttataattcctgcgttatgaatgcattcttggagcacgggatcccggcgactcctgaaatggttgtagcgctgatgcagaaggcaacaataattgtgggaggacactcgctaaatgcaatcacaatcgaacatttcatcttgagacttccataccacttgaaattcacttgtcccaaaactgcaacacatgaagaaatgagagctcatagcacatttggattggaatggtcagagcccttggtcacattcgctctcgcctgtggaagctggtcctctcctgctgtaagggtctacacagcagctaatgtagaggaagagctagaagctgcaaagagagattatctgcaagcatcagttgggatatcaaagaacaacaaactaatgcttccaaaggtattagattggtacttactcgactttgccaaggatttggaatcgttactggattgggtttgccttcagttacctgataaactaagagaagaagcaactaagtgtatggagagaaagaacaaagaatcactaatggaattggttcaagtagtaccatatgacttcagtttcagattgcttttgcatcaatga

SEQ ID NO: 29622 - protein, 596 aa, Arabidopsis thaliana
  misc_feature (1)..(596): Ceres Seq. ID no. 4918993
MFRGILKSAKDEKKKMESQGNGAVANSGKSLVNRRRANKEKKMDLLQDVDKLKRKLRQEENVHRALERAFTRPLGALPRLPSYLPRHTLELLAEVAVLEEEVVRLEEQVVNFRQGLYQEAVYISSKRNLESPNNNSLNENSPVRSTKHQRSKSMSQHEFNSMITPTKKHQQSLSRSISSRKLFSSDQTVNDRSGQRVVSGKQASPKSNLSSVTNTKPVDVRGKENQTSSNASKDKKNKESPEKKLGRFLTSVKKKKPLIKPEAAADKHSESTKLQLDDRLADQDKAQESVSGSSSEDKTLQSGNVANRVSEDLLKCLVTIILRISSSKDIVLDPYNNCSEWRTRELGAYKHFSSVDTSSVDLGRRINASFLIHRLKFLLNKLSVVNLDGLSHQQKLAFWINTYNSCVMNAFLEHGIPATPEMVVALMQKATIIVGGHSLNAITIEHFILRLPYHLKFTCPKTATHEEMRAHSTFGLEWSEPLVTFALACGSWSSPAVRVYTAANVEEELEAAKRDYLQASVGISKNNKLMLPKVLDWYLLDFAKDLESLLDWVCLQLPDKLREEATKCMERKNKESLMELVQVVPYDFSFRLLLHQ

SEQ ID NO: 29623 - protein, 581 aa, Arabidopsis thaliana
  misc_feature (1)..(581): Ceres Seq. ID no. 4918994
MESQGNGAVANSGKSLVNRRRANKEKKMDLLQDVDKLKRKLRQEENVHRALERAFTRPLGALPRLPSYLPRHTLELLAEVAVLEEEVVRLEEQVVNFRQGLYQEAVYISSKRNLESPNNNSLNENSPVRSTKHQRSKSMSQHEFNSMITPTKKHQQSLSRSISSRKLFSSDQTVNDRSGQRVVSGKQASPKSNLSSVTNTKPVDVRGKENQTSSNASKDKKNKESPEKKLGRFLTSVKKKKPLIKPEAAADKHSESTKLQLDDRLADQDKAQESVSGSSSEDKTLQSGNVANRVSEDLLKCLVTIILRISSSKDIVLDPYNNCSEWRTRELGAYKHFSSVDTSSVDLGRRINASFLIHRLKFLLNKLSVVNLDGLSHQQKLAFWINTYNSCVMNAFLEHGIPATPEMVVALMQKATIIVGGHSLNAITIEHFILRLPYHLKFTCPKTATHEEMRAHSTFGLEWSEPLVTFALACGSWSSPAVRVYTAANVEEELEAAKRDYLQASVGISKNNKLMLPKVLDWYLLDFAKDLESLLDWVCLQLPDKLREEATKCMERKNKESLMELVQVVPYDFSFRLLLHQ

SEQ ID NO: 29624 - protein, 554 aa, Arabidopsis thaliana
  misc_feature (1)..(554): Ceres Seq. ID no. 4918995
MDLLQDVDKLKRKLRQEENVHRALERAFTRPLGALPRLPSYLPRHTLELLAEVAVLEEEVVRLEEQVVNFRQGLYQEAVYISSKRNLESPNNNSLNENSPVRSTKHQRSKSMSQHEFNSMITPTKKHQQSLSRSISSRKLFSSDQTVNDRSGQRVVSGKQASPKSNLSSVTNTKPVDVRGKENQTSSNASKDKKNKESPEKKLGRFLTSVKKKKPLIKPEAAADKHSESTKLQLDDRLADQDKAQESVSGSSSEDKTLQSGNVANRVSEDLLKCLVTIILRISSSKDIVLDPYNNCSEWRTRELGAYKHFSSVDTSSVDLGRRINASFLIHRLKFLLNKLSVVNLDGLSHQQKLAFWINTYNSCVMNAFLEHGIPATPEMVVALMQKATIIVGGHSLNAITIEHFILRLPYHLKFTCPKTATHEEMRAHSTFGLEWSEPLVTFALACGSWSSPAVRVYTAANVEEELEAAKRDYLQASVGISKNNKLMLPKVLDWYLLDFAKDLESLLDWVCLQLPDKLREEATKCMERKNKESLMELVQVVPYDFSFRLLLHQ

SEQ ID NO: 29625 - DNA, 2688 bp, Arabidopsis thaliana
  misc_feature (1)..(2688): Ceres Seq. ID no. 4919129
atggttgctgcgtcttatgagccctacacgtatagctcaccaccaccaccattgtatgactctcctacaccaaaggttgactataagtctccaccacctccatacgtttacagttctccaccacctccactatcgtattcgccatctcccaaggtagactacaagtctccaccacctccatatgtttacagctctccaccaccaccatattactcaccatcccctaaagtcgaatacaaatccccaccacctccatatgtttatagttctccaccaccaccatattactcaccctcacctaaagtagattacaagtctccaccaccaccgtatgtttacagctccccaccaccaccatactattcaccttctccaaagcccacatacaaatcaccaccacctccatatgtttacaattctccaccaccaccatactactcaccatcccctaaggtcgaatacaaatctccaccacctccatacgtctatagctctccacccccaccatactactcaccctcacctaaagtagattataagtctccaccaccaccgtatgtttacaactctccaccaccaccatactattcaccttctccaaaacccacatacaagtccccaccaccaccatatatttacagctctccaccaccaccatactattctccttctcctaaaccagtatacaaatctccaccaccaccatacgtctattcctctccaccaccaccatactattcaccttctcctaaaccagcatacaaatctccaccaccaccgtatgtttatagctctccacctcctccatactactcgccttctcctaaacccatatacaagtctccaccaccaccgtacgtctacaactctcctccaccaccatactactctccttctccaaaaccggcatacaaatctccaccaccaccatacgtatacagctttccacctcctccatactactcgccttctcctaaacccgtatacaagtctccaccaccaccatacgtctacaactctcctccaccaccatactactctccttctccaaaaccggcatacaaatctccaccaccaccatacgtatacagctctccaccaccaccatactactcgccttctcctaaaccaacatacaaatctccaccaccaccatatgtttatagctctccacctcctccatactactcgccttctcctaaacccgtatacaagtctccaccaccaccgtacatctacaactctccaccaccaccatactactccccttcacctaaaccatcatacaaatccccaccaccaccatatgtttacagctctccaccaccaccatattactcgccttctcctaagcttacatacaaatcctcaccaccaccctatgtttacagctctccaccaccaccatattactctccttctcctaaggttgtatacaaatctccaccaccaccatatgtttacagctctccaccaccaccatactactccccttcacctaaaccatcatacaaatccccaccaccaccgtacgtctataactctccacctcctccttactactctccttcacctaaggtcatatacaaatcgccaccacacccacatgtatgtgtttgtcccccacctccaccatgctactctcattctccaaagattgagtacaaatccccaccaacaccatatgtttaccactcaccacctcccccaccttattattcgccttcgcctaaacctgcatataaatcttcaccaccaccttacgtctacagctctccaccaccaccatattactcacctgctcctaagcccgtatacaaatctccaccaccaccatacgtgtacaactccccaccaccaccatattactcaccatcccctaaacctacatacaaatctccaccaccaccatatgtatacagctctccaccaccaccatattactcacctactcctaaacctacatacaaatctccaccacccccatatgtctacagttccccaccaccaccatattactcgccttctcctaagccaacatacaaatccccaccaccaccatacgtctacagttctccaccaccaccatattactcacctgctcctaagcccacatacaaatctccaccaccaccatacgtttacagctccccaccaccaccatactactcgccttcccctaagcctacatacaaatctccaccacctccatatgtatatagctctccacctccaccaccttattactctccttctccaaaggttgagtacaaatctccgccaccaccatatgtctacagttctcctcccccaccatattactctccttctccaaaggttgagtacaaatctcctcctccaccgtatgtttatagttctccacctccaccaccatattactctccttctccaaaggttgagtacaaatcccctccaccaccgtatgtctacagctccccaccaccacccacgtattattctccttctccaaaggttgaatacaaatctccaccacctccatatgtctacaactctccacctccaccggcgtattactctccatctccaaagattgagtacaaatctccacctccaccatatgtctacagttctccaccaccaccatcatattctccttctccaaaagctgaatacaaatctcctcctcccccatccttatattactaa

SEQ ID NO: 29626 - protein, 895 aa, Arabidopsis thaliana
  misc_feature (1)..(895): Ceres Seq. ID no. 4919130
MVAASYEPYTYSSPPPPLYDSPTPKVDYKSPPPPYVYSSPPPPLSYSPSPKVDYKSPPPPYVYSSPPPPYYSPSPKVEYKSPPPPYVYSSPPPPYYSPSPKVDYKSPPPPYVYSSPPPPYYSPSPKPTYKSPPPPYVYNSPPPPYYSPSPKVEYKSPPPPYVYSSPPPPYYSPSPKVDYKSPPPPYVYNSPPPPYYSPSPKPTYKSPPPPYIYSSPPPPYYSPSPKPVYKSPPPPYVYSSPPPPYYSPSPKPAYKSPPPPYVYSSPPPPYYSPSPKPIYKSPPPPYVYNSPPPPYYSPSPKPAYKSPPPPYVYSFPPPPYYSPSPKPVYKSPPPPYVYNSPPPPYYSPSPKPAYKSPPPPYVYSSPPPPYYSPSPKPTYKSPPPPYVYSSPPPPYYSPSPKPVYKSPPPPYIYNSPPPPYYSPSPKPSYKSPPPPYVYSSPPPPYYSPSPKLTYKSSPPPYVYSSPPPPYYSPSPKVVYKSPPPPYVYSSPPPPYYSPSPKPSYKSPPPPYVYNSPPPPYYSPSPKVIYKSPPHPHVCVCPPPPPCYSHSPKIEYKSPPTPYVYHSPPPPPYYSPSPKPAYKSSPPPYVYSSPPPPYYSPAPKPVYKSPPPPYVYNSPPPPYYSPSPKPTYKSPPPPYVYSSPPPPYYSPTPKPTYKSPPPPYVYSSPPPPYYSPSPKPTYKSPPPPYVYSSPPPPYYSPAPKPTYKSPPPPYVYSSPPPPYYSPSPKPTYKSPPPPYVYSSPPPPPYYSPSPKVEYKSPPPPYVYSSPPPPYYSPSPKVEYKSPPPPYVYSSPPPPPYYSPSPKVEYKSPPPPYVYSSPPPPTYYSPSPKVEYKSPPPPYVYNSPPPPAYYSPSPKIEYKSPPPPYVYSSPPPPSYSPSPKAEYKSPPPPSLYY

SEQ ID NO: 29627 - protein, 710 aa, Arabidopsis thaliana
  misc_feature (1)..(710): Ceres Seq. ID no. 4919131
MFTTLHHHHTIHLLQNPHTSPHHHHIFTALHHHHTILLLLNQYTNLHHHHTSIPLHHHHTIHLLLNQHTNLHHHRMFIALHLLHTTRLLLNPYTSLHHHRTSTTLLHHHTTLLLQNRHTNLHHHHTYTAFHLLHTTRLLLNPYTSLHHHHTSTTLLHHHTTLLLQNRHTNLHHHHTYTALHHHHTTRLLLNQHTNLHHHHMFIALHLLHTTRLLLNPYTSLHHHRTSTTLHHHHTTPLHLNHHTNPHHHHMFTALHHHHITRLLLSLHTNPHHHPMFTALHHHHITLLLLRLYTNLHHHHMFTALHHHHTTPLHLNHHTNPHHHRTSITLHLLLTTLLHLRSYTNRHHTHMYVFVPHLHHATLILQRLSTNPHQHHMFTTHHLPHLIIRLRLNLHINLHHHLTSTALHHHHITHLLLSPYTNLHHHHTCTTPHHHHITHHPLNLHTNLHHHHMYTALHHHHITHLLLNLHTNLHHPHMSTVPHHHHITRLLLSQHTNPHHHHTSTVLHHHHITHLLLSPHTNLHHHHTFTAPHHHHTTRLPLSLHTNLHHLHMYIALHLHHLITLLLQRLSTNLRHHHMSTVLLPHHITLLLQRLSTNLLLHRMFIVLHLHHHITLLLQRLSTNPLHHRMSTAPHHHPRIILLLQRLNTNLHHLHMSTTLHLHRRITLHLQRLSTNLHLHHMSTVLHHHHHILLLQKLNTNLLLPHPYIT

SEQ ID NO: 29628 - protein, 635 aa, Arabidopsis thaliana
  misc_feature (1)..(635): Ceres Seq. ID no. 4919132
MFIALHLLHTTRLLLNPYTSLHHHRTSTTLLHHHTTLLLQNRHTNLHHHHTYTAFHLLHTTRLLLNPYTSLHHHHTSTTLLHHHTTLLLQNRHTNLHHHHTYTALHHHHTTRLLLNQHTNLHHHHMFIALHLLHTTRLLLNPYTSLHHHRTSTTLHHHHTTPLHLNHHTNPHHHHMFTALHHHHITRLLLSLHTNPHHHPMFTALHHHHITLLLLRLYTNLHHHHMFTALHHHHTTPLHLNHHTNPHHHRTSITLHLLLTTLLHLRSYTNRHHTHMYVFVPHLHHATLILQRLSTNPHQHHMFTTHHLPHLIIRLRLNLHINLHHHLTSTALHHHHITHLLLSPYTNLHHHHTCTTPHHHHITHHPLNLHTNLHHHHMYTALHHHHITHLLLNLHTNLHHPHMSTVPHHHHITRLLLSQHTNPHHHHTSTVLHHHHITHLLLSPHTNLHHHHTFTAPHHHHTTRLPLSLHTNLHHLHMYIALHLHHLITLLLQRLSTNLRHHHMSTVLLPHHITLLLQRLSTNLLLHRMFIVLHLHHHITLLLQRLSTNPLHHRMSTAPHHHPRIILLLQRLNTNLHHLHMSTTLHLHRRITLHLQRLSTNLHLHHMSTVLHHHHHILLLQKLNTNLLLPHPYIT

SEQ ID NO: 29629 - DNA, 1188 bp, Arabidopsis thaliana
  misc_feature (1)..(1188): Ceres Seq. ID no. 4919394
atgtcctggacggcagatggctatgtggctacggtaactatgaacaacttccaaatctaccggcacatacaaaaccctggttggacattaggttggacatgggcaaagaaagaggtgatttggtcaatggttggtgcacaaacaacagaacaaggagactgttccaagtttaagggaaatgtacctcattgctgtaagaaaacccctacagttgttgatctcttgccaggtgtgccttataatcaacagttctcaaactgttgcaaaggaggtgtaattggagcttggggtcaagatccatcagccgctgtatcccagtttcaggttagtgctggtttagctggaactacaaacaagactgtcaagcttcctaagaacttcactttgcttggtcccggccctggttacacttgcggtcctgccaaaatcgtgccctctaccgtttttctcacaactgacaaacggcgaaaaacacaagctttgatgacatggaatgttacctgcacatactcacagtttttagcaagaaagcatccaagctgttgtgtctccttctcttctttctacaacgacaccataactccttgcccgtcttgtgcctgtggctgcgagaacaaaaagagctgcgtcaaggctgattctaagattctaaccaagaaaggtctcaacacaccaaaaaaggacaacactcctttgttgcaatgcacacatcacatgtgccctgttagagtccactggcacgttaaaactaactacaaagactattggcgagtgaagatagcaatcacaaatttcaattaccggatgaatcatacactctggactttagcaattcagcatccaaatctcaacaatgtgactcaagttttcagctttgactacaaaccagtctctccttacggatccataaatgatactggaatgttctatggaacgaagttttacaatgatttattaatggaagctggaccttcagggaatgtgcaatcagaggttttgctacagaaagatcaaaagacttttactttcaagcaaggttgggcttttcctagaaaagtttactttaatggtgatgaatgtatgttacctccaccagattcatacccttttctaccaaactctgcacaagggaactttgcttcgttctcactcaccattcttcttctcctattcatctcaatatggtga

SEQ ID NO: 29630 - protein, 395 aa, Arabidopsis thaliana; identical to SEQ ID NO: 29054
  misc_feature (1)..(395): Ceres Seq. ID no. 4919395

SEQ ID NO: 29631 - protein, 382 aa, Arabidopsis thaliana
  misc_feature (1)..(382): Ceres Seq. ID no. 4919396
MNNFQIYRHIQNPGWTLGWTWAKKEVIWSMVGAQTTEQGDCSKFKGNVPHCCKKTPTVVDLLPGVPYNQQFSNCCKGGVIGAWGQDPSAAVSQFQVSAGLAGTTNKTVKLPKNFTLLGPGPGYTCGPAKIVPSTVFLTTDKRRKTQALMTWNVTCTYSQFLARKHPSCCVSFSSFYNDTITPCPSCACGCENKKSCVKADSKILTKKGLNTPKKDNTPLLQCTHHMCPVRVHWHVKTNYKDYWRVKIAITNFNYRMNHTLWTLAIQHPNLNNVTQVFSFDYKPVSPYGSINDTGMFYGTKFYNDLLMEAGPSGNVQSEVLLQKDQKTFTFKQGWAFPRKVYFNGDECMLPPPDSYPFLPNSAQGNFASFSLTILLLLFISIW

SEQ ID NO: 29632 - protein, 353 aa, Arabidopsis thaliana
  misc_feature (1)..(353): Ceres Seq. ID no. 4919397
MVGAQTTEQGDCSKFKGNVPHCCKKTPTVVDLLPGVPYNQQFSNCCKGGVIGAWGQDPSAAVSQFQVSAGLAGTTNKTVKLPKNFTLLGPGPGYTCGPAKIVPSTVFLTTDKRRKTQALMTWNVTCTYSQFLARKHPSCCVSFSSFYNDTITPCPSCACGCENKKSCVKADSKILTKKGLNTPKKDNTPLLQCTHHMCPVRVHWHVKTNYKDYWRVKIAITNFNYRMNHTLWTLAIQHPNLNNVTQVFSFDYKPVSPYGSINDTGMFYGTKFYNDLLMEAGPSGNVQSEVLLQKDQKTFTFKQGWAFPRKVYFNGDECMLPPPDSYPFLPNSAQGNFASFSLTILLLLFISIW

SEQ ID NO: 29633 - DNA, 912 bp, Arabidopsis thaliana
  misc_feature (1)..(912): Ceres Seq. ID no. 4919864
atggccagagccaattttgagccttacggtcgtgacttccctggtggtcgcgccaccggacgcttttgtaacggccgtctctcctccgatttcacttccgaggcttatggccttaaaccgaccgtgccagcctacctagatccgtcctataatatatctgattttgctaccggagtttgttttgcctccgccggcaccggttatgataattccacagccgatgtgcttggcgtgattccgttatggaaagaggtcgagtacttcaaggaataccaaagcaacctttccgcctatctcggccatcggagagctgccaaaatcatcagagaatctctgtacatagtaagcataggcaccaacgatttccttgagaactactacacattaccggacaggagatctcaattcagcatcagtcagtaccaagacttcctggtcgagattgctgaggtgttcttaaaggacatttacagacttggagctcggaaaatgtctttcactggaatctcacctatggggtgtctaccgctggagagagtgacaaatcttgacgacccttttagctgtgctcggagttataatgatttggctgtagatttcaatgggagattgagaagattggtgacaaaactgaatagagagcttactggaataaagatttatttcgctaatccttacgatatcatgtgggatattgttaccaaacctaatctttacggtctagagatatcaagttctgcctgttgcggtactggattgttcgagatgggatttctttgcggccaggacaatccgttaacttgcagtgatgccaataagttcgttttctgggacgcatttcacccgaccgagaggactaatcagattgtgtctgatcacttcttcaagcatctcaagaatctgtttcattga

SEQ ID NO: 29634 - protein, 303 aa, Arabidopsis thaliana
  misc_feature (1)..(303): Ceres Seq. ID no. 4919865
MARANFEPYGRDFPGGRATGRFCNGRLSSDFTSEAYGLKPTVPAYLDPSYNISDFATGVCFASAGTGYDNSTADVLGVIPLWKEVEYFKEYQSNLSAYLGHRRAAKIIRESLYIVSIGTNDFLENYYTLPDRRSQFSISQYQDFLVEIAEVFLKDIYRLGARKMSFTGISPMGCLPLERVTNLDDPFSCARSYNDLAVDFNGRLRRLVTKLNRELTGIKIYFANPYDIMWDIVTKPNLYGLEISSSACCGTGLFEMGFLCGQDNPLTCSDANKFVFWDAFHPTERTNQIVSDHFFKHLKNLFH

SEQ ID NO: 29635 - DNA, 600 bp, Arabidopsis thaliana
  misc_feature (1)..(600): Ceres Seq. ID no. 4920385
atggaaacggatgatcacaacggtgatgttttagcgccgccgtcgaatttctcgatggttgaagatggaatttatcgatctgggtttcctcgacctgagaatttcagtttccttaaaaccctaaatcttcgttccatcatttatctgtgtcctgaaccatacccagaggagaatctcaagtttcttgaggctaacaacattaagctttaccaatttggaatcgaaggcaaaacggatcctccaactcctatgccaaaagatacagttttggatgctctcaaagttttagttgatgtgagaaaccatccaattctcatacattgcaaacgcgggaagcataggacaggttgtctagtgggatgcttaagaaaagttcagagctggtgtttatcatcggtgctcgaggagtaccagaagaacgcgggtttaaaatggagacaaagggacttgaattttatagaggcatttgatatagtgagcttgagacagtgtctcttgagcatcatgtatcagtatcacggttatggcttcaagaggagaaggttggcatatgaagaagagaatgtcaagacaccaaaaccgcaggctgctagagtttaa

SEQ ID NO: 29636 - protein, 199 aa, Arabidopsis thaliana; identical to SEQ ID NO: 29214
  misc_feature (1)..(199): Ceres Seq. ID no. 4920386

SEQ ID NO: 29637 - protein, 181 aa, Arabidopsis thaliana; identical to SEQ ID NO: 29215
  misc_feature (1)..(181): Ceres Seq. ID no. 4920387

SEQ ID NO: 29638 - protein, 116 aa, Arabidopsis thaliana
  misc_feature (1)..(116): Ceres Seq. ID no. 4920388
MPKDTVLDALKVLVDVRNHPILIHCKRGKHRTGCLVGCLRKVQSWCLSSVLEEYQKNAGLKWRQRDLNFIEAFDIVSLRQCLLSIMYQYHGYGFKRRRLAYEEENVKTPKPQAARV

SEQ ID NO: 29639 - DNA, 1566 bp, Arabidopsis thaliana
  misc_feature (1)..(1566): Ceres Seq. ID no. 4920469
atggcggagcagttactgaatcaattcatctccgcagtgatatcaaagtcgagacatttgaatcatttgaagcaagttcagtcctttatgatagtttctggactaagtcattcacatttcctctgttttaagcttcttcgtttttgtacgcttcgtctctgtaatctctcttacgctcgctttatctttgatcgtttctctttccccaatacgcatctttacgctgccgttttaactgcttactcttcttctcttcctcttcatgcttcttcagctttctccttctttcgtctcatggttaatcgttctgttcctcggcctaatcactttatctacccacttgttcttaagtctacaccatatctctcctctgctttttcaactcctttggtgcatacccatttgtttaaatctgggtttcatctctatgtcgttgttcaaactgctcttcttcactcctacgcttcctctgtttctcatataactcttgcaagacaactgttcgacgaaatgtctgagagaaatgttgtttcttggactgctatgctttctgggtatgctaggtctggtgatatctctaatgctgttgctctttttgaagatatgcctgagcgtgatgttccttcctggaatgcgattcttgctgcttgtactcagaatggtctttttcttgaagcggtttctctgtttagaaggatgattaatgagcctagcattcgtcctaatgaggtaactgtagtttgtgtcctctctgcgtgtgctcaaactggtacgcttcagctggctaaagggattcatgcctttgcttaccgtcgtgatctttcttctgatgtgtttgtttcgaattctttagttgacttgtatggaaaatgtggtaacttggaggaagcaagctctgtttttaagatggcatccaagaaaagtttaacagcttggaattctatgatcaattgctttgcactccatggtagaagtgaagaagccatagctgtgtttgaagaaatgatgaagttgaacattaacgatatcaaaccagatcacattactttcatcggtcttctcaatgcgtgtactcatggaggtttggtatcaaaaggccgaggttatttcgatctgatgacaaacagattcggtattgagccaaggattgagcattatggctgtctaatagatcttttaggcagggcaggtcggtttgatgaagctttagaagttatgtccacgatgaagatgaaagcggatgaggctatttggggatcactgcttaatgcttgtaagatacatggccatctggatttggctgaagttgctgtaaaaaacctggttgctttaaatcctaataatggaggttatgtcgctatgatggcaaatttatatggagagatgggtaattgggaagaggcacgtagagctagaaagatgatcaagcaccaaaatgcttataaaccaccaggctggagtcggattgagatcgataacgaggtccatcagttctactctcttgacaaatcacatccggagactgaggagatatacatgatacttgacagtctgatctctttctga

SEQ ID NO: 29640 - protein, 521 aa, Arabidopsis thaliana
  misc_feature (1)..(521): Ceres Seq. ID no. 4920470
MAEQLLNQFISAVISKSRHLNHLKQVQSFMIVSGLSHSHFLCFKLLRFCTLRLCNLSYARFIFDRFSFPNTHLYAAVLTAYSSSLPLHASSAFSFFRLMVNRSVPRPNHFIYPLVLKSTPYLSSAFSTPLVHTHLFKSGFHLYVVVQTALLHSYASSVSHITLARQLFDEMSERNVVSWTAMLSGYARSGDISNAVALFEDMPERDVPSWNAILAACTQNGLFLEAVSLFRRMINEPSIRPNEVTVVCVLSACAQTGTLQLAKGIHAFAYRRDLSSDVFVSNSLVDLYGKCGNLEEASSVFKMASKKSLTAWNSMINCFALHGRSEEAIAVFEEMMKLNINDIKPDHITFIGLLNACTHGGLVSKGRGYFDLMTNRFGIEPRIEHYGCLIDLLGRAGRFDEALEVMSTMKMKADEAIWGSLLNACKIHGHLDLAEVAVKNLVALNPNNGGYVAMMANLYGEMGNWEEARRARKMIKHQNAYKPPGWSRIEIDNEVHQFYSLDKSHPETEEIYMILDSLISF

SEQ ID NO: 29641 - protein, 492 aa, Arabidopsis thaliana
  misc_feature (1)..(492): Ceres Seq. ID no. 4920471
MIVSGLSHSHFLCFKLLRFCTLRLCNLSYARFIFDRFSFPNTHLYAAVLTAYSSSLPLHASSAFSFFRLMVNRSVPRPNHFIYPLVLKSTPYLSSAFSTPLVHTHLFKSGFHLYVVVQTALLHSYASSVSHITLARQLFDEMSERNVVSWTAMLSGYARSGDISNAVALFEDMPERDVPSWNAILAACTQNGLFLEAVSLFRRMINEPSIRPNEVTVVCVLSACAQTGTLQLAKGIHAFAYRRDLSSDVFVSNSLVDLYGKCGNLEEASSVFKMASKKSLTAWNSMINCFALHGRSEEAIAVFEEMMKLNINDIKPDHITFIGLLNACTHGGLVSKGRGYFDLMTNRFGIEPRIEHYGCLIDLLGRAGRFDEALEVMSTMKMKADEAIWGSLLNACKIHGHLDLAEVAVKNLVALNPNNGGYVAMMANLYGEMGNWEEARRARKMIKHQNAYKPPGWSRIEIDNEVHQFYSLDKSHPETEEIYMILDSLISF

SEQ ID NO: 29642 - protein, 423 aa, Arabidopsis thaliana
  misc_feature (1)..(423): Ceres Seq. ID no. 4920472
MVNRSVPRPNHFIYPLVLKSTPYLSSAFSTPLVHTHLFKSGFHLYVVVQTALLHSYASSVSHITLARQLFDEMSERNVVSWTAMLSGYARSGDISNAVALFEDMPERDVPSWNAILAACTQNGLFLEAVSLFRRMINEPSIRPNEVTVVCVLSACAQTGTLQLAKGIHAFAYRRDLSSDVFVSNSLVDLYGKCGNLEEASSVFKMASKKSLTAWNSMINCFALHGRSEEAIAVFEEMMKLNINDIKPDHITFIGLLNACTHGGLVSKGRGYFDLMTNRFGIEPRIEHYGCLIDLLGRAGRFDEALEVMSTMKMKADEAIWGSLLNACKIHGHLDLAEVAVKNLVALNPNNGGYVAMMANLYGEMGNWEEARRARKMIKHQNAYKPPGWSRIEIDNEVHQFYSLDKSHPETEEIYMILDSLISF

SEQ ID NO: 29643 - DNA, 2307 bp, Arabidopsis thaliana
  misc_feature (1)..(2307): Ceres Seq. ID no. 4920616
atggggaagtattctcgtgtagacgggaagaagtcatcgggatatggcttaaccattaccatcgttttaattgtttctctatgtttggttggggcgtggatgttcatgtcttcatggtctgctccaactgagtctattgacttctctgcaaacgagaggacaaaagatgtagatactactaagagtgatttcaaaagtgaagaggttgatcgaggttccaagagttttccggatgaaaagaatgaggagacggaggttgtgacagagaccaacgaagagaagactgatcctgagaaatctggtgaggagaactctggtgagaaaacggagtcggctgaggaaagaaaggagtttgatgacaaaaatggtgatggggatagaaaaaatggagacggtgagaaagacacggaatcagaaagtgatgaaaccaagcaaaaagagaaaacacaactggaagagagctcagaagaaaacaaatctgaggatagtaatggaaccgaagagaatgctggtgaatctgaagaaaacaccgagaagaagtcagaagaaaacgctggtgaaactgaagagagcactgagaagagtaaggatgttttcccagctggtgaccaggctgaaatcacaaaggagtcaagcactggaagtggggcttggtctacccaattggtggaatcccagaacgagaagaaagcacaagtgtcctcaattaaatggaaagtctgcaatgtgacagctggaccagactacatcccttgccttgacaattggcaagctatcagaaagcttcattcgacaaagcattatgaacatcgtgagaggcattgtcccgaggagtctccacgctgccttgtttctcttcccgaagggtataagcgatccatcaagtggcctaagagcagagaaaagatctggtacaccaatattccacacaccaagcttgcagaagtcaagggacatcaaaactgggtgaagatgagtggtgaatacttaacattccctggtggaggtactcaattcaagaatggtgctcttcactacattgatttcctccaagagtcatatcctgatattgcttggggaaataggactcgtgttatattggatgttgggtgtggggttgctagctttgggggatatctttttgacagagatgtactcgctttgtcatttgcacccaaagacgaacacgaggcacaggtgcaatttgctctggaacgtggtattcctgcaatgtcaaatgttatgggaaccaagagattaccttttccaggatctgtttttgaccttatccattgtgctcgttgtagagttccttggcatatcgaaggtggtaaactacttttggagttgaaccgtgcattgaggccgggtggtttctttgtctggtcagcgactccagtctataggaagactgaggaagatgttggcatatggaaagctatgtcgaagctaacaaaggcaatgtgctgggaactgatgacgattaagaaagatgaactgaatgaagttggtgctgccatttaccagaagccaatgtcgaataaatgctacaatgaaagatctcaaaatgagccacctctctgcaaagactctgatgatcaaaatgccgcctggaatgttccacttgaggcatgtattcacaaagtaacagaagattcatcaaaacgcggagcagtttggcctgaaagttggccggaaagagtggagacggttcctcagtggttagattctcaggaaggagtatatggaaaacctgcacaagaggatttcacagcagaccatgaacgctggaagactattgtttcaaagtcatacctcaacggtatgggaatcgattggtcttatgttagaaatgtgatggacatgagagcagtctatggaggttttgctgctgcattgaaggatctgaaactgtgggtgatgaatgtagttcctatcgactcacctgatacccttccgattatatacgaacgtggtttgtttggaatctatcatgattggtgtgaatcattcagcacttaccctcggacttacgacctccttcacgctgatcatcttttctcttcactgaaaaagaggtgcaacttggtgggcgtgatggctgaagtagaccggattcttagaccacaaggaactttcatagtaagagatgacatggaaacgataggagaaattgagaagatggtgaaatcgatgaaatggaatgtaagaatgacacattccaaagatggagaaggattgctctctgttcagaagtcatggtggcgtcctacagaggccgagaccattcagtcggcaatagcttga

SEQ ID NO: 29644 - protein, 768 aa, Arabidopsis thaliana
  misc_feature (1)..(768): Ceres Seq. ID no. 4920617
MGKYSRVDGKKSSGYGLTITIVLIVSLCLVGAWMFMSSWSAPTESIDFSANERTKDVDTTKSDFKSEEVDRGSKSFPDEKNEETEVVTETNEEKTDPEKSGEENSGEKTESAEERKEFDDKNGDGDRKNGDGEKDTESESDETKQKEKTQLEESSEENKSEDSNGTEENAGESEENTEKKSEENAGETEESTEKSKDVFPAGDQAEITKESSTGSGAWSTQLVESQNEKKAQVSSIKWKVCNVTAGPDYIPCLDNWQAIRKLHSTKHYEHRERHCPEESPRCLVSLPEGYKRSIKWPKSREKIWYTNIPHTKLAEVKGHQNWVKMSGEYLTFPGGGTQFKNGALHYIDFLQESYPDIAWGNRTRVILDVGCGVASFGGYLFDRDVLALSFAPKDEHEAQVQFALERGIPAMSNVMGTKRLPFPGSVFDLIHCARCRVPWHIEGGKLLLELNRALRPGGFFVWSATPVYRKTEEDVGIWKAMSKLTKAMCWELMTIKKDELNEVGAAIYQKPMSNKCYNERSQNEPPLCKDSDDQNAAWNVPLEACIHKVTEDSSKRGAVWPESWPERVETVPQWLDSQEGVYGKPAQEDFTADHERWKTIVSKSYLNGMGIDWSYVRNVMDMRAVYGGFAAALKDLKLWVMNVVPIDSPDTLPIIYERGLFGIYHDWCESFSTYPRTYDLLHADHLFSSLKKRCNLVGVMAEVDRILRPQGTFIVRDDMETIGEIEKMVKSMKWNVRMTHSKDGEGLLSVQKSWWRPTEAETIQSAIA

SEQ ID NO: 29645 - protein, 735 aa, Arabidopsis thaliana
  misc_feature (1)..(735): Ceres Seq. ID no. 4920618
MFMSSWSAPTESIDFSANERTKDVDTTKSDFKSEEVDRGSKSFPDEKNEETEVVTETNEEKTDPEKSGEENSGEKTESAEERKEFDDKNGDGDRKNGDGEKDTESESDETKQKEKTQLEESSEENKSEDSNGTEENAGESEENTEKKSEENAGETEESTEKSKDVFPAGDQAEITKESSTGSGAWSTQLVESQNEKKAQVSSIKWKVCNVTAGPDYIPCLDNWQAIRKLHSTKHYEHRERHCPEESPRCLVSLPEGYKRSIKWPKSREKIWYTNIPHTKLAEVKGHQNWVKMSGEYLTFPGGGTQFKNGALHYIDFLQESYPDIAWGNRTRVILDVGCGVASFGGYLFDRDVLALSFAPKDEHEAQVQFALERGIPAMSNVMGTKRLPFPGSVFDLIHCARCRVPWHIEGGKLLLELNRALRPGGFFVWSATPVYRKTEEDVGIWKAMSKLTKAMCWELMTIKKDELNEVGAAIYQKPMSNKCYNERSQNEPPLCKDSDDQNAAWNVPLEACIHKVTEDSSKRGAVWPESWPERVETVPQWLDSQEGVYGKPAQEDFTADHERWKTIVSKSYLNGMGIDWSYVRNVMDMRAVYGGFAAALKDLKLWVMNVVPIDSPDTLPIIYERGLFGIYHDWCESFSTYPRTYDLLHADHLFSSLKKRCNLVGVMAEVDRILRPQGTFIVRDDMETIGEIEKMVKSMKWNVRMTHSKDGEGLLSVQKSWWRPTEAETIQSAIA

SEQ ID NO: 29646 - protein, 733 aa, Arabidopsis thaliana
  misc_feature (1)..(733): Ceres Seq. ID no. 4920619
MSSWSAPTESIDFSANERTKDVDTTKSDFKSEEVDRGSKSFPDEKNEETEVVTETNEEKTDPEKSGEENSGEKTESAEERKEFDDKNGDGDRKNGDGEKDTESESDETKQKEKTQLEESSEENKSEDSNGTEENAGESEENTEKKSEENAGETEESTEKSKDVFPAGDQAEITKESSTGSGAWSTQLVESQNEKKAQVSSIKWKVCNVTAGPDYIPCLDNWQAIRKLHSTKHYEHRERHCPEESPRCLVSLPEGYKRSIKWPKSREKIWYTNIPHTKLAEVKGHQNWVKMSGEYLTFPGGGTQFKNGALHYIDFLQESYPDIAWGNRTRVILDVGCGVASFGGYLFDRDVLALSFAPKDEHEAQVQFALERGIPAMSNVMGTKRLPFPGSVFDLIHCARCRVPWHIEGGKLLLELNRALRPGGFFVWSATPVYRKTEEDVGIWKAMSKLTKAMCWELMTIKKDELNEVGAAIYQKPMSNKCYNERSQNEPPLCKDSDDQNAAWNVPLEACIHKVTEDSSKRGAVWPESWPERVETVPQWLDSQEGVYGKPAQEDFTADHERWKTIVSKSYLNGMGIDWSYVRNVMDMRAVYGGFAAALKDLKLWVMNVVPIDSPDTLPIIYERGLFGIYHDWCESFSTYPRTYDLLHADHLFSSLKKRCNLVGVMAEVDRILRPQGTFIVRDDMETIGEIEKMVKSMKWNVRMTHSKDGEGLLSVQKSWWRPTEAETIQSAIA

SEQ ID NO: 29647 - DNA, 1977 bp, Arabidopsis thaliana
  misc_feature (1)..(1977): Ceres Seq. ID no. 4920641
atgttggcaggttgttcgagttcatcattgttgtcgcctactcgaagattgaggagtgaagcagtagcagcaacatcagcaacagtatcagcgcattttcccatgaacacacagagattggacttaccatgcagtagtagcttctctcgcaaggaaactccttctagcagaccacttggaagaagcatctctcttgacaacagcaacaacaacaacaacaaaccgatcgagcgcaagacgaagaccagtggttgttcgcttaaacagaacataaagcttccacctttggcaacaacaagaggaaatggagaagggttttcttggaacaacgacaacaacaacagagggaagagtttgaagagattagctgaggaggacgagtcttgtttgagcagagcgaagaggacaaaatgcgaaaacgaaggtggtttctggtttgagcatttcactggccaggattcttcttcaccagcattacctttttctttgacttgttcaggtgatgatgaggaaaaggtttgctttgtgccaagtgaagtcatttctcagcctttaccaaactgggttgattcggtgattacggagctagctggtataggcgataaggacgttgagagtagccttcctgcagcagttaaggaagcatctggaggatcatctacaagcgcatcatccgagagtcgtagcttaagccatagagtaccagaacctacaaatggctcaaggaatccgtactcacaccgcggtgcaacagaggaaaggaccaccggaaacatcaacaacaacaacaacaggaacgatttgcagagggatttcgagcttgtcaatttgcttacgggatgcttagacgcgatcagatcaagaaacatagcagcgattaaccatttcattgcaagaaccggtgatcttgcttctcctagaggaagaacaccaatgactcgcctcatagcttactacattgaagctttggctctaagagtggcgcgtatgtggcctcacatcttccacatcgcaccccctcgtgaattcgatagaactgtcgaagatgaatcaggaaatgcattgaggttcttgaatcaagtaaccccaattccaaagttcattcatttcacagccaacgagatgttactcagagcatttgaagggaaagagagagttcacattattgacttcgacatcaagcaaggtttacagtggcctagcttcttccaaagcttagcttcgagaataaatccaccacaccatgtacgaatcactgggatcggagaatcgaaacttgagctaaacgaaaccggagatcgcctccacggatttgcagaggcgatgaatcttcaattcgagtttcatcctgtagttgatagactcgaagacgttagactatggatgcttcacgtcaaagaaggtgaatcagtagctgtaaactgtgtcatgcagatgcacaagacactctacgatggaaccggagcagcaattagggattttttgggtttaatcagaagcacaaacccaatagctctcgttcttgcggagcaagaagcagaacacaactcagagcaacttgagacacgagtttgtaactcgctaaagtactattcagctatgtttgatgcaattcacacgaatcttgctacagatagcttaatgagagtcaaagttgaggagatgttgtttgggagagagatcaggaacattgttgcgtgtgaaggaagtcatagacaagagaggcatgtgggttttcgtcattggaggaggatgttggagcagttagggtttcggagtcttggagtctcggagagagaggttttgcagagtaagatgttgcttaggatgtacggatctgataatgaagggtttttcaatgtggagaggagcgatgaagacaacggcggtgaaggcggacgcggcggtggagttactttacggtggtcggagcagccactttatacgatctcggcttggactaccggagggaattaa

SEQ ID NO: 29648 - protein, 658 aa, Arabidopsis thaliana; identical to SEQ ID NO: 29309
  misc_feature (1)..(658): Ceres Seq. ID no. 4920642

SEQ ID NO: 29649 - protein, 624 aa, Arabidopsis thaliana; identical to SEQ ID NO: 29310
  misc_feature (1)..(624): Ceres Seq. ID no. 4920643

SEQ ID NO: 29650 - protein, 347 aa, Arabidopsis thaliana
  misc_feature (1)..(347): Ceres Seq. ID no. 4920644
MTRLIAYYIEALALRVARMWPHIFHIAPPREFDRTVEDESGNALRFLNQVTPIPKFIHFTANEMLLRAFEGKERVHIIDFDIKQGLQWPSFFQSLASRINPPHHVRITGIGESKLELNETGDRLHGFAEAMNLQFEFHPVVDRLEDVRLWMLHVKEGESVAVNCVMQMHKTLYDGTGAAIRDFLGLIRSTNPIALVLAEQEAEHNSEQLETRVCNSLKYYSAMFDAIHTNLATDSLMRVKVEEMLFGREIRNIVACEGSHRQERHVGFRHWRRMLEQLGFRSLGVSEREVLQSKMLLRMYGSDNEGFFNVERSDEDNGGEGGRGGGVTLRWSEQPLYTISAWTTGGN

SEQ ID NO: 29651 - DNA, 1368 bp, Arabidopsis thaliana
  misc_feature (1)..(1368): Ceres Seq. ID no. 4920703
atggcgggaatcccagatcatatccaagaccaacatcttgtggaggaggatcaaccctttgatctggaagattggcttccaatcacagcatcaaggaatgccaattggtattattcagctttccacaacgtcactgccattgttggtgctggcgttctcggtcttccttacgccatgtcagagcttggatggggacctggggttgtggtgttgatcctgtcatgggtgatcacgttatacaccctctggcaaatgattgagatgcatgagatgtttgaagggcaacggttcgataggtaccatgagctgggtcaggcagcctttggtaaaaagcttggtttgtacatcatcgtgcccctacaactacttgtcgagatcagtgtgtgcatagtctatatggtcactggaggtaaatccctgaagaatgtacatgaccttgctttgggagatggtgacaagtgcacaaagcttagaattcaacacttcattttgatctttgcctcttcacagttcgtgctctcccttcttaagaacttcaactccatttctggtgtctccttggtagctgctgtcatgtctgtcagctattctacaattgcttgggtagcctcgctgaggaagggtgccaccaccgggagtgtagagtacggctatagaaaaagaacaacctcagtgccattagccttcttaagtgcactgggtgaaatggcttttgcgtacgcaggtcataacgttgttttggaaattcaagcaacgatcccatcaacaccagagaacccatcaaaacgacccatgtggaagggagcggttgtagcctatatcattgtagctttctgctacttccctgtggcacttgtaggtttcaagacctttggaaacagtgttgaagagagcatcctcgaatcactaacaaaaccaacggcacttgtcattgtggccaacatgtttgtggtcatacatctcttgggaagctaccaggtgtatgcgatgcccgtgtttgacatgatcgaatctgtaatgataaggatatggcacttcagtccaacaagagttctacggtttaccatccgatggacttttgtggccgccacgatgggaatagcggtcggtttaccgtattacagcgcattgctgtcattttttgggggatttgtgttcgccccgaccacatactttatcccatgcatcatgtggctgatcctaaagaaaccaaagagatttagtctctcatggtgtatgaactggttttgcatcatttttgggcttgtgctgatgatcatagcacctattgggggactggccaaactaatctataatattcaaaagggcactctacctaattcaagatgcaacttacctaaacactga

SEQ ID NO: 29652 - protein, 455 aa, Arabidopsis thaliana
  misc_feature (1)..(455): Ceres Seq. ID no. 4920704
MAGIPDHIQDQHLVEEDQPFDLEDWLPITASRNANWYYSAFHNVTAIVGAGVLGLPYAMSELGWGPGVVVLILSWVITLYTLWQMIEMHEMFEGQRFDRYHELGQAAFGKKLGLYIIVPLQLLVEISVCIVYMVTGGKSLKNVHDLALGDGDKCTKLRIQHFILIFASSQFVLSLLKNFNSISGVSLVAAVMSVSYSTIAWVASLRKGATTGSVEYGYRKRTTSVPLAFLSALGEMAFAYAGHNVVLEIQATIPSTPENPSKRPMWKGAVVAYIIVAFCYFPVALVGFKTFGNSVEESILESLTKPTALVIVANMFVVIHLLGSYQVYAMPVFDMIESVMIRIWHFSPTRVLRFTIRWTFVAATMGIAVGLPYYSALLSFFGGFVFAPTTYFIPCIMWLILKKPKRFSLSWCMNWFCIIFGLVLMIIAPIGGLAKLIYNIQKGTLPNSRCNLPKH

SEQ ID NO: 29653 - protein, 397 aa, Arabidopsis thaliana; identical to SEQ ID NO: 29359
  misc_feature (1)..(397): Ceres Seq. ID no. 4920705

SEQ ID NO: 29654 - protein, 371 aa, Arabidopsis thaliana; identical to SEQ ID NO: 29360
  misc_feature (1)..(371): Ceres Seq. ID no. 4920706

SEQ ID NO: 29655 - DNA, 1209 bp, Arabidopsis thaliana
  misc_feature (1)..(1209): Ceres Seq. ID no. 4920718
atggaggtggataagaaggacgagagagaggctgaatcttcggagcaagtggtgaatccatgggaagtgtccgccaaagacggcgggaagatcgattacgacaagcttattgacaaatttggatgtcaaaggcttgacgagtcactgattgatcgtgttcagagactgacttctcgtcaaccacacgtgttcctccgccgtagtgtcttcttcgcccaccgggatttcaatgagattttggacgcttatgagagaggagacaagttctatctctacactggaagaggaccttcatcagaagcattgcatttggggcatttgattcctttcatgtttaccaaatacttgcaagaagctttcaaggttccccttgttatacagctcacggatgatgaaaaaagtatatggaagaacttatcggtggaggaaagtcaaagacttgccagagaaaatgcgaaagatattattgcttgtggattcgatgtaacaaagaccttcattttctcggacttcgactatgttggcggtgctttctataaaaatatggtgaaggttggcaagtgcgttacacttaataaggctatgggaatctttggcttttccggtgaagatcctatcgcgaaactcagtttccctcctgtgcaggcagttccatcttttcctagctcattcccacatttgttccctggcaaggacaatctccgctgcttgattccttgtgctattgaccaggatccttattttagaatgactcgtgatgtcgcaccccggttaggctatagcaagcccgccctgattgagtcaacattttttcctgcgttgcagggagagaatggaaaaatgtctgctagtgatccaaattctgctatctatgtgactgattccgcaaaggacattaaaaacaagataaacagatatgcgtttagtggtgggcaagactccattgagaagcaccgagaacttggagcaaatctcgaggttgacatacccgtcaagtatctgagtttcttcctcgaagacgattctgaactagaacacattaaaaaggaatatggagaaggaagaatgctaacaggagaagtaaagaagagacttacggaagtgttgacagaaattgtggagagacaccgcagggctcgagctgctgttactgatgagatggttgatgcgttcatggcggtgagacctctcccaagcatgttcgaatag

SEQ ID NO: 29656 - protein, 402 aa, Arabidopsis thaliana
  misc_feature (1)..(402): Ceres Seq. ID no. 4920719
MEVDKKDEREAESSEQVVNPWEVSAKDGGKIDYDKLIDKFGCQRLDESLIDRVQRLTSRQPHVFLRRSVFFAHRDFNEILDAYERGDKFYLYTGRGPSSEALHLGHLIPFMFTKYLQEAFKVPLVIQLTDDEKSIWKNLSVEESQRLARENAKDIIACGFDVTKTFIFSDFDYVGGAFYKNMVKVGKCVTLNKAMGIFGFSGEDPIAKLSFPPVQAVPSFPSSFPHLFPGKDNLRCLIPCAIDQDPYFRMTRDVAPRLGYSKPALIESTFFPALQGENGKMSASDPNSAIYVTDSAKDIKNKINRYAFSGGQDSIEKHRELGANLEVDIPVKYLSFFLEDDSELEHIKKEYGEGRMLTGEVKKRLTEVLTEIVERHRRARAAVTDEMVDAFMAVRPLPSMFE

SEQ ID NO: 29657 - protein, 292 aa, Arabidopsis thaliana
  misc_feature (1)..(292): Ceres Seq. ID no. 4920720
MFTKYLQEAFKVPLVIQLTDDEKSIWKNLSVEESQRLARENAKDIIACGFDVTKTFIFSDFDYVGGAFYKNMVKVGKCVTLNKAMGIFGFSGEDPIAKLSFPPVQAVPSFPSSFPHLFPGKDNLRCLIPCAIDQDPYFRMTRDVAPRLGYSKPALIESTFFPALQGENGKMSASDPNSAIYVTDSAKDIKNKINRYAFSGGQDSIEKHRELGANLEVDIPVKYLSFFLEDDSELEHIKKEYGEGRMLTGEVKKRLTEVLTEIVERHRRARAAVTDEMVDAFMAVRPLPSMFE

SEQ ID NO: 29658 - protein, 221 aa, Arabidopsis thaliana
  misc_feature (1)..(221): Ceres Seq. ID no. 4920721
MVKVGKCVTLNKAMGIFGFSGEDPIAKLSFPPVQAVPSFPSSFPHLFPGKDNLRCLIPCAIDQDPYFRMTRDVAPRLGYSKPALIESTFFPALQGENGKMSASDPNSAIYVTDSAKDIKNKINRYAFSGGQDSIEKHRELGANLEVDIPVKYLSFFLEDDSELEHIKKEYGEGRMLTGEVKKRLTEVLTEIVERHRRARAAVTDEMVDAFMAVRPLPSMFE

SEQ ID NO: 29659 - DNA, 1533 bp, Arabidopsis thaliana
  misc_feature (1)..(1533): Ceres Seq. ID no. 4920891
atgaagatcaaagtcgcagctcgtcacatctcttaccgaactctcttccacactatcttaatcctcgctttcttgttaccttttgttttcatcctaaccgctgttgttacccttgaaggtgtcaacaagtgctcctcttttgattgtttcgggaggcggctaggaccacgtcttcttggtaggatagatgattcagagcagagactagttagagatttttacaaaattctaaatgaagtaagcactcaagaaattccagatggtttaaagcttccagagtcttttagtcaactggtttcggatatgaagaacaaccactatgatgctaaaacatttgccctcgtatttcgagctatggtagagaagtttgaaagggatttaagggaatccaaatttgcagaactcatgaacaagcactttgctgcaagttcaattccaaaaggaattcactgtctctctttaagactaaccgatgaatattcctccaatgctcatgcccggagacagcttccttccccggagcttctccctgttctctcagacaatgcttaccaccattttgttctagctacagataatatcttagctgcatcggttgtggtctcatctgctgttcaatcatcttcaaaacccgagaaaattgtcttccatgttatcacagacaagaaaacctatgcgggtatgcattcttggtttgcactcaattctgttgctcctgcgattgttgaagtgaaaagcgttcatcagtttgattggttaacaagagagaatgttccagttcttgaagctgtggaaagccataacagtatcagaaattattaccatgggaatcatattgctggtgcaaacctcagcgaaacaacccctcgaacatttgcttcgaaactgcagtcaagaagtcccaaatacatatctttgctcaaccatcttagaatatatctaccagagctttttccgaacttagacaaggtagtgttcttagatgatgatatagtgatacagaaagatttatctccgctttgggatattgaccttaacgggaaggttaatggagctgtggagacttgtcgaggagaagacgtatgggttatgtcaaagcgtcttaggaactacttcaatttttctcacccgctcatcgcaaagcatttagatcccgaagaatgtgcttgggcttatggaatgaatatctttgatctacggacttggaggaagacaaatatcagagaaacgtatcattcttggcttaaagagaatctgaagtcgaatctaacaatgtggaaacttggaacattgcctcctgctctaatagcatttaaaggtcatgttcagccaatagattcctcttggcatatgcttggattaggttatcagagcaagaccaacttagaaaatgcgaagaaagctgcagtgattcattacaatggccaatcaaagccgtggcttgagataggtttcgagcatctcagaccattctggacaaaatatgttaactactccaatgatttcattaagaattgtcatatcttggaatag

SEQ ID NO: 29660 - protein, 510 aa, Arabidopsis thaliana
  misc_feature (1)..(510): Ceres Seq. ID no. 4920892
MKIKVAARHISYRTLFHTILILAFLLPFVFILTAVVTLEGVNKCSSFDCFGRRLGPRLLGRIDDSEQRLVRDFYKILNEVSTQEIPDGLKLPESFSQLVSDMKNNHYDAKTFALVFRAMVEKFERDLRESKFAELMNKHFAASSIPKGIHCLSLRLTDEYSSNAHARRQLPSPELLPVLSDNAYHHFVLATDNILAASVVVSSAVQSSSKPEKIVFHVITDKKTYAGMHSWFALNSVAPAIVEVKSVHQFDWLTRENVPVLEAVESHNSIRNYYHGNHIAGANLSETTPRTFASKLQSRSPKYISLLNHLRIYLPELFPNLDKVVFLDDDIVIQKDLSPLWDIDLNGKVNGAVETCRGEDVWVMSKRLRNYFNFSHPLIAKHLDPEECAWAYGMNIFDLRTWRKTNIRETYHSWLKENLKSNLTMWKLGTLPPALIAFKGHVQPIDSSWHMLGLGYQSKTNLENAKKAAVIHYNGQSKPWLEIGFEHLRPFWTKYVNYSNDFIKNCHILE

SEQ ID NO: 29661 - protein, 409 aa, Arabidopsis thaliana
  misc_feature (1)..(409): Ceres Seq. ID no. 4920893
MKNNHYDAKTFALVFRAMVEKFERDLRESKFAELMNKHFAASSIPKGIHCLSLRLTDEYSSNAHARRQLPSPELLPVLSDNAYHHFVLATDNILAASVVVSSAVQSSSKPEKIVFHVITDKKTYAGMHSWFALNSVAPAIVEVKSVHQFDWLTRENVPVLEAVESHNSIRNYYHGNHIAGANLSETTPRTFASKLQSRSPKYISLLNHLRIYLPELFPNLDKVVFLDDDIVIQKDLSPLWDIDLNGKVNGAVETCRGEDVWVMSKRLRNYFNFSHPLIAKHLDPEECAWAYGMNIFDLRTWRKTNIRETYHSWLKENLKSNLTMWKLGTLPPALIAFKGHVQPIDSSWHMLGLGYQSKTNLENAKKAAVIHYNGQSKPWLEIGFEHLRPFWTKYVNYSNDFIKNCHILE

SEQ ID NO: 29662 - protein, 392 aa, Arabidopsis thaliana
  misc_feature (1)..(392): Ceres Seq. ID no. 4920894
MVEKFERDLRESKFAELMNKHFAASSIPKGIHCLSLRLTDEYSSNAHARRQLPSPELLPVLSDNAYHHFVLATDNILAASVVVSSAVQSSSKPEKIVFHVITDKKTYAGMHSWFALNSVAPAIVEVKSVHQFDWLTRENVPVLEAVESHNSIRNYYHGNHIAGANLSETTPRTFASKLQSRSPKYISLLNHLRIYLPELFPNLDKVVFLDDDIVIQKDLSPLWDIDLNGKVNGAVETCRGEDVWVMSKRLRNYFNFSHPLIAKHLDPEECAWAYGMNIFDLRTWRKTNIRETYHSWLKENLKSNLTMWKLGTLPPALIAFKGHVQPIDSSWHMLGLGYQSKTNLENAKKAAVIHYNGQSKPWLEIGFEHLRPFWTKYVNYSNDFIKNCHILE

SEQ ID NO: 29663 - DNA, 1563 bp, Arabidopsis thaliana
  misc_feature (1)..(1563): Ceres Seq. ID no. 4920902
atgaatgtgtgtccactggagttcaatgagtatataccttgtcacaatgtcacctatgtgcatcagctgctaccaagcttgaatctttctagaagagaagacctcgaaaggcattgcccgccactcgagcaccgccttttttgcttggtacctccgccaaatgattataagatacctattagatggccaaccagtagagactatgtatggagaagtaatgtgaaccatacacatcttgctcaagttaaaggtggccaaaattgggtccatgagcaaggtcagttttggtggttccctggtggtggtactcattttaagcatggagctgcagaatacatccagaggttggggaatatgatgactaatgaaacaggtgacttgcgttcagctggggtggtacaagttcttgatgttggctgtggagttgcgagctttgcggcttatcttcttcccttaggtatacagacaatttcatttgctcccaaagatggtcatgaaaaccagattcagtttgcattggagagaggcattggtgcaatgatatccgcggttgccaccaaacaattgccatatcctgcagcctcgtttgagatggttcattgttcgagatgtcgtgttgactggcatacaaatgatggcatcttacttaaagaagttcatcgtcttctccgaccaaatggattcttcgtgtattcatcaccaccagcatatagaaaggataaagagtatcctatgatttgggataagttggtcaatctaactagtgcaatgtgctggaagcttatttcccggaaggtacagactgcaatatggattaaagaagagaaggaggtttgtcttaagcagaaagcagagctaaagctaataagtttatgtgatgtggaagatgttttgaaaccatcatggaaagttcctcttaaagattgtgtgcaaatcagtggacaaacagaagagagaccctcttctttagctgaacgtctttctgcatatccagcaactctaagaaaaatagggatcagtgaagatgaatatacatcagatacagtgttctggagagaacaagttaatcattactggcggttaatgaatgtcaatgagactgaagtacggaatgtgatggacatgaacgcattcattggtggttttgctgcagctatgaattcgtatcctgtttgggtaatgaacatagtacctgcaaccatgaatgataccttgtctggaattttcgagagaggcttaaatggcgctttccatgattggtgtgaggcgttctcaacatatccacgcacgtatgatttggtgcattccgatcatgtcttctctcactacaacaaaagctacggagatggttgtttgctagaggatatcatgcttgagatggaccgcatagttcgccctcaggggtttgtcataataagggacgaggaatatatcatctcaaggatccgaggcttggctccaaaattcttgtgggaagtggaaactcatgagcttgaaaacaaagacaagaagataacagagtctgttttgttttgcagaaagagattctgggcaatcatttga

SEQ ID NO: 29664 - protein, 520 aa, Arabidopsis thaliana
  misc_feature (1)..(520): Ceres Seq. ID no. 4920903
MNVCPLEFNEYIPCHNVTYVHQLLPSLNLSRREDLERHCPPLEHRLFCLVPPPNDYKIPIRWPTSRDYVWRSNVNHTHLAQVKGGQNWVHEQGQFWWFPGGGTHFKHGAAEYIQRLGNMMTNETGDLRSAGVVQVLDVGCGVASFAAYLLPLGIQTISFAPKDGHENQIQFALERGIGAMISAVATKQLPYPAASFEMVHCSRCRVDWHTNDGILLKEVHRLLRPNGFFVYSSPPAYRKDKEYPMIWDKLVNLTSAMCWKLISRKVQTAIWIKEEKEVCLKQKAELKLISLCDVEDVLKPSWKVPLKDCVQISGQTEERPSSLAERLSAYPATLRKIGISEDEYTSDTVFWREQVNHYWRLMNVNETEVRNVMDMNAFIGGFAAAMNSYPVWVMNIVPATMNDTLSGIFERGLNGAFHDWCEAFSTYPRTYDLVHSDHVFSHYNKSYGDGCLLEDIMLEMDRIVRPQGFVIIRDEEYIISRIRGLAPKFLWEVETHELENKDKKITESVLFCRKRFWAII

SEQ ID NO: 29665 - protein, 402 aa, Arabidopsis thaliana
  misc_feature (1)..(402): Ceres Seq. ID no. 4920904
MMTNETGDLRSAGVVQVLDVGCGVASFAAYLLPLGIQTISFAPKDGHENQIQFALERGIGAMISAVATKQLPYPAASFEMVHCSRCRVDWHTNDGILLKEVHRLLRPNGFFVYSSPPAYRKDKEYPMIWDKLVNLTSAMCWKLISRKVQTAIWIKEEKEVCLKQKAELKLISLCDVEDVLKPSWKVPLKDCVQISGQTEERPSSLAERLSAYPATLRKIGISEDEYTSDTVFWREQVNHYWRLMNVNETEVRNVMDMNAFIGGFAAAMNSYPVWVMNIVPATMNDTLSGIFERGLNGAFHDWCEAFSTYPRTYDLVHSDHVFSHYNKSYGDGCLLEDIMLEMDRIVRPQGFVIIRDEEYIISRIRGLAPKFLWEVETHELENKDKKITESVLFCRKRFWAII

SEQ ID NO: 29666 - protein, 401 aa, Arabidopsis thaliana
  misc_feature (1)..(401): Ceres Seq. ID no. 4920905
MTNETGDLRSAGVVQVLDVGCGVASFAAYLLPLGIQTISFAPKDGHENQIQFALERGIGAMISAVATKQLPYPAASFEMVHCSRCRVDWHTNDGILLKEVHRLLRPNGFFVYSSPPAYRKDKEYPMIWDKLVNLTSAMCWKLISRKVQTAIWIKEEKEVCLKQKAELKLISLCDVEDVLKPSWKVPLKDCVQISGQTEERPSSLAERLSAYPATLRKIGISEDEYTSDTVFWREQVNHYWRLMNVNETEVRNVMDMNAFIGGFAAAMNSYPVWVMNIVPATMNDTLSGIFERGLNGAFHDWCEAFSTYPRTYDLVHSDHVFSHYNKSYGDGCLLEDIMLEMDRIVRPQGFVIIRDEEYIISRIRGLAPKFLWEVETHELENKDKKITESVLFCRKRFWAII

SEQ ID NO: 29667 - DNA, 852 bp, Arabidopsis thaliana
  misc_feature (1)..(852): Ceres Seq. ID no. 4921051
atggcgtcgtcgtctctcatgtatgtctctcctccagagtctatcctgtgggagaaacgttcgaaggcgattcttgataatataaagaattttgaagctgatttcatctgtctacaagaagtagacgagtaccatagttttttcgatagaaacatggaagctcaaggatactctggaattcctattgaaaataaagaaggctatgaatgcgcaatctttttcaagcccaaatttgcagagttcattacataccaaacaaccagaatccaaggatacaccaaatatgaaaacctttgcgtggcgccgagtagtagtaccgtaagtagtgagtctagtgacgttgttaacgctgaagagctttctgtggtaatggtagcgttcaagattttaaaaccatttaatcatgtcgttattattgcaagctctcatttaaaatccgggaaacctgatcgatgggatgatttaaagctagctcaagtcaagactctaatgactgaattagcctcgttcaaggagattatatcagcgctaacaaattgcagtccatcggtgatccttgctggtgacttcaattcgaaaccctacgtgcataaatacataaattcagacaatataccgtctgatattgatctacgaagtgtgtatgaatttacgaaaggagagccaaggttcacaaataatgtgccagggtttgctgaaacactcgattacatgttctacacgcattctgaaattatttctcctgtgaagctcctggattcgccggacgaagtcgatttcttacccaatgaaattcatccgagtgatcatttacccatcggcgttgagtttgagatcaaccgaaacatatag

SEQ ID NO: 29668 - protein, 283 aa, Arabidopsis thaliana; identical to SEQ ID NO: 29184
  misc_feature (1)..(283): Ceres Seq. ID no. 4921052

SEQ ID NO: 29669 - protein, 277 aa, Arabidopsis thaliana; identical to SEQ ID NO: 29185
  misc_feature (1)..(277): Ceres Seq. ID no. 4921053

SEQ ID NO: 29670 - protein, 232 aa, Arabidopsis thaliana
  misc_feature (1)..(232): Ceres Seq. ID no. 4921054
MEAQGYSGIPIENKEGYECAIFFKPKFAEFITYQTTRIQGYTKYENLCVAPSSSTVSSESSDVVNAEELSVVMVAFKILKPFNHVVIIASSHLKSGKPDRWDDLKLAQVKTLMTELASFKEIISALTNCSPSVILAGDFNSKPYVHKYINSDNIPSDIDLRSVYEFTKGEPRFTNNVPGFAETLDYMFYTHSEIISPVKLLDSPDEVDFLPNEIHPSDHLPIGVEFEINRNI

SEQ ID NO: 29671 - DNA, 1200 bp, Arabidopsis thaliana
  misc_feature (1)..(1200): Ceres Seq. ID no. 4922754
atgggagcggtgacgtcatcaatggcggcgaagtttgcgtttttcccgccaaatccgccgtcgtacggcgtagaagtggtggaaggaaagctgaggctgattggtgtagagaacgtgaaggagaatgttgaagtattgaagctgaagacgaagagaggtaatcaggtggttgcggcgtatattaagaatcctacagcttcacttacgcttctttattctcatggtaacgccgcggatcttggtcagatgttcgagcttttctccgagcttagcctccatcttcgtgttaacttaattgggtatgattattcgggttatgggagatcttcagggaagcctagtgagcagaacacgtatagcgatatagaagcagtgtatagatgcttggaagagaagtatggtgtgaaggaacaagatgttatcttatatggacaatctgtaggaagcggcccgactttagaattggcttctcggttacctaacctacgagccgtggttcttcatagcgctattgcttccggacttagagtcatgtaccctgttaaacgaacttactggttcgacatttacaagaatgtcgagaagatatcgtttgtcaaatgtccggttttagtaatacacggaacatcagatgatgttgttaattggtctcatgggaagcaattatttgagctatgtaaagaaaaatatgaaccgctttggatcaaaggagggaaccattgtgatttagagttatatccgcaatacataaagcatctaagaaaatttgtatcggcgattgaaaagtcgccgatacttagaaatggaccggtgccactaacagagaaggcaaggagtagtacggatattagagaacctgcaagaccaagcacagatcagagagataaatcaagaacaagcacggatcaaagagagatgccgaagctgagtacagatatagcgagagcaagcgttgataagagggagagaacgagaagaagcgttgatgggactgagaaaccgagtaattccgcggaacagcaactagtacaaccagagaaaggaaggaatagcattgacaggtacatttctcagagtttctatgatgtgttgatgatcatgttgttgatgatcatgtatgataacaggtttggggagatgataagatcagtaggattttgcaacatagattgtttcaagcctacagcaacagctaagtga

SEQ ID NO: 29672 - protein, 399 aa, Arabidopsis thaliana
  misc_feature (1)..(399): Ceres Seq. ID no. 4922755
MGAVTSSMAAKFAFFPPNPPSYGVEVVEGKLRLIGVENVKENVEVLKLKTKRGNQVVAAYIKNPTASLTLLYSHGNAADLGQMFELFSELSLHLRVNLIGYDYSGYGRSSGKPSEQNTYSDIEAVYRCLEEKYGVKEQDVILYGQSVGSGPTLELASRLPNLRAVVLHSAIASGLRVMYPVKRTYWFDIYKNVEKISFVKCPVLVIHGTSDDVVNWSHGKQLFELCKEKYEPLWIKGGNHCDLELYPQYIKHLRKFVSAIEKSPILRNGPVPLTEKARSSTDIREPARPSTDQRDKSRTSTDQREMPKLSTDIARASVDKRERTRRSVDGTEKPSNSAEQQLVQPEKGRNSIDRYISQSFYDVLMIMLLMIMYDNRFGEMIRSVGFCNIDCFKPTATAK

SEQ ID NO: 29673 - protein, 392 aa, Arabidopsis thaliana
  misc_feature (1)..(392): Ceres Seq. ID no. 4922756
MAAKFAFFPPNPPSYGVEVVEGKLRLIGVENVKENVEVLKLKTKRGNQVVAAYIKNPTASLTLLYSHGNAADLGQMFELFSELSLHLRVNLIGYDYSGYGRSSGKPSEQNTYSDIEAVYRCLEEKYGVKEQDVILYGQSVGSGPTLELASRLPNLRAVVLHSAIASGLRVMYPVKRTYWFDIYKNVEKISFVKCPVLVIHGTSDDVVNWSHGKQLFELCKEKYEPLWIKGGNHCDLELYPQYIKHLRKFVSAIEKSPILRNGPVPLTEKARSSTDIREPARPSTDQRDKSRTSTDQREMPKLSTDIARASVDKRERTRRSVDGTEKPSNSAEQQLVQPEKGRNSIDRYISQSFYDVLMIMLLMIMYDNRFGEMIRSVGFCNIDCFKPTATAK

SEQ ID NO: 29674 - protein, 317 aa, Arabidopsis thaliana
  misc_feature (1)..(317): Ceres Seq. ID no. 4922757
MFELFSELSLHLRVNLIGYDYSGYGRSSGKPSEQNTYSDIEAVYRCLEEKYGVKEQDVILYGQSVGSGPTLELASRLPNLRAVVLHSAIASGLRVMYPVKRTYWFDIYKNVEKISFVKCPVLVIHGTSDDVVNWSHGKQLFELCKEKYEPLWIKGGNHCDLELYPQYIKHLRKFVSAIEKSPILRNGPVPLTEKARSSTDIREPARPSTDQRDKSRTSTDQREMPKLSTDIARASVDKRERTRRSVDGTEKPSNSAEQQLVQPEKGRNSIDRYISQSFYDVLMIMLLMIMYDNRFGEMIRSVGFCNIDCFKPTATAK

SEQ ID NO: 29675 - DNA, 1854 bp, Arabidopsis thaliana
  misc_feature (1)..(1854): Ceres Seq. ID no. 4924786
atgttttcgttatcgttaatccaaccgcgtctccggatttcagagattccggtgactcaatcctacaaatctccgacgatatgttacagtagcgattcaagaactaagcgagaggaacagagacacgtgagattacctgggtttcgattagtttctggaaagagagcatctttcgattcgggttttagtggtttcaaaggagagaatgtgaatcaggatgattcgtcttctttcgatagcgaaagagttgattatgctctgttagcggagtggctacagtcttctaatgggatgcgactcattaaaaggatccatgcgatggcgttgaagtgttttgatgatcaagttatctattttgggaacaatttgattagttcttgtgttagacttggtgatttggtttatgcacgtaaagtgttcgacagtatgcctgagaaaaatactgttacttggactgctatgattgatgggtatttgaagtatggtcttgaggatgaggcttttgcactgtttgaggattatgtgaagcatggaatacgttttacgaacgagaggatgtttgtgtgtttgttgaatctgtgtagtaggagagcagagtttgagttagggagacaagttcatggtaatatggtgaaagttggagtggggaatctcattgtggagagttctcttgtttatttttatgcgcaatgcggtgaattgacaagtgcgttacgagcttttgatatgatggaggagaaagatgtgatatcttggactgctgttatatcggcgtgttcgagaaaagggcatggaattaaagctataggcatgtttatcggaatgttgaatcactggtttttgcctaacgagtttacggtgtgcagtattttgaaggcttgtagtgaggagaaagcgttaagattcggaaggcaagtacacagcttggttgttaagaggatgataaagacagatgtttttgtgggaacttcgctgatggacatgtatgctaagtgtggggagatttctgattgcagaaaagtgtttgatggaatgagtaatagaaacacggtcacatggacttcgattatagctgctcatgctcgggaaggttttggtgaggaagctatcagcctcttccggataatgaagaggcggcatttgattgctaacaatttgacagtagtaagcattcttagagcgtgtggatctgttggagctttattgttggggaaggaacttcatgcacagattatcaagaattcgatcgaaaagaatgtctatataggaagtactttggtgtggctgtattgtaaatgcggagaatctcgtgacgctttcaatgttctccagcaattgccatctagagatgtggtttcatggaccgctatgatctctggatgttcgagcttaggacatgaatcggaagcgctagacttcttgaaagagatgattcaagaaggtgtagagccaaacccatttacatactcctcggctttaaaagcttgtgcgaattcagaatctcttcttatcggtagatcaatccattccattgcaaagaagaatcatgctctatcaaatgtctttgtgggaagtgctttgattcacatgtatgcaaaatgtggatttgtctcggaagcttttcgggtttttgacagtatgcctgagaagaacttggtttcatggaaggcgatgataatgggttatgcgaggaatgggttttgcagggaagcattgaagctaatgtatagaatggaggcagagggatttgaagttgatgattatatatttgcaacaattctctctacttgtggagatattgagctcgatgaagctgttgaatcttctgcaacttgttacttggagacatcttga

SEQ ID NO: 29676 - protein, 617 aa, Arabidopsis thaliana
  misc_feature (1)..(617): Ceres Seq. ID no. 4924787
MFSLSLIQPRLRISEIPVTQSYKSPTICYSSDSRTKREEQRHVRLPGFRLVSGKRASFDSGFSGFKGENVNQDDSSSFDSERVDYALLAEWLQSSNGMRLIKRIHAMALKCFDDQVIYFGNNLISSCVRLGDLVYARKVFDSMPEKNTVTWTAMIDGYLKYGLEDEAFALFEDYVKHGIRFTNERMFVCLLNLCSRRAEFELGRQVHGNMVKVGVGNLIVESSLVYFYAQCGELTSALRAFDMMEEKDVISWTAVISACSRKGHGIKAIGMFIGMLNHWFLPNEFTVCSILKACSEEKALRFGRQVHSLVVKRMIKTDVFVGTSLMDMYAKCGEISDCRKVFDGMSNRNTVTWTSIIAAHAREGFGEEAISLFRIMKRRHLIANNLTVVSILRACGSVGALLLGKELHAQIIKNSIEKNVYIGSTLVWLYCKCGESRDAFNVLQQLPSRDVVSWTAMISGCSSLGHESEALDFLKEMIQEGVEPNPFTYSSALKACANSESLLIGRSIHSIAKKNHALSNVFVGSALIHMYAKCGFVSEAFRVFDSMPEKNLVSWKAMIMGYARNGFCREALKLMYRMEAEGFEVDDYIFATILSTCGDIELDEAVESSATCYLETS

SEQ ID NO: 29677 - protein, 520 aa, Arabidopsis thaliana
  misc_feature (1)..(520): Ceres Seq. ID no. 4924788
MRLIKRIHAMALKCFDDQVIYFGNNLISSCVRLGDLVYARKVFDSMPEKNTVTWTAMIDGYLKYGLEDEAFALFEDYVKHGIRFTNERMFVCLLNLCSRRAEFELGRQVHGNMVKVGVGNLIVESSLVYFYAQCGELTSALRAFDMMEEKDVISWTAVISACSRKGHGIKAIGMFIGMLNHWFLPNEFTVCSILKACSEEKALRFGRQVHSLVVKRMIKTDVFVGTSLMDMYAKCGEISDCRKVFDGMSNRNTVTWTSIIAAHAREGFGEEAISLFRIMKRRHLIANNLTVVSILRACGSVGALLLGKELHAQIIKNSIEKNVYIGSTLVWLYCKCGESRDAFNVLQQLPSRDVVSWTAMISGCSSLGHESEALDFLKEMIQEGVEPNPFTYSSALKACANSESLLIGRSIHSIAKKNHALSNVFVGSALIHMYAKCGFVSEAFRVFDSMPEKNLVSWKAMIMGYARNGFCREALKLMYRMEAEGFEVDDYIFATILSTCGDIELDEAVESSATCYLETS

SEQ ID NO: 29678 - protein, 511 aa, Arabidopsis thaliana
  misc_feature (1)..(511): Ceres Seq. ID no. 4924789
MALKCFDDQVIYFGNNLISSCVRLGDLVYARKVFDSMPEKNTVTWTAMIDGYLKYGLEDEAFALFEDYVKHGIRFTNERMFVCLLNLCSRRAEFELGRQVHGNMVKVGVGNLIVESSLVYFYAQCGELTSALRAFDMMEEKDVISWTAVISACSRKGHGIKAIGMFIGMLNHWFLPNEFTVCSILKACSEEKALRFGRQVHSLVVKRMIKTDVFVGTSLMDMYAKCGEISDCRKVFDGMSNRNTVTWTSIIAAHAREGFGEEAISLFRIMKRRHLIANNLTVVSILRACGSVGALLLGKELHAQIIKNSIEKNVYIGSTLVWLYCKCGESRDAFNVLQQLPSRDVVSWTAMISGCSSLGHESEALDFLKEMIQEGVEPNPFTYSSALKACANSESLLIGRSIHSIAKKNHALSNVFVGSALIHMYAKCGFVSEAFRVFDSMPEKNLVSWKAMIMGYARNGFCREALKLMYRMEAEGFEVDDYIFATILSTCGDIELDEAVESSATCYLETS

SEQ ID NO: 29679 - DNA, 1885 bp, Arabidopsis thaliana
  misc_feature (1)..(1885): Ceres Seq. ID no. 4924830
aaaaccaaacccacaaagtctctctctcttgctctctcggtgattcgattttcagaaccgaaactccggcgaaaagattatggcgggacagtcacgaaaatggatgatactggtggcgacgatatggattcaagctttcaccgggacgaatttcgatttctcagcttactcgtcagatttgaaatcggttctagggatttcacaggtgcagctaaactacctcgccgtggcttcggatctcggaaaagtattcggatggtcgtcgggactagcgcttatgtatttcccgctttggacggtgcttttcgcggcggcgtttatgggattcgtcggttatggagttcagtggcttgtcatcactcatttcatctctttgccttatatcatggtgtttctctgttgcttacttgctggtttaagtatctgttggttcaacactgtctgctttgtgctctgcattagtaacttccctgcaaacagatcacttgctctttccctcacagtgagtttcaatggtgtaagcgctgctttatatactcttgcttacaacgcaatcaatccaacttctccagagctatatcttcttttgaacgctcttataccgctcattgtctctttcactgctatcatcccgattcttcgtcaaccgccttttgagcctcttccaccagatggagttcgtcgtgactctctcatgtttctattgctcaacatactcgctgctttaaacggtgtttatctccttctctttggatcaaactcctctgatttaacctctgctcgtctactctttggtggagcaatcctcctcttggtattccctttatgtattcccggtttagtcatcgcccggaattggtataaccgcacaatccacactagtttccgtctagaaggttctggtttcattcttgttgatcctgatgagcttgagttgcataaagggatgcttgcacatgaagcaaaccgtgaaggttaccaattgctgagtgacgatgtggtgcaaaacccggttaagtccgtagctgttgaggaagaggatagtgatgagtcatgttgcaagaaacttatcacaagagatcagcttgaaggtttggggattgaacattctttgtcgctgctcttaaccagatcagatttttggttatactatatcacgtacttctgcggtggaaccattggacttgtgtacagcaacaaccttggacagattgctcaatctttaggacaaagctcaaataccacaactcttgtcacactttattctgctttctcattctttggaagattgctttctgcaacaccagattatatccgagcgaaggtttattttgccagaaccgggtggttagcaatcgcgctattaccaacccccttcgcacttttcttgcttgcatcatcaggaactgcatcagcattacaagctggaacagcgctgatgggtttaagctccgggtttatctttgcagcagcggtttccatcacatcagagctttttggaccaaacagtgttggagttaaccacaatatcttaatcacaaacataccgataggatcattgatctatggattcttggctgcattggtctatgactcacatggtttcaccgggaccaaatcaatgacctcggagtcggtggtgtgtatgggacgagattgttattacttgacctttgtgtggtggggttgcttgtctcttcttgggctaggttcgagtcttgtgttgtttattagaactagacgagcttatcaacggtttgaacaagctcgtataagttcgaacatcaacgactcttagaaatttgcatcaaccccaacggtttgtgtgtatatgtaggatctaaattataacagacggattaatggtattttagtggattttggc

SEQ ID NO: 29680 - protein, 572 aa, Arabidopsis thaliana
  misc_feature (1)..(572): Ceres Seq. ID no. 4924831
MAGQSRKWMILVATIWIQAFTGTNFDFSAYSSDLKSVLGISQVQLNYLAVASDLGKVFGWSSGLALMYFPLWTVLFAAAFMGFVGYGVQWLVITHFISLPYIMVFLCCLLAGLSICWFNTVCFVLCISNFPANRSLALSLTVSFNGVSAALYTLAYNAINPTSPELYLLLNALIPLIVSFTAIIPILRQPPFEPLPPDGVRRDSLMFLLLNILAALNGVYLLLFGSNSSDLTSARLLFGGAILLLVFPLCIPGLVIARNWYNRTIHTSFRLEGSGFILVDPDELELHKGMLAHEANREGYQLLSDDVVQNPVKSVAVEEEDSDESCCKKLITRDQLEGLGIEHSLSLLLTRSDFWLYYITYFCGGTIGLVYSNNLGQIAQSLGQSSNTTTLVTLYSAFSFFGRLLSATPDYIRAKVYFARTGWLAIALLPTPFALFLLASSGTASALQAGTALMGLSSGFIFAAAVSITSELFGPNSVGVNHNILITNIPIGSLIYGFLAALVYDSHGFTGTKSMTSESVVCMGRDCYYLTFVWWGCLSLLGLGSSLVLFIRTRRAYQRFEQARISSNINDS

SEQ ID NO: 29681 - protein, 564 aa, Arabidopsis thaliana
  misc_feature (1)..(564): Ceres Seq. ID no. 4924832
MILVATIWIQAFTGTNFDFSAYSSDLKSVLGISQVQLNYLAVASDLGKVFGWSSGLALMYFPLWTVLFAAAFMGFVGYGVQWLVITHFISLPYIMVFLCCLLAGLSICWFNTVCFVLCISNFPANRSLALSLTVSFNGVSAALYTLAYNAINPTSPELYLLLNALIPLIVSFTAIIPILRQPPFEPLPPDGVRRDSLMFLLLNILAALNGVYLLLFGSNSSDLTSARLLFGGAILLLVFPLCIPGLVIARNWYNRTIHTSFRLEGSGFILVDPDELELHKGMLAHEANREGYQLLSDDVVQNPVKSVAVEEEDSDESCCKKLITRDQLEGLGIEHSLSLLLTRSDFWLYYITYFCGGTIGLVYSNNLGQIAQSLGQSSNTTTLVTLYSAFSFFGRLLSATPDYIRAKVYFARTGWLAIALLPTPFALFLLASSGTASALQAGTALMGLSSGFIFAAAVSITSELFGPNSVGVNHNILITNIPIGSLIYGFLAALVYDSHGFTGTKSMTSESVVCMGRDCYYLTFVWWGCLSLLGLGSSLVLFIRTRRAYQRFEQARISSNINDS

SEQ ID NO: 29682 - protein, 506 aa, Arabidopsis thaliana
  misc_feature (1)..(506): Ceres Seq. ID no. 4924833
MYFPLWTVLFAAAFMGFVGYGVQWLVITHFISLPYIMVFLCCLLAGLSICWFNTVCFVLCISNFPANRSLALSLTVSFNGVSAALYTLAYNAINPTSPELYLLLNALIPLIVSFTAIIPILRQPPFEPLPPDGVRRDSLMFLLLNILAALNGVYLLLFGSNSSDLTSARLLFGGAILLLVFPLCIPGLVIARNWYNRTIHTSFRLEGSGFILVDPDELELHKGMLAHEANREGYQLLSDDVVQNPVKSVAVEEEDSDESCCKKLITRDQLEGLGIEHSLSLLLTRSDFWLYYITYFCGGTIGLVYSNNLGQIAQSLGQSSNTTTLVTLYSAFSFFGRLLSATPDYIRAKVYFARTGWLAIALLPTPFALFLLASSGTASALQAGTALMGLSSGFIFAAAVSITSELFGPNSVGVNHNILITNIPIGSLIYGFLAALVYDSHGFTGTKSMTSESVVCMGRDCYYLTFVWWGCLSLLGLGSSLVLFIRTRRAYQRFEQARISSNINDS

SEQ ID NO: 29683 - DNA, 2259 bp, Arabidopsis thaliana
  misc_feature (1)..(2259): Ceres Seq. ID no. 4924965
atgtcgtcaggagagtgtagcaatgtgcagttagatgatcataggaagaataacttagagattgatgaagggagagaatttgaatcaaaagaggaagcttttgagttctacaaagaatatgctaactctgttggttttactaccattattaaagctagtcgtcgttcaagaatgaccgggaaatttattgatgccaagtttgtttgtacgcgatatggaagcaagaaagaagacatagatactggtttaggtactgatggatttaacattcctcaagcaagaaaacgtggtagaattaaccggtcatcgtcgaaaaccgattgtaaagcttttttacatgttaagagaaggcaagatgggaggtgggttgttcgtagtttggtaaaagaacataaccatgaaatcttcactggtcaagctgattccttaagagaattgagtgggaggagaaaactcgagaaactaaacggtgctattgttaaagaggtgaaaagcaggaagcttgaggatggggatgttgaaagacttttaaacttctttactgatatgcaagttgagaatcctttcttcttttattccattgatctcagtgaggagcagagtttaagaaacatcttttgggttgatgcaaaaggtagatttgattatacttgtttctctgatgttgtatctattgacactacattcatcaagaatgagtataaactgcctcttgttgcttttactggcgtgaaccaccatggacagttcctgttgcttggttttggattattactaacggatgagtctaaatctggatttgtttggcttttccgggcatggttaaaagcgatgcacggatgcagacctagagttatacttactaagcatgaccaaatgctcaaggaagctgtcttggaggtgttcccatcttctagacattgcttttatatgtgggatactcttggccagatgccggaaaagcttggtcatgttatcagactagagaaaaaacttgtggatgagataaatgatgctatttacgggtcttgccagagcgaggactttgaaaagaattggtgggaggtagttgataggtttcatatgagagacaacgtgtggcttcagtcgttgtatgaagatagggaatattgggttcctgtatatatgaaagatgtatctctagcgggaatgtgtacagctcagagatcagacagtgtgaactctggtttagataaatacattcaaaggaaaactacatttaaagcatttcttgagcagtacaagaagatgatacaagagaggtacgaagaggaagagaaatcggagattgagacattgtataaacaaccgggacttaagtcaccttcaccatttgggaagcaaatggctgaggtatacactcgtgagatgttcaagaagtttcaggtggaggtgttgggaggagttgcttgtcatccgaagaaagaaagtgaagaagatggggttaacaagaggactttcagggttcaagattatgaacagaaccgttctttcgttgtggtctggaactctgaatcatctgaagttgtctgttcttgtcgattgtttgagttgaaaggttttctttgtaggcacgcgatgattgttctgcagatgtcaggggaacttagtattccttctcagtatgtgttgaagcgttggacaaaggatgcaaaaagcagagaagtcatggaatctgatcagactgatgtagaatcaactaaggctcaacggtacaaggatctttgtctccgttctttaaaactgagtgaggaagcatctttatccgaggagagctataacgccgtggtcaatgtgctgaatgaagctttaagaaagtgggagaacaagagtaacttgatccaaaatcttgaagagtcagaatcggttacagctcaagatcttccaatacatgaagaacagaacaatacatatgacatgaacaaagacgataatgtcgctgacacaggacaggaatattcattgcaagaagtctggaaagtaactgctttgcaagaacaaagaaaccgatactcgattctcgatgactacctcagtgcccaacatatgtctcatgaaatgggacaaatcaactcgatggcctcaaatcgcaatggatattgttctgtccatcaaaacatacactcattgcaggggcaatccataactcacccaaggctttatgaaactgaacaatcaagtttcagaccagaagctatgtatgaaagactacaagatatggtaaaagacttgaactag

SEQ ID NO: 29684 - protein, 752 aa, Arabidopsis thaliana
  misc_feature (1)..(752): Ceres Seq. ID no. 4924966
MSSGECSNVQLDDHRKNNLEIDEGREFESKEEAFEFYKEYANSVGFTTIIKASRRSRMTGKFIDAKFVCTRYGSKKEDIDTGLGTDGFNIPQARKRGRINRSSSKTDCKAFLHVKRRQDGRWVVRSLVKEHNHEIFTGQADSLRELSGRRKLEKLNGAIVKEVKSRKLEDGDVERLLNFFTDMQVENPFFFYSIDLSEEQSLRNIFWVDAKGRFDYTCFSDVVSIDTTFIKNEYKLPLVAFTGVNHHGQFLLLGFGLLLTDESKSGFVWLFRAWLKAMHGCRPRVILTKHDQMLKEAVLEVFPSSRHCFYMWDTLGQMPEKLGHVIRLEKKLVDEINDAIYGSCQSEDFEKNWWEVVDRFHMRDNVWLQSLYEDREYWVPVYMKDVSLAGMCTAQRSDSVNSGLDKYIQRKTTFKAFLEQYKKMIQERYEEEEKSEIETLYKQPGLKSPSPFGKQMAEVYTREMFKKFQVEVLGGVACHPKKESEEDGVNKRTFRVQDYEQNRSFVVVWNSESSEVVCSCRLFELKGFLCRHAMIVLQMSGELSIPSQYVLKRWTKDAKSREVMESDQTDVESTKAQRYKDLCLRSLKLSEEASLSEESYNAVVNVLNEALRKWENKSNLIQNLEESESVTAQDLPIHEEQNNTYDMNKDDNVADTGQEYSLQEVWKVTALQEQRNRYSILDDYLSAQHMSHEMGQINSMASNRNGYCSVHQNIHSLQGQSITHPRLYETEQSSFRPEAMYERLQDMVKDLN

SEQ ID NO: 29685 - protein, 695 aa, Arabidopsis thaliana
  misc_feature (1)..(695): Ceres Seq. ID no. 4924967
MTGKFIDAKFVCTRYGSKKEDIDTGLGTDGFNIPQARKRGRINRSSSKTDCKAFLHVKRRQDGRWVVRSLVKEHNHEIFTGQADSLRELSGRRKLEKLNGAIVKEVKSRKLEDGDVERLLNFFTDMQVENPFFFYSIDLSEEQSLRNIFWVDAKGRFDYTCFSDVVSIDTTFIKNEYKLPLVAFTGVNHHGQFLLLGFGLLLTDESKSGFVWLFRAWLKAMHGCRPRVILTKHDQMLKEAVLEVFPSSRHCFYMWDTLGQMPEKLGHVIRLEKKLVDEINDAIYGSCQSEDFEKNWWEVVDRFHMRDNVWLQSLYEDREYWVPVYMKDVSLAGMCTAQRSDSVNSGLDKYIQRKTTFKAFLEQYKKMIQERYEEEEKSEIETLYKQPGLKSPSPFGKQMAEVYTREMFKKFQVEVLGGVACHPKKESEEDGVNKRTFRVQDYEQNRSFVVVWNSESSEVVCSCRLFELKGFLCRHAMIVLQMSGELSIPSQYVLKRWTKDAKSREVMESDQTDVESTKAQRYKDLCLRSLKLSEEASLSEESYNAVVNVLNEALRKWENKSNLIQNLEESESVTAQDLPIHEEQNNTYDMNKDDNVADTGQEYSLQEVWKVTALQEQRNRYSILDDYLSAQHMSHEMGQINSMASNRNGYCSVHQNIHSLQGQSITHPRLYETEQSSFRPEAMYERLQDMVKDLN

SEQ ID NO: 29686 - protein, 570 aa, Arabidopsis thaliana
  misc_feature (1)..(570): Ceres Seq. ID no. 4924968
MQVENPFFFYSIDLSEEQSLRNIFWVDAKGRFDYTCFSDVVSIDTTFIKNEYKLPLVAFTGVNHHGQFLLLGFGLLLTDESKSGFVWLFRAWLKAMHGCRPRVILTKHDQMLKEAVLEVFPSSRHCFYMWDTLGQMPEKLGHVIRLEKKLVDEINDAIYGSCQSEDFEKNWWEVVDRFHMRDNVWLQSLYEDREYWVPVYMKDVSLAGMCTAQRSDSVNSGLDKYIQRKTTFKAFLEQYKKMIQERYEEEEKSEIETLYKQPGLKSPSPFGKQMAEVYTREMFKKFQVEVLGGVACHPKKESEEDGVNKRTFRVQDYEQNRSFVVVWNSESSEVVCSCRLFELKGFLCRHAMIVLQMSGELSIPSQYVLKRWTKDAKSREVMESDQTDVESTKAQRYKDLCLRSLKLSEEASLSEESYNAVVNVLNEALRKWENKSNLIQNLEESESVTAQDLPIHEEQNNTYDMNKDDNVADTGQEYSLQEVWKVTALQEQRNRYSILDDYLSAQHMSHEMGQINSMASNRNGYCSVHQNIHSLQGQSITHPRLYETEQSSFRPEAMYERLQDMVKDLN

SEQ ID NO: 29687 - DNA, 3114 bp, Arabidopsis thaliana
  misc_feature (1)..(3114): Ceres Seq. ID no. 4924992
atggggcaacttccatcacaggacatcatggcattgcttgaattcaagaaaggcatcaaacatgaccctacagggtttgtccttaattcatggaacgatgagtctattgacttcaatggttgtccttcttcatggaatggtattgtctgcaatggcggtaatgtggctggtgttgttttggataatttgggtttgactgctgatgctgatttcagtctgttctccaacttgacaaagcttgtcaagctatctatgtcaaacaattccctttctggtgtgttgccaaatgatttaggcagtttcaaaagcctccagttcctggatttatcagataatctgttctcttcttcattgcctaaagagattggtagatcagtaagcttgaggaatctttctttatctggtaacaacttttctggtgagattccagagtctatgggtggtttgatttcacttcagtcgttggatatgagtagcaactccttatctggacctttgccaaagtccttgacaaggctgaacgatctgctgtacttgaatctgtcttctaatggattcacggggaaaatgccaaggggctttgagttgatttcaagtcttgaagtgcttgatttgcatggtaattcaattgatggtaatcttgatggggagtttttccttttaacgaatgcgagctatgtcgatatcagtggaaacagattggtgacgacgtctgggaaactgttacctggtgtttctgagagtatcaagcacttgaatctcagccataatcagcttgaaggttcattgactagtgggtttcagttgtttcagaacttaaaagtcttggatcttagctacaacatgttatctggagaattaccaggtttcaattatgtctatgatcttgaagttctcaagcttagcaacaacagattctcaggttcccttcccaataatttgttaaaaggtgactctttgcttttaacaacgctggatttaagtggcaacaatctctcagggccagtaagttctatcatgtcaactactcttcacacccttgatctttcttcaaattcactgaccggggagcttcctctcttgactgggggatgtgttttactcgatctctcaaacaaccagtttgaaggaaatctgacaagatggtcaaaatgggagaatatagagtaccttgatctaagccagaaccatttcactgggtcgttcccagacgcaactccccagcttctgcgagcaaatcatcttaatctttcctacaataagctcacaggctcacttccagaacggattccaactcactatccgaagcttcgggtacttgatataagttctaacagcttagaagggccaattccaggtgcgttactatccatgcccactttggaggaaatccaccttcaaaacaatggcatgacaggtaacatcggacccctgccttcttctggttccagaatccgtcttcttgatctttctcacaaccggtttgacggggatcttcctggtgtattcgggtctttaaccaatcttcaagtgctgaatctcgcagcaaataatttgtctggctctttgcctagctccatgaatgacattgtctctctaagctcattagacgtatcccagaatcatttcactggaccactcccaagcaacttatctagcaacattatggccttcaacgtgtcatataatgatctatcagggactgtgccagagaatctgaagaacttccctccgccttccttttatcctggaaacagcaagctcgtcttgcctgctgggtcccctggatcaagtgcatcagaagcttccaagaataaatccacgaacaaacttgttaaggttgtcataatagtttcttgcgctgttgctctaattattctcatccttgtggctatcctccttttctgcatctgcaaatcaagaaggcgcgaagaacgtagtattactggtaaagaaactaataggcgggctcaaactatcccctcaggcagcggaggtggtatggttgtctctgctgaggatctggttgcttcaagaaaaggctcatcatccgaaatcctcagtccagatgaaaaactagctgttgcaaccggcttctctccttctaagaccagcaatttgtcttggtcacctggctcaggagattcattcccagctgatcagcaactagcacggcttgatgtgaggtcaccagatagacttgtgggagagctgcattttctggatgattcaattaagttgactccagaggaattatcaagggcaccagctgaagttctgggaagaagtagccacggcacttcttacagggcaacgctggataatggagtgtttctaacagtgaaatggctaagagaaggagtggcaaagcagagaaaggagtttgctaaagaggtgaagaaattttctaacattagacatcctaatgttgtgactctccgagggtactattggggtccaacgcaacacgagaagcttattctttcagattatatatcgcctggaagccttgccagcttcctttacgatcgaccgggcaggaaaggccctcccttagcctggacccaacggttgaaaatcgcagttgatgtggcacgtggtctaaactacctccatttcgacagagctgttccacacggtaacctcaaggcaacaaacattctcttagatggagcagagctaaacgcgcgtgtggcagattactgcctccaccgtctcatgacacaagcaggcacagtcgaacagattctagacgcaggaatcctcggttaccgagctcccgagctagcagcttcaagaaaaccattaccttctttcaaatcagatgtatatgcgtttggtgtgatacttcttgagatcctaaccggaagatgtgcaggagatgtaatcacaggtgagcaagaaggtgttgatctaaccgattgggttaggttacgtgttgcagaagggcgtggtgcagaatgctttgattcggtattgactcaggagatgggaagtgatccggtaacagaaaaaggcatgaaagaagttcttgggattgctttgaggtgtataagatcagtttctgagagacctggtattaagaccatttacgaagatctttcttctatttag

SEQ ID NO: 29688 - protein, 1037 aa, Arabidopsis thaliana
  misc_feature (1)..(1037): Ceres Seq. ID no. 4924993
MGQLPSQDIMALLEFKKGIKHDPTGFVLNSWNDESIDFNGCPSSWNGIVCNGGNVAGVVLDNLGLTADADFSLFSNLTKLVKLSMSNNSLSGVLPNDLGSFKSLQFLDLSDNLFSSSLPKEIGRSVSLRNLSLSGNNFSGEIPESMGGLISLQSLDMSSNSLSGPLPKSLTRLNDLLYLNLSSNGFTGKMPRGFELISSLEVLDLHGNSIDGNLDGEFFLLTNASYVDISGNRLVTTSGKLLPGVSESIKHLNLSHNQLEGSLTSGFQLFQNLKVLDLSYNMLSGELPGFNYVYDLEVLKLSNNRFSGSLPNNLLKGDSLLLTTLDLSGNNLSGPVSSIMSTTLHTLDLSSNSLTGELPLLTGGCVLLDLSNNQFEGNLTRWSKWENIEYLDLSQNHFTGSFPDATPQLLRANHLNLSYNKLTGSLPERIPTHYPKLRVLDISSNSLEGPIPGALLSMPTLEEIHLQNNGMTGNIGPLPSSGSRIRLLDLSHNRFDGDLPGVFGSLTNLQVLNLAANNLSGSLPSSMNDIVSLSSLDVSQNHFTGPLPSNLSSNIMAFNVSYNDLSGTVPENLKNFPPPSFYPGNSKLVLPAGSPGSSASEASKNKSTNKLVKVVIIVSCAVALIILILVAILLFCICKSRRREERSITGKETNRRAQTIPSGSGGGMVVSAEDLVASRKGSSSEILSPDEKLAVATGFSPSKTSNLSWSPGSGDSFPADQQLARLDVRSPDRLVGELHFLDDSIKLTPEELSRAPAEVLGRSSHGTSYRATLDNGVFLTVKWLREGVAKQRKEFAKEVKKFSNIRHPNVVTLRGYYWGPTQHEKLILSDYISPGSLASFLYDRPGRKGPPLAWTQRLKIAVDVARGLNYLHFDRAVPHGNLKATNILLDGAELNARVADYCLHRLMTQAGTVEQILDAGILGYRAPELAASRKPLPSFKSDVYAFGVILLEILTGRCAGDVITGEQEGVDLTDWVRLRVAEGRGAECFDSVLTQEMGSDPVTEKGMKEVLGIALRCIRSVSERPGIKTIYEDLSSI

SEQ ID NO: 29689 - protein, 1028 aa, Arabidopsis thaliana
  misc_feature (1)..(1028): Ceres Seq. ID no. 4924994
MALLEFKKGIKHDPTGFVLNSWNDESIDFNGCPSSWNGIVCNGGNVAGVVLDNLGLTADADFSLFSNLTKLVKLSMSNNSLSGVLPNDLGSFKSLQFLDLSDNLFSSSLPKEIGRSVSLRNLSLSGNNFSGEIPESMGGLISLQSLDMSSNSLSGPLPKSLTRLNDLLYLNLSSNGFTGKMPRGFELISSLEVLDLHGNSIDGNLDGEFFLLTNASYVDISGNRLVTTSGKLLPGVSESIKHLNLSHNQLEGSLTSGFQLFQNLKVLDLSYNMLSGELPGFNYVYDLEVLKLSNNRFSGSLPNNLLKGDSLLLTTLDLSGNNLSGPVSSIMSTTLHTLDLSSNSLTGELPLLTGGCVLLDLSNNQFEGNLTRWSKWENIEYLDLSQNHFTGSFPDATPQLLRANHLNLSYNKLTGSLPERIPTHYPKLRVLDISSNSLEGPIPGALLSMPTLEEIHLQNNGMTGNIGPLPSSGSRIRLLDLSHNRFDGDLPGVFGSLTNLQVLNLAANNLSGSLPSSMNDIVSLSSLDVSQNHFTGPLPSNLSSNIMAFNVSYNDLSGTVPENLKNFPPPSFYPGNSKLVLPAGSPGSSASEASKNKSTNKLVKVVIIVSCAVALIILILVAILLFCICKSRRREERSITGKETNRRAQTIPSGSGGGMVVSAEDLVASRKGSSSEILSPDEKLAVATGFSPSKTSNLSWSPGSGDSFPADQQLARLDVRSPDRLVGELHFLDDSIKLTPEELSRAPAEVLGRSSHGTSYRATLDNGVFLTVKWLREGVAKQRKEFAKEVKKFSNIRHPNVVTLRGYYWGPTQHEKLILSDYISPGSLASFLYDRPGRKGPPLAWTQRLKIAVDVARGLNYLHFDRAVPHGNLKATNILLDGAELNARVADYCLHRLMTQAGTVEQILDAGILGYRAPELAASRKPLPSFKSDVYAFGVILLEILTGRCAGDVITGEQEGVDLTDWVRLRVAEGRGAECFDSVLTQEMGSDPVTEKGMKEVLGIALRCIRSVSERPGIKTIYEDLSSI

SEQ ID NO: 29690 - protein, 953 aa, Arabidopsis thaliana
  misc_feature (1)..(953): Ceres Seq. ID no. 4924995
MSNNSLSGVLPNDLGSFKSLQFLDLSDNLFSSSLPKEIGRSVSLRNLSLSGNNFSGEIPESMGGLISLQSLDMSSNSLSGPLPKSLTRLNDLLYLNLSSNGFTGKMPRGFELISSLEVLDLHGNSIDGNLDGEFFLLTNASYVDISGNRLVTTSGKLLPGVSESIKHLNLSHNQLEGSLTSGFQLFQNLKVLDLSYNMLSGELPGFNYVYDLEVLKLSNNRFSGSLPNNLLKGDSLLLTTLDLSGNNLSGPVSSIMSTTLHTLDLSSNSLTGELPLLTGGCVLLDLSNNQFEGNLTRWSKWENIEYLDLSQNHFTGSFPDATPQLLRANHLNLSYNKLTGSLPERIPTHYPKLRVLDISSNSLEGPIPGALLSMPTLEEIHLQNNGMTGNIGPLPSSGSRIRLLDLSHNRFDGDLPGVFGSLTNLQVLNLAANNLSGSLPSSMNDIVSLSSLDVSQNHFTGPLPSNLSSNIMAFNVSYNDLSGTVPENLKNFPPPSFYPGNSKLVLPAGSPGSSASEASKNKSTNKLVKVVIIVSCAVALIILILVAILLFCICKSRRREERSITGKETNRRAQTIPSGSGGGMVVSAEDLVASRKGSSSEILSPDEKLAVATGFSPSKTSNLSWSPGSGDSFPADQQLARLDVRSPDRLVGELHFLDDSIKLTPEELSRAPAEVLGRSSHGTSYRATLDNGVFLTVKWLREGVAKQRKEFAKEVKKFSNIRHPNVVTLRGYYWGPTQHEKLILSDYISPGSLASFLYDRPGRKGPPLAWTQRLKIAVDVARGLNYLHFDRAVPHGNLKATNILLDGAELNARVADYCLHRLMTQAGTVEQILDAGILGYRAPELAASRKPLPSFKSDVYAFGVILLEILTGRCAGDVITGEQEGVDLTDWVRLRVAEGRGAECFDSVLTQEMGSDPVTEKGMKEVLGIALRCIRSVSERPGIKTIYEDLSSI

SEQ ID NO: 29691 - DNA, 1590 bp, Arabidopsis thaliana
  misc_feature (1)..(1590): Ceres Seq. ID no. 4925263
ataaatttaattttaaaattcgaaactttttttctgcctttcctctttctctctctctatctatcaaacactagacttgaagaaatgcagtgaaattgaaattgagtagaagcagaagagaatatggtggtaaggaaggtgggcaagtatgaattaggtagaacaatcggcgaaggtactttcgctaaagtcaagttcgctcagaatacagagaccggtgagagcgtcgccatgaaaatcgtggatcgtagcacaatcatcaagcgcaagatggtggatcagattaagagagagatctcgattatgaagcttgttcgtcatccttgtgttgttcgtctttatgaggttctagcaagccgtacaaagatttatatcatcctggagtacattactggtggtgaactgtttgataagattgttcgtaatggacgacttagtgagtcagaagctaggaaatactttcaccagcttattgatggagttgattactgtcatagtaaaggtgtttaccacagagatctaaagccggaaaatcttctgttggattctcaaggaaatctcaagatatctgattttggcctcagtgcattacctgaacaaggagttaccatcctaaagacaacatgtggaactcccaattacgttgctcctgaggttctcagtcacaagggttacaatggtgccgttgcagatatttggtcctgtggggtcatcctttatgttcttatggcaggatatcttccatttgatgaaatggatctaccaactttatatagtaagatcgacaaagctgagttctcttgcccctcatattttgccctgggggcaaagtccttgattaatagaattttggatccaaatccagaaactcggattacaattgcagaaatcaggaaagatgagtggtttctaaaggattacactcctgtacaacttatcgattacgaacatgtaaacctggatgatgtatatgctgcttttgatgatccggaggaacaaacatatgcacaggatggaacaagagacacaggtccactaactctaaatgcgtttgacctaattattctatctcagggcctgaacctcgcaactctttttgaccgtggaaaggactccatgaagcaccagacaaggttcatctcacacaagccagcaaacgtggttctctcaagcatggaagttgtgtcacagtctatgggctttaagacacacattcgtaattacaagatgagagtggaaggattatctgcaaataagacatctcatttctccgtcatactagaacaggagacgcagaagaataccttaagttctacaagactttttgtagtaagcttgatgacatcatttggaagccgccagatgcatctatgagaaatcgagtcaccaaggccaagagtaaaagacgttgaatccacgtgcgtggtattcaagcagagctttcacagaagacagttagaaacaatatttaactctctgtgtttcttaagtgctttagtcgagtgaatatgtacaagcttgttgatttggttttaatttatgaatacatagaagattgtactaaacttatacgatatcaagactaaattg

SEQ ID NO: 29692 - protein, 416 aa, Arabidopsis thaliana
  misc_feature (1)..(416): Ceres Seq. ID no. 4925264
MVVRKVGKYELGRTIGEGTFAKVKFAQNTETGESVAMKIVDRSTIIKRKMVDQIKREISIMKLVRHPCVVRLYEVLASRTKIYIILEYITGGELFDKIVRNGRLSESEARKYFHQLIDGVDYCHSKGVYHRDLKPENLLLDSQGNLKISDFGLSALPEQGVTILKTTCGTPNYVAPEVLSHKGYNGAVADIWSCGVILYVLMAGYLPFDEMDLPTLYSKIDKAEFSCPSYFALGAKSLINRILDPNPETRITIAEIRKDEWFLKDYTPVQLIDYEHVNLDDVYAAFDDPEEQTYAQDGTRDTGPLTLNAFDLIILSQGLNLATLFDRGKDSMKHQTRFISHKPANVVLSSMEVVSQSMGFKTHIRNYKMRVEGLSANKTSHFSVILEQETQKNTLSSTRLFVVSLMTSFGSRQMHL

SEQ ID NO: 29693 - protein, 380 aa, Arabidopsis thaliana
  misc_feature (1)..(380): Ceres Seq. ID no. 4925265
MKIVDRSTIIKRKMVDQIKREISIMKLVRHPCVVRLYEVLASRTKIYIILEYITGGELFDKIVRNGRLSESEARKYFHQLIDGVDYCHSKGVYHRDLKPENLLLDSQGNLKISDFGLSALPEQGVTILKTTCGTPNYVAPEVLSHKGYNGAVADIWSCGVILYVLMAGYLPFDEMDLPTLYSKIDKAEFSCPSYFALGAKSLINRILDPNPETRITIAEIRKDEWFLKDYTPVQLIDYEHVNLDDVYAAFDDPEEQTYAQDGTRDTGPLTLNAFDLIILSQGLNLATLFDRGKDSMKHQTRFISHKPANVVLSSMEVVSQSMGFKTHIRNYKMRVEGLSANKTSHFSVILEQETQKNTLSSTRLFVVSLMTSFGSRQMHL

SEQ ID NO: 29694 - protein, 367 aa, Arabidopsis thaliana
  misc_feature (1)..(367): Ceres Seq. ID no. 4925266
MVDQIKREISIMKLVRHPCVVRLYEVLASRTKIYIILEYITGGELFDKIVRNGRLSESEARKYFHQLIDGVDYCHSKGVYHRDLKPENLLLDSQGNLKISDFGLSALPEQGVTILKTTCGTPNYVAPEVLSHKGYNGAVADIWSCGVILYVLMAGYLPFDEMDLPTLYSKIDKAEFSCPSYFALGAKSLINRILDPNPETRITIAEIRKDEWFLKDYTPVQLIDYEHVNLDDVYAAFDDPEEQTYAQDGTRDTGPLTLNAFDLIILSQGLNLATLFDRGKDSMKHQTRFISHKPANVVLSSMEVVSQSMGFKTHIRNYKMRVEGLSANKTSHFSVILEQETQKNTLSSTRLFVVSLMTSFGSRQMHL

SEQ ID NO: 29695 - DNA, 981 bp, Arabidopsis thaliana
  misc_feature (1)..(981): Ceres Seq. ID no. 4925476
atggtttgggcaaatgctaagatgaggctagctttgtctcttgttacggttttcttcggcatctctcttgctaatcttgaagtcggattttactccaatacatgccctcaagccgagtcaatcgttaagagggttgtctcaggggctgctctttccgaccctaacctcccagccatacttctacggctccatttccatgattgctttgttgagggatgtgatggctcgatcctcgtgaacaacggagcaatctctgaaaagaatgcatttggacatgaaggcgttagaggatttgagatagtagaagccgtcaaagccgagcttgaagctgcatgccccggtgttgtctcctgctcagacattgttgccttggctgcacgtgatgccatatctttggcgaatggaccggcgtatgaggtgccaactgggcggagagatggtcgggtttcgaacatgtcattggctaaggacatgccggaggtgagtgactcgattgagatactaaaggctaagttcatgcagaaaggactcaacgccaaagacctcgtgcttctcagtgctgctcacactatcggaacaacggcctgcttcttcatgtccaaacggctctatgatttcttacctggtggccaacctgacccgactatcaatccaacattcctacccgaattaaccactcagtgcccacaaaatggtgacataaacgtccgtttaccaattgaccggttcagcgaacggctattcgacaagcagattctgcaaaacataaaggatggttttgctgtgcttcagaccgacgcaggtctttacgaggatgtaacgaccagacaggtcgtggattcctatcttgggatgctaaatccattctttgggccaacattcgagtctgatttcgttaaggcgatcgtaaagatggggaagattggtgtgaagactggtttcaaaggggagattcgacgggtttgctcggccttcaattga

SEQ ID NO: 29696 - protein, 326 aa, Arabidopsis thaliana; identical to SEQ ID NO: 27566
  misc_feature (1)..(326): Ceres Seq. ID no. 4925477

SEQ ID NO: 29697 - protein, 319 aa, Arabidopsis thaliana
  misc_feature (1)..(319): Ceres Seq. ID no. 4925478
MRLALSLVTVFFGISLANLEVGFYSNTCPQAESIVKRVVSGAALSDPNLPAILLRLHFHDCFVEGCDGSILVNNGAISEKNAFGHEGVRGFEIVEAVKAELEAACPGVVSCSDIVALAARDAISLANGPAYEVPTGRRDGRVSNMSLAKDMPEVSDSIEILKAKFMQKGLNAKDLVLLSAAHTIGTTACFFMSKRLYDFLPGGQPDPTINPTFLPELTTQCPQNGDINVRLPIDRFSERLFDKQILQNIKDGFAVLQTDAGLYEDVTTRQVVDSYLGMLNPFFGPTFESDFVKAIVKMGKIGVKTGFKGEIRRVCSAFN

SEQ ID NO: 29698 - protein, 175 aa, Arabidopsis thaliana
  misc_feature (1)..(175): Ceres Seq. ID no. 4925479
MSLAKDMPEVSDSIEILKAKFMQKGLNAKDLVLLSAAHTIGTTACFFMSKRLYDFLPGGQPDPTINPTFLPELTTQCPQNGDINVRLPIDRFSERLFDKQILQNIKDGFAVLQTDAGLYEDVTTRQVVDSYLGMLNPFFGPTFESDFVKAIVKMGKIGVKTGFKGEIRRVCSAFN

SEQ ID NO: 29699 - DNA, 1152 bp, Arabidopsis thaliana
  misc_feature (1)..(1152): Ceres Seq. ID no. 4925926
atggggaagatagaggagtacaagccggtaatggcgatgacgatgattcaactatgttatgcaggagtgactctctttgcaagagctactttggttcatggattaagccctcgggtttttatcctctataggcaagcctttgccaccattttcatcttcccatttctttacttatccaggagaaaatcaaagatagctatatcttctttggatctaaagagcttttctttaatattcttggtctcgcttataggcattacaatcaatcaaaatctatatcttgaaggtctttacttaacttcatcatcaatgggaagtgcagtgggtaacatcatccctgcaatcaccttcctcatctcatttctcgccggatacgagaaactgaatctccgagatataagaggcttagcaaagatcgcagggacgatcctatgtgtagcaggagcgatctccatgactcttcttcgtggaccaaagattctcaactcagaatccgctttaccgatcgctaaatcggtattaggacatcttaaagaccagaacacgtggttgattggctgtttgttcttgttttctagcactctttgttggtccttttggcttatacttcaggttccaatctctgcctactatccagataacctctctttatcagcatggatgtgtttattcggaacaatacaatgtgcagtcgtcactttcttccttgagaaagacccaaacgcttggattctccattcctactccgagtttgccacatgtctctatgcaggaattggggcgtcagcactttcttttacggtccaagcttgggctattgcaaagagaggtcctgtgttttctgcactgtttaatcctctttgtacagtcattgtcacaatcttggctgctttgttcttccatgaagagatttacactggaagtttaatcggaggattgggcgtgatattgggactttacactgtgctctggggtaaagcaaaagatgtcatgatgaatcaagatcagagagacaatgatcagaagtcagaagtgaagattcatatagaagattcttcaaacacaacaatctgtaataaagatctgaagaatcctctgttgtccaaacacaaatcaacagaagaaatccaaacacatcaacaactatactaa

SEQ ID NO: 29700 - protein, 383 aa, Arabidopsis thaliana
  misc_feature (1)..(383): Ceres Seq. ID no. 4925927
MGKIEEYKPVMAMTMIQLCYAGVTLFARATLVHGLSPRVFILYRQAFATIFIFPFLYLSRRKSKIAISSLDLKSFSLIFLVSLIGITINQNLYLEGLYLTSSSMGSAVGNIIPAITFLISFLAGYEKLNLRDIRGLAKIAGTILCVAGAISMTLLRGPKILNSESALPIAKSVLGHLKDQNTWLIGCLFLFSSTLCWSFWLILQVPISAYYPDNLSLSAWMCLFGTIQCAVVTFFLEKDPNAWILHSYSEFATCLYAGIGASALSFTVQAWAIAKRGPVFSALFNPLCTVIVTILAALFFHEEIYTGSLIGGLGVILGLYTVLWGKAKDVMMNQDQRDNDQKSEVKIHIEDSSNTTICNKDLKNPLLSKHKSTEEIQTHQQLY

SEQ ID NO: 29701 - protein, 373 aa, Arabidopsis thaliana; identical to SEQ ID NO: 28453
  misc_feature (1)..(373): Ceres Seq. ID no. 4925928

SEQ ID NO: 29702 - protein, 371 aa, Arabidopsis thaliana; identical to SEQ ID NO: 28454
  misc_feature (1)..(371): Ceres Seq. ID no. 4925929

SEQ ID NO: 29703 - DNA, 2304 bp, Arabidopsis thaliana
  misc_feature (1)..(2304): Ceres Seq. ID no. 4926014
atggagaaaatgaatgtccgttttatgattgtgttgatggtaatgtctctggttctgggtttttcgtcggcagttgatttcagatggaggaaaactgcaggattctcagatagattcaccagagctgtttcttcagtcgtgttcccagttcatggcaacgtttatcctcttgggtactataatgtaaccatcaacataggacaaccaccaagaccttattatcttgatcttgatactggtagtgatctcacttggctccaatgtgatgctccttgtgttcgttgcttggaggcgcctcatccactgtatcagcctagtagtgatcttattccttgcaatgatccactgtgtaaggctttgcatttgaatagtaatcagagatgtgagactccagagcaatgtgactatgaggttgagtatgctgatggaggatcttctctcggtgttcttgttagagatgtcttctctatgaactatacacagggtctccggctcactccccgtcttgctctaggttgtggatacgatcaaatcccaggggcttcgagtcatcatcctctagatggagtattagggcttggtagggggaaagtaagcattctgtcacagcttcatagccaaggttatgtaaagaatgttatcggtcattgcctaagcagtttaggtggaggaattctcttttttggcgacgatctttatgattcttcaagagtctcatggacaccaatgtctcgtgaatactcaaaacactactctcctgcaatgggaggggaacttctattcgggggaagaacaacaggattgaagaatctattaacagtatttgacagtggaagttcttacacatacttcaattccaaggcataccaagccgtaacatatttgctaaagagagaactaagcggaaaaccgttgaaagaagcacgggatgaccacacgctgcctctatgctggcaaggacgtagaccattcatgagcattgaagaagtcaagaagtatttcaagcctctagctcttagcttcaaaacaggctggagatcaaaaactctgtttgagatacccccagaagcttatctaatcatttctatgaaggggaatgtatgtttgggaatcttgaatggcacagaaataggtctccagaacctaaacctcatcggcgatatatcgatgcaagatcagatgataatctacgataacgagaaacaatcaatcgggtggatgccagtggattgcgatgaacttgcttcactaaaagcagctcaagagactcaagtttctcactttctctcttccatggctttctcatactctttaacttctccgtcaccaaattcgactctctcctattccagtacccatcaatttctcaacccgtcttcttcgtttcccgtctcgttatcagtctcatctccgaagaatacccgccatcttcgtctcctcatcacctccgctttgaatccacagacgggacagccgacgaagaaggcctccaccggtagtgataagagtagtacgaacaagaaacgtaagaaaaaggggaaaattgcgaaacctgtggaggattgggaattgagagattcagaagacgcttttgaggaagatgatgatgccgattattcttcttcttcgagttctctagcaacttttaactctcctcctaccatacccaaaccacctgctgggtttgtgattaatgaaactggtagggttcttatggcctctaagaagcgtatcaccactgtgattgatccaacaaacaatagccctttggattgtgtgataagaagagtatttacaagtagtaaaggagaggattgtatgcttctttgccctgtggatacgccagttcagattttgaagagcacaaatattgatggatggtcagctgtcagtgatgaagaggtcgaatctcttcttcctgctgctgcttatgctcttgcaaagatccatatgcatctagtacacagcgggttctgttacactgcaaggggaggcttttgctacacggaagataatgtctttgattttcgcacagatgatggccaagatgttgaaggcttgccaactgaaggggttgagattacgtgtttccatctggatggatcacactatatggtctacacaccttcagatccacttctctttgttgctgctaaggatcaaaatgggctgctgcaaatcgctgatgatgaactcttagacgatccagctgtgatcagcgccatagacgaggaaaccgaattcaatgccttggtggaggaagaggcggctctcctggaatcactgcttggggaaagaatttga

SEQ ID NO: 29704 - protein, 767 aa, Arabidopsis thaliana
  misc_feature (1)..(767): Ceres Seq. ID no. 4926015
MEKMNVRFMIVLMVMSLVLGFSSAVDFRWRKTAGFSDRFTRAVSSVVFPVHGNVYPLGYYNVTINIGQPPRPYYLDLDTGSDLTWLQCDAPCVRCLEAPHPLYQPSSDLIPCNDPLCKALHLNSNQRCETPEQCDYEVEYADGGSSLGVLVRDVFSMNYTQGLRLTPRLALGCGYDQIPGASSHHPLDGVLGLGRGKVSILSQLHSQGYVKNVIGHCLSSLGGGILFFGDDLYDSSRVSWTPMSREYSKHYSPAMGGELLFGGRTTGLKNLLTVFDSGSSYTYFNSKAYQAVTYLLKRELSGKPLKEARDDHTLPLCWQGRRPFMSIEEVKKYFKPLALSFKTGWRSKTLFEIPPEAYLIISMKGNVCLGILNGTEIGLQNLNLIGDISMQDQMIIYDNEKQSIGWMPVDCDELASLKAAQETQVSHFLSSMAFSYSLTSPSPNSTLSYSSTHQFLNPSSSFPVSLSVSSPKNTRHLRLLITSALNPQTGQPTKKASTGSDKSSTNKKRKKKGKIAKPVEDWELRDSEDAFEEDDDADYSSSSSSLATFNSPPTIPKPPAGFVINETGRVLMASKKRITTVIDPTNNSPLDCVIRRVFTSSKGEDCMLLCPVDTPVQILKSTNIDGWSAVSDEEVESLLPAAAYALAKIHMHLVHSGFCYTARGGFCYTEDNVFDFRTDDGQDVEGLPTEGVEITCFHLDGSHYMVYTPSDPLLFVAAKDQNGLLQIADDELLDDPAVISAIDEETEFNALVEEEAALLESLLGERI

SEQ ID NO: 29705 - protein, 764 aa, Arabidopsis thaliana
  misc_feature (1)..(764): Ceres Seq. ID no. 4926016
MNVRFMIVLMVMSLVLGFSSAVDFRWRKTAGFSDRFTRAVSSVVFPVHGNVYPLGYYNVTINIGQPPRPYYLDLDTGSDLTWLQCDAPCVRCLEAPHPLYQPSSDLIPCNDPLCKALHLNSNQRCETPEQCDYEVEYADGGSSLGVLVRDVFSMNYTQGLRLTPRLALGCGYDQIPGASSHHPLDGVLGLGRGKVSILSQLHSQGYVKNVIGHCLSSLGGGILFFGDDLYDSSRVSWTPMSREYSKHYSPAMGGELLFGGRTTGLKNLLTVFDSGSSYTYFNSKAYQAVTYLLKRELSGKPLKEARDDHTLPLCWQGRRPFMSIEEVKKYFKPLALSFKTGWRSKTLFEIPPEAYLIISMKGNVCLGILNGTEIGLQNLNLIGDISMQDQMIIYDNEKQSIGWMPVDCDELASLKAAQETQVSHFLSSMAFSYSLTSPSPNSTLSYSSTHQFLNPSSSFPVSLSVSSPKNTRHLRLLITSALNPQTGQPTKKASTGSDKSSTNKKRKKKGKIAKPVEDWELRDSEDAFEEDDDADYSSSSSSLATFNSPPTIPKPPAGFVINETGRVLMASKKRITTVIDPTNNSPLDCVIRRVFTSSKGEDCMLLCPVDTPVQILKSTNIDGWSAVSDEEVESLLPAAAYALAKIHMHLVHSGFCYTARGGFCYTEDNVFDFRTDDGQDVEGLPTEGVEITCFHLDGSHYMVYTPSDPLLFVAAKDQNGLLQIADDELLDDPAVISAIDEETEFNALVEEEAALLESLLGERI

SEQ ID NO: 29706 - protein, 759 aa, Arabidopsis thaliana
  misc_feature (1)..(759): Ceres Seq. ID no. 4926017
MIVLMVMSLVLGFSSAVDFRWRKTAGFSDRFTRAVSSVVFPVHGNVYPLGYYNVTINIGQPPRPYYLDLDTGSDLTWLQCDAPCVRCLEAPHPLYQPSSDLIPCNDPLCKALHLNSNQRCETPEQCDYEVEYADGGSSLGVLVRDVFSMNYTQGLRLTPRLALGCGYDQIPGASSHHPLDGVLGLGRGKVSILSQLHSQGYVKNVIGHCLSSLGGGILFFGDDLYDSSRVSWTPMSREYSKHYSPAMGGELLFGGRTTGLKNLLTVFDSGSSYTYFNSKAYQAVTYLLKRELSGKPLKEARDDHTLPLCWQGRRPFMSIEEVKKYFKPLALSFKTGWRSKTLFEIPPEAYLIISMKGNVCLGILNGTEIGLQNLNLIGDISMQDQMIIYDNEKQSIGWMPVDCDELASLKAAQETQVSHFLSSMAFSYSLTSPSPNSTLSYSSTHQFLNPSSSFPVSLSVSSPKNTRHLRLLITSALNPQTGQPTKKASTGSDKSSTNKKRKKKGKIAKPVEDWELRDSEDAFEEDDDADYSSSSSSLATFNSPPTIPKPPAGFVINETGRVLMASKKRITTVIDPTNNSPLDCVIRRVFTSSKGEDCMLLCPVDTPVQILKSTNIDGWSAVSDEEVESLLPAAAYALAKIHMHLVHSGFCYTARGGFCYTEDNVFDFRTDDGQDVEGLPTEGVEITCFHLDGSHYMVYTPSDPLLFVAAKDQNGLLQIADDELLDDPAVISAIDEETEFNALVEEEAALLESLLGERI

SEQ ID NO: 29707 - DNA, 1401 bp, Arabidopsis thaliana
  misc_feature (1)..(1401): Ceres Seq. ID no. 4926239
atgacggcggccgaagtagcttctgcgcagaccaagaagctcatgaagtttagtctttctctcttccgtcgtggctttaactcctctaaatgcaaaacggcggcgaagatggctgtggctcgtataaagcttataaggaacaagagattagttgtggtgaagcaaatgaggcgtgacatcgctgttcttcttcaatccggtcaagatgccactgctcgaatcagagttgagcatgtgataagggaacagaacattcaggcagcaaacgaaatcattgagcttttctgtgaacttattgtttctcgtctcactatcatcactaagcaaaagcaatgtcctgtggatcttaaggaaggtattgctagtttgatttttgctgcgcctagatgctctgaaattcctgagcttggagatcttagagacatctttgcgaagaaatatgggaaagattttgtatctgctgctactgatttgcgtcctagctgcggtgttaaccggatgttgattgataagctttcggttagaaatcccggtggagaatacaaactgaaaatcatgaaggaaattgcaaaggaattccaggttgattgggatactacagagacagagcaagaacttctcaaacctcaagaagaaagcatagacgggccacgtaagtttgttagcgcttcaagcttaccagttaatcgtgcagctatcaacgagcctattgatcctaccaaagcagtgccaagatcgactagtagcatgagcatcaacacgcattatcatgacaccgagtcagcagcggaagcagctacagaattagccaaacaggcagttgcagcagcacaagtagcctccttattagctaccagaagagacagcagcaacaaggagttctctgtatcttctgatcattcaacacaccagaaggattcacagtacatggatcatcatcatcatcatccaggttcaagaagacaatcacgagactccgaaacaagttcctattacgcaaaacctggtgcagaaaacagaggaatgggtaggagacacagctacaacaatccgggtattaatgaatctgactacgaggaagagtataccaataccgaagcagaagcaaaagaaacaatgaggaggagacacagctacaaccctcgatcagttcctcctcctgcaacttctgagatcaagtttgatgagtcagactactacgaggaagagacagagccagatgaaccatcacagggtcgtgtttcttctctcccgccaaaccgagcaccgcctcaggctcctcagtccggtgagtccagacaggactcgagcggtcaccaggttcacccaaaactgcctgactatgatattttggctgcacgttttgaagcaatcagacacagtaaagggccattgatctga

SEQ ID NO: 29708 - protein, 466 aa, Arabidopsis thaliana
  misc_feature (1)..(466): Ceres Seq. ID no. 4926240
MTAAEVASAQTKKLMKFSLSLFRRGFNSSKCKTAAKMAVARIKLIRNKRLVVVKQMRRDIAVLLQSGQDATARIRVEHVIREQNIQAANEIIELFCELIVSRLTIITKQKQCPVDLKEGIASLIFAAPRCSEIPELGDLRDIFAKKYGKDFVSAATDLRPSCGVNRMLIDKLSVRNPGGEYKLKIMKEIAKEFQVDWDTTETEQELLKPQEESIDGPRKFVSASSLPVNRAAINEPIDPTKAVPRSTSSMSINTHYHDTESAAEAATELAKQAVAAAQVASLLATRRDSSNKEFSVSSDHSTHQKDSQYMDHHHHHPGSRRQSRDSETSSYYAKPGAENRGMGRRHSYNNPGINESDYEEEYTNTEAEAKETMRRRHSYNPRSVPPPATSEIKFDESDYYEEETEPDEPSQGRVSSLPPNRAPPQAPQSGESRQDSSGHQVHPKLPDYDILAARFEAIRHSKGPLI

SEQ ID NO: 29709 - protein, 452 aa, Arabidopsis thaliana
  misc_feature (1)..(452): Ceres Seq. ID no. 4926241
MKFSLSLFRRGFNSSKCKTAAKMAVARIKLIRNKRLVVVKQMRRDIAVLLQSGQDATARIRVEHVIREQNIQAANEIIELFCELIVSRLTIITKQKQCPVDLKEGIASLIFAAPRCSEIPELGDLRDIFAKKYGKDFVSAATDLRPSCGVNRMLIDKLSVRNPGGEYKLKIMKEIAKEFQVDWDTTETEQELLKPQEESIDGPRKFVSASSLPVNRAAINEPIDPTKAVPRSTSSMSINTHYHDTESAAEAATELAKQAVAAAQVASLLATRRDSSNKEFSVSSDHSTHQKDSQYMDHHHHHPGSRRQSRDSETSSYYAKPGAENRGMGRRHSYNNPGINESDYEEEYTNTEAEAKETMRRRHSYNPRSVPPPATSEIKFDESDYYEEETEPDEPSQGRVSSLPPNRAPPQAPQSGESRQDSSGHQVHPKLPDYDILAARFEAIRHSKGPLI

SEQ ID NO: 29710 - protein, 430 aa, Arabidopsis thaliana; identical to SEQ ID NO: 27630
  misc_feature (1)..(430): Ceres Seq. ID no. 4926242

SEQ ID NO: 29711 - DNA, 1161 bp, Arabidopsis thaliana
  misc_feature (1)..(1161): Ceres Seq. ID no. 4926550
acagaatcagatctttgtatcgtcaatggctccttcttttatgtaaggatctatgttcttatccggaatttagagtctttattgagtttgatcgattttgggattataagtttcgcaaaattcatgttttttacattaagtctattcgatttcagctgtattgggaatttaagtttttctgtggcttgattctattgagacagttttgtagaagatcgtccagctccgcttgatgctacttctgatccaccgtctctcttcgacggaaccacaaggttgtacacaagctacgtttgcccatttgctcaacgagtttggatcactcgaaacttcaagggtttgcaagaaaagattaaacttgttcctttggatcttgggaataggcctgcttggtacaaggagaaagtatatccagagaacaaggtgccagcgcttgagcacaatggaaaaatcattggggagagtctggatttgattaaatatcttgataacacttttgaagggccttctctttaccccgaggatcatgcaaaaagagagtttggcgacgagttgctcaagtatactgatactttcgttaaaactatgtatgtgtcactcaaaggagacccctctaaagaaaccgcacctgtgttagattatctggaaaacgctctgtataagttcgatgacgggccgttcttcctcggtcagttaagcttggttgatatcgcctatatcccgttcattgaaaggttccaaactgtactcaatgaattatttaagtgcgacattactgccgaacgtcccaaactatcagcatggattgaggaaattaacaagagcgatggctatgcacagacgaaaatggatcctaaggagattgtggaggttttcaagaaaaaattcatgtaactgtaagcaagcacgaagcagtaaagtgtatgagaccaaaccaccttgtacgaacaggtggtctttggatatgaagaaataagatgtgtacttgaacctgatgatgcaataagatttgtactttaagcagcaacagcttaatctgtattctagtgttgatcaaattatcaaccattgacattgttaatatattactgtatgatagtaatactatcaaaatctcacacattaagaaccagatgatgcaataaggataaggtgtatagt

SEQ ID NO: 29712 - protein, 102 aa, Arabidopsis thaliana
  misc_feature (1)..(102): Ceres Seq. ID no. 4926551
MYVSLKGDPSKETAPVLDYLENALYKFDDGPFFLGQLSLVDIAYIPFIERFQTVLNELFKCDITAERPKLSAWIEEINKSDGYAQTKMDPKEIVEVFKKKFM

SEQ ID NO: 29713 - protein, 80 aa, Arabidopsis thaliana
  misc_feature (1)..(80): Ceres Seq. ID no. 4926552
MLLLIHRLSSTEPQGCTQATFAHLLNEFGSLETSRVCKKRLNLFLWILGIGLLGTRRKYIQRTRCQRLSTMEKSLGRVWI

SEQ ID NO: 29714 - protein, 76 aa, Arabidopsis thaliana
  misc_feature (1)..(76): Ceres Seq. ID no. 4926553
RIRSLYRQWLLLLCKDLCSYPEFRVFIEFDRFWDYKFRKIHVFYIKSIRFQLYWEFKFFCGLILLRQFCRRSSSSA

SEQ ID NO: 29715 - DNA, 705 bp, Arabidopsis thaliana
  misc_feature (1)..(705): Ceres Seq. ID no. 4926873
atgactctacgggaacacatggaaagaaacatggagctccaagaaggtgacatgtccaaggctttggttgctttgcatccaacaactacttctattccaactcccaaactaaagaacattagccgtctcaggacagagcaccaagtgtacgagctcccagattcacatcgtctccttgatggtatggataaaagagaaccagatgatccaagtccttatctcttagctatatggacaccaggtgaaacagcgaattcggcacaaccgcctgaacagaagtgtggagggaaagcgtctggcaaaatgtgctttgacgagacttgttctgagtgtaacagtctgagggaagcaaactcacagacagttcgaggaactcttctgataccttgtcggactgccatgagaggaagttttccgctcaacgggacatatttccaagtcaacgagttatttgcagaccacgagtccagtctcaaacccatcgatgttcctagagattggatatgggatctcccaagaaggactgtttacttcggaacatcagtaacatcaatattcagaggtctttcaacggagcagatacagttctgcttttggaaaggattcgtatgtgtccgtggattcgaacagaagacaagagcaccgcgtccattaatggcaaggttgcattttcctgcgagcaaattgaagaacaacaaaacctaa

SEQ ID NO: 29716 - protein, 234 aa, Arabidopsis thaliana
  misc_feature (1)..(234): Ceres Seq. ID no. 4926874
MTLREHMERNMELQEGDMSKALVALHPTTTSIPTPKLKNISRLRTEHQVYELPDSHRLLDGMDKREPDDPSPYLLAIWTPGETANSAQPPEQKCGGKASGKMCFDETCSECNSLREANSQTVRGTLLIPCRTAMRGSFPLNGTYFQVNELFADHESSLKPIDVPRDWIWDLPRRTVYFGTSVTSIFRGLSTEQIQFCFWKGFVCVRGFEQKTRAPRPLMARLHFPASKLKNNKT

SEQ ID NO: 29717 - protein, 228 aa, Arabidopsis thaliana
  misc_feature (1)..(228): Ceres Seq. ID no. 4926875
MERNMELQEGDMSKALVALHPTTTSIPTPKLKNISRLRTEHQVYELPDSHRLLDGMDKREPDDPSPYLLAIWTPGETANSAQPPEQKCGGKASGKMCFDETCSECNSLREANSQTVRGTLLIPCRTAMRGSFPLNGTYFQVNELFADHESSLKPIDVPRDWIWDLPRRTVYFGTSVTSIFRGLSTEQIQFCFWKGFVCVRGFEQKTRAPRPLMARLHFPASKLKNNKT

SEQ ID NO: 29718 - protein, 224 aa, Arabidopsis thaliana
  misc_feature (1)..(224): Ceres Seq. ID no. 4926876
MELQEGDMSKALVALHPTTTSIPTPKLKNISRLRTEHQVYELPDSHRLLDGMDKREPDDPSPYLLAIWTPGETANSAQPPEQKCGGKASGKMCFDETCSECNSLREANSQTVRGTLLIPCRTAMRGSFPLNGTYFQVNELFADHESSLKPIDVPRDWIWDLPRRTVYFGTSVTSIFRGLSTEQIQFCFWKGFVCVRGFEQKTRAPRPLMARLHFPASKLKNNKT

SEQ ID NO: 29719 - DNA, 876 bp, Arabidopsis thaliana
  misc_feature (1)..(876): Ceres Seq. ID no. 4926979
atgtcaccagcaacatatctagagacatcaaactggttgtttcaagaaaacagaggaaccaaatggacagctgaagaaaacaagaaattcgaaaacgctttagccttttacgacaaagatactcccgacagatggtccagagtcgctgccatgcttcccggtaaaacagtcggagatgtgatcaaacaatacagagagcttgaggaagacgttagcgacatcgaagctggtcttataccaatccctggttacgcctctgattcattcacacttgattggggtggctacgacggagcaagcggtaacaatgggtttaacatgaacggttactacttttccgccgccggaggaaagagaggatccgccgcacgaacggcggagcatgagaggaagaaaggtgttccatggacagaagaagaacacagacaatttctgatgggtttgaagaaatatggaaaaggagattggagaaacatagctcgtaactttgtgaccacaagaacgccaacgcaagtcgcaagtcacgctcaaaagtatttcatacggcaagtcaatggtggcaaagacaaacgccgttcaagcatccatgatatcacaaccgtcaacatccccgactctcctgacgctgcagccgcggataacgcaaccgcaaacgcaccttgctcgccaccttccgtaggaggaaaccagcgggagacatcggagtgggaaggtcaaacactatacgatgaaacagcagctgcgttttataatcaaaacgcgttttcagaaacgctacttggaatgtcttcgacgccctacatggcaaaacttcaggagcagagttttctgaacgcatcgcaattcgaatcgtacaatgcgtatctccaaatgtag

SEQ ID NO: 29720 - protein, 291 aa, Arabidopsis thaliana
  misc_feature (1)..(291): Ceres Seq. ID no. 4926980
MSPATYLETSNWLFQENRGTKWTAEENKKFENALAFYDKDTPDRWSRVAAMLPGKTVGDVIKQYRELEEDVSDIEAGLIPIPGYASDSFTLDWGGYDGASGNNGFNMNGYYFSAAGGKRGSAARTAEHERKKGVPWTEEEHRQFLMGLKKYGKGDWRNIARNFVTTRTPTQVASHAQKYFIRQVNGGKDKRRSSIHDITTVNIPDSPDAAAADNATANAPCSPPSVGGNQRETSEWEGQTLYDETAAAFYNQNAFSETLLGMSSTPYMAKLQEQSFLNASQFESYNAYLQM

SEQ ID NO: 29721 - protein, 241 aa, Arabidopsis thaliana
  misc_feature (1)..(241): Ceres Seq. ID no. 4926981
MLPGKTVGDVIKQYRELEEDVSDIEAGLIPIPGYASDSFTLDWGGYDGASGNNGFNMNGYYFSAAGGKRGSAARTAEHERKKGVPWTEEEHRQFLMGLKKYGKGDWRNIARNFVTTRTPTQVASHAQKYFIRQVNGGKDKRRSSIHDITTVNIPDSPDAAAADNATANAPCSPPSVGGNQRETSEWEGQTLYDETAAAFYNQNAFSETLLGMSSTPYMAKLQEQSFLNASQFESYNAYLQM

SEQ ID NO: 29722 - protein, 185 aa, Arabidopsis thaliana
  misc_feature (1)..(185): Ceres Seq. ID no. 4926982
MNGYYFSAAGGKRGSAARTAEHERKKGVPWTEEEHRQFLMGLKKYGKGDWRNIARNFVTTRTPTQVASHAQKYFIRQVNGGKDKRRSSIHDITTVNIPDSPDAAAADNATANAPCSPPSVGGNQRETSEWEGQTLYDETAAAFYNQNAFSETLLGMSSTPYMAKLQEQSFLNASQFESYNAYLQM

SEQ ID NO: 29723 - DNA, 1681 bp, Arabidopsis thaliana
  misc_feature (1)..(1681): Ceres Seq. ID no. 4927134
aattagattgtttttgttttgtttaacatcagttgcgaatcgagctggattcttgggctcgctttttctttcaatcaaaagtttcgatattagtgaaggataaaattcgctaaaaaaagagaattttttttgttaaaaaaattataaaagctggctttctcaaaatttctccatgtggtcgacgaagaagacgaagaagacgaagaagaaagagaaagtctcttagcaaacatgaccgccaccgaagctaagaatcgcaaaatcaatgtcggagatggagatgacgttgttgatatcgaaatccctgacactgctcatcaaattagcagcgattcatggtttcaggtggcgttcgttttgaccaccggtataaacagcgcgtatgtgttgggatattcaggaacaattatggttcctttaggttggattggtggtgtggttggtcttcttattgctactgcaatctctctttatgcaaacactctaatagctaagcttcatgagtttggtggcagaagacacattcgctatagagaccttgctggattcatttacggtaggaaggcttatcatcttacatggggattgcaatatgttaatcttttcatgattaattgtggattcattatcctagctggttccgccttaaaggctgtttatgtgcttttcagggatgatcataccatgaaactacctcattttatagccattgctggtttgatttgtgcgattttcgctattgggattcctcatttatcggctcttggggtctggcttggagtttcgaccttcctcagtctcatctatattgttgtggcaatcgtgctatcggttagagatggagtaaaaacaccttcaagagattacgagatacaaggatcatcattgagcaaactttttaccatcacaggagcagccgcaaatctggttttcgcattcaacaccgggatgcttccagaaattcaggcaacagtgaggcaaccagttgttaaaaacatgatgaaggctctatactttcaattcacagcgggtgttttaccgatgtacgcagttacattcatcggatattgggcttatggatcctcaacctcgacctatctactaaacagtgttaatggcccactctgggtcaaagcccttgctaacgtctctgctatccttcaatctgttatctctttgcacatatttgcgagtccaacatatgagtacatggacacaaagtatgggatcaaaggaaacccatttgcgataaagaacctgctgtttaggatcatggcgagaggcgggtacatagcggtaagcacgcttatctcagcgctgttgccgttcctcggtgacttcatgagcctaactggtgcagtgagcacattccctctcacattcattctagccaaccacatgtactataaggcaaagaacaataagctgaatgctatgcaaaagctatggcattggcttaacgttgtcttctttagtttgatgtctgttgctgcagccattgcagctgtcagactcatcgccgttgattccaaaaatttccatgtttttgcagatttgtaattcattatattatatagtcaattgtgtatcctttattcttaggcaggtttatttctcctgtaagcttgtattctctctctatttgtcttaccattagagcctaaataaataaatcaagttc

SEQ ID NO: 29724 - protein, 442 aa, Arabidopsis thaliana
  misc_feature (1)..(442): Ceres Seq. ID no. 4927135
MTATEAKNRKINVGDGDDVVDIEIPDTAHQISSDSWFQVAFVLTTGINSAYVLGYSGTIMVPLGWIGGVVGLLIATAISLYANTLIAKLHEFGGRRHIRYRDLAGFIYGRKAYHLTWGLQYVNLFMINCGFIILAGSALKAVYVLFRDDHTMKLPHFIAIAGLICAIFAIGIPHLSALGVWLGVSTFLSLIYIVVAIVLSVRDGVKTPSRDYEIQGSSLSKLFTITGAAANLVFAFNTGMLPEIQATVRQPVVKNMMKALYFQFTAGVLPMYAVTFIGYWAYGSSTSTYLLNSVNGPLWVKALANVSAILQSVISLHIFASPTYEYMDTKYGIKGNPFAIKNLLFRIMARGGYIAVSTLISALLPFLGDFMSLTGAVSTFPLTFILANHMYYKAKNNKLNAMQKLWHWLNVVFFSLMSVAAAIAAVRLIAVDSKNFHVFADL

SEQ ID NO: 29725 - protein, 383 aa, Arabidopsis thaliana
  misc_feature (1)..(383): Ceres Seq. ID no. 4927136
MVPLGWIGGVVGLLIATAISLYANTLIAKLHEFGGRRHIRYRDLAGFIYGRKAYHLTWGLQYVNLFMINCGFIILAGSALKAVYVLFRDDHTMKLPHFIAIAGLICAIFAIGIPHLSALGVWLGVSTFLSLIYIVVAIVLSVRDGVKTPSRDYEIQGSSLSKLFTITGAAANLVFAFNTGMLPEIQATVRQPVVKNMMKALYFQFTAGVLPMYAVTFIGYWAYGSSTSTYLLNSVNGPLWVKALANVSAILQSVISLHIFASPTYEYMDTKYGIKGNPFAIKNLLFRIMARGGYIAVSTLISALLPFLGDFMSLTGAVSTFPLTFILANHMYYKAKNNKLNAMQKLWHWLNVVFFSLMSVAAAIAAVRLIAVDSKNFHVFADL

SEQ ID NO: 29726 - protein, 317 aa, Arabidopsis thaliana
  misc_feature (1)..(317): Ceres Seq. ID no. 4927137
MINCGFIILAGSALKAVYVLFRDDHTMKLPHFIAIAGLICAIFAIGIPHLSALGVWLGVSTFLSLIYIVVAIVLSVRDGVKTPSRDYEIQGSSLSKLFTITGAAANLVFAFNTGMLPEIQATVRQPVVKNMMKALYFQFTAGVLPMYAVTFIGYWAYGSSTSTYLLNSVNGPLWVKALANVSAILQSVISLHIFASPTYEYMDTKYGIKGNPFAIKNLLFRIMARGGYIAVSTLISALLPFLGDFMSLTGAVSTFPLTFILANHMYYKAKNNKLNAMQKLWHWLNVVFFSLMSVAAAIAAVRLIAVDSKNFHVFADL

SEQ ID NO: 29727 - DNA, 1551 bp, Arabidopsis thaliana
  misc_feature (1)..(1551): Ceres Seq. ID no. 4927185
acaaaagaaaattgtcaatttcgaaaaatgttgagcacaagctctgatcttcatggccgtcttctccggtgagtgacatctctctctggcctctgtttttttggcctttaagtgcttttttcttgaagaaccctaattttgatttgttttgaggattcagattatcagaaccaatagcagagattcttagacgtacacagtacacaccgcaagagagcagcaaagtatccaccaaagatatactcttgtccttgttaccaaacacttcgtcttctcgtctcgccaatgaagaatcgatcaaaagtctcgcgcttgcttgtgcccttctcgcttcttcacgttcatccactcacgaacttctctcatggattccagaaaacctctctgtcatgggggaatctacattttgggagatttcaagggattgtttcagtgatttttctagcaacagtaatgctgagaagcttgtggaattggtagaggatagtgagaagatcgaaatgttgccgatagttttgccggagttaaaagatggaatcgaaaagagttcacttggtaaaggcagtgatgcagaggatgtttcagctgcaatggctagaacacctgttggttatgctatacttgctgctcaccagctcaggtggtttgttactcaggttaaaaaaccgaatttggtgaaattttgtaacttggtggttccttgtgctttgacagcacttgatcattggtctcctgaagtcaaagggcagggtatgataacctttgttcatcttgctaaaaatgtgagttccggtgatcttggtttgtatggagatgtggttcttgatgcgtgttgccagaatatagcttccgatgatgagatttggatacatgtggtagagttatctgtgcttcttgttactaaaatccacccaaataatcctcgaagcccgtggtatgagaagatcatgaatgagatgctcgggcatttggaacgccaaccaagaaataaggagcgacgtatcacttggctaagatttgttgagccactcttgaactctctagggcttttcttacttgctcattttcgacgtatcttccctcttttctttcagtggatgcattcagacgacgccgaaacagttctgttggttcttgagagactggagacagttgtgaggttgacgtggattagacactcacctgtgttcccaagattggtggatgagcttgtttccttgtacaaagagtcatcgatgcgtaaggatcgcgatgatattagacctcttatcctccgtatcttgatgctactccgccagtgcaaaggtctacggtttgagtcagcgtggagtcaataccaggaggatccaaatctgagtactgttagtcaacatatatggactagttcaagttgatctcaagagcgtatgtttgactaaaacagccatttttttttctaattttcgatattagtttggtctaggcctagtgatgcaagtaattactggcgaatcctcgaatttttgtaagcatttggctcttgactcttcttaagctaatctgatttgatac

SEQ ID NO: 29728 - protein, 334 aa, Arabidopsis thaliana; identical to SEQ ID NO: 29550
  misc_feature (1)..(334): Ceres Seq. ID no. 4927186

SEQ ID NO: 29729 - protein, 297 aa, Arabidopsis thaliana
  misc_feature (1)..(297): Ceres Seq. ID no. 4927187
MLPIVLPELKDGIEKSSLGKGSDAEDVSAAMARTPVGYAILAAHQLRWFVTQVKKPNLVKFCNLVVPCALTALDHWSPEVKGQGMITFVHLAKNVSSGDLGLYGDVVLDACCQNIASDDEIWIHVVELSVLLVTKIHPNNPRSPWYEKIMNEMLGHLERQPRNKERRITWLRFVEPLLNSLGLFLLAHFRRIFPLFFQWMHSDDAETVLLVLERLETVVRLTWIRHSPVFPRLVDELVSLYKESSMRKDRDDIRPLILRILMLLRQCKGLRFESAWSQYQEDPNLSTVSQHIWTSSS

SEQ ID NO: 29730 - protein, 267 aa, Arabidopsis thaliana
  misc_feature (1)..(267): Ceres Seq. ID no. 4927188
MARTPVGYAILAAHQLRWFVTQVKKPNLVKFCNLVVPCALTALDHWSPEVKGQGMITFVHLAKNVSSGDLGLYGDVVLDACCQNIASDDEIWIHVVELSVLLVTKIHPNNPRSPWYEKIMNEMLGHLERQPRNKERRITWLRFVEPLLNSLGLFLLAHFRRIFPLFFQWMHSDDAETVLLVLERLETVVRLTWIRHSPVFPRLVDELVSLYKESSMRKDRDDIRPLILRILMLLRQCKGLRFESAWSQYQEDPNLSTVSQHIWTSSS

SEQ ID NO: 29731 - DNA, 978 bp, Arabidopsis thaliana
  misc_feature (1)..(978): Ceres Seq. ID no. 4927536
atggtggttggaggcgtcagtctcttcccggagacggcagaagcgatcgtgatgggaccgtcgatgcagaagctgacgtggcattactataaagtttacaacacttgcgagaatgcagagaattttgtgaggcaccaagttgagatattttacaagaacgataaaagtattgctcctaagctccttcgtctcctctactcagactgctttgtttccggatgcgatgcatcagttcttctagaaggtccaaactcagagaaaatggcgccacaaaacagaggacttggaggattcgttctcatagacaaaatcaaaatagtcttggaacagagatgtcctggtgttgtctcttgcgccgacattcttaatcttgcaactcgtgatgctgttcatttggcgggtgcaccatcttatcctgtgttcacaggcaggagagatggtttgacgtctgataagcaaaccgtggacctaccatcgccatccatctcatgggaccaagccatgtcttatttcaaatccagaggcttgaatgttcttgacatggctacacttctaggatcacattcaatggggagaacacattgcagctatgttgttgatcgactctacaattacaacaagaccggtaaaccaagccctactatgaacaagtatttcctatctgaaatggcaaagcaatgtcctccaagaacgaggaaaggccagaccgatccgctcgtgtacctaaacccggactcaggctcaaaccacagcttcacaagctcattttactcaagaattctatcaaacaaatctgtacttgaagtagatcaacaactgctttacaatgatgacaccaagcaaatatctaaggaattctcagagggtttcgaggattttcggaaatcatttgctctttcgatgagcaagatgggagcgataaatgtgttaactaaaacggaaggtgagatacgaaaagattgcaggcatataaactaa

SEQ ID NO: 29732 - protein, 325 aa, Arabidopsis thaliana
  misc_feature (1)..(325): Ceres Seq. ID no. 4927537
MVVGGVSLFPETAEAIVMGPSMQKLTWHYYKVYNTCENAENFVRHQVEIFYKNDKSIAPKLLRLLYSDCFVSGCDASVLLEGPNSEKMAPQNRGLGGFVLIDKIKIVLEQRCPGVVSCADILNLATRDAVHLAGAPSYPVFTGRRDGLTSDKQTVDLPSPSISWDQAMSYFKSRGLNVLDMATLLGSHSMGRTHCSYVVDRLYNYNKTGKPSPTMNKYFLSEMAKQCPPRTRKGQTDPLVYLNPDSGSNHSFTSSFYSRILSNKSVLEVDQQLLYNDDTKQISKEFSEGFEDFRKSFALSMSKMGAINVLTKTEGEIRKDCRHIN

SEQ ID NO: 29733 - protein, 308 aa, Arabidopsis thaliana
  misc_feature (1)..(308): Ceres Seq. ID no. 4927538
MGPSMQKLTWHYYKVYNTCENAENFVRHQVEIFYKNDKSIAPKLLRLLYSDCFVSGCDASVLLEGPNSEKMAPQNRGLGGFVLIDKIKIVLEQRCPGVVSCADILNLATRDAVHLAGAPSYPVFTGRRDGLTSDKQTVDLPSPSISWDQAMSYFKSRGLNVLDMATLLGSHSMGRTHCSYVVDRLYNYNKTGKPSPTMNKYFLSEMAKQCPPRTRKGQTDPLVYLNPDSGSNHSFTSSFYSRILSNKSVLEVDQQLLYNDDTKQISKEFSEGFEDFRKSFALSMSKMGAINVLTKTEGEIRKDCRHIN

SEQ ID NO: 29734 - protein, 304 aa, Arabidopsis thaliana
  misc_feature (1)..(304): Ceres Seq. ID no. 4927539
MQKLTWHYYKVYNTCENAENFVRHQVEIFYKNDKSIAPKLLRLLYSDCFVSGCDASVLLEGPNSEKMAPQNRGLGGFVLIDKIKIVLEQRCPGVVSCADILNLATRDAVHLAGAPSYPVFTGRRDGLTSDKQTVDLPSPSISWDQAMSYFKSRGLNVLDMATLLGSHSMGRTHCSYVVDRLYNYNKTGKPSPTMNKYFLSEMAKQCPPRTRKGQTDPLVYLNPDSGSNHSFTSSFYSRILSNKSVLEVDQQLLYNDDTKQISKEFSEGFEDFRKSFALSMSKMGAINVLTKTEGEIRKDCRHIN

SEQ ID NO: 29735 - DNA, 1689 bp, Arabidopsis thaliana
  misc_feature (1)..(1689): Ceres Seq. ID no. 4927632
atttggctctttatcttgtctttgtctgatcagtagtcactacatttgtttctttcacaatctttcttttttgcttcatattgaactgcaagaccaatccatgaatgcaaatataaaatattgtcttacggttaaccatctctaagtgtttgctagtcatgaattgtgaaattgtttcgcttcaaacatagaattagttgatttggaaatgtagacatgaatgcttatctaaatacaataaactgtgttcttgtttcagttgtgtatcagagatgagaccttgactggtaatttcaatggagcataattaaatgctaatgatacttattttctggttaatgcagggaggttgagagtttgaagaaaccatttacgccacccagggaagtgcatgttcaagtcttgcactccatgccacctcaaaagatcgagatcttcaaatctatggaaaactgggccgaggagaaccttctgattcacctcaaggatgtggagaagtcttggcaaccccaggatttcttgcctgaccctgcatcagatgggtttgaagatcaggtaagagagttaagagagagggctagagagctccctgatgattactttgttgttttggtgggggacatgatcacagaagaagcacttccgacctatcaaactatgttgaacactttggatggagttagggatgaaacaggtgctagtcctacttcatgggctatttggaccagagcttggactgcagaagaaaaccgacatggcgatcttctgaataaatacctttacttgtctggtcgtgttgacatgaggcagatcgaaaagaccattcagtacttgattggatctggaatggatccgcggacagagaataacccctaccttggcttcatctatacgtcattccaagaaagagcgacattcatctctcacggaaacacagcccgccaagccaaagagcacggggacatcaaactagcccaaatatgtggcacaatagctgcagacgagaagcgtcatgaaacagcatacaccaagatagttgaaaagctctttgagattgatcctgatggtactgtcatggcttttgcagacatgatgagaaagaaaatctcaatgcctgctcacttgatgtatgatgggcgcaacgacaacctctttgacaacttctcttccgtggctcagaggctcggtgtttacaccgccaaagactatgcagacattcttgagtttctggttggtaggtggaaaatccaggacttaaccgggctttcaggtgaaggaaacaaagcacaagactatttatgcgggttggctccaaggatcaagagattggatgagagagctcaagcaagagccaagaaaggacccaagattcctttcagttggatacacgacagagaagtgcagctctaaaaggacaaagacaaaaacaaaaacctatcctcccggttcctcatttcatctgtctgctcttaaaattggtgtagattactatggttttctgataatgttggtgggtctagttacaaagttgagatgcagtgatttagtagctttgtttttcccagtcactatatgtttggtctttggtccgttagcacacttgtagtagttaaaacagtttaagtatggtctgtactcagtcttcctcttctctgtggagttttgtttaagttcaggttagttttgttt

SEQ ID NO: 29736 - protein, 332 aa, Arabidopsis thaliana
  misc_feature (1)..(332): Ceres Seq. ID no. 4927633
MPPQKIEIFKSMENWAEENLLIHLKDVEKSWQPQDFLPDPASDGFEDQVRELRERARELPDDYFVVLVGDMITEEALPTYQTMLNTLDGVRDETGASPTSWAIWTRAWTAEENRHGDLLNKYLYLSGRVDMRQIEKTIQYLIGSGMDPRTENNPYLGFIYTSFQERATFISHGNTARQAKEHGDIKLAQICGTIAADEKRHETAYTKIVEKLFEIDPDGTVMAFADMMRKKISMPAHLMYDGRNDNLFDNFSSVAQRLGVYTAKDYADILEFLVGRWKIQDLTGLSGEGNKAQDYLCGLAPRIKRLDERAQARAKKGPKIPFSWIHDREVQL

SEQ ID NO: 29737 - protein, 321 aa, Arabidopsis thaliana
  misc_feature (1)..(321): Ceres Seq. ID no. 4927634
MENWAEENLLIHLKDVEKSWQPQDFLPDPASDGFEDQVRELRERARELPDDYFVVLVGDMITEEALPTYQTMLNTLDGVRDETGASPTSWAIWTRAWTAEENRHGDLLNKYLYLSGRVDMRQIEKTIQYLIGSGMDPRTENNPYLGFIYTSFQERATFISHGNTARQAKEHGDIKLAQICGTIAADEKRHETAYTKIVEKLFEIDPDGTVMAFADMMRKKISMPAHLMYDGRNDNLFDNFSSVAQRLGVYTAKDYADILEFLVGRWKIQDLTGLSGEGNKAQDYLCGLAPRIKRLDERAQARAKKGPKIPFSWIHDREVQL

SEQ ID NO: 29738 - protein, 262 aa, Arabidopsis thaliana
  misc_feature (1)..(262): Ceres Seq. ID no. 4927635
MITEEALPTYQTMLNTLDGVRDETGASPTSWAIWTRAWTAEENRHGDLLNKYLYLSGRVDMRQIEKTIQYLIGSGMDPRTENNPYLGFIYTSFQERATFISHGNTARQAKEHGDIKLAQICGTIAADEKRHETAYTKIVEKLFEIDPDGTVMAFADMMRKKISMPAHLMYDGRNDNLFDNFSSVAQRLGVYTAKDYADILEFLVGRWKIQDLTGLSGEGNKAQDYLCGLAPRIKRLDERAQARAKKGPKIPFSWIHDREVQL

SEQ ID NO: 29739 - DNA, 921 bp, Arabidopsis thaliana
  misc_feature (1)..(921): Ceres Seq. ID no. 4927666
atggctgtgttaggcgacggattcgtcgcctccaccaagttcgagatcctcaaagccttcgagtctccgcttcctcttcctgaattcttggcctatcactctgactccatctccgccattatagcccctgtagctgctccggtcacagccgatctgattcgcatcctccctaatcttcgcttggttgttactaccagcgccggcgttgaccatgttgacttagttgagtgtcgtcgtcgaggcatctccgtcgccaacgctggctcaagcttctcggaagatgtcgcagatactgccgtcggtttactcatcgacgtcttccgccgcatctccgccgccaatcggttcgttaagcaacggttttggccactcaaaggcgattatcctctcggttccaagttggggagaaagcgaatcggaatcgtgggactaggaagcattggctcgaaagtagcgacaaggctcgacgcctttggttgccaaatttcatatagctcaagaaacagaaaaccatatgatgttccatatcactattacatggatatagaggagatggcagctaatagtgatgcactcataatctgttgtgaattgaatgagaagacattgcgtttgattaataaagatgttctttctgctctgggaaagcgaggagtgatcgttaacgtggctcgtggggctataatcgatgaggaagaaatggtgagatgtttgagagaaggtgagattggtggtgctggtttggatgtttttgaagatgagcctaatgttccgaaggagctttttgaattggataatgttgttttctctccacatagtgcttttatgacattggaaggtcttgaagaacttgggaaagttgtagtagggaatattgaagctttcttctccaataaacctcttttaactcctgttctttga

SEQ ID NO: 29740 - protein, 306 aa, Arabidopsis thaliana
  misc_feature (1)..(306): Ceres Seq. ID no. 4927667
MAVLGDGFVASTKFEILKAFESPLPLPEFLAYHSDSISAIIAPVAAPVTADLIRILPNLRLVVTTSAGVDHVDLVECRRRGISVANAGSSFSEDVADTAVGLLIDVFRRISAANRFVKQRFWPLKGDYPLGSKLGRKRIGIVGLGSIGSKVATRLDAFGCQISYSSRNRKPYDVPYHYYMDIEEMAANSDALIICCELNEKTLRLINKDVLSALGKRGVIVNVARGAIIDEEEMVRCLREGEIGGAGLDVFEDEPNVPKELFELDNVVFSPHSAFMTLEGLEELGKVVVGNIEAFFSNKPLLTPVL

SEQ ID NO: 29741 - DNA, 942 bp, Arabidopsis thaliana
  misc_feature (1)..(942): Ceres Seq. ID no. 4927736
attgcgaattttaattgatcactctctctctctatctctgttcacacatctctcccaaagtaggtagaagaagatggggacgacgttagatgtatcaagagcagagctagcacttgtggtaatgtatttgaacaaagcagaggcaagagataagttatgcagagctatacagtatggttccaagttcttgagtggtggacaacctggtactgctcaaaatgttgacaaatctactagcttagcaagaaaagtcttccgtcttttcaagtttgtgaatgacttgcatggtcttatcagtcctgtgcctaaaggaactcctcttcctcttgttttacttggaaagtcgaagaacgcacttttatctacattcttgttcctggatcaaattgtctggcttgggagatcaggaatatataagaacaaagaacgagctgagttacttggacgtatatctctcttctgctggatgggatcttctgtctgcacaactttagtcgaggttggtgagatgggaaggctttcttcatcaatgaagaagatcgaaaagggactcaagaatggaaacaagtatcaggatgaggattatcgtgctaagctaaaaaaatcaaacgagaggtcacttgctttgatcaaatcagctatggacattgttgtagcagctggtcttcttcagttagctccaacgaagatcactcctcgtgtcaccggagcttttggattcatcacctccatcatttcttgttaccagttgcttccgacacgccccaagatcaaaacaccctgaagtcaatcgaggaagctggtgttaaggagaaagtcatttcagaaagtttctgttcttcttattattaaggaaattcactgctgttataaaacatcgtataaaatacttatttgcaggaattacggttattataaatttatgcctcagattcttgatac

SEQ ID NO: 29742 - protein, 236 aa, Arabidopsis thaliana
  misc_feature (1)..(236): Ceres Seq. ID no. 4927737
MGTTLDVSRAELALVVMYLNKAEARDKLCRAIQYGSKFLSGGQPGTAQNVDKSTSLARKVFRLFKFVNDLHGLISPVPKGTPLPLVLLGKSKNALLSTFLFLDQIVWLGRSGIYKNKERAELLGRISLFCWMGSSVCTTLVEVGEMGRLSSSMKKIEKGLKNGNKYQDEDYRAKLKKSNERSLALIKSAMDIVVAAGLLQLAPTKITPRVTGAFGFITSIISCYQLLPTRPKIKTP

SEQ ID NO: 29743 - protein, 220 aa, Arabidopsis thaliana
  misc_feature (1)..(220): Ceres Seq. ID no. 4927738
MYLNKAEARDKLCRAIQYGSKFLSGGQPGTAQNVDKSTSLARKVFRLFKFVNDLHGLISPVPKGTPLPLVLLGKSKNALLSTFLFLDQIVWLGRSGIYKNKERAELLGRISLFCWMGSSVCTTLVEVGEMGRLSSSMKKIEKGLKNGNKYQDEDYRAKLKKSNERSLALIKSAMDIVVAAGLLQLAPTKITPRVTGAFGFITSIISCYQLLPTRPKIKTP

SEQ ID NO: 29744 - DNA, 1283 bp, Arabidopsis thaliana
  misc_feature (1)..(1283): Ceres Seq. ID no. 4928186
gaaaatggatatgggaccatgcccaaaggtgcactctttgcagcttcggaaagaataccgagaagcaagggcaaaaggtgttgataactacgacagggaattggaagatgccatagacaggcttatcgttgagtgtgataggaagattggtagggcccttaagcgtcttcaagaagaggacgccaaagctgccattgccatttctgtctctgaagtcactcagtcgcctgaaattctcgagttatcggagaaaatcaaagagaagatgaaggaagcagatatccacgatcttgaaggcaaaatggatcttaagattagagctcttgagttagtcgaagagatgaggaccaagagagctgaccaacaggcggtgttgctgttggaagccttcaacaaagatagagcatccttgccacagcccgttccagctcaaccaccatcttccgaattacctccaccggatcctcgcactcaagaaatgataaatgagaaactgaagaaggcagaagatcttggtgaacaaggaatggttgatgaagcccagaaagccctggaagaggctgaagctcttaagaagcttacagttagacgagaacctccagcagattcaacgaagtacaccgctgttgatgtgcgcatcacagaccaaaagttgcgtctatgtgacatatgtggagcattcttgagcgtctatgacagtgatcgccgtttagctgatcattttggggggaagcttcatctaggatacatgctagtccgggacaaattaacagagcttctggatgagaaggccaatatacgcaaggaaagatcaaaggaacggaacagtaaggagagagaatcaagtaaagaccgagagaaagaacaagaaactagtcgtgaacatcgaagagattatgatcgcaggagtagagatcgagataggcaccatgaccgtgatcgtgaacaagacagagactatgatcggtcacactcaagaagcagacgtaggtcacgctcacggtccaggtcaagagatagaccaagggactatgatcgccacaggcgtcacaaccgctactagatcgatcggtcttgctgtctaacagggtttacaagttacaaatggttttaggatctatcaccgaaacttttttctgtctacatgtatgttactcaagtatgttagatgagtttcagaaaatttcacatctttttcttttaccacaaactaaagacttggaagaaacaagatgtggtttatgtttttaccacatctgagaagcgtgtatgcactatcatcg

SEQ ID NO: 29745 - protein, 353 aa, Arabidopsis thaliana
  misc_feature (1)..(353): Ceres Seq. ID no. 4928187
KMDMGPCPKVHSLQLRKEYREARAKGVDNYDRELEDAIDRLIVECDRKIGRALKRLQEEDAKAAIAISVSEVTQSPEILELSEKIKEKMKEADIHDLEGKMDLKIRALELVEEMRTKRADQQAVLLLEAFNKDRASLPQPVPAQPPSSELPPPDPRTQEMINEKLKKAEDLGEQGMVDEAQKALEEAEALKKLTVRREPPADSTKYTAVDVRITDQKLRLCDICGAFLSVYDSDRRLADHFGGKLHLGYMLVRDKLTELLDEKANIRKERSKERNSKERESSKDREKEQETSREHRRDYDRRSRDRDRHHDRDREQDRDYDRSHSRSRRRSRSRSRSRDRPRDYDRHRRHNRY

SEQ ID NO: 29746 - protein, 352 aa, Arabidopsis thaliana
  misc_feature (1)..(352): Ceres Seq. ID no. 4928188
MDMGPCPKVHSLQLRKEYREARAKGVDNYDRELEDAIDRLIVECDRKIGRALKRLQEEDAKAAIAISVSEVTQSPEILELSEKIKEKMKEADIHDLEGKMDLKIRALELVEEMRTKRADQQAVLLLEAFNKDRASLPQPVPAQPPSSELPPPDPRTQEMINEKLKKAEDLGEQGMVDEAQKALEEAEALKKLTVRREPPADSTKYTAVDVRITDQKLRLCDICGAFLSVYDSDRRLADHFGGKLHLGYMLVRDKLTELLDEKANIRKERSKERNSKERESSKDREKEQETSREHRRDYDRRSRDRDRHHDRDREQDRDYDRSHSRSRRRSRSRSRSRDRPRDYDRHRRHNRY

SEQ ID NO: 29747 - protein, 350 aa, Arabidopsis thaliana
  misc_feature (1)..(350): Ceres Seq. ID no. 4928189
MGPCPKVHSLQLRKEYREARAKGVDNYDRELEDAIDRLIVECDRKIGRALKRLQEEDAKAAIAISVSEVTQSPEILELSEKIKEKMKEADIHDLEGKMDLKIRALELVEEMRTKRADQQAVLLLEAFNKDRASLPQPVPAQPPSSELPPPDPRTQEMINEKLKKAEDLGEQGMVDEAQKALEEAEALKKLTVRREPPADSTKYTAVDVRITDQKLRLCDICGAFLSVYDSDRRLADHFGGKLHLGYMLVRDKLTELLDEKANIRKERSKERNSKERESSKDREKEQETSREHRRDYDRRSRDRDRHHDRDREQDRDYDRSHSRSRRRSRSRSRSRDRPRDYDRHRRHNRY

SEQ ID NO: 29748 - DNA, 1329 bp, Arabidopsis thaliana
  misc_feature (1)..(1329): Ceres Seq. ID no. 4928399
atgacacttgctagcgattttggttttccatccgctatatcttcatcttttacaattctagaagagagataccacaataactttcctaacactttgtgtgtttcatcaggacaggaatcgatgaataacaaccccgtcccctgtcaggtgtttcctctggtctctggtggtagttctggtgggaatttgttttcatcttcttccggattctgcaatggtgtctatgtttcatcttcctcccaggcacggccatctgtttctaccgtgccaagagacagaattactgttgctcacgtctctggtgaagggcagaggcaggaatgccctgtggaaacacattccttgcaattgatcaatcaacctcaagaacagaaaattatgacttggtcttcagaccagattcggggcttcttcgattttcctgttccagatccacaagcagcgagcagcagaactatggtttcatccaaggaagtgctttcaaaatgcgaatggccagactgggcggatcagttgatctctgatgatagtcttgaaccaaattggtcggagcttctaggtgatcctaatgtactcaatctatattcaaagatagaaacacagtcttctgatatagcaaggcaagagatcgtctttagaaatcagcatcaggtggatccatcaatggagccgtttaatgccaaaagcccaccagctagttcaatgacatctaagcaaagaatgcgttggacaccagaacttcatgaagcatttgtcgaagctatcaatcagctcggtggtagtgaacgagccacccctaaggctgttttgaagctcatcaatagccctgggttgaccgtttatcatgtcaaaagccatttgcagaaatacagaactgcaaggtataaaccagagctttccaaagatacagaagaacctctagtaaagaatttgaaaaccattgaagatatcaaatctcttgacttgaagacgagcattgaaatcactgaagctctccggttacagatgaaagttcaaaaacaactccacgagcaacttgagatccaaagatcactgcagttacaaatcgaagaacaaggtcggtatcttcagatgatgattgagaaacaacagaagatgcaagagaacaaaaaagactctacttcctcatcatcaatgccagaagctgacccttcagctccatcaccaaacctttcacaacctttcctccataaagcaaccaattcagaaccatcaataactcagaaactgcagaatggttctagcacaatggatcaaagtgaatctacttctgggactagtaatagaaaacgggttagagaagattag

SEQ ID NO: 29749 - protein, 442 aa, Arabidopsis thaliana
  misc_feature (1)..(442): Ceres Seq. ID no. 4928400
MTLASDFGFPSAISSSFTILEERYHNNFPNTLCVSSGQESMNNNPVPCQVFPLVSGGSSGGNLFSSSSGFCNGVYVSSSSQARPSVSTVPRDRITVAHVSGEGQRQECPVETHSLQLINQPQEQKIMTWSSDQIRGFFDFPVPDPQAASSRTMVSSKEVLSKCEWPDWADQLISDDSLEPNWSELLGDPNVLNLYSKIETQSSDIARQEIVFRNQHQVDPSMEPFNAKSPPASSMTSKQRMRWTPELHEAFVEAINQLGGSERATPKAVLKLINSPGLTVYHVKSHLQKYRTARYKPELSKDTEEPLVKNLKTIEDIKSLDLKTSIEITEALRLQMKVQKQLHEQLEIQRSLQLQIEEQGRYLQMMIEKQQKMQENKKDSTSSSSMPEADPSAPSPNLSQPFLHKATNSEPSITQKLQNGSSTMDQSESTSGTSNRKRVRED

SEQ ID NO: 29750 - protein, 402 aa, Arabidopsis thaliana
  misc_feature (1)..(402): Ceres Seq. ID no. 4928401
MNNNPVPCQVFPLVSGGSSGGNLFSSSSGFCNGVYVSSSSQARPSVSTVPRDRITVAHVSGEGQRQECPVETHSLQLINQPQEQKIMTWSSDQIRGFFDFPVPDPQAASSRTMVSSKEVLSKCEWPDWADQLISDDSLEPNWSELLGDPNVLNLYSKIETQSSDIARQEIVFRNQHQVDPSMEPFNAKSPPASSMTSKQRMRWTPELHEAFVEAINQLGGSERATPKAVLKLINSPGLTVYHVKSHLQKYRTARYKPELSKDTEEPLVKNLKTIEDIKSLDLKTSIEITEALRLQMKVQKQLHEQLEIQRSLQLQIEEQGRYLQMMIEKQQKMQENKKDSTSSSSMPEADPSAPSPNLSQPFLHKATNSEPSITQKLQNGSSTMDQSESTSGTSNRKRVRED

SEQ ID NO: 29751 - protein, 316 aa, Arabidopsis thaliana
  misc_feature (1)..(316): Ceres Seq. ID no. 4928402
MTWSSDQIRGFFDFPVPDPQAASSRTMVSSKEVLSKCEWPDWADQLISDDSLEPNWSELLGDPNVLNLYSKIETQSSDIARQEIVFRNQHQVDPSMEPFNAKSPPASSMTSKQRMRWTPELHEAFVEAINQLGGSERATPKAVLKLINSPGLTVYHVKSHLQKYRTARYKPELSKDTEEPLVKNLKTIEDIKSLDLKTSIEITEALRLQMKVQKQLHEQLEIQRSLQLQIEEQGRYLQMMIEKQQKMQENKKDSTSSSSMPEADPSAPSPNLSQPFLHKATNSEPSITQKLQNGSSTMDQSESTSGTSNRKRVRED

SEQ ID NO: 29752 - DNA, 639 bp, Arabidopsis thaliana
  misc_feature (1)..(639): Ceres Seq. ID no. 4928465
atggaaacttctagaaactccaccaactcatcactcttccaatggttaggtcttctagaagattctgatcagcctcctgattctacccctcctcgagtcataacccttctcgcttctaccctcgagaagatgattcagaagaacaaaaaaaaattccacacaagacacaacaaggctgatgagatcactatgttccatggctcaaaagcaccatcgttaagcatttatcgttacacagaaagaatccataggtatgctcagtgtagccctgtgtgtttcgttgcagcttttgcctacatccttagatatctacagagaccagaggctaccagtacggctcgtcgtctcacatcactcaacgttcatcgccttctcatcaccagtctcttggtcgcagcaaaattcttggaacgccagtgttataacaacgcatattatgcaaaaatcggaggagtgagcactgaagagatgaataggctggagagaacgttcttggttgatgttgatttcaggctatatattacaacggagactttcgagaaacactgtctcatgttgcagaaagaaacggtgccttgtgattcaagaaaacttagaacagttcttggagagatagcttgtagctgccaagcgatttga

SEQ ID NO: 29753 - protein, 212 aa, Arabidopsis thaliana
  misc_feature (1)..(212): Ceres Seq. ID no. 4928466
METSRNSTNSSLFQWLGLLEDSDQPPDSTPPRVITLLASTLEKMIQKNKKKFHTRHNKADEITMFHGSKAPSLSIYRYTERIHRYAQCSPVCFVAAFAYILRYLQRPEATSTARRLTSLNVHRLLITSLLVAAKFLERQCYNNAYYAKIGGVSTEEMNRLERTFLVDVDFRLYITTETFEKHCLMLQKETVPCDSRKLRTVLGEIACSCQAI

SEQ ID NO: 29754 - protein, 169 aa, Arabidopsis thaliana
  misc_feature (1)..(169): Ceres Seq. ID no. 4928467
MIQKNKKKFHTRHNKADEITMFHGSKAPSLSIYRYTERIHRYAQCSPVCFVAAFAYILRYLQRPEATSTARRLTSLNVHRLLITSLLVAAKFLERQCYNNAYYAKIGGVSTEEMNRLERTFLVDVDFRLYITTETFEKHCLMLQKETVPCDSRKLRTVLGEIACSCQAI

SEQ ID NO: 29755 - protein, 149 aa, Arabidopsis thaliana
  misc_feature (1)..(149): Ceres Seq. ID no. 4928468
MFHGSKAPSLSIYRYTERIHRYAQCSPVCFVAAFAYILRYLQRPEATSTARRLTSLNVHRLLITSLLVAAKFLERQCYNNAYYAKIGGVSTEEMNRLERTFLVDVDFRLYITTETFEKHCLMLQKETVPCDSRKLRTVLGEIACSCQAI

SEQ ID NO: 29756 - DNA, 1368 bp, Arabidopsis thaliana
  misc_feature (1)..(1368): Ceres Seq. ID no. 4928956
atggcagatttcaagcttcttttgcttatactcatccttctatctctctttgaacttgatctacttcactttcaccatgacttcttctctccttttccggtcaagatcggtttactcctgatatccatcttcttctatgcctactcaaccacccggtctaaaccggtttacctagtggatttctcatgtcaccaacccacggattcttgcaaaatctcatccgaaacgttcttcaacatggccaaaggcgctcaactctacaccgaagaaacaatccaattcatgacgaggatactaaaccggtccggtttaggagacgatacgtactccccacgttgcatgttaacctctccaccaactccatcaatgtacgaggcgagacatgaatccgaattagtcatcttcggagctcttaactcactatttaagaaaaccggaatcgaaccgagagaagtcggaatcttcatcgtaaactgcagcttgtttaaccctaacccatctctctcgtccatgatcgtaaaccggtacaagcttaaaaccgacgtcaaaacttacaatctctccggaatctccgtggacctcgccacaaatctactaaaggcaaaccctaatacctacgcagttattgttagtacggagaacatgactctaagcatgtatcgaggcaacgaccggtcaatgttagtccctaactgtctattccgagtaggtggcgctgcggttatgctctcaaaccggagtcaagaccgagtccggtctaagtacgaattgactcatattgtaaggactcacaaaggctctagcgataaacactacacttgtgctgaacaaaaagaagatagtaaaggtatcgttggagtcgcactctctaaagaactaacggttgttgctggtgacacgttaaagacgaatctaacagcacttggtccgcttgttttgcctttatctgaaaaactccggtttatcctctttttggtaaagagtaagcttttccggttaaaggttagtccatatgttccggattttaaactatgtttcaagcatttctgtattcacgctggtggtagagcgttacttgacgcggttgaaaaaggtcttggacttagtgagtttgatcttgagccgtctcggatgactttgcaccgctttggaaacacttcaagctcgtcgctgtggtacgagctggcttacgtggaggctaaatgtcgggtcaaacgaggagatagggtttggcagttggcgtttgggtcgggttttaaatgtaatagtattgtgtggagagcattgagaacgattccggctaacgagtcattggtgggtaacccgtggggtgactcggttcataagtatccagttcacgtgacctaa

SEQ ID NO: 29757 - protein, 455 aa, Arabidopsis thaliana; identical to SEQ ID NO: 29406
  misc_feature (1)..(455): Ceres Seq. ID no. 4928957

SEQ ID NO: 29758 - protein, 376 aa, Arabidopsis thaliana; identical to SEQ ID NO: 29407
  misc_feature (1)..(376): Ceres Seq. ID no. 4928958

SEQ ID NO: 29759 - protein, 361 aa, Arabidopsis thaliana
  misc_feature (1)..(361): Ceres Seq. ID no. 4928959
MTRILNRSGLGDDTYSPRCMLTSPPTPSMYEARHESELVIFGALNSLFKKTGIEPREVGIFIVNCSLFNPNPSLSSMIVNRYKLKTDVKTYNLSGISVDLATNLLKANPNTYAVIVSTENMTLSMYRGNDRSMLVPNCLFRVGGAAVMLSNRSQDRVRSKYELTHIVRTHKGSSDKHYTCAEQKEDSKGIVGVALSKELTVVAGDTLKTNLTALGPLVLPLSEKLRFILFLVKSKLFRLKVSPYVPDFKLCFKHFCIHAGGRALLDAVEKGLGLSEFDLEPSRMTLHRFGNTSSSSLWYELAYVEAKCRVKRGDRVWQLAFGSGFKCNSIVWRALRTIPANESLVGNPWGDSVHKYPVHVT

SEQ ID NO: 29760 - DNA, 1310 bp, Arabidopsis thaliana
  misc_feature (1)..(1310): Ceres Seq. ID no. 4929186
cacttttaattaaaacggtgccgtttctctcaggaacctctttcggtcggacgagaaagccaaaaacgtagcaaaacatcgatcctccgagtccgagattcaggaattggtaatggcggctatgtcagcggttctgtctctgggtttaggaacactccgcccttcgcatcgttccttgtcctgtttcgattccctccggcaccaccagacatcttttctccgttgccaccaaagtctcatctctagaaatacgacgaggtctccgctcaacaagattcttcaggcttgccttcaatccagtggattctgcaaatggtgatgctttggtgtcatcatccgatgaaagttctgagattgtatttatgggtaccggaaccagtgaagggattcctcgtgtcagctgcctcactaatcctttgaaaacatgttcggtatgcacaaaagcaacagaaccaggaaacagaaataggagacttaacaccagcattcttgttcggtacattagaccatccggaacaagtaacatcctcattgattgtggcaagttcttctaccatagtgcccttcgatggtttcccaccttcgggctaagaacacttgatgcagttgtaattactcattctcatgctgacgcaattggaggtctctgaaactgacaagtcttgatgatcttcgtgattggacaaacaatgtccaacctcacattccaatttacactgctatacgtgatctcgaggtgatgaagaagacccattattacttggttgatacaagtgtcatcatacccggagctgcagtctcagagttggagtttaaagtcatacacgaggaccagccatttgtggtaaacgatctgaagatcaccccattacctgtatggcatggaagtaactaccgttcccttggtttccgctttggtaatgtctgctacataagcgatgtcagtgacataccggaagaaacctacccgctccttaaagactgtgatctcctaattatggatgctttgaggcctgaccggtcttcagcaacacactttggcctcccaagggcgttagaggaagttcggaaaatcaaaccaaaaagaacccttttcaccggaatgatgcatttgatggaccacgagaaggtgagcgaagaactggagaaacttaggaacacagaaggcctcgatgtccaactgagctacgatggtcttcgtgtaccaatctcaatttaactcggtttattccttttttccctggtataaccggtttataattatatacataaaataaatttccttttttgtaatgacctgttatatgtgc

SEQ ID NO: 29761 - protein, 159 aa, Arabidopsis thaliana
  misc_feature (1)..(159): Ceres Seq. ID no. 4929187
MKKTHYYLVDTSVIIPGAAVSELEFKVIHEDQPFVVNDLKITPLPVWHGSNYRSLGFRFGNVCYISDVSDIPEETYPLLKDCDLLIMDALRPDRSSATHFGLPRALEEVRKIKPKRTLFTGMMHLMDHEKVSEELEKLRNTEGLDVQLSYDGLRVPISI

SEQ ID NO: 29762 - protein, 95 aa, Arabidopsis thaliana
  misc_feature (1)..(95): Ceres Seq. ID no. 4929188
MGTGTSEGIPRVSCLTNPLKTCSVCTKATEPGNRNRRLNTSILVRYIRPSGTSNILIDCGKFFYHSALRWFPTFGLRTLDAVVITHSHADAIGGL

SEQ ID NO: 29763 - DNA, 1887 bp, Arabidopsis thaliana
  misc_feature (1)..(1887): Ceres Seq. ID no. 4929292
atgtttaacttgatgagactaattcatcgatctttctcgtcgtctccaacaaactatgttcttcaaaccattcttccaatctctcaattatgctccaacggtcgtcttcaagaagctttactggagatggcgatgttaggtcccgagatggggttccatggttacgatgctttgttgaatgcgtgtttggacaaaagggctcttagagatggtcaaagagttcatgcccacatgatcaaaacccgttatttacccgccacttacctccgaactcgtctgcttatcttctatggtaaatgtgattgtttagaggatgcacggaaagtgctcgacgaaatgcctgagaagaatgtcgtttcctggactgctatgatctcgcgttattctcaaactgggcattcttctgaggctctcactgtttttgcagagatgatgagatcagatgggaaaccgaatgagttcactttcgctactgttcttacttcttgtatacgtgcttctgggttaggtcttggtaagcaaatccatggactcatagttaagtggaattacgattctcatatttttgttggaagctctcttcttgacatgtatgctaaagctggtcaaattaaagaagctcgtgagattttcgagtgtttgcctgagagagatgttgtctcatgtactgctattattgctggttatgcccaactaggtcttgatgaagaggcgttagagatgtttcatagactgcatagtgaaggaatgagtcccaattatgttacctatgctagtcttttgacagcattatctggacttgctttgctagatcatggcaagcaagctcattgccatgtcttgagacgtgaacttccgttttacgcggtccttcagaattctcttattgatatgtactcaaaatgtgggaatctttcttacgctagaaggctttttgataacatgcctgagaggacagcgatttcatggaatgcgatgcttgtgggatatagtaaacatgggttaggaagagaagttcttgaactttttagattgatgagagatgagaagagagtaaagcctgatgcagttacccttttggctgttttgtctggttgcagccatgggagaatggaagacacagggttgaatatatttgatggcatggtagcgggagaatacgggactaagcctggcactgagcattatggttgcatcgttgatatgcttggccgtgcgggtaggattgatgaggcatttgaattcatcaaaagaatgccatctaaaccaactgctggtgtcttgggttcccttttaggagcatgtagggttcacttatctgtggatattggcgaatctgtaggtcgcagactcattgagattgaaccagagaatgcagggaactatgtcatcctctctaatttgtatgcttcggctggaagatgggcagatgtaaacaatgtaagagctatgatgatgcagaaagctgttacaaaagaaccaggaagaagctggattcaacacgagcaaaccttacattacttccacgccaatgatcgtacccatccaagaagggaagaagtgttagctaaaatgaaagaaatatcgataaaaatgaagcaagctggttatgttcctgatcttagctgtgtgctatatgatgtggatgaagagcagaaggagaaaatgctacttggccacagtgagaaactagccttgacttttggtttgattgctactggtgaagggattccaattagagttttcaagaatctacgtatatgcgttgattgtcataacttcgccaagatcttctcaaaggtttttgaaagagaagtgtcattaagggataaaaacaggtttcatcaaattgtcgatggaatatgttcatgcggagattactggtga

SEQ ID NO: 29764 - protein, 628 aa, Arabidopsis thaliana
  misc_feature (1)..(628): Ceres Seq. ID no. 4929293
MFNLMRLIHRSFSSSPTNYVLQTILPISQLCSNGRLQEALLEMAMLGPEMGFHGYDALLNACLDKRALRDGQRVHAHMIKTRYLPATYLRTRLLIFYGKCDCLEDARKVLDEMPEKNVVSWTAMISRYSQTGHSSEALTVFAEMMRSDGKPNEFTFATVLTSCIRASGLGLGKQIHGLIVKWNYDSHIFVGSSLLDMYAKAGQIKEAREIFECLPERDVVSCTAIIAGYAQLGLDEEALEMFHRLHSEGMSPNYVTYASLLTALSGLALLDHGKQAHCHVLRRELPFYAVLQNSLIDMYSKCGNLSYARRLFDNMPERTAISWNAMLVGYSKHGLGREVLELFRLMRDEKRVKPDAVTLLAVLSGCSHGRMEDTGLNIFDGMVAGEYGTKPGTEHYGCIVDMLGRAGRIDEAFEFIKRMPSKPTAGVLGSLLGACRVHLSVDIGESVGRRLIEIEPENAGNYVILSNLYASAGRWADVNNVRAMMMQKAVTKEPGRSWIQHEQTLHYFHANDRTHPRREEVLAKMKEISIKMKQAGYVPDLSCVLYDVDEEQKEKMLLGHSEKLALTFGLIATGEGIPIRVFKNLRICVDCHNFAKIFSKVFEREVSLRDKNRFHQIVDGICSCGDYW

SEQ ID NO: 29765 - protein, 624 aa, Arabidopsis thaliana
  misc_feature (1)..(624): Ceres Seq. ID no. 4929294
MRLIHRSFSSSPTNYVLQTILPISQLCSNGRLQEALLEMAMLGPEMGFHGYDALLNACLDKRALRDGQRVHAHMIKTRYLPATYLRTRLLIFYGKCDCLEDARKVLDEMPEKNVVSWTAMISRYSQTGHSSEALTVFAEMMRSDGKPNEFTFATVLTSCIRASGLGLGKQIHGLIVKWNYDSHIFVGSSLLDMYAKAGQIKEAREIFECLPERDVVSCTAIIAGYAQLGLDEEALEMFHRLHSEGMSPNYVTYASLLTALSGLALLDHGKQAHCHVLRRELPFYAVLQNSLIDMYSKCGNLSYARRLFDNMPERTAISWNAMLVGYSKHGLGREVLELFRLMRDEKRVKPDAVTLLAVLSGCSHGRMEDTGLNIFDGMVAGEYGTKPGTEHYGCIVDMLGRAGRIDEAFEFIKRMPSKPTAGVLGSLLGACRVHLSVDIGESVGRRLIEIEPENAGNYVILSNLYASAGRWADVNNVRAMMMQKAVTKEPGRSWIQHEQTLHYFHANDRTHPRREEVLAKMKEISIKMKQAGYVPDLSCVLYDVDEEQKEKMLLGHSEKLALTFGLIATGEGIPIRVFKNLRICVDCHNFAKIFSKVFEREVSLRDKNRFHQIVDGICSCGDYW

SEQ ID NO: 29766 - protein, 586 aa, Arabidopsis thaliana
  misc_feature (1)..(586): Ceres Seq. ID no. 4929295
MAMLGPEMGFHGYDALLNACLDKRALRDGQRVHAHMIKTRYLPATYLRTRLLIFYGKCDCLEDARKVLDEMPEKNVVSWTAMISRYSQTGHSSEALTVFAEMMRSDGKPNEFTFATVLTSCIRASGLGLGKQIHGLIVKWNYDSHIFVGSSLLDMYAKAGQIKEAREIFECLPERDVVSCTAIIAGYAQLGLDEEALEMFHRLHSEGMSPNYVTYASLLTALSGLALLDHGKQAHCHVLRRELPFYAVLQNSLIDMYSKCGNLSYARRLFDNMPERTAISWNAMLVGYSKHGLGREVLELFRLMRDEKRVKPDAVTLLAVLSGCSHGRMEDTGLNIFDGMVAGEYGTKPGTEHYGCIVDMLGRAGRIDEAFEFIKRMPSKPTAGVLGSLLGACRVHLSVDIGESVGRRLIEIEPENAGNYVILSNLYASAGRWADVNNVRAMMMQKAVTKEPGRSWIQHEQTLHYFHANDRTHPRREEVLAKMKEISIKMKQAGYVPDLSCVLYDVDEEQKEKMLLGHSEKLALTFGLIATGEGIPIRVFKNLRICVDCHNFAKIFSKVFEREVSLRDKNRFHQIVDGICSCGDYW

SEQ ID NO: 29767 - DNA, 1134 bp, Arabidopsis thaliana
  misc_feature (1)..(1134): Ceres Seq. ID no. 4929400
atggcaagtcctagatttaattccatcatcatcatcttattcatctgcactataagcttatcgatcgtctcgatttcttgcaaagaagatcttaaaacgaaccaagccgccttgtttgcgtttggagattctctgtttgaagccggaaacaataattacttcgactctatctcaagtttccgatcaaatttctggccgtatggtaaaacaacgttcaagtttccaacgggacgggtctctgatggacgaataatgatagattttattgctgaatacgcatggttaccgttgatcccgccaaatctacaacctggttacagtaacagtcaactaacctatggacttaatttcgctactacagccgccggagttttcgccggaacttttcccggatcggtaactaatctctcgaaagatttgggaacacagttaaacaacttcaagaacgtggagaaaacgttgaggtctaatttaggagatgcagaggcgaggagagtaatctcgaaagctgtttatctttttcacataggagcaaatgactatcaatacccattctttgcaaatacctcaacttttagtaacactaccaaagaaagattcatcgatttcgtcatcggtaacacaacgactgtaatcgaggagttgtataaattaggagcaaggaaattcggattcttgagcttgggtccatttggttgtacaccaagcgcattgataataaacagtacaaagataggatcttgtttcgagccagtcacagagctgatcaatctccataaccaagaatttccaaaagtcttgaggcgtctagagcgccggttatccggattcaaatacgctcttcatgactttcacacttctctatcccaaagaatcaacaatccttctcgttacggttttaaggaaggggagatggcatgttgcgggagtgggccgttgaggggaatcaatacatgtggattccgaaatggaccatcgcaaggttacaagctatgcgaaaacgctgatgattacgtcttctttgatccttctcatttgacggaaacggctcatcaacagatcgctgagctgatttggagcggaccacctaatgtcactgcaccttacaatcttaaaacattgttcagactctag

SEQ ID NO: 29768 - protein, 377 aa, Arabidopsis thaliana
  misc_feature (1)..(377): Ceres Seq. ID no. 4929401
MASPRFNSIIIILFICTISLSIVSISCKEDLKTNQAALFAFGDSLFEAGNNNYFDSISSFRSNFWPYGKTTFKFPTGRVSDGRIMIDFIAEYAWLPLIPPNLQPGYSNSQLTYGLNFATTAAGVFAGTFPGSVTNLSKDLGTQLNNFKNVEKTLRSNLGDAEARRVISKAVYLFHIGANDYQYPFFANTSTFSNTTKERFIDFVIGNTTTVIEELYKLGARKFGFLSLGPFGCTPSALIINSTKIGSCFEPVTELINLHNQEFPKVLRRLERRLSGFKYALHDFHTSLSQRINNPSRYGFKEGEMACCGSGPLRGINTCGFRNGPSQGYKLCENADDYVFFDPSHLTETAHQQIAELIWSGPPNVTAPYNLKTLFRL

SEQ ID NO: 29769 - protein, 293 aa, Arabidopsis thaliana
  misc_feature (1)..(293): Ceres Seq. ID no. 4929402
MIDFIAEYAWLPLIPPNLQPGYSNSQLTYGLNFATTAAGVFAGTFPGSVTNLSKDLGTQLNNFKNVEKTLRSNLGDAEARRVISKAVYLFHIGANDYQYPFFANTSTFSNTTKERFIDFVIGNTTTVIEELYKLGARKFGFLSLGPFGCTPSALIINSTKIGSCFEPVTELINLHNQEFPKVLRRLERRLSGFKYALHDFHTSLSQRINNPSRYGFKEGEMACCGSGPLRGINTCGFRNGPSQGYKLCENADDYVFFDPSHLTETAHQQIAELIWSGPPNVTAPYNLKTLFRL

SEQ ID NO: 29770 - DNA, 1695 bp, Arabidopsis thaliana
  misc_feature (1)..(1695): Ceres Seq. ID no. 4929461
atcctgagaatggtcacaaattctctacctctctctctctctctctctggtagagaaaatggagatatcagttgcatcggtaacagtttctgtagctgtagttgttgtgtcatggtgggtatggagaactttacagcgggtttggcttaaaccaaagatgcttgagagttacctgagaagacaaggtcttgccggaactccttacacgcctcttgtcggtgatttgaagagaaattttagcatgctggctgaggcaagatccaaacccatcaacctaacagatgatatcacaccacgtatcgtgccttatccgttgcaaatgctcaagactcatgggaggactttctttacatggtttggacccataccaacaatcaccataatggatcctgagcaaatcaaagaagtgttcaacaaagtttatgatttccagaaggcacatacgtttcctctgggcagattaatagcggctggactcgttagttatgatggtgataaatggacaaaacaccgaagaatcatcaacccggctttccaccttgagaagatcaaaaatatggtacctgcgttccaccagagctgcagcgagattgttggcgaatgggacaagttagtgacggataaacagtcatcctgtgaggtggatatttggccttggcttgtgagtatgactgcagatgtgatctcccgtactgcatttggcagcagctacaaagaagggcagaggatatttgagctccaagcggaattagcacagctcatcattcaagcttttcggaaagctattatccctggatatcgttatttccctacaaagggtaatagaaggatgaaagcagcagctagagaaatcaaatttatactgagagggatcgttaacaaaaggcttagggcaagagaagctggggaagcaccaagtgacgatttgctgggtatacttcttgaatcgaatttgggacaaacaaaaggaaatggaatgagtaccgaggaactgatggaggagtgcaagttgttctatttcgctgggcaagagactactacagtacttctggtttggacaatggtgttgttaagccaacaccaagattggcaggctcgtgcaagagaagaagtgaagcaagtttttggcgataaagaacctgatgcagaaggcttgaaccagctcaaagttgtaagtaaaccgaaccaaaaaccttcaagtgacgtgagttcttttgttgcattgaagctgaaaatttgatccctcacagatgacgatgatattatatgaagtccttaggctatatcctccagtagtccagctgacccgagccattcacaaagagatgcagctaggtgacctgacactaccaggcggcgttcagataagtctaccaattctgctaatccaacgcgacagggagctgtggggaaacgatgcaggggagttcaagccagatagattcaaagacggtctctcaaaggcaacaaagaaccaagtctccttctttccttttgcgtggggaccgaggatctgcattggccaaaattttgcactgcttgaggcaaagatggcaatgacactgattctacggaaattctcctttgagctttctccttcttatgttcacgcgccttacacagtcctcactactcacccacagttcggtgctcctcttatcttgcacaagctctaatcgtataaactccttgttc

SEQ ID NO: 29771 - protein, 393 aa, Arabidopsis thaliana
  misc_feature (1)..(393): Ceres Seq. ID no. 4929462
MEISVASVTVSVAVVVVSWWVWRTLQRVWLKPKMLESYLRRQGLAGTPYTPLVGDLKRNFSMLAEARSKPINLTDDITPRIVPYPLQMLKTHGRTFFTWFGPIPTITIMDPEQIKEVFNKVYDFQKAHTFPLGRLIAAGLVSYDGDKWTKHRRIINPAFHLEKIKNMVPAFHQSCSEIVGEWDKLVTDKQSSCEVDIWPWLVSMTADVISRTAFGSSYKEGQRIFELQAELAQLIIQAFRKAIIPGYRYFPTKGNRRMKAAAREIKFILRGIVNKRLRAREAGEAPSDDLLGILLESNLGQTKGNGMSTEELMEECKLFYFAGQETTTVLLVWTMVLLSQHQDWQARAREEVKQVFGDKEPDAEGLNQLKVVSKPNQKPSSDVSSFVALKLKI

SEQ ID NO: 29772 - protein, 360 aa, Arabidopsis thaliana
  misc_feature (1)..(360): Ceres Seq. ID no. 4929463
MLESYLRRQGLAGTPYTPLVGDLKRNFSMLAEARSKPINLTDDITPRIVPYPLQMLKTHGRTFFTWFGPIPTITIMDPEQIKEVFNKVYDFQKAHTFPLGRLIAAGLVSYDGDKWTKHRRIINPAFHLEKIKNMVPAFHQSCSEIVGEWDKLVTDKQSSCEVDIWPWLVSMTADVISRTAFGSSYKEGQRIFELQAELAQLIIQAFRKAIIPGYRYFPTKGNRRMKAAAREIKFILRGIVNKRLRAREAGEAPSDDLLGILLESNLGQTKGNGMSTEELMEECKLFYFAGQETTTVLLVWTMVLLSQHQDWQARAREEVKQVFGDKEPDAEGLNQLKVVSKPNQKPSSDVSSFVALKLKI

SEQ ID NO: 29773 - protein, 332 aa, Arabidopsis thaliana
  misc_feature (1)..(332): Ceres Seq. ID no. 4929464
MLAEARSKPINLTDDITPRIVPYPLQMLKTHGRTFFTWFGPIPTITIMDPEQIKEVFNKVYDFQKAHTFPLGRLIAAGLVSYDGDKWTKHRRIINPAFHLEKIKNMVPAFHQSCSEIVGEWDKLVTDKQSSCEVDIWPWLVSMTADVISRTAFGSSYKEGQRIFELQAELAQLIIQAFRKAIIPGYRYFPTKGNRRMKAAAREIKFILRGIVNKRLRAREAGEAPSDDLLGILLESNLGQTKGNGMSTEELMEECKLFYFAGQETTTVLLVWTMVLLSQHQDWQARAREEVKQVFGDKEPDAEGLNQLKVVSKPNQKPSSDVSSFVALKLKI

SEQ ID NO: 29774 - DNA, 2967 bp, Arabidopsis thaliana
  misc_feature (1)..(2967): Ceres Seq. ID no. 4929535
atgtcgttaaatcgacaacttctattcacttactacttcatcgtctctcttatcctcttctccgatttcgtatcctctgcaacattaccaaaagaagaagtggatgctttacaaagcgtcgcgacggcgttgaagaagagtaattggaatttcagtgtggatccatgtgacgaaaccttgtctgaaggcggatggaggaatcctaacgccgctaagggattcgaagacgccgttacttgtaactgctcctccgtcatctgccacgtcaccaacatagttctcaaggcacaagaccttcaaggatctcttcctacagatctttcaggacttcctttcttgcaagagcttgatctgactagaaactatctcaacggttccattcctcccgaatggggagcctcatcacttctaaacatctcactacttggaaaccggataagtggttcaatcccaaaagaacttggaaaccttacaaccctttctggtcttgtcttggaatacaaccaactctcagggaagatacctccagagctcgggaatctaccaaaccttaaaagactctcgaataacttgagcggggaaatcccaagtacattcgccaaacttactacgttgactgatttacgtattagtgacaaccagttcactggtgctataccagatttcatccagaactggaaaggactagagaaactggttattcaagcaagtggtttagttggaccgattcctagtgccattggtcttctgggaaccttgacagacttgagaatcactgacttgagtggacctgaatctccatttccgccactaagaaacatgacatcgatgaagtatttgattcttaggaactgtaaccttacaggagacttacctgcgtatcttggacagaatagaaaattaaagaatctagatcttagctttaacaaactgagtggaccaatcccagccacatattccggtctttcagatgtagatttcatatactttacaagtaacatgttaaatggacaagtaccaagttggatggtagaccaaggagacacgattgatattacttacaataacttctccaaagataaaaccgaagaatgtcaacaaaaatccgtgaacacgttttcaagcacaagccctttagtggcaaataactccaatgagactaagtatgatgctgacacatgggatacaccgggttactatgatagtaaaaacgggtgggtttctagcaacacgggaaacttcttggatgatgatcggactaacaatggaaaatcaaaatggtcgaattcatcagagcttaagataacaaattctagcatagattttaggctttacacacaagcgcgtctctcggctatctccctcacttaccaggcattgtgtcttggaaaaggaaactatacggttaatcttcatttcgctgaaattatgttcaatgaaaagaacatgtatagcaatttgggaagacgatacttcgacatatacgttcagggtaaacgtgaagtgaaagatttcaatatcgttgatgaagcaaaaggtgtgggaaaagctgttgttaagaaatttcctgtcatggttacaaatgggaaactggaaataagattgcagtgggctgggaaaggaactcaagctattcctgtgagaggtgtctatggtcctctcatatctgctgtatcggtagatccagattttattccaccaaaggaaccgggcactggaactggtggtggaagttctgttggtacagtggttggtagtgtaatcgcttctacggtgtttcttgtgcttttaatcggcggtatattatggtggagaggctgcttaagacccaagagtcagatggaaaaagatttcaagaacttagatttccagatcagttcgttctccttgaggcaaatcaaagttgccacggataactttgatcctgcaaacaagatcggagaaggtggttttggtcctgtacacaagggaataatgactgatggaactgtaatcgcggtgaagcagctatcggcaaaatcaaaacaagggaatcgagaattcttaaacgagattgctatgatttcggctctgcagcatccacatttggttaaactatatggatgttgcgttgaaggtgatcagctcctgctagtttacgagtacttggagaacaacagtctcgcgcgagctcttttcggacctcaagagactcagataccactaaattggccaatgaggcagaagatttgtgttggaatagcgagaggattagcttatctccacgaggaatcaagactcaagatcgtacacagagacatcaaagccactaatgtcttgctggataaggaactaaacccaaagatttcagattttgggcttgctaagcttgatgaagaagaaaacacacacatcagcacacgagtcgctggaacatatggatacatggctccagaatacgccatgagaggccatttgacagataaagccgacgtctacagttttggcgttgtggccctagaaatcgttcacggaaagagcaacacgagctcacgatctaaagctgataccttctaccttcttgactgggtgcacgttttaagggaacaaaacactctacttgaagtagtagatccaaggctaggaacagattacaacaaacaagaagcattgatgatgattcagatagggatgctctgtaccagtccagctccaggggatagaccttcgatgtcgacggtggtgagtatgctcgaaggccattcaacggtgaatgttgagaaacttcttgaagcttcggtcaacaatgaaaaggacgaagagagtgtgagagcgatgaaaaggcattacgccacgataggtgaggaggagataacgaacacgacaactaccgatggacctttcacgtcgtcttctacgtcaaccgccaacgccaacgatctttaccctgttaagctcgactctgcctattggaacactagaacttaa

SEQ ID NO: 29775 - protein, 988 aa, Arabidopsis thaliana
  misc_feature (1)..(988): Ceres Seq. ID no. 4929536
MSLNRQLLFTYYFIVSLILFSDFVSSATLPKEEVDALQSVATALKKSNWNFSVDPCDETLSEGGWRNPNAAKGFEDAVTCNCSSVICHVTNIVLKAQDLQGSLPTDLSGLPFLQELDLTRNYLNGSIPPEWGASSLLNISLLGNRISGSIPKELGNLTTLSGLVLEYNQLSGKIPPELGNLPNLKRLSNNLSGEIPSTFAKLTTLTDLRISDNQFTGAIPDFIQNWKGLEKLVIQASGLVGPIPSAIGLLGTLTDLRITDLSGPESPFPPLRNMTSMKYLILRNCNLTGDLPAYLGQNRKLKNLDLSFNKLSGPIPATYSGLSDVDFIYFTSNMLNGQVPSWMVDQGDTIDITYNNFSKDKTEECQQKSVNTFSSTSPLVANNSNETKYDADTWDTPGYYDSKNGWVSSNTGNFLDDDRTNNGKSKWSNSSELKITNSSIDFRLYTQARLSAISLTYQALCLGKGNYTVNLHFAEIMFNEKNMYSNLGRRYFDIYVQGKREVKDFNIVDEAKGVGKAVVKKFPVMVTNGKLEIRLQWAGKGTQAIPVRGVYGPLISAVSVDPDFIPPKEPGTGTGGGSSVGTVVGSVIASTVFLVLLIGGILWWRGCLRPKSQMEKDFKNLDFQISSFSLRQIKVATDNFDPANKIGEGGFGPVHKGIMTDGTVIAVKQLSAKSKQGNREFLNEIAMISALQHPHLVKLYGCCVEGDQLLLVYEYLENNSLARALFGPQETQIPLNWPMRQKICVGIARGLAYLHEESRLKIVHRDIKATNVLLDKELNPKISDFGLAKLDEEENTHISTRVAGTYGYMAPEYAMRGHLTDKADVYSFGVVALEIVHGKSNTSSRSKADTFYLLDWVHVLREQNTLLEVVDPRLGTDYNKQEALMMIQIGMLCTSPAPGDRPSMSTVVSMLEGHSTVNVEKLLEASVNNEKDEESVRAMKRHYATIGEEEITNTTTTDGPFTSSSTSTANANDLYPVKLDSAYWNTRT

SEQ ID NO: 29776 - protein, 715 aa, Arabidopsis thaliana
  misc_feature (1)..(715): Ceres Seq. ID no. 4929537
MTSMKYLILRNCNLTGDLPAYLGQNRKLKNLDLSFNKLSGPIPATYSGLSDVDFIYFTSNMLNGQVPSWMVDQGDTIDITYNNFSKDKTEECQQKSVNTFSSTSPLVANNSNETKYDADTWDTPGYYDSKNGWVSSNTGNFLDDDRTNNGKSKWSNSSELKITNSSIDFRLYTQARLSAISLTYQALCLGKGNYTVNLHFAEIMFNEKNMYSNLGRRYFDIYVQGKREVKDFNIVDEAKGVGKAVVKKFPVMVTNGKLEIRLQWAGKGTQAIPVRGVYGPLISAVSVDPDFIPPKEPGTGTGGGSSVGTVVGSVIASTVFLVLLIGGILWWRGCLRPKSQMEKDFKNLDFQISSFSLRQIKVATDNFDPANKIGEGGFGPVHKGIMTDGTVIAVKQLSAKSKQGNREFLNEIAMISALQHPHLVKLYGCCVEGDQLLLVYEYLENNSLARALFGPQETQIPLNWPMRQKICVGIARGLAYLHEESRLKIVHRDIKATNVLLDKELNPKISDFGLAKLDEEENTHISTRVAGTYGYMAPEYAMRGHLTDKADVYSFGVVALEIVHGKSNTSSRSKADTFYLLDWVHVLREQNTLLEVVDPRLGTDYNKQEALMMIQIGMLCTSPAPGDRPSMSTVVSMLEGHSTVNVEKLLEASVNNEKDEESVRAMKRHYATIGEEEITNTTTTDGPFTSSSTSTANANDLYPVKLDSAYWNTRT

SEQ ID NO: 29777 - protein, 712 aa, Arabidopsis thaliana
  misc_feature (1)..(712): Ceres Seq. ID no. 4929538
MKYLILRNCNLTGDLPAYLGQNRKLKNLDLSFNKLSGPIPATYSGLSDVDFIYFTSNMLNGQVPSWMVDQGDTIDITYNNFSKDKTEECQQKSVNTFSSTSPLVANNSNETKYDADTWDTPGYYDSKNGWVSSNTGNFLDDDRTNNGKSKWSNSSELKITNSSIDFRLYTQARLSAISLTYQALCLGKGNYTVNLHFAEIMFNEKNMYSNLGRRYFDIYVQGKREVKDFNIVDEAKGVGKAVVKKFPVMVTNGKLEIRLQWAGKGTQAIPVRGVYGPLISAVSVDPDFIPPKEPGTGTGGGSSVGTVVGSVIASTVFLVLLIGGILWWRGCLRPKSQMEKDFKNLDFQISSFSLRQIKVATDNFDPANKIGEGGFGPVHKGIMTDGTVIAVKQLSAKSKQGNREFLNEIAMISALQHPHLVKLYGCCVEGDQLLLVYEYLENNSLARALFGPQETQIPLNWPMRQKICVGIARGLAYLHEESRLKIVHRDIKATNVLLDKELNPKISDFGLAKLDEEENTHISTRVAGTYGYMAPEYAMRGHLTDKADVYSFGVVALEIVHGKSNTSSRSKADTFYLLDWVHVLREQNTLLEVVDPRLGTDYNKQEALMMIQIGMLCTSPAPGDRPSMSTVVSMLEGHSTVNVEKLLEASVNNEKDEESVRAMKRHYATIGEEEITNTTTTDGPFTSSSTSTANANDLYPVKLDSAYWNTRT

SEQ ID NO: 29778 - DNA, 549 bp, Arabidopsis thaliana
  misc_feature (1)..(549): Ceres Seq. ID no. 4929928
atgagctcgtcgttatggacatattacggaatagtgacacctggtgaatacttggtttctactgtcaatggctttggtgctcttgctgaatccatctacgttctcattttcctcttctttgtccccaaatccagattcttgaaaacagttgttgtggttctagctttgaacgtgtgtttcccagttatcgcgattgcgggaacaagaactctgtttggagatgcaaactcgcgttctagttcaatgggtttcatatgtgctactctcaacattatcatgtatggttctcctctttcagctattaaaacggttgtgacgacgagaagtgtgcagtttatgccattttggttgtcatttttcctctttctgaacggcgcgatttggggtgtctacgctttactcctacacgatatgtttctactagtgccaaatggaatgggattctttcttgggataatgcaactcctaatttatgcctattacagaaatgccgaaccaattgtagaagatgaagaaggcctcataccaaatcaacctctcctcgcttaa

SEQ ID NO: 29779 - protein, 182 aa, Arabidopsis thaliana
  misc_feature (1)..(182): Ceres Seq. ID no. 4929929
MSSSLWTYYGIVTPGEYLVSTVNGFGALAESIYVLIFLFFVPKSRFLKTVVVVLALNVCFPVIAIAGTRTLFGDANSRSSSMGFICATLNIIMYGSPLSAIKTVVTTRSVQFMPFWLSFFLFLNGAIWGVYALLLHDMFLLVPNGMGFFLGIMQLLIYAYYRNAEPIVEDEEGLIPNQPLLA

SEQ ID NO: 29780 - protein, 101 aa, Arabidopsis thaliana
  misc_feature (1)..(101): Ceres Seq. ID no. 4929930
MGFICATLNIIMYGSPLSAIKTVVTTRSVQFMPFWLSFFLFLNGAIWGVYALLLHDMFLLVPNGMGFFLGIMQLLIYAYYRNAEPIVEDEEGLIPNQPLLA

SEQ ID NO: 29781 - DNA, 2031 bp, Arabidopsis thaliana
  misc_feature (1)..(2031): Ceres Seq. ID no. 4930300
atggaaatgagtggtctgggaagaaaacgtgtttcaaagtgggactctaaggaagacacacaccatcatcattctagcgtaaatgcaaactcggcttcttattaccgcgacaaagagtctgagcctgtccggttcaatgcagagagtaacggtgaagctaggactagaagcagagtttcacagaataacgataacagttatttttctgaacaagatggtactaggcaacagtttgtccgtaggagtggaagtagaagtaatagcaggagtagaagccgtagtagaagcccagtctatagagctagacgagacgcgggatcttatgacagacacaagacgagaacacaagtttctcctacgccaatcagagaattcaataagagaggcagtgatcatttgtttgatcaaagcagaagtgatcattatggttgggaagataacattagaaagccgagggagaccaaatatcacaccgatgatttcagagaagaggcaatgatggaaggtgcaaggtcttctgactataataatactgattatcccgaggataattcgagaataagaaggcgaagaagcgagtttacgggagagaaggaaacacaaagaagggatggtggtgatggtgaaggaggattccacaggagttcgaatattccgtgtaagtttttcgctgcggggacggggttctgtcgtaatggcaagtattgcaggttttctcatcatgttgctgatagaaaacagcctcaagacaacaacaacaacttttatagacaggacaataacaatcatactagtggtcataataaatggaatgatgttgaaagattggacaatggaagagtaggcggaatcgaagtttctcgtgccagtaagaagggagtttctgaatctaaagggaatggtagtagtagctggattgatgacatggagatgtctcctgattggaattatggagtccaagctttaaagaagcctgtgaaggaagaccatagtgttggtattattggtcagagttcacaatctcgagttcttaaagatgatcagaggagtagtggtatgttttcacatggtggcagaactatggctgagaaacctgtagctgcttcacatcagagttacagtaattcagtgaatgttgcgccagttgaaacattcaatcagaatcataatgcattaccgtaccaaagctcactaactgctggaggaagtcaacaagtgctagctgctgctgctacaaatttctcagtaggctccaacttgagcaatcttgagagtggaaaagtttatcaagataatcatcactcaactgtggagaaacctgttttggtccaaaatacagtaagtagggaacaaatcgatcagattactaacatctcagcatctctagcgcagtttcttgcaaatggtcagcccattccacagcttgaacaggcattgcagctgcctctgcattcagaatctgttcaaccaaatcaggctactactcaaagtaatgtagtgagtagtaatccaaatcagctatggggattagggatgagcactggcgctgaaggagtccccgcggttactgcatcaaagataagcaatgtcgaagagattcaagaagtatcgctagatcccaaggaaaacggggacaaaaagactgatgaagctagcaaggaagaagagggtaagaaaactggagaagacactaatgatgctgagaatgtcgtggatgaagatgaagatggtgatgatgatgggagcgacgaagagaacaagaaagagaaagacccgaaaggaatgcgggcgtttaagtttgctttagttgaggttgtaaaagagcttttaaaaccagcttggaaagaaggtaagctgaacaaagatggttacaaaaacatagtgaagaaggtagctgagaaagtgactggtacaatgcaaagtggaaacgttcctcaaacacaggagaagattgaccattatctatccgcttcgaaaccaaagcttaccaagctcgttcaggcatatgtcggcaaaatcaagaagacctaa

SEQ ID NO: 29782 - protein, 676 aa, Arabidopsis thaliana
  misc_feature (1)..(676): Ceres Seq. ID no. 4930301
MEMSGLGRKRVSKWDSKEDTHHHHSSVNANSASYYRDKESEPVRFNAESNGEARTRSRVSQNNDNSYFSEQDGTRQQFVRRSGSRSNSRSRSRSRSPVYRARRDAGSYDRHKTRTQVSPTPIREFNKRGSDHLFDQSRSDHYGWEDNIRKPRETKYHTDDFREEAMMEGARSSDYNNTDYPEDNSRIRRRRSEFTGEKETQRRDGGDGEGGFHRSSNIPCKFFAAGTGFCRNGKYCRFSHHVADRKQPQDNNNNFYRQDNNNHTSGHNKWNDVERLDNGRVGGIEVSRASKKGVSESKGNGSSSWIDDMEMSPDWNYGVQALKKPVKEDHSVGIIGQSSQSRVLKDDQRSSGMFSHGGRTMAEKPVAASHQSYSNSVNVAPVETFNQNHNALPYQSSLTAGGSQQVLAAAATNFSVGSNLSNLESGKVYQDNHHSTVEKPVLVQNTVSREQIDQITNISASLAQFLANGQPIPQLEQALQLPLHSESVQPNQATTQSNVVSSNPNQLWGLGMSTGAEGVPAVTASKISNVEEIQEVSLDPKENGDKKTDEASKEEEGKKTGEDTNDAENVVDEDEDGDDDGSDEENKKEKDPKGMRAFKFALVEVVKELLKPAWKEGKLNKDGYKNIVKKVAEKVTGTMQSGNVPQTQEKIDHYLSASKPKLTKLVQAYVGKIKKT

SEQ ID NO: 29783 - protein, 674 aa, Arabidopsis thaliana
  misc_feature (1)..(674): Ceres Seq. ID no. 4930302
MSGLGRKRVSKWDSKEDTHHHHSSVNANSASYYRDKESEPVRFNAESNGEARTRSRVSQNNDNSYFSEQDGTRQQFVRRSGSRSNSRSRSRSRSPVYRARRDAGSYDRHKTRTQVSPTPIREFNKRGSDHLFDQSRSDHYGWEDNIRKPRETKYHTDDFREEAMMEGARSSDYNNTDYPEDNSRIRRRRSEFTGEKETQRRDGGDGEGGFHRSSNIPCKFFAAGTGFCRNGKYCRFSHHVADRKQPQDNNNNFYRQDNNNHTSGHNKWNDVERLDNGRVGGIEVSRASKKGVSESKGNGSSSWIDDMEMSPDWNYGVQALKKPVKEDHSVGIIGQSSQSRVLKDDQRSSGMFSHGGRTMAEKPVAASHQSYSNSVNVAPVETFNQNHNALPYQSSLTAGGSQQVLAAAATNFSVGSNLSNLESGKVYQDNHHSTVEKPVLVQNTVSREQIDQITNISASLAQFLANGQPIPQLEQALQLPLHSESVQPNQATTQSNVVSSNPNQLWGLGMSTGAEGVPAVTASKISNVEEIQEVSLDPKENGDKKTDEASKEEEGKKTGEDTNDAENVVDEDEDGDDDGSDEENKKEKDPKGMRAFKFALVEVVKELLKPAWKEGKLNKDGYKNIVKKVAEKVTGTMQSGNVPQTQEKIDHYLSASKPKLTKLVQAYVGKIKKT

SEQ ID NO: 29784 - protein, 511 aa, Arabidopsis thaliana
  misc_feature (1)..(511): Ceres Seq. ID no. 4930303
MMEGARSSDYNNTDYPEDNSRIRRRRSEFTGEKETQRRDGGDGEGGFHRSSNIPCKFFAAGTGFCRNGKYCRFSHHVADRKQPQDNNNNFYRQDNNNHTSGHNKWNDVERLDNGRVGGIEVSRASKKGVSESKGNGSSSWIDDMEMSPDWNYGVQALKKPVKEDHSVGIIGQSSQSRVLKDDQRSSGMFSHGGRTMAEKPVAASHQSYSNSVNVAPVETFNQNHNALPYQSSLTAGGSQQVLAAAATNFSVGSNLSNLESGKVYQDNHHSTVEKPVLVQNTVSREQIDQITNISASLAQFLANGQPIPQLEQALQLPLHSESVQPNQATTQSNVVSSNPNQLWGLGMSTGAEGVPAVTASKISNVEEIQEVSLDPKENGDKKTDEASKEEEGKKTGEDTNDAENVVDEDEDGDDDGSDEENKKEKDPKGMRAFKFALVEVVKELLKPAWKEGKLNKDGYKNIVKKVAEKVTGTMQSGNVPQTQEKIDHYLSASKPKLTKLVQAYVGKIKKT

SEQ ID NO: 29785 - DNA, 1665 bp, Arabidopsis thaliana
  misc_feature (1)..(1665): Ceres Seq. ID no. 4930507
atgttggccgcgacgcctgctcatggactcaggtacgtggtggtgcccacacgctcatggcttcataggtttcgatgctgctcgtcttctctcgctcctctctccccttctgaattctcgggcggtaataaagcccagaagaagctcaacgacgagaacaacaccaacgtaagcaatgagaaaacggcgccgtattatccgaaacgaggagaaacagtggagcttgtgtgcgagagtttaggattcaaaggcaaaggaatctgtaaagttgatggaactggctacgtcgttatgtgtgaccgagctcttcccggcgaacgttttcttggccgtgtcactcgccgcaaaggcagctatgctgaagtgacaaaaatgaagacaatatctccacataaggacttagtagaagctccatgtgagtatgcatcttactgtggtggttgcaaaactcagaatctctcttatgaagctcagcttagagctaaagaagagcaagttcatgagcttatcagacatgttggaaggttttctgataacaatcctggccttgagattgtcttgaagcctattgttgcttgcgatattcaattccattatcggaataagatggagttttcatttggtccacaaagatggcttccgattgaaatgttaaacgagagacaagatggtcctaagaactttgcattggggctccatgcacctggattttttgataaggttttaaatgttgataagtgcttattacagagcgagccaggaaacttggttcttgctgctgtccaagattgctggagagatcctgaattaagtctttcaccatatgattgtcgttcacatgttgggtttcttaaacatttgatgctgagaactggaaggaatgtggagactggttcactagaacttatggtcaattttgtgacatcgtcttataagccagagctgttgaaacccctggttgataggatttcatcaattcctcaagtggtaagcattatgaataatgtaaattcttcggtaggaaacacatccgttggcgaaaaggaatatactctttatgggaaggatacaatcacagaggtcttaagagggcttacatttcaaatttcagccaactctttctttcagactaacactcatcaggctgaagttttatataagcttattgaggaatctgctggacttaaaggagatggctcagaagtcgtgctcgatcttttctgtggaactggtaccataggccttacacttgccagaagggcgaaacacgtgtatggttatgaagtagtaccacaagcaataacagatgcacacaagaatgcccaaataaacggcatagagaatgcaacattcatccaaggggatctaaacaaaataggagaagattttgggaacaatttccctaagcctgatatcgttatttctgatcccaatcgacctggtatgcacatgaagttgatcaagtttctgctaaagcttaaatctccacggatcatttatgtttcctgtaatcctgcaacctgcgccagggatctcgattacctctgtcacggcgtggaggagaagaatctaaaaggttgctacaaactgatgagtgttcagccagtggatatgttccctcacactcctcacatcgaatgtgtctgcttgttagagcttgcttga

SEQ ID NO: 29786 - protein, 554 aa, Arabidopsis thaliana
  misc_feature (1)..(554): Ceres Seq. ID no. 4930508
MLAATPAHGLRYVVVPTRSWLHRFRCCSSSLAPLSPSEFSGGNKAQKKLNDENNTNVSNEKTAPYYPKRGETVELVCESLGFKGKGICKVDGTGYVVMCDRALPGERFLGRVTRRKGSYAEVTKMKTISPHKDLVEAPCEYASYCGGCKTQNLSYEAQLRAKEEQVHELIRHVGRFSDNNPGLEIVLKPIVACDIQFHYRNKMEFSFGPQRWLPIEMLNERQDGPKNFALGLHAPGFFDKVLNVDKCLLQSEPGNLVLAAVQDCWRDPELSLSPYDCRSHVGFLKHLMLRTGRNVETGSLELMVNFVTSSYKPELLKPLVDRISSIPQVVSIMNNVNSSVGNTSVGEKEYTLYGKDTITEVLRGLTFQISANSFFQTNTHQAEVLYKLIEESAGLKGDGSEVVLDLFCGTGTIGLTLARRAKHVYGYEVVPQAITDAHKNAQINGIENATFIQGDLNKIGEDFGNNFPKPDIVISDPNRPGMHMKLIKFLLKLKSPRIIYVSCNPATCARDLDYLCHGVEEKNLKGCYKLMSVQPVDMFPHTPHIECVCLLELA

SEQ ID NO: 29787 - protein, 457 aa, Arabidopsis thaliana
  misc_feature (1)..(457): Ceres Seq. ID no. 4930509
MCDRALPGERFLGRVTRRKGSYAEVTKMKTISPHKDLVEAPCEYASYCGGCKTQNLSYEAQLRAKEEQVHELIRHVGRFSDNNPGLEIVLKPIVACDIQFHYRNKMEFSFGPQRWLPIEMLNERQDGPKNFALGLHAPGFFDKVLNVDKCLLQSEPGNLVLAAVQDCWRDPELSLSPYDCRSHVGFLKHLMLRTGRNVETGSLELMVNFVTSSYKPELLKPLVDRISSIPQVVSIMNNVNSSVGNTSVGEKEYTLYGKDTITEVLRGLTFQISANSFFQTNTHQAEVLYKLIEESAGLKGDGSEVVLDLFCGTGTIGLTLARRAKHVYGYEVVPQAITDAHKNAQINGIENATFIQGDLNKIGEDFGNNFPKPDIVISDPNRPGMHMKLIKFLLKLKSPRIIYVSCNPATCARDLDYLCHGVEEKNLKGCYKLMSVQPVDMFPHTPHIECVCLLELA

SEQ ID NO: 29788 - protein, 430 aa, Arabidopsis thaliana
  misc_feature (1)..(430): Ceres Seq. ID no. 4930510
MKTISPHKDLVEAPCEYASYCGGCKTQNLSYEAQLRAKEEQVHELIRHVGRFSDNNPGLEIVLKPIVACDIQFHYRNKMEFSFGPQRWLPIEMLNERQDGPKNFALGLHAPGFFDKVLNVDKCLLQSEPGNLVLAAVQDCWRDPELSLSPYDCRSHVGFLKHLMLRTGRNVETGSLELMVNFVTSSYKPELLKPLVDRISSIPQVVSIMNNVNSSVGNTSVGEKEYTLYGKDTITEVLRGLTFQISANSFFQTNTHQAEVLYKLIEESAGLKGDGSEVVLDLFCGTGTIGLTLARRAKHVYGYEVVPQAITDAHKNAQINGIENATFIQGDLNKIGEDFGNNFPKPDIVISDPNRPGMHMKLIKFLLKLKSPRIIYVSCNPATCARDLDYLCHGVEEKNLKGCYKLMSVQPVDMFPHTPHIECVCLLELA

SEQ ID NO: 29789 - DNA, 1584 bp, Arabidopsis thaliana
  misc_feature (1)..(1584): Ceres Seq. ID no. 4930547
accaaaatcagattagagtttcagagacatctctcgaatacgatcatcagacaagacttaacctccatttgcacgtcttcctgctcacgacagacaaatcatgaacgaatccgacagctgaacgaattgcgtgtctgagaagatccaaatcctaattttctaccttttttttttgggaactaaggttagaatttggagcttctcgtacgtttttgcttgcctacgtttccggacaaaaccctatttgcatataaacagaacaggttctgttcatcaagacactgaagcctgatggggatggaggaagggattaaagataatgctgcatcagctcccaattcaagacctacaaaccaacttaaagctcttttaccgatgcgggtgcttcaagttttcttgttgttctttgttttggttcttggaatctcagtcattagtatgcacatgatcaagtacttaaagattcaaactttagctccatcgacattgatctctacttatgatgagagaattacgttagagagccttatcaagcctccattgaatggttggcattccatgaatgacagtgagcttctttggcgtgcttcgatggagcctcggatacttgactatccatttaaaagagttcctaaaatggcattcatgtttctcaccaaaggacctttgccatttgctccactttgggaaaggtttttcaaagggcatgagggcttttactcaatctatgttcatactttgccaaattatagatcagatttcccaagctcatctgtgttttacagaagacagatcccaagtcagcatgtagcttggggagagatgagtatgtgtgatgctgaaaggaggcttttggctaacgcgttgctcgatatctctaacgaatggtttgttttactatctgaagcgtgtattcctcttcgcggtttcaactttgtctaccgttatgtctctagatcaagatatagtttcatgggttctgttgacgaggacgggccttacgggagaggcagatatagctatgcaatgggaccagaagtaagtctaaacgagtggagaaaagggtctcagtggtttgaaataaacagagcacttgctgttgatattgttgaagacatggtttactataacaaattcaaagagttttgtagacctccttgttatgtagatgaacattacttcccaacaatgctctctattggatatccggattttctcgctaatcggacattgacttggacagattggtcaaggggtggtgctcatccagctacttttggcaaggctgatataacagagaagttcatcaagaagctgtcaagaggtaaagcttgcttctacaatgatcagccatctcaagtttgttatctttttgcaagaaagtttgctccaagcgcattgaagcctttacttaaacttgcaccaaaggttcttgggttctaattaatggatctcttgtcttctttttgttcttggtttttgttctgaaatgttcttgaacttgagtgtagcttcgtatagcatggacacaactctgatccttattgtctccttccacattgataatatagatacttcaatggc

SEQ ID NO: 29790 - protein, 383 aa, Arabidopsis thaliana
  misc_feature (1)..(383): Ceres Seq. ID no. 4930548
MGMEEGIKDNAASAPNSRPTNQLKALLPMRVLQVFLLFFVLVLGISVISMHMIKYLKIQTLAPSTLISTYDERITLESLIKPPLNGWHSMNDSELLWRASMEPRILDYPFKRVPKMAFMFLTKGPLPFAPLWERFFKGHEGFYSIYVHTLPNYRSDFPSSSVFYRRQIPSQHVAWGEMSMCDAERRLLANALLDISNEWFVLLSEACIPLRGFNFVYRYVSRSRYSFMGSVDEDGPYGRGRYSYAMGPEVSLNEWRKGSQWFEINRALAVDIVEDMVYYNKFKEFCRPPCYVDEHYFPTMLSIGYPDFLANRTLTWTDWSRGGAHPATFGKADITEKFIKKLSRGKACFYNDQPSQVCYLFARKFAPSALKPLLKLAPKVLGF

SEQ ID NO: 29791 - protein, 381 aa, Arabidopsis thaliana
  misc_feature (1)..(381): Ceres Seq. ID no. 4930549
MEEGIKDNAASAPNSRPTNQLKALLPMRVLQVFLLFFVLVLGISVISMHMIKYLKIQTLAPSTLISTYDERITLESLIKPPLNGWHSMNDSELLWRASMEPRILDYPFKRVPKMAFMFLTKGPLPFAPLWERFFKGHEGFYSIYVHTLPNYRSDFPSSSVFYRRQIPSQHVAWGEMSMCDAERRLLANALLDISNEWFVLLSEACIPLRGFNFVYRYVSRSRYSFMGSVDEDGPYGRGRYSYAMGPEVSLNEWRKGSQWFEINRALAVDIVEDMVYYNKFKEFCRPPCYVDEHYFPTMLSIGYPDFLANRTLTWTDWSRGGAHPATFGKADITEKFIKKLSRGKACFYNDQPSQVCYLFARKFAPSALKPLLKLAPKVLGF

SEQ ID NO: 29792 - protein, 355 aa, Arabidopsis thaliana
  misc_feature (1)..(355): Ceres Seq. ID no. 4930550
MRVLQVFLLFFVLVLGISVISMHMIKYLKIQTLAPSTLISTYDERITLESLIKPPLNGWHSMNDSELLWRASMEPRILDYPFKRVPKMAFMFLTKGPLPFAPLWERFFKGHEGFYSIYVHTLPNYRSDFPSSSVFYRRQIPSQHVAWGEMSMCDAERRLLANALLDISNEWFVLLSEACIPLRGFNFVYRYVSRSRYSFMGSVDEDGPYGRGRYSYAMGPEVSLNEWRKGSQWFEINRALAVDIVEDMVYYNKFKEFCRPPCYVDEHYFPTMLSIGYPDFLANRTLTWTDWSRGGAHPATFGKADITEKFIKKLSRGKACFYNDQPSQVCYLFARKFAPSALKPLLKLAPKVLGF

SEQ ID NO: 29793 - DNA, 2886 bp, Arabidopsis thaliana
  misc_feature (1)..(2886): Ceres Seq. ID no. 4930559
atgcctcgtgctgttggaaaaaggactcctagaattcctatctcatacacccttgagaaggatactagggaaagatatttatcacctgttaagagaggtttaaatcagaagggggatgatactgatgatgatatggaacatgagatagcattagcattggctgaggcttcacaacgaggtggctctacaaagaactcccacacaccaaatagaaaagcaaagatgtacccccctgataaaaagggtgaaagaatgcgtgccgatattgacttggcgattgccaagcttcatgccactgatatggaagatgtccgctgtgaaccaagcttaggaagcactgaagctgataatgcggattattctggaggtagaaatgacttgacacatggagaaggttctagtgccgtggaaaagcagcaaaaaggaagaacatactataggaggagagtaggcattaaagaagaagatgcaaaagaagcctgcagtggtacagatgaagcaccaagcttaggcgctcccgatgagaaatttgaacaagaaagggaagggaaggctttgaaattcacatataaagtttcaaggagaaaaaatgaagacacagcatgtgatgctctccatacgctggcagatctatcgctgatgatgcctgaaactgccactgatactgagtcatcagttcaagctgaggaaaagaaagctggagaagcttatgtttcagattttaaagggactgatccggcatccatgtctaaaagtagttctcttagaaactccaaacagagaagatacggcagcaatgacctttgtaaccctgaactcgagagaaaaagtccaagtagttctttaatccaaaagagacggcagaaagcattaccagctaaagttcttaaagatgagcttgctgcaagctcacaagtcatagagccttgtaatagcaagggaataggtgaggaatataagcctgttgggagaggtaaacggtccgcaagtattcgaaactcacatgaaaagaaatctgccaaatctcatgatcatacttcgtcaagtaacaacatagtagaagaagatgagtcagctccatcaaatgcagtcattaaaaaacaagttaacttgccaactaaagttaggagcagaagaaagatagtaactgagaaacctctaactattgatgacgggaaaatttctgagactatagtgagtgaactttctgatactcagactttattcccaaatgataaagaaaccgcagagaagttttcgcattgcatttctagtttccgagcacggagatggtgtatttttgagtggttctacagtgcaattgactatccatggtttgccagacaagagtttgttgagtatttggatcatgtagggttgggtcatgttcctagattaactcgcgttgaatggggtgtcataaggagttctcttgggaaaccaaggcgattttctgaacagtttttgaaggaggaaaaagaaaagctatacctatacagggactctgtaagaaaacattatgatgaactaaacacgggcatgagggaaggacttccaatggatttggcccggcctctaaatgtttcacagagagtcatttgcctgcatccaaagtcaagagagattcatgacggcaatgtcctaactgttgatcactgtaggtaccggattcagtttgacaaccctgaattaggggtagaatttgttaaggatactgaatgcatgccactgaatcctctagaaaacatgccagcatcgctggcaaggcactatgctttctcaaattatcacattcagaatcccattgaggagaaaatgcatgaacgggcaaaggaaagcatgctggaaggatatcccaaactttcgtgtgagacaggccatctcttgtcctctccaaattataacattagcaattcactaaagcaggaaaaggtagatatctcaagttcaaatccacaagctcaagacggagttgatgaggctcttgctttacaattgtttaattctcagccctcaagtattggacaaatccaggcaagagaagctgatgtccaagctctttctgaactaacgcgtgcgcttgacaagaaggagctagttttgagggagctaaaatgcatgaacgacgaggttgtggaaagtcagaaagatggacataataatgccctaaaggattctgaatcttttaagaaacaatatgcagcagttctctttcagctaagcgaaatcaatgagcaggtttcattggcacttcttggcttgaggcaacgaaatacttaccaggagaatgtaccatattcatcaataagacgcatgagtaaatcaggggaacctgatggtcagttgacatacgaagacaataatgcatcagacactaatggattccatgtgtctgagatcgtcgaaagttctagaataaaagcacggaaaatggtatacagagctgtacaggcattggagttactgagaaaagacgaaaataataatgtaaatatggaagaagccattgattttgtaaataatcagctctcaatagatcaaacagaaggatcatcagtccagcaaacacaaggtggccaggatcagcgtcttccctctacaccaaatccacctagctcaactcctgccaatgattcccacctaaaccaacccgatcaaaatgacctgcaagtcccgtccgatcttgtgtcccgatgtatcgctacattgcttatgattcagaaatgtacagagaggcaattcccaccaagtgaagtagcccaggttctagactcggcagtggcgagtttacagccttgctgctcgcagaaccttccgatctatacagagattcagaagtgcatgggaatcataagaaaccagattctagccctcgtaccctcctaa

SEQ ID NO: 29794 - protein, 961 aa, Arabidopsis thaliana
  misc_feature (1)..(961): Ceres Seq. ID no. 4930560
MPRAVGKRTPRIPISYTLEKDTRERYLSPVKRGLNQKGDDTDDDMEHEIALALAEASQRGGSTKNSHTPNRKAKMYPPDKKGERMRADIDLAIAKLHATDMEDVRCEPSLGSTEADNADYSGGRNDLTHGEGSSAVEKQQKGRTYYRRRVGIKEEDAKEACSGTDEAPSLGAPDEKFEQEREGKALKFTYKVSRRKNEDTACDALHTLADLSLMMPETATDTESSVQAEEKKAGEAYVSDFKGTDPASMSKSSSLRNSKQRRYGSNDLCNPELERKSPSSSLIQKRRQKALPAKVLKDELAASSQVIEPCNSKGIGEEYKPVGRGKRSASIRNSHEKKSAKSHDHTSSSNNIVEEDESAPSNAVIKKQVNLPTKVRSRRKIVTEKPLTIDDGKISETIVSELSDTQTLFPNDKETAEKFSHCISSFRARRWCIFEWFYSAIDYPWFARQEFVEYLDHVGLGHVPRLTRVEWGVIRSSLGKPRRFSEQFLKEEKEKLYLYRDSVRKHYDELNTGMREGLPMDLARPLNVSQRVICLHPKSREIHDGNVLTVDHCRYRIQFDNPELGVEFVKDTECMPLNPLENMPASLARHYAFSNYHIQNPIEEKMHERAKESMLEGYPKLSCETGHLLSSPNYNISNSLKQEKVDISSSNPQAQDGVDEALALQLFNSQPSSIGQIQAREADVQALSELTRALDKKELVLRELKCMNDEVVESQKDGHNNALKDSESFKKQYAAVLFQLSEINEQVSLALLGLRQRNTYQENVPYSSIRRMSKSGEPDGQLTYEDNNASDTNGFHVSEIVESSRIKARKMVYRAVQALELLRKDENNNVNMEEAIDFVNNQLSIDQTEGSSVQQTQGGQDQRLPSTPNPPSSTPANDSHLNQPDQNDLQVPSDLVSRCIATLLMIQKCTERQFPPSEVAQVLDSAVASLQPCCSQNLPIYTEIQKCMGIIRNQILALVPS

SEQ ID NO: 29795 - protein, 917 aa, Arabidopsis thaliana
  misc_feature (1)..(917): Ceres Seq. ID no. 4930561
MEHEIALALAEASQRGGSTKNSHTPNRKAKMYPPDKKGERMRADIDLAIAKLHATDMEDVRCEPSLGSTEADNADYSGGRNDLTHGEGSSAVEKQQKGRTYYRRRVGIKEEDAKEACSGTDEAPSLGAPDEKFEQEREGKALKFTYKVSRRKNEDTACDALHTLADLSLMMPETATDTESSVQAEEKKAGEAYVSDFKGTDPASMSKSSSLRNSKQRRYGSNDLCNPELERKSPSSSLIQKRRQKALPAKVLKDELAASSQVIEPCNSKGIGEEYKPVGRGKRSASIRNSHEKKSAKSHDHTSSSNNIVEEDESAPSNAVIKKQVNLPTKVRSRRKIVTEKPLTIDDGKISETIVSELSDTQTLFPNDKETAEKFSHCISSFRARRWCIFEWFYSAIDYPWFARQEFVEYLDHVGLGHVPRLTRVEWGVIRSSLGKPRRFSEQFLKEEKEKLYLYRDSVRKHYDELNTGMREGLPMDLARPLNVSQRVICLHPKSREIHDGNVLTVDHCRYRIQFDNPELGVEFVKDTECMPLNPLENMPASLARHYAFSNYHIQNPIEEKMHERAKESMLEGYPKLSCETGHLLSSPNYNISNSLKQEKVDISSSNPQAQDGVDEALALQLFNSQPSSIGQIQAREADVQALSELTRALDKKELVLRELKCMNDEVVESQKDGHNNALKDSESFKKQYAAVLFQLSEINEQVSLALLGLRQRNTYQENVPYSSIRRMSKSGEPDGQLTYEDNNASDTNGFHVSEIVESSRIKARKMVYRAVQALELLRKDENNNVNMEEAIDFVNNQLSIDQTEGSSVQQTQGGQDQRLPSTPNPPSSTPANDSHLNQPDQNDLQVPSDLVSRCIATLLMIQKCTERQFPPSEVAQVLDSAVASLQPCCSQNLPIYTEIQKCMGIIRNQILALVPS

SEQ ID NO: 29796 - protein, 887 aa, Arabidopsis thaliana
  misc_feature (1)..(887): Ceres Seq. ID no. 4930562
MYPPDKKGERMRADIDLAIAKLHATDMEDVRCEPSLGSTEADNADYSGGRNDLTHGEGSSAVEKQQKGRTYYRRRVGIKEEDAKEACSGTDEAPSLGAPDEKFEQEREGKALKFTYKVSRRKNEDTACDALHTLADLSLMMPETATDTESSVQAEEKKAGEAYVSDFKGTDPASMSKSSSLRNSKQRRYGSNDLCNPELERKSPSSSLIQKRRQKALPAKVLKDELAASSQVIEPCNSKGIGEEYKPVGRGKRSASIRNSHEKKSAKSHDHTSSSNNIVEEDESAPSNAVIKKQVNLPTKVRSRRKIVTEKPLTIDDGKISETIVSELSDTQTLFPNDKETAEKFSHCISSFRARRWCIFEWFYSAIDYPWFARQEFVEYLDHVGLGHVPRLTRVEWGVIRSSLGKPRRFSEQFLKEEKEKLYLYRDSVRKHYDELNTGMREGLPMDLARPLNVSQRVICLHPKSREIHDGNVLTVDHCRYRIQFDNPELGVEFVKDTECMPLNPLENMPASLARHYAFSNYHIQNPIEEKMHERAKESMLEGYPKLSCETGHLLSSPNYNISNSLKQEKVDISSSNPQAQDGVDEALALQLFNSQPSSIGQIQAREADVQALSELTRALDKKELVLRELKCMNDEVVESQKDGHNNALKDSESFKKQYAAVLFQLSEINEQVSLALLGLRQRNTYQENVPYSSIRRMSKSGEPDGQLTYEDNNASDTNGFHVSEIVESSRIKARKMVYRAVQALELLRKDENNNVNMEEAIDFVNNQLSIDQTEGSSVQQTQGGQDQRLPSTPNPPSSTPANDSHLNQPDQNDLQVPSDLVSRCIATLLMIQKCTERQFPPSEVAQVLDSAVASLQPCCSQNLPIYTEIQKCMGIIRNQILALVPS

SEQ ID NO: 29797 - DNA, 2643 bp, Arabidopsis thaliana
  misc_feature (1)..(2643): Ceres Seq. ID no. 4930583
atggagtaccatcctcaagcaattaggttatgtgcgttgatcttcatctctttctatgctcttttacacctcgttgaagcacaagaccaaaaaggattcattagtttggattgcgggtcattgccaaatgagcctccttacaacgatccttcaaccggattaacatactcgacggacgatggtttcgtgcagagtggcaaaactggaagaatccagaaagcgttcgagtcgatcttcagtaaaccgtctttgaagcttagatacttcccggacggattccgaaactgctataccttgaatgtcacgcaagacacaaactatctgatcaaagctgtatttgtgtatggtaactacgatggtcttaacaatcccccgagtttcgatctttaccttggtccgaatctatgggtaacggttgatatgaatggacggaccaatggtactatccaggagattatccacaagaccatatctaagtctctccaggtctgtcttgttaagacaggaacaagctcacctatgattaatacgttagagctacgaccacttaaaaacaatacttacaatactcagagtggctctctgaagtatttcttccgatattatttcagcggttcaggccaaaacatacggtaccctgatgatgtcaatgatcgtaaatggtatccattctttgatgcaaaagagtggacagagttaacaaccaatctgaatataaacagttctaatggttatgcaccaccagaagttgtgatggcgtcagcctcaacgcctataagtacttttggaacatggaacttctcatggttattgccatcttccacaacccaattttatgtgtacatgcattttgccgagattcaaactctacggtccctcgatacccgagaattcaaagtgacgttgaatggaaaacttgcttatgaacgctacagccctaaaacgttagccaccgaaaccattttctattcgacaccacaacaatgtgaagatgggacatgcctcttggagttgacgaaaacacctaagtctactcttcctcctctcatgaacgctcttgaggttttcaccgtgatcgattttccacagatggaaacaaatccagatgatgttgctgctatcaagagtatccaaagcacttatggattaagtaaaatcagctggcaaggagatccatgcgttcctaaacagtttttgtgggagggtttaaactgcaataatctagataactccacgccgcctattgtcacttccttaaacttatcgtcaagtcatttaacggggatcatcgcgcaaggcattcagaatctgacacacctacaagaactagacttgtcaaataacaatttgacgggaggaatacccgaatttcttgctgacataaaatcactcttagtaataaatttaagtgggaacaattttaatggctctattcctcaaatccttttacagaagaaaggactaaagctaattcttgaaggaaacgccaatctgatttgtccggatggattatgtgtaaacaaagctggcaatggtggtgccaagaaaatgaatgttgtaataccgattgttgcatcagttgcgtttgtggttgttcttggatctgcattggcgttcttttttattttcaaaaagaaaaagacatcaaacagtcaagagtcggcaataatgactaagaacagaagatttacatattcggaggttgtaacaatgacaaataactttgaaagagttcttggtaaaggaggatttggaatggtttatcatggaactgtaaataatactgaacaagtagccgttaaaatgctttcacactcatcttctcaaggatataaagaattcaaagcagaggtggaacttcttctcagagttcaccacaaaaatttggttggcctcgttggatattgtgatgaaggagaaaacttggctcttatctacgagtacatggctaacggagacttgagagaacatatgtcaggaaagcgaggtggatctattctaaattgggaaactagactaaaaatagttgtcgagtctgcccaaggtttggaatacttgcataatggatgcaaaccaccaatggttcatagggatgttaaaaccacaaatatattgttgaatgaacacctccatgctaagctagctgattttgggctttcgagatcttttccaattgaaggagaaactcatgtgtcaacagttgttgctggaactcctggataccttgatccagaatattaccgaacaaattggttgaacgagaaaagtgatgtttatagctttggaattgtactattagagatcatcacaaaccaacttgtgatcaatcaaagtcgtgaaaaaccacatatagcagaatgggtggggttaatgcttacaaaaggagacattcaaaacattatggatccaaaactttatggtgattatgactctggttctgtctggagagcagttgaactagcaatgtcatgtctaaatccttcttcagctagaagaccaacaatgtctcaagttgttatcgaattaaacgaatgtttgtcatatgaaaacgcaagaggaggaacgagtcaaaacatgaactcagagagttcaatagaagtcagcatgaactttgatattggagctacccctgatgctcgttag

SEQ ID NO: 29798 - protein, 880 aa, Arabidopsis thaliana
  misc_feature (1)..(880): Ceres Seq. ID no. 4930584
MEYHPQAIRLCALIFISFYALLHLVEAQDQKGFISLDCGSLPNEPPYNDPSTGLTYSTDDGFVQSGKTGRIQKAFESIFSKPSLKLRYFPDGFRNCYTLNVTQDTNYLIKAVFVYGNYDGLNNPPSFDLYLGPNLWVTVDMNGRTNGTIQEIIHKTISKSLQVCLVKTGTSSPMINTLELRPLKNNTYNTQSGSLKYFFRYYFSGSGQNIRYPDDVNDRKWYPFFDAKEWTELTTNLNINSSNGYAPPEVVMASASTPISTFGTWNFSWLLPSSTTQFYVYMHFAEIQTLRSLDTREFKVTLNGKLAYERYSPKTLATETIFYSTPQQCEDGTCLLELTKTPKSTLPPLMNALEVFTVIDFPQMETNPDDVAAIKSIQSTYGLSKISWQGDPCVPKQFLWEGLNCNNLDNSTPPIVTSLNLSSSHLTGIIAQGIQNLTHLQELDLSNNNLTGGIPEFLADIKSLLVINLSGNNFNGSIPQILLQKKGLKLILEGNANLICPDGLCVNKAGNGGAKKMNVVIPIVASVAFVVVLGSALAFFFIFKKKKTSNSQESAIMTKNRRFTYSEVVTMTNNFERVLGKGGFGMVYHGTVNNTEQVAVKMLSHSSSQGYKEFKAEVELLLRVHHKNLVGLVGYCDEGENLALIYEYMANGDLREHMSGKRGGSILNWETRLKIVVESAQGLEYLHNGCKPPMVHRDVKTTNILLNEHLHAKLADFGLSRSFPIEGETHVSTVVAGTPGYLDPEYYRTNWLNEKSDVYSFGIVLLEIITNQLVINQSREKPHIAEWVGLMLTKGDIQNIMDPKLYGDYDSGSVWRAVELAMSCLNPSSARRPTMSQVVIELNECLSYENARGGTSQNMNSESSIEVSMNFDIGATPDAR

SEQ ID NO: 29799 - protein, 740 aa, Arabidopsis thaliana
  misc_feature (1)..(740): Ceres Seq. ID no. 4930585
MNGRTNGTIQEIIHKTISKSLQVCLVKTGTSSPMINTLELRPLKNNTYNTQSGSLKYFFRYYFSGSGQNIRYPDDVNDRKWYPFFDAKEWTELTTNLNINSSNGYAPPEVVMASASTPISTFGTWNFSWLLPSSTTQFYVYMHFAEIQTLRSLDTREFKVTLNGKLAYERYSPKTLATETIFYSTPQQCEDGTCLLELTKTPKSTLPPLMNALEVFTVIDFPQMETNPDDVAAIKSIQSTYGLSKISWQGDPCVPKQFLWEGLNCNNLDNSTPPIVTSLNLSSSHLTGIIAQGIQNLTHLQELDLSNNNLTGGIPEFLADIKSLLVINLSGNNFNGSIPQILLQKKGLKLILEGNANLICPDGLCVNKAGNGGAKKMNVVIPIVASVAFVVVLGSALAFFFIFKKKKTSNSQESAIMTKNRRFTYSEVVTMTNNFERVLGKGGFGMVYHGTVNNTEQVAVKMLSHSSSQGYKEFKAEVELLLRVHHKNLVGLVGYCDEGENLALIYEYMANGDLREHMSGKRGGSILNWETRLKIVVESAQGLEYLHNGCKPPMVHRDVKTTNILLNEHLHAKLADFGLSRSFPIEGETHVSTVVAGTPGYLDPEYYRTNWLNEKSDVYSFGIVLLEIITNQLVINQSREKPHIAEWVGLMLTKGDIQNIMDPKLYGDYDSGSVWRAVELAMSCLNPSSARRPTMSQVVIELNECLSYENARGGTSQNMNSESSIEVSMNFDIGATPDAR

SEQ ID NO: 29800 - protein, 707 aa, Arabidopsis thaliana
  misc_feature (1)..(707): Ceres Seq. ID no. 4930586
MINTLELRPLKNNTYNTQSGSLKYFFRYYFSGSGQNIRYPDDVNDRKWYPFFDAKEWTELTTNLNINSSNGYAPPEVVMASASTPISTFGTWNFSWLLPSSTTQFYVYMHFAEIQTLRSLDTREFKVTLNGKLAYERYSPKTLATETIFYSTPQQCEDGTCLLELTKTPKSTLPPLMNALEVFTVIDFPQMETNPDDVAAIKSIQSTYGLSKISWQGDPCVPKQFLWEGLNCNNLDNSTPPIVTSLNLSSSHLTGIIAQGIQNLTHLQELDLSNNNLTGGIPEFLADIKSLLVINLSGNNFNGSIPQILLQKKGLKLILEGNANLICPDGLCVNKAGNGGAKKMNVVIPIVASVAFVVVLGSALAFFFIFKKKKTSNSQESAIMTKNRRFTYSEVVTMTNNFERVLGKGGFGMVYHGTVNNTEQVAVKMLSHSSSQGYKEFKAEVELLLRVHHKNLVGLVGYCDEGENLALIYEYMANGDLREHMSGKRGGSILNWETRLKIVVESAQGLEYLHNGCKPPMVHRDVKTTNILLNEHLHAKLADFGLSRSFPIEGETHVSTVVAGTPGYLDPEYYRTNWLNEKSDVYSFGIVLLEIITNQLVINQSREKPHIAEWVGLMLTKGDIQNIMDPKLYGDYDSGSVWRAVELAMSCLNPSSARRPTMSQVVIELNECLSYENARGGTSQNMNSESSIEVSMNFDIGATPDAR

SEQ ID NO: 29801 - DNA, 3918 bp, Arabidopsis thaliana
  misc_feature (1)..(3918): Ceres Seq. ID no. 4930607
atgagtcttttgcttctcctttgttcatggatgaatttgagatcttcttctgcagcagctcaagattgtagtgtaacaggactttctgatcctcttttaactaaaaatcctagaaaagaatcggcgaggttagcaacagctggatttttcagcattctatctttctcttggatgaatcctttactctcgctgggattcaagaaaccattatcccctgaagatatcccaagtgtagtcccggaggatgaggctcaattagcttacaagaaattttctcaagcatgggatactcttcttggagatgaaagctcaactaaggaaagaaacttggtgtttagagccgttgtgaaagtttactttaaagaaaacattttcatagcagtttttgcatttctcagaacatttgctgttgtttctcttccattaatgctatatgtctttgtggattatgcaaacagtgaccacagggatctccgcaatgggttcttcaacttagcttgtctagttatgctgaaactagttgaatccttgacaatgagacattggtattttgcatcaagaagatcaggaatgaggattagatcagcgctaatggtagctgcatacaaaaaacagctaaagctatcaagtttagggaggaaaaggcattcatctggagagattgtgaattatatcgcggtggatgcatatcgtatgggagaattcttatggtggttccactcgggatggagcctttcgctgcagcttttgctttctacagctgtactttttggagtggttggtgcaggagcttttccaggtttaattcttcttctcctatgtggtctgctgaatctaccatttgcaaagatgctacagaactgccagacacagttcatgatcgcgcaggataagcgattgaggtccacctcagagattttgaacagtatgaaagtcattaagctgcagtcatgggaagatgagttcaagaaaaagatagaatcttgtcgtgatgatgaattcacatggttggctaaagctcagctgacaaaggcctttggttctttcttgtattggatgtctccaacaatagtttcttctgttgttttcttgggatgtgctctattgaagagtgcgccgctgaacgcaagcaccatcttcacggttttagctacactaagagttatgtcagagcctgtcaaaattatacctgatgcaatttctgctatcatccaaggcaatgtctcgttccaaagattaaacaactttttgcttgacgacgagctaaagatggatgaaatcgaaagaagtggtctggatgcatctggaacagcagttgacatacaagtaggtaacttcggttgggaaccagaaactaagattccaactcttcggaatatacatctggaaatcaagcatgggcaaaaagttgcagtttgtggaccagttggagcaggaaaatcatcgctgttgcatgcagtactcggagaaatacctaaagtttctggaactgtaaaggtctttgggtccatcgcttatgtttctcagacttcttggatccaaagtggtaccatccgggacaatatcctctatggaaagcccatggaaagtagacgatacaatgctgctattaaagcatgtgcgttggataaggacatgaacggttttggacatggtgacctcacagaaataggacaaagagggattaacttgagcggaggacaaaagcaaaggattcagctggcccgtgctgtctatgcagacgccgatgtttacctgcttgatgatccttttagtgctgtggatgcacatacagctggagttctttttcataaatgtgttgaggactcgctgaaggagaaaactgttattctggtcactcaccaagttgagttcctctcagaagttgatcaaattctggttatggaggaaggaacaatcactcagtcaggaaaatatgaggagctcttaatgatggggactgcattccaacagctggtaaatgctcataatgatgcagtaactgtattacctttagcgagtaacgaaagcctcggagatcttaggaaagagggcaaggacagagagataagaaacatgacggttgtcgaaaaaatcgaagaagagatcgaaaaaacggatattccaggggtacaacttacacaagaagaagaaaaagagagcggttatgttgggatgaaacctttcttggactatatcggtgtctctcgaggatggtgtcttctatggtcaagcgtattgggtcaggttggctttgtagtttttcaggctgcatcaacatactggctggcttttgccatcgggatccctaaaatcacgaatacaatgcttattggagtctatagcattatatcaactcttagtgctggttttgtatatgcgagagctattacgactgcccatcttggactaaaagcttccaaagccttcttctctggtttcacaaatgcagtcttcaaagccccgatgcttttctttgattctactccagttggccgcattctcacccgagcttcgtctgatttgaacgtgttggactatgacgttccatttgccttcatatttgtggtagcaccggctgttgagctcactgcagctcttctcatcatgacgtatgtcacatggcaagtaattatcatagcccttcttgctttggcagccacgaaagttgttcaggattactatttagcctctgcaagggagctgattaggatcaatggaacaaccaaagctccagtgatgaattatgctgcagaaacctcacttggggtggtgacaattcgagcttttggaaccgcagagagattcttcaaaaactacttaaacctagttgatgcagatgccgtgctattctttctgtctaatgcagccatggagtgggtgattttgaggatagagactctgcagaatgtgactttgttcacttgtgcacttcttcttatccttattcccaagggctacatagctccaggcctcgttggactttcgctctcctatgcattaacactgacacaaactcaggtgtttctgacccgatggtattgtactttgtcgaattccatcatttcagtagagaggatcaaacaatatatgaacataccagaagaacctcctgcaattatagatgataaaagaccaccttcctcatggccttccaatggtacaattcatttgcaggagcttaagataagatatcgacccaatgctccgttggttctcaaaggaatctcttgcacattcagggaagggacaagagtaggagttgtcgggaggacgggaagcggaaaaagcacattgatcagcgcattgtttcgcttggtagaaccagcaagtggttgtatattgattgatgggattgacataagtaagattggccttaaagacctgagaatgaaactgagcatcattcctcaagaaccaactcttttccgtggctgcataaggacaaaccttgatcctttaggtgtttactccgacgatgaaatatggaaggctctagagaagtgtcagctcaagacaacgattagcaatcttcctaataaacttgattcttcagtgagtgatgaaggagaaaactggagcgtgggacagagacaactgttctgtcttggaagagtactgttaaagagaaacaaaatattagtgttagatgaagctacagcttccattgattcagcaactgatgcaatcattcagagaattataagagaagagtttgcagactgtacagtgataacagttgcacatagagtaccaactgtcatagacagtgacatggtcatggttctctcttttggtgatttagtagagtacaacgagccttcgaagctaatggagactgattcttacttctctaagcttgttgctgagtattgggctagttgcagaggaaactcttctcagaatctccaattataa

SEQ ID NO: 29802 - protein, 1305 aa, Arabidopsis thaliana
  misc_feature (1)..(1305): Ceres Seq. ID no. 4930608
MSLLLLLCSWMNLRSSSAAAQDCSVTGLSDPLLTKNPRKESARLATAGFFSILSFSWMNPLLSLGFKKPLSPEDIPSVVPEDEAQLAYKKFSQAWDTLLGDESSTKERNLVFRAVVKVYFKENIFIAVFAFLRTFAVVSLPLMLYVFVDYANSDHRDLRNGFFNLACLVMLKLVESLTMRHWYFASRRSGMRIRSALMVAAYKKQLKLSSLGRKRHSSGEIVNYIAVDAYRMGEFLWWFHSGWSLSLQLLLSTAVLFGVVGAGAFPGLILLLLCGLLNLPFAKMLQNCQTQFMIAQDKRLRSTSEILNSMKVIKLQSWEDEFKKKIESCRDDEFTWLAKAQLTKAFGSFLYWMSPTIVSSVVFLGCALLKSAPLNASTIFTVLATLRVMSEPVKIIPDAISAIIQGNVSFQRLNNFLLDDELKMDEIERSGLDASGTAVDIQVGNFGWEPETKIPTLRNIHLEIKHGQKVAVCGPVGAGKSSLLHAVLGEIPKVSGTVKVFGSIAYVSQTSWIQSGTIRDNILYGKPMESRRYNAAIKACALDKDMNGFGHGDLTEIGQRGINLSGGQKQRIQLARAVYADADVYLLDDPFSAVDAHTAGVLFHKCVEDSLKEKTVILVTHQVEFLSEVDQILVMEEGTITQSGKYEELLMMGTAFQQLVNAHNDAVTVLPLASNESLGDLRKEGKDREIRNMTVVEKIEEEIEKTDIPGVQLTQEEEKESGYVGMKPFLDYIGVSRGWCLLWSSVLGQVGFVVFQAASTYWLAFAIGIPKITNTMLIGVYSIISTLSAGFVYARAITTAHLGLKASKAFFSGFTNAVFKAPMLFFDSTPVGRILTRASSDLNVLDYDVPFAFIFVVAPAVELTAALLIMTYVTWQVIIIALLALAATKVVQDYYLASARELIRINGTTKAPVMNYAAETSLGVVTIRAFGTAERFFKNYLNLVDADAVLFFLSNAAMEWVILRIETLQNVTLFTCALLLILIPKGYIAPGLVGLSLSYALTLTQTQVFLTRWYCTLSNSIISVERIKQYMNIPEEPPAIIDDKRPPSSWPSNGTIHLQELKIRYRPNAPLVLKGISCTFREGTRVGVVGRTGSGKSTLISALFRLVEPASGCILIDGIDISKIGLKDLRMKLSIIPQEPTLFRGCIRTNLDPLGVYSDDEIWKALEKCQLKTTISNLPNKLDSSVSDEGENWSVGQRQLFCLGRVLLKRNKILVLDEATASIDSATDAIIQRIIREEFADCTVITVAHRVPTVIDSDMVMVLSFGDLVEYNEPSKLMETDSYFSKLVAEYWASCRGNSSQNLQL

SEQ ID NO: 29803 - protein, 1295 aa, Arabidopsis thaliana
  misc_feature (1)..(1295): Ceres Seq. ID no. 4930609
MNLRSSSAAAQDCSVTGLSDPLLTKNPRKESARLATAGFFSILSFSWMNPLLSLGFKKPLSPEDIPSVVPEDEAQLAYKKFSQAWDTLLGDESSTKERNLVFRAVVKVYFKENIFIAVFAFLRTFAVVSLPLMLYVFVDYANSDHRDLRNGFFNLACLVMLKLVESLTMRHWYFASRRSGMRIRSALMVAAYKKQLKLSSLGRKRHSSGEIVNYIAVDAYRMGEFLWWFHSGWSLSLQLLLSTAVLFGVVGAGAFPGLILLLLCGLLNLPFAKMLQNCQTQFMIAQDKRLRSTSEILNSMKVIKLQSWEDEFKKKIESCRDDEFTWLAKAQLTKAFGSFLYWMSPTIVSSVVFLGCALLKSAPLNASTIFTVLATLRVMSEPVKIIPDAISAIIQGNVSFQRLNNFLLDDELKMDEIERSGLDASGTAVDIQVGNFGWEPETKIPTLRNIHLEIKHGQKVAVCGPVGAGKSSLLHAVLGEIPKVSGTVKVFGSIAYVSQTSWIQSGTIRDNILYGKPMESRRYNAAIKACALDKDMNGFGHGDLTEIGQRGINLSGGQKQRIQLARAVYADADVYLLDDPFSAVDAHTAGVLFHKCVEDSLKEKTVILVTHQVEFLSEVDQILVMEEGTITQSGKYEELLMMGTAFQQLVNAHNDAVTVLPLASNESLGDLRKEGKDREIRNMTVVEKIEEEIEKTDIPGVQLTQEEEKESGYVGMKPFLDYIGVSRGWCLLWSSVLGQVGFVVFQAASTYWLAFAIGIPKITNTMLIGVYSIISTLSAGFVYARAITTAHLGLKASKAFFSGFTNAVFKAPMLFFDSTPVGRILTRASSDLNVLDYDVPFAFIFVVAPAVELTAALLIMTYVTWQVIIIALLALAATKVVQDYYLASARELIRINGTTKAPVMNYAAETSLGVVTIRAFGTAERFFKNYLNLVDADAVLFFLSNAAMEWVILRIETLQNVTLFTCALLLILIPKGYIAPGLVGLSLSYALTLTQTQVFLTRWYCTLSNSIISVERIKQYMNIPEEPPAIIDDKRPPSSWPSNGTIHLQELKIRYRPNAPLVLKGISCTFREGTRVGVVGRTGSGKSTLISALFRLVEPASGCILIDGIDISKIGLKDLRMKLSIIPQEPTLFRGCIRTNLDPLGVYSDDEIWKALEKCQLKTTISNLPNKLDSSVSDEGENWSVGQRQLFCLGRVLLKRNKILVLDEATASIDSATDAIIQRIIREEFADCTVITVAHRVPTVIDSDMVMVLSFGDLVEYNEPSKLMETDSYFSKLVAEYWASCRGNSSQNLQL

SEQ ID NO: 29804 - protein, 1248 aa, Arabidopsis thaliana
  misc_feature (1)..(1248): Ceres Seq. ID no. 4930610
MNPLLSLGFKKPLSPEDIPSVVPEDEAQLAYKKFSQAWDTLLGDESSTKERNLVFRAVVKVYFKENIFIAVFAFLRTFAVVSLPLMLYVFVDYANSDHRDLRNGFFNLACLVMLKLVESLTMRHWYFASRRSGMRIRSALMVAAYKKQLKLSSLGRKRHSSGEIVNYIAVDAYRMGEFLWWFHSGWSLSLQLLLSTAVLFGVVGAGAFPGLILLLLCGLLNLPFAKMLQNCQTQFMIAQDKRLRSTSEILNSMKVIKLQSWEDEFKKKIESCRDDEFTWLAKAQLTKAFGSFLYWMSPTIVSSVVFLGCALLKSAPLNASTIFTVLATLRVMSEPVKIIPDAISAIIQGNVSFQRLNNFLLDDELKMDEIERSGLDASGTAVDIQVGNFGWEPETKIPTLRNIHLEIKHGQKVAVCGPVGAGKSSLLHAVLGEIPKVSGTVKVFGSIAYVSQTSWIQSGTIRDNILYGKPMESRRYNAAIKACALDKDMNGFGHGDLTEIGQRGINLSGGQKQRIQLARAVYADADVYLLDDPFSAVDAHTAGVLFHKCVEDSLKEKTVILVTHQVEFLSEVDQILVMEEGTITQSGKYEELLMMGTAFQQLVNAHNDAVTVLPLASNESLGDLRKEGKDREIRNMTVVEKIEEEIEKTDIPGVQLTQEEEKESGYVGMKPFLDYIGVSRGWCLLWSSVLGQVGFVVFQAASTYWLAFAIGIPKITNTMLIGVYSIISTLSAGFVYARAITTAHLGLKASKAFFSGFTNAVFKAPMLFFDSTPVGRILTRASSDLNVLDYDVPFAFIFVVAPAVELTAALLIMTYVTWQVIIIALLALAATKVVQDYYLASARELIRINGTTKAPVMNYAAETSLGVVTIRAFGTAERFFKNYLNLVDADAVLFFLSNAAMEWVILRIETLQNVTLFTCALLLILIPKGYIAPGLVGLSLSYALTLTQTQVFLTRWYCTLSNSIISVERIKQYMNIPEEPPAIIDDKRPPSSWPSNGTIHLQELKIRYRPNAPLVLKGISCTFREGTRVGVVGRTGSGKSTLISALFRLVEPASGCILIDGIDISKIGLKDLRMKLSIIPQEPTLFRGCIRTNLDPLGVYSDDEIWKALEKCQLKTTISNLPNKLDSSVSDEGENWSVGQRQLFCLGRVLLKRNKILVLDEATASIDSATDAIIQRIIREEFADCTVITVAHRVPTVIDSDMVMVLSFGDLVEYNEPSKLMETDSYFSKLVAEYWASCRGNSSQNLQL

SEQ ID NO: 29805 - DNA, 1132 bp, Arabidopsis thaliana
  misc_feature (1)..(1132): Ceres Seq. ID no. 4930668
aatcgaattttattgtgtggccagaaactgacaacttccagcattgtactattaccattttttttatagaaaaagatgaacttcactttagagcaataacaatccctcgagtctcccctatataaagattccaactctttaacgattcatctattgaaaaaacacacacaccaaaaatatcagatatctcaaacaatgtcttcagtttttggatctgtccatatcttggccatgatagccatacaactcctccttatacacagtgtttcgtctctgaaccttacaaatgcgtatctgcaccacaaatgcagcaacactcaaggaaaatataagcaggggagtgcgttcgagaaaaatctcaacttagtcctcagtaccatcacctcgattggaaattttcgtgacggtttccgctacaccgaagaaggtgaggatcccaataacgtctttgtcatgttccagtgtcgcggcgactcctactggtccaagtgccccccttgcattagcaccgctgtctctgggcttcgtaggagatgtccaagaaataagggagcaataatatggtatgaccaatgtcttttaaagatatcttcagtcgcctccttcaataagatagattatgagaacgatttctatttgtccaacccaaaaaacatgagtgatcgggagttgttcaacaaggagacgtcggctctcctggagaagctggcaaataaagcctccgatagaaacaacttggatggtaaacaattggtgttgtacgcagcaggggagaagagaattgggacaaagaaggtgtctgcaatggtgcagtgtacgaaagacttaatatttacaaagtgctttgagtgtttggaagggattttgaggaagtttccagagtgttgtgacggtaaacaaggagggagagttttgggtacgagctgtaactttaggtatgagttatatccttttcttagaaactaacaacaacagtacaatgagagctccatattaaatgaaagggttctagagataaacagtcttataatatacactgtgttgcattttagtacgtgaacttaattgagcgaataaatgtactttcctctttgggatttttgtttttttttgtgaacttgagttattgaga

SEQ ID NO: 29806 - protein, 256 aa, Arabidopsis thaliana
  misc_feature (1)..(256): Ceres Seq. ID no. 4930669
MSSVFGSVHILAMIAIQLLLIHSVSSLNLTNAYLHHKCSNTQGKYKQGSAFEKNLNLVLSTITSIGNFRDGFRYTEEGEDPNNVFVMFQCRGDSYWSKCPPCISTAVSGLRRRCPRNKGAIIWYDQCLLKISSVASFNKIDYENDFYLSNPKNMSDRELFNKETSALLEKLANKASDRNNLDGKQLVLYAAGEKRIGTKKVSAMVQCTKDLIFTKCFECLEGILRKFPECCDGKQGGRVLGTSCNFRYELYPFLRN

SEQ ID NO: 29807 - protein, 244 aa, Arabidopsis thaliana
  misc_feature (1)..(244): Ceres Seq. ID no. 4930670
MIAIQLLLIHSVSSLNLTNAYLHHKCSNTQGKYKQGSAFEKNLNLVLSTITSIGNFRDGFRYTEEGEDPNNVFVMFQCRGDSYWSKCPPCISTAVSGLRRRCPRNKGAIIWYDQCLLKISSVASFNKIDYENDFYLSNPKNMSDRELFNKETSALLEKLANKASDRNNLDGKQLVLYAAGEKRIGTKKVSAMVQCTKDLIFTKCFECLEGILRKFPECCDGKQGGRVLGTSCNFRYELYPFLRN

SEQ ID NO: 29808 - protein, 170 aa, Arabidopsis thaliana
  misc_feature (1)..(170): Ceres Seq. ID no. 4930671
MFQCRGDSYWSKCPPCISTAVSGLRRRCPRNKGAIIWYDQCLLKISSVASFNKIDYENDFYLSNPKNMSDRELFNKETSALLEKLANKASDRNNLDGKQLVLYAAGEKRIGTKKVSAMVQCTKDLIFTKCFECLEGILRKFPECCDGKQGGRVLGTSCNFRYELYPFLRN

SEQ ID NO: 29809 - DNA, 903 bp, Arabidopsis thaliana
  misc_feature (1)..(903): Ceres Seq. ID no. 4930762
atgctaaaaatttattttaaaacaccccacttggaaacacaaataaataaaaataaattcaaaacaatgtattcttcatcatctgtatcaaaacgcttcgttctagtccctattgtggtcgtggtgaccacacaactcctcctggtacgtaacgtttcttcactaaaccttaccaattcgtatcttcaccacaaatgcgtagtcaatcaagggaaatacaagccaggaagcaagtacgagaaatccctcgatgatatcatccaaagcttttcgaataaagataaagattcgtatggttttcgtaccggttacagcatgaaggcctacggtaaagaacctgatatggtctccatcacctaccagtgccgtatcgactctcgtgggcccaagtgccagtcctgcgttgtcacggccggttatgagcttcttcgtaagagatgtccgagatataaagaggcaataatatggtacgaccaatgtcttgtggagttttcttcgttagatacttctgggcagatcaattacgacgacaacttctgtatgcctagcgcgaagaacctgatcggcaattcaatctctcttgaagaaaggttgcatctcctcaacaatcttacaaagatagccgtcacgaaaatagataaaaacatagaaggtataaaaaaaccagtactgtatgcggcgggggagaagagactcgggacgaaaagtctatacggaatggtgcaatgttcggctgacttatctgttcagggttgtaatgagtgtatgttatattatatagtgcattttcaagagtgctgggaaagtaaacaaggagtaagagttttgagtagaagctgtaactttaggtatgagctttacccttttattagccccaagggttcttactataccaagttctaa

SEQ ID NO: 29810 - protein, 300 aa, Arabidopsis thaliana
  misc_feature (1)..(300): Ceres Seq. ID no. 4930763
MLKIYFKTPHLETQINKNKFKTMYSSSSVSKRFVLVPIVVVVTTQLLLVRNVSSLNLTNSYLHHKCVVNQGKYKPGSKYEKSLDDIIQSFSNKDKDSYGFRTGYSMKAYGKEPDMVSITYQCRIDSRGPKCQSCVVTAGYELLRKRCPRYKEAIIWYDQCLVEFSSLDTSGQINYDDNFCMPSAKNLIGNSISLEERLHLLNNLTKIAVTKIDKNIEGIKKPVLYAAGEKRLGTKSLYGMVQCSADLSVQGCNECMLYYIVHFQECWESKQGVRVLSRSCNFRYELYPFISPKGSYYTKF

SEQ ID NO: 29811 - protein, 278 aa, Arabidopsis thaliana; identical to SEQ ID NO: 28024
  misc_feature (1)..(278): Ceres Seq. ID no. 4930764

SEQ ID NO: 29812 - protein, 195 aa, Arabidopsis thaliana; identical to SEQ ID NO: 28025
  misc_feature (1)..(195): Ceres Seq. ID no. 4930765

SEQ ID NO: 29813 - DNA, 1530 bp, Arabidopsis thaliana
  misc_feature (1)..(1530): Ceres Seq. ID no. 4930930
atggcgcgtagtaatagatgtgtaccccaaaatagttccattgtccaaattccgatagaagaagtattcaaaactcaactcaagtctcggtggcagcagatcacaatgtcatctgcttcttctccaccgccgccgcaggttttcgtcccagagccacttttttccgaacccccgcctcctcccaaagcacccgttaacgtttccctatctccaccgcctcctccgcggtctccctccacatccactccacctaggttgggaaatcgaaaccctccacctccagcgagtccctctggccaggaacctacaactccaactatgaccccaggcttttctctatcaccgccgtctccctcaagattatcaacgggagctgtggtcgggatctccataggaggaggagtttttgtgttgactttgatttttttcctttgtaagaagaaacgaccaagagacgataaagcacttccggctcccataggcatccatcaaagcactttcacttacggggagctagctagagccaccaataaattctctgaggccaatttgttaggagagggtggatttggattcgtatacaaaggtatattgaataatggaaatgaagttgcagttaaacagttgaaagtagggagtgctcagggtgagaaagagtttcaggctgaggttaatattattagccaaattcaccataggaatttggtttcccttgtcggttattgcatcgctggtgctcaaagattgcttgtctatgagtttgttcccaacaacactctcgagtttcacctccatgggaaaggacggcctacgatggaatggagtttaagattaaagattgctgtcagttcttccaaaggattgtcttatcttcatgaaaattgcaatcctaaaatcatccaccgtgatatcaaggcggcaaacatattgattgatttcaaatttgaagcaaaggttgctgattttggtctcgccaagattgctttggatacaaacactcatgtatctacacgtgttatgggaacctttgggtatttggctccggaatatgctgcaagtggaaagcttactgaaaagtctgatgtttactcattcggcgttgtacttttggagctaataacgggacgtcgccctgttgatgcaaacaatgtctatgcggatgacagcttggttgattgggcacgaccattgcttgtacaagcacttgaagaaagtaactttgaaggtttggctgatataaagctgaataatgagtatgatagagaagagatggctcgcatggttgcttgtgctgcagcttgtgtccgctatacagctcgccgaagacctcgcatggaccaggttgtgcgtgtgctagaaggaaacatatcgccgtcagatctgaatcaagggataacacccggtcacagcaatactgtatccgtccggctggacgctcgagcagtgagggtcaagccacacggggaaatggattcgagatggggaagatttaaaagaactgctcaacgttatggtggagattctctttaa

SEQ ID NO: 29814 - protein, 509 aa, Arabidopsis thaliana
  misc_feature (1)..(509): Ceres Seq. ID no. 4930931
MARSNRCVPQNSSIVQIPIEEVFKTQLKSRWQQITMSSASSPPPPQVFVPEPLFSEPPPPPKAPVNVSLSPPPPPRSPSTSTPPRLGNRNPPPPASPSGQEPTTPTMTPGFSLSPPSPSRLSTGAVVGISIGGGVFVLTLIFFLCKKKRPRDDKALPAPIGIHQSTFTYGELARATNKFSEANLLGEGGFGFVYKGILNNGNEVAVKQLKVGSAQGEKEFQAEVNIISQIHHRNLVSLVGYCIAGAQRLLVYEFVPNNTLEFHLHGKGRPTMEWSLRLKIAVSSSKGLSYLHENCNPKIIHRDIKAANILIDFKFEAKVADFGLAKIALDTNTHVSTRVMGTFGYLAPEYAASGKLTEKSDVYSFGVVLLELITGRRPVDANNVYADDSLVDWARPLLVQALEESNFEGLADIKLNNEYDREEMARMVACAAACVRYTARRRPRMDQVVRVLEGNISPSDLNQGITPGHSNTVSVRLDARAVRVKPHGEMDSRWGRFKRTAQRYGGDSL

SEQ ID NO: 29815 - protein, 474 aa, Arabidopsis thaliana
  misc_feature (1)..(474): Ceres Seq. ID no. 4930932
MSSASSPPPPQVFVPEPLFSEPPPPPKAPVNVSLSPPPPPRSPSTSTPPRLGNRNPPPPASPSGQEPTTPTMTPGFSLSPPSPSRLSTGAVVGISIGGGVFVLTLIFFLCKKKRPRDDKALPAPIGIHQSTFTYGELARATNKFSEANLLGEGGFGFVYKGILNNGNEVAVKQLKVGSAQGEKEFQAEVNIISQIHHRNLVSLVGYCIAGAQRLLVYEFVPNNTLEFHLHGKGRPTMEWSLRLKIAVSSSKGLSYLHENCNPKIIHRDIKAANILIDFKFEAKVADFGLAKIALDTNTHVSTRVMGTFGYLAPEYAASGKLTEKSDVYSFGVVLLELITGRRPVDANNVYADDSLVDWARPLLVQALEESNFEGLADIKLNNEYDREEMARMVACAAACVRYTARRRPRMDQVVRVLEGNISPSDLNQGITPGHSNTVSVRLDARAVRVKPHGEMDSRWGRFKRTAQRYGGDSL

SEQ ID NO: 29816 - protein, 403 aa, Arabidopsis thaliana
  misc_feature (1)..(403): Ceres Seq. ID no. 4930933
MTPGFSLSPPSPSRLSTGAVVGISIGGGVFVLTLIFFLCKKKRPRDDKALPAPIGIHQSTFTYGELARATNKFSEANLLGEGGFGFVYKGILNNGNEVAVKQLKVGSAQGEKEFQAEVNIISQIHHRNLVSLVGYCIAGAQRLLVYEFVPNNTLEFHLHGKGRPTMEWSLRLKIAVSSSKGLSYLHENCNPKIIHRDIKAANILIDFKFEAKVADFGLAKIALDTNTHVSTRVMGTFGYLAPEYAASGKLTEKSDVYSFGVVLLELITGRRPVDANNVYADDSLVDWARPLLVQALEESNFEGLADIKLNNEYDREEMARMVACAAACVRYTARRRPRMDQVVRVLEGNISPSDLNQGITPGHSNTVSVRLDARAVRVKPHGEMDSRWGRFKRTAQRYGGDSL

SEQ ID NO: 29817 - DNA, 2085 bp, Arabidopsis thaliana
  misc_feature (1)..(2085): Ceres Seq. ID no. 4930944
atgtcatcggcgccgcctcccggtggtactccgtcacctcctccacagcctctcccaattcctcctccgcctcagcctctgcccgttactcctccacctccacctactgcccttcctcccgcccttccccctccacctccgcctactgcccttccacccgcccttcctcctccacctccacctaccaccgttcctcctatacctccctctacgccttctcccccacctcccttgaccccttctcctctgcctccatctcccacaactccttcacctcccttgacgccttctcccacaactccttcacctcccttgactccttctcctccacctgccatcactccttcacctcctttgacaccatctcctctgcctccgtctcccaccaccccttcacctccgcctccatctccaagcattccttcacctcccttgacgccttcccctccaccgtcttctcccttgaggccttcttctcctccaccgccctctcccgccactccttcaactccgccaagatctccgccacctccctcaacacccactcctcctcctcgggtaggcagtctgagccctccacctccagcgagtccctctggcgggagatctcctagtactccatctaccactccaggctcttctccaccggcacaatcttccaaagaattatcaaagggagctatggtcgggatcgccataggaggaggatttgtgcttcttgtggcattggctttgatatttttcctttgtaagaagaaacgacgaagagacaatgaagcaccccctgctcccatagtgccaccaccgaagtctccctcctctgcaccaccacgtccaccgcatttcatgagcagcggcagcagcggagactacgactcaaactactcggatcaatcagttcttcctccaccatcaccagggcttgcattaggcttaggcatatatcaaggcactttcaattacgaggagctatctagagccaccaatggattctctgaggccaatttgttaggacaaggcggtttcggatacgtgttcaaaggtatgttacgtaatgggaaagaagttgctgtgaaacaattgaaagaagggagttctcaaggagaaagagagtttcaagcagaggttgggatcattagccgagtacatcatagacatttggttgctcttgtcggttattgcatcgccgatgctcaaagattgcttgtctatgagtttgttcccaacaacactctcgagtttcacctccatggaaagggacggcctacgatggaatggagttcaagattgaagattgctgttggttctgccaaaggattgtcttatcttcatgaaaattgcaatcctaaaattattcaccgtgatatcaaggcgtcaaacatattgatagatttcaaatttgaagcaaaggttgctgattttggtcttgccaagattgcttctgatacaaatactcatgtatctacacgtgtgatgggaacttttgggtatttggctccggaatatgcttcaagcggaaaactcacggaaaagtctgacgttttctcatttggcgttgtacttctggagctaataactggacgtcgccctattgatgtaaacaatgtccatgcagataacagcttggttgattgggcacgacctttgcttaaccaagtatctgaattaggaaactttgaggttgtggttgataaaaaactgaataatgagtatgacaaagaagagatggctcgcatggttgcttgtgccgcagcttgtgttcggtccacagctccacgtagacctcgcatggatcaggttgcacgtgtgctagaaggaaacatatcaccatcagatctaaaccaaggaatcacaccgggacacagcaatgtgtatggctcatctggaggaagcacagattatgactcgagccaagacaatgaaggcatgaacaagtttaggaaagtgggacttgagactcaagatttatatagtaacccaattagtgaatatgatttgtacccgtcctggtcgagcactgacggtcagaccacacagggaaaggcgaccggcaatattaaaagacccggtcaaggttatggttaa

SEQ ID NO: 29818 - protein, 694 aa, Arabidopsis thaliana
  misc_feature (1)..(694): Ceres Seq. ID no. 4930945
MSSAPPPGGTPSPPPQPLPIPPPPQPLPVTPPPPPTALPPALPPPPPPTALPPALPPPPPPTTVPPIPPSTPSPPPPLTPSPLPPSPTTPSPPLTPSPTTPSPPLTPSPPPAITPSPPLTPSPLPPSPTTPSPPPPSPSIPSPPLTPSPPPSSPLRPSSPPPPSPATPSTPPRSPPPPSTPTPPPRVGSLSPPPPASPSGGRSPSTPSTTPGSSPPAQSSKELSKGAMVGIAIGGGFVLLVALALIFFLCKKKRRRDNEAPPAPIVPPPKSPSSAPPRPPHFMSSGSSGDYDSNYSDQSVLPPPSPGLALGLGIYQGTFNYEELSRATNGFSEANLLGQGGFGYVFKGMLRNGKEVAVKQLKEGSSQGEREFQAEVGIISRVHHRHLVALVGYCIADAQRLLVYEFVPNNTLEFHLHGKGRPTMEWSSRLKIAVGSAKGLSYLHENCNPKIIHRDIKASNILIDFKFEAKVADFGLAKIASDTNTHVSTRVMGTFGYLAPEYASSGKLTEKSDVFSFGVVLLELITGRRPIDVNNVHADNSLVDWARPLLNQVSELGNFEVVVDKKLNNEYDKEEMARMVACAAACVRSTAPRRPRMDQVARVLEGNISPSDLNQGITPGHSNVYGSSGGSTDYDSSQDNEGMNKFRKVGLETQDLYSNPISEYDLYPSWSSTDGQTTQGKATGNIKRPGQGYG

SEQ ID NO: 29819 - protein, 467 aa, Arabidopsis thaliana
  misc_feature (1)..(467): Ceres Seq. ID no. 4930946
MVGIAIGGGFVLLVALALIFFLCKKKRRRDNEAPPAPIVPPPKSPSSAPPRPPHFMSSGSSGDYDSNYSDQSVLPPPSPGLALGLGIYQGTFNYEELSRATNGFSEANLLGQGGFGYVFKGMLRNGKEVAVKQLKEGSSQGEREFQAEVGIISRVHHRHLVALVGYCIADAQRLLVYEFVPNNTLEFHLHGKGRPTMEWSSRLKIAVGSAKGLSYLHENCNPKIIHRDIKASNILIDFKFEAKVADFGLAKIASDTNTHVSTRVMGTFGYLAPEYASSGKLTEKSDVFSFGVVLLELITGRRPIDVNNVHADNSLVDWARPLLNQVSELGNFEVVVDKKLNNEYDKEEMARMVACAAACVRSTAPRRPRMDQVARVLEGNISPSDLNQGITPGHSNVYGSSGGSTDYDSSQDNEGMNKFRKVGLETQDLYSNPISEYDLYPSWSSTDGQTTQGKATGNIKRPGQGYG

SEQ ID NO: 29820 - protein, 412 aa, Arabidopsis thaliana
  misc_feature (1)..(412): Ceres Seq. ID no. 4930947
MSSGSSGDYDSNYSDQSVLPPPSPGLALGLGIYQGTFNYEELSRATNGFSEANLLGQGGFGYVFKGMLRNGKEVAVKQLKEGSSQGEREFQAEVGIISRVHHRHLVALVGYCIADAQRLLVYEFVPNNTLEFHLHGKGRPTMEWSSRLKIAVGSAKGLSYLHENCNPKIIHRDIKASNILIDFKFEAKVADFGLAKIASDTNTHVSTRVMGTFGYLAPEYASSGKLTEKSDVFSFGVVLLELITGRRPIDVNNVHADNSLVDWARPLLNQVSELGNFEVVVDKKLNNEYDKEEMARMVACAAACVRSTAPRRPRMDQVARVLEGNISPSDLNQGITPGHSNVYGSSGGSTDYDSSQDNEGMNKFRKVGLETQDLYSNPISEYDLYPSWSSTDGQTTQGKATGNIKRPGQGYG

SEQ ID NO: 29821 - DNA, 1140 bp, Arabidopsis thaliana
  misc_feature (1)..(1140): Ceres Seq. ID no. 4931036
atgaaggttcttcgatgcctgctccttataagcaaccaaactcacctagtaagctctcgtcaatattcttggaaatgtgcacagagaacaacaggagaagtggtggctaagaacgcaaacggaccatcaaacaatatgggggcacgtattttcacgttccgtgagctagccaccgcgacaaagaattttagacaagagtgcctcattggtgaaggtgggttcgggagggtttacaaaggaaagcttgaaaatccagctcaggtcgtggcagtgaaacaacttgataggaatggattacaaggacaaagagagttcttggtcgaggtcttaatgcttagtcttctacatcataggaatcttgtgaatcttatcggttattgcgctgatggagaccaaagacttcttgtttacgagtatatgcctcttggatctctagaagatcatctcctcgatcttgaaccgggacaaaaaccactagactggaacactcgtattaagattgctttaggagcagcaaaaggaattgagtatctccatgatgaggctgatcctccagtgatttaccgagatcttaaatcgtcaaatatattacttgacccagaatacgttgcgaaattatcggatttcggtttagcaaagctaggtcctgttggagacacactacatgtgtcttcccgagttatgggaacttatggttattgtgctcctgaatatcaaagaactggctatctaacaaataaatcagatgtctacagctttggagttgtgttgttggaacttatatccggaagacgagtcatcgacacaatgagacctagtcatgaacaaaatctcgttacttgggcactaccgatttttagagatccgactagatattggcagctagctgatccattgcttcgaggcgactatccggaaaagagtttgaaccaagctatagctgtagcggcaatgtgcctgcatgaagaaccaacggttagaccactaatgagtgacgttattacagccttgagctttcttggtgcatcctcaaattcctccaataccggctctaaccatttgcaacaaaatcgatccaacaaatatcaggatgcagttcagtgggactcaagtcctagatatgctaattcgcaaatgtag

SEQ ID NO: 29822 - protein, 379 aa, Arabidopsis thaliana
  misc_feature (1)..(379): Ceres Seq. ID no. 4931037
MKVLRCLLLISNQTHLVSSRQYSWKCAQRTTGEVVAKNANGPSNNMGARIFTFRELATATKNFRQECLIGEGGFGRVYKGKLENPAQVVAVKQLDRNGLQGQREFLVEVLMLSLLHHRNLVNLIGYCADGDQRLLVYEYMPLGSLEDHLLDLEPGQKPLDWNTRIKIALGAAKGIEYLHDEADPPVIYRDLKSSNILLDPEYVAKLSDFGLAKLGPVGDTLHVSSRVMGTYGYCAPEYQRTGYLTNKSDVYSFGVVLLELISGRRVIDTMRPSHEQNLVTWALPIFRDPTRYWQLADPLLRGDYPEKSLNQAIAVAAMCLHEEPTVRPLMSDVITALSFLGASSNSSNTGSNHLQQNRSNKYQDAVQWDSSPRYANSQM

SEQ ID NO: 29823 - protein, 334 aa, Arabidopsis thaliana; identical to SEQ ID NO: 29004
  misc_feature (1)..(334): Ceres Seq. ID no. 4931038

SEQ ID NO: 29824 - protein, 269 aa, Arabidopsis thaliana
  misc_feature (1)..(269): Ceres Seq. ID no. 4931039
MLSLLHHRNLVNLIGYCADGDQRLLVYEYMPLGSLEDHLLDLEPGQKPLDWNTRIKIALGAAKGIEYLHDEADPPVIYRDLKSSNILLDPEYVAKLSDFGLAKLGPVGDTLHVSSRVMGTYGYCAPEYQRTGYLTNKSDVYSFGVVLLELISGRRVIDTMRPSHEQNLVTWALPIFRDPTRYWQLADPLLRGDYPEKSLNQAIAVAAMCLHEEPTVRPLMSDVITALSFLGASSNSSNTGSNHLQQNRSNKYQDAVQWDSSPRYANSQM

SEQ ID NO: 29825 - DNA, 1518 bp, Arabidopsis thaliana
  misc_feature (1)..(1518): Ceres Seq. ID no. 4931215
atgggtcggttagtagaagctatcattgcttcgatattattgtctttgtgttttacaataacaaagtcagctccaaaatctgctctcattaccaatcttcctggtttcaacggcacttttccatctaaacactatgccgggtatgtggcaatagataaacatcgtaataagaatctatggtattactttgtggaatctgagagaaatgcttcggtagatccagttgtgctttggcttaatggtggtccaggttgctctagcatggatggatttgtctacgagcacggtccattcaatttcgaaccaaaaaagaagaactcacatcttttgcatctcaatccttatagttggtccaaggtgtccaacatcatataccttgactctccagttggtgtgggattctcttactcaaatgacaacgccgattatacaactgatgatacaaaaaccgcgtctgatactcacacattccttctcgagtggtttaaaatgtttccggagtttcagtcaaatccgttctttatatcaggagaatcatatgctggtatctatgtgccaactcttgcggccgaggttgtcaaaggtcacaagaatgtgacaaagccggttatcaacttcaagggatatttggtgggtaatggtgttaccgatgaggtgtttgatggtaatgctcttgttcccttcactcatggcatgggactcatctctgatgaactctatgaggaaactaaattagtgtgcaacggaacatactataccggcggccagtcaggagtgagtaaagaatgtgctggcaaacttaaaacagtgtcagatactgtgaacttattgaacttatataacattctagaaccgtgctaccacggaacatctctatccgccttagatatcgagtttctgcctaagagtctccttactctaggcaaaacagaaaagccaatggcggtgagaaagagaatgtttggtcgtgcatggcctctaggtgccgttgtgcgtccaggcattgtacctagttggtctcaactcctcgctggctttggtgttccttgcattgacgatacagttgcgaccaaatggctaaacgatccagctgtaaggaaagcggttcatgctaaagaggtctctattcaattcatcatatttctctcaatcagtatttcgattggaaattgggagttatgttcaagcaacctcgaatataggcacgacaccggtagcatgatcgaataccatagaaacctcactcttagtggctttcgagctctcattttcagtggagatcatgatatgtgtgtaccatatactggctctgaagcatggactaaggcaatgggatacaaagtggttgatgaatggaggccatggatgtcaaataaccaagtcgccgggtttacacaagggtatgccaataatctcacatttctaaccatcaagggtgcaggacataccgttccagaatacaaaccgcgtgaatctttggacttctatagtcgtttcctagcaggagaaaagatatag

SEQ ID NO: 29826 - protein, 505 aa, Arabidopsis thaliana
  misc_feature (1)..(505): Ceres Seq. ID no. 4931216
MGRLVEAIIASILLSLCFTITKSAPKSALITNLPGFNGTFPSKHYAGYVAIDKHRNKNLWYYFVESERNASVDPVVLWLNGGPGCSSMDGFVYEHGPFNFEPKKKNSHLLHLNPYSWSKVSNIIYLDSPVGVGFSYSNDNADYTTDDTKTASDTHTFLLEWFKMFPEFQSNPFFISGESYAGIYVPTLAAEVVKGHKNVTKPVINFKGYLVGNGVTDEVFDGNALVPFTHGMGLISDELYEETKLVCNGTYYTGGQSGVSKECAGKLKTVSDTVNLLNLYNILEPCYHGTSLSALDIEFLPKSLLTLGKTEKPMAVRKRMFGRAWPLGAVVRPGIVPSWSQLLAGFGVPCIDDTVATKWLNDPAVRKAVHAKEVSIQFIIFLSISISIGNWELCSSNLEYRHDTGSMIEYHRNLTLSGFRALIFSGDHDMCVPYTGSEAWTKAMGYKVVDEWRPWMSNNQVAGFTQGYANNLTFLTIKGAGHTVPEYKPRESLDFYSRFLAGEKI

SEQ ID NO: 29827 - protein, 418 aa, Arabidopsis thaliana
  misc_feature (1)..(418): Ceres Seq. ID no. 4931217
MDGFVYEHGPFNFEPKKKNSHLLHLNPYSWSKVSNIIYLDSPVGVGFSYSNDNADYTTDDTKTASDTHTFLLEWFKMFPEFQSNPFFISGESYAGIYVPTLAAEVVKGHKNVTKPVINFKGYLVGNGVTDEVFDGNALVPFTHGMGLISDELYEETKLVCNGTYYTGGQSGVSKECAGKLKTVSDTVNLLNLYNILEPCYHGTSLSALDIEFLPKSLLTLGKTEKPMAVRKRMFGRAWPLGAVVRPGIVPSWSQLLAGFGVPCIDDTVATKWLNDPAVRKAVHAKEVSIQFIIFLSISISIGNWELCSSNLEYRHDTGSMIEYHRNLTLSGFRALIFSGDHDMCVPYTGSEAWTKAMGYKVVDEWRPWMSNNQVAGFTQGYANNLTFLTIKGAGHTVPEYKPRESLDFYSRFLAGEKI

SEQ ID NO: 29828 - protein, 342 aa, Arabidopsis thaliana
  misc_feature (1)..(342): Ceres Seq. ID no. 4931218
MFPEFQSNPFFISGESYAGIYVPTLAAEVVKGHKNVTKPVINFKGYLVGNGVTDEVFDGNALVPFTHGMGLISDELYEETKLVCNGTYYTGGQSGVSKECAGKLKTVSDTVNLLNLYNILEPCYHGTSLSALDIEFLPKSLLTLGKTEKPMAVRKRMFGRAWPLGAVVRPGIVPSWSQLLAGFGVPCIDDTVATKWLNDPAVRKAVHAKEVSIQFIIFLSISISIGNWELCSSNLEYRHDTGSMIEYHRNLTLSGFRALIFSGDHDMCVPYTGSEAWTKAMGYKVVDEWRPWMSNNQVAGFTQGYANNLTFLTIKGAGHTVPEYKPRESLDFYSRFLAGEKI

SEQ ID NO: 29829 - DNA, 1503 bp, Arabidopsis thaliana
  misc_feature (1)..(1503): Ceres Seq. ID no. 4931385
atggctactatttggtttctcccacttctctttctctcttgtcttcttcttgccgctttaagactcaagaagcggcggcaacatcaacggaaaccaccgtctccaccgggctttccgatcatcggaaacttgcatcagcttggggagctaccacatcaatctctatggagtctctccaaaaaatatggtcctgtaatgcttttgaagtttggaagtatcccaacggttgttgtctcttcttctgaaacagcaaagcaagctctgaaaatccatgacctcaattgttgtagccgtccaagcttagcaggaccaagagcgctctcttacaactacttggacatagttttctctccttttaatgattactggaaagaattgaggaggatgtgtgtgcaagagcttttcagtcctaaacaagttcatttgattcaacccatcagggaagaggaagtcaagaaactgatgaattcattctcggaatcagctgctcagaaaactccggttaacttgagcgagaagttagcttctttaactgttggcgtgatatgcaaggcagcatttggtgtgagtttccaaggaactgtgcttaatagtgacaacttcgacaagttaatccatgatgcatttttgttcttggggagcttctctgcctcggattattttccaaatgtcggctggatcatcgactggctcacggggttacaagggcagagagagagaagtgtgagaggtcttgacgcattctatgaacaaatgtttgatctacataaacaggggaacaaagaaggagttgaggattttgtggacttgctcttgaagttggagaaagaagaaactgttcttggatatggcaagctcacaagaaaccatatcaaagcagtcttaatgaatgttcttcttggaggcattggaacttcggctataacaatgacatgggcaatgacagaacttatgagaaacccgcgagtaatgaagaaagttcaatccgaaatcagaaatcaaattgggggcaagtcaatgatctgcttggatgacatagaccaactccattacctgaaaatggtgatcaatgaaacatggaggctacatcctccagcaccacttctagttccaagagaagtaatgtctgaatttgaaatcaacggctacacgattccagccaagacaagactttatgtgaatgtatggggtatcgggcgtgatccagatacttggaaagatccagaggagtttcttccagagagatttgttaacagtaacattgatgcaaaaggacaaaactttgagctgttaccatttggaagtggtaggagaatgtgtcctgccatgtacatggggacaacaatggtggagtttggtctagccaatctcttgtaccattttgactggaaattaccagaaggcatggtggtcgaagacattgacatggaagaatctcctggactcaatgccagcaagaaaaatgagcttgtacttgttcctaggaagtatttaaatctgtaa

SEQ ID NO: 29830 - protein, 500 aa, Arabidopsis thaliana
  misc_feature (1)..(500): Ceres Seq. ID no. 4931386
MATIWFLPLLFLSCLLLAALRLKKRRQHQRKPPSPPGFPIIGNLHQLGELPHQSLWSLSKKYGPVMLLKFGSIPTVVVSSSETAKQALKIHDLNCCSRPSLAGPRALSYNYLDIVFSPFNDYWKELRRMCVQELFSPKQVHLIQPIREEEVKKLMNSFSESAAQKTPVNLSEKLASLTVGVICKAAFGVSFQGTVLNSDNFDKLIHDAFLFLGSFSASDYFPNVGWIIDWLTGLQGQRERSVRGLDAFYEQMFDLHKQGNKEGVEDFVDLLLKLEKEETVLGYGKLTRNHIKAVLMNVLLGGIGTSAITMTWAMTELMRNPRVMKKVQSEIRNQIGGKSMICLDDIDQLHYLKMVINETWRLHPPAPLLVPREVMSEFEINGYTIPAKTRLYVNVWGIGRDPDTWKDPEEFLPERFVNSNIDAKGQNFELLPFGSGRRMCPAMYMGTTMVEFGLANLLYHFDWKLPEGMVVEDIDMEESPGLNASKKNELVLVPRKYLNL

SEQ ID NO: 29831 - protein, 435 aa, Arabidopsis thaliana
  misc_feature (1)..(435): Ceres Seq. ID no. 4931387
MLLKFGSIPTVVVSSSETAKQALKIHDLNCCSRPSLAGPRALSYNYLDIVFSPFNDYWKELRRMCVQELFSPKQVHLIQPIREEEVKKLMNSFSESAAQKTPVNLSEKLASLTVGVICKAAFGVSFQGTVLNSDNFDKLIHDAFLFLGSFSASDYFPNVGWIIDWLTGLQGQRERSVRGLDAFYEQMFDLHKQGNKEGVEDFVDLLLKLEKEETVLGYGKLTRNHIKAVLMNVLLGGIGTSAITMTWAMTELMRNPRVMKKVQSEIRNQIGGKSMICLDDIDQLHYLKMVINETWRLHPPAPLLVPREVMSEFEINGYTIPAKTRLYVNVWGIGRDPDTWKDPEEFLPERFVNSNIDAKGQNFELLPFGSGRRMCPAMYMGTTMVEFGLANLLYHFDWKLPEGMVVEDIDMEESPGLNASKKNELVLVPRKYLNL

SEQ ID NO: 29832 - protein, 372 aa, Arabidopsis thaliana; identical to SEQ ID NO: 28952
  misc_feature (1)..(372): Ceres Seq. ID no. 4931388

SEQ ID NO: 29833 - DNA, 1503 bp, Arabidopsis thaliana
  misc_feature (1)..(1503): Ceres Seq. ID no. 4931393
atgacaaacatttggcttctgtcacttatcttcgtcatttgtattcttgtagccgtgttcaaccacaagaatcggaggaattatcaacggacaccaccgtctcctcctggctgtcctatcatcggaaacttgcatcaactcggagaattaccacatcaatctctatggaaactctccaaaaagtatggccctgtgatgcttttaaagcttggaagagtaccaacagtcatagtttcttcctctgaaacagcaaaacaagctttgaaaatccatgacctccattgttgtagtcgtccaggctttgcaggggcaagagagctctcttacaactatctagacattgctttttctccttatgatgattattggaaagaagtaaggaagctcgctgttcaagaacttttcagtagtaaacaagttcactctatacaaccgataaaggacgaggaggtcaagaaactgatcgattcaatctccgaatcagctgctcagaagactccgatcaacttgaacaagacattgctggctttaactgttagtgtggtctgcaggacagcgtttagtgtgaattttgagggaactgtgctcaacagtgaacgattcaataacatagtccgtgaggcgctcgagatgttgggaagcttttctgcctcagatttcattccgtatgtcggaaggatcatcgacttgttgacgggtttgcaaggacggcgagagagaagcatgagagatctcgatgctttctatgaacaaatgtttgatctgcataaacagaaaaaggaagaaggtagtgaagactttgtggacttgctgttgaggttggagaaagaagaagctgttcttggaaatgacaagctcactagaaaccatatcaaagcgatattgatggatgttcttctagcaggaatggatacttctgcaataaccatgacatgggcaatggcagaactcgcaaagaatccacgagtgatgaaaaaagttcaatccgaaatcagaagtcaaatcaagaacaaagaaagaatcagctttgatgacactgataagcttgagtacctcaaaatggttatcaaagaaacatggaggttacatcctacaacacctcttctaatcccaagggaagcaatgtctgaatttgagatcaacggctacacgattccagttaagacacggcttcacgtgaatgtatgggctattggtcgtgatcccgatacctggaaagaccctgaagtgtttctcccggagaggtttacggataataatattgatgcaaaaggacagcattttgagctgttaccgtttggaggcggccggagaatgtgtcctgcagtttatatggggacaacaatggtcgagtttggtttggctaatcttttgtatcattttgattggaagttaccagaaggcatgaaggttgacgatattgacatggaagaagctcccggactcactgtcaacaagaaaaacgagcttatacttgtgccaacgaagtttctagatccttaa

SEQ ID NO: 29834 - protein, 500 aa, Arabidopsis thaliana
  misc_feature (1)..(500): Ceres Seq. ID no. 4931394
MTNIWLLSLIFVICILVAVFNHKNRRNYQRTPPSPPGCPIIGNLHQLGELPHQSLWKLSKKYGPVMLLKLGRVPTVIVSSSETAKQALKIHDLHCCSRPGFAGARELSYNYLDIAFSPYDDYWKEVRKLAVQELFSSKQVHSIQPIKDEEVKKLIDSISESAAQKTPINLNKTLLALTVSVVCRTAFSVNFEGTVLNSERFNNIVREALEMLGSFSASDFIPYVGRIIDLLTGLQGRRERSMRDLDAFYEQMFDLHKQKKEEGSEDFVDLLLRLEKEEAVLGNDKLTRNHIKAILMDVLLAGMDTSAITMTWAMAELAKNPRVMKKVQSEIRSQIKNKERISFDDTDKLEYLKMVIKETWRLHPTTPLLIPREAMSEFEINGYTIPVKTRLHVNVWAIGRDPDTWKDPEVFLPERFTDNNIDAKGQHFELLPFGGGRRMCPAVYMGTTMVEFGLANLLYHFDWKLPEGMKVDDIDMEEAPGLTVNKKNELILVPTKFLDP

SEQ ID NO: 29835 - protein, 435 aa, Arabidopsis thaliana
  misc_feature (1)..(435): Ceres Seq. ID no. 4931395
MLLKLGRVPTVIVSSSETAKQALKIHDLHCCSRPGFAGARELSYNYLDIAFSPYDDYWKEVRKLAVQELFSSKQVHSIQPIKDEEVKKLIDSISESAAQKTPINLNKTLLALTVSVVCRTAFSVNFEGTVLNSERFNNIVREALEMLGSFSASDFIPYVGRIIDLLTGLQGRRERSMRDLDAFYEQMFDLHKQKKEEGSEDFVDLLLRLEKEEAVLGNDKLTRNHIKAILMDVLLAGMDTSAITMTWAMAELAKNPRVMKKVQSEIRSQIKNKERISFDDTDKLEYLKMVIKETWRLHPTTPLLIPREAMSEFEINGYTIPVKTRLHVNVWAIGRDPDTWKDPEVFLPERFTDNNIDAKGQHFELLPFGGGRRMCPAVYMGTTMVEFGLANLLYHFDWKLPEGMKVDDIDMEEAPGLTVNKKNELILVPTKFLDP

SEQ ID NO: 29836 - protein, 290 aa, Arabidopsis thaliana
  misc_feature (1)..(290): Ceres Seq. ID no. 4931396
MLGSFSASDFIPYVGRIIDLLTGLQGRRERSMRDLDAFYEQMFDLHKQKKEEGSEDFVDLLLRLEKEEAVLGNDKLTRNHIKAILMDVLLAGMDTSAITMTWAMAELAKNPRVMKKVQSEIRSQIKNKERISFDDTDKLEYLKMVIKETWRLHPTTPLLIPREAMSEFEINGYTIPVKTRLHVNVWAIGRDPDTWKDPEVFLPERFTDNNIDAKGQHFELLPFGGGRRMCPAVYMGTTMVEFGLANLLYHFDWKLPEGMKVDDIDMEEAPGLTVNKKNELILVPTKFLDP

SEQ ID NO: 29837 - DNA, 2103 bp, Arabidopsis thaliana
  misc_feature (1)..(2103): Ceres Seq. ID no. 4931483
atggcagtgaccggagtttcttctgcttttggccgtcttttcaaacaagataaaacccacaagcgtgttatcggcaccggaaccaaacttacagtgacccgtcagattcttgagcatctcgaaggcggtaatgtctcgaaagccgtctctgttctctttgcttctccagagccagttagttattggctatacgagcgtcttttccgttcttgttcctcgaaagctcttgttgtgcaagcccgtaaagtccaatctcacttagtaactttctctccgttgcctccgattttcctcttgaacagagccattgaggcttatggtaaatgtgggtgtgttgatgatgcacgagagctgttcgaggaaatgcctgaacgagatggtgggtcttggaacgctgtgattactgcttgtgcgcaaaacggtgtctctgatgaggtgtttcgtatgtttcgtagaatgaatagagatggcgtacgagctacggagacttcttttgctggtgttttaaagtcatgtggtttaatcttggacttgagattattgaggcagctgcattgtgctgtggtgaagtatgggtattcggggaatgtagatttggagacttcgattgttgatgtttatgggaagtgtcgggtgatgagtgatgcgagaagagtgtttgatgagattgtaaaccctagtgatgtatcttggaatgtgattgtgcggcggtatcttgagatggggtttaatgatgaggcagtggtgatgtttttcaagatgctggagttgaatgttcgacctttgaatcacacggtttctagtgtaatgttagcttgttcgagatccttggcccttgaggtgggaaaggtaatccatgccattgctgtgaaacttagtgttgtggcagatacagttgtttctacttctgtatttgatatgtatgtaaaatgtgacagattggagagtgctcgcagagtatttgaccaaactagatctaaagatttgaaatcttggacttcggcgatgtcgggatatgcaatgagtggtttaactagagaggcaagggagctctttgatttgatgcctgaacggaatatagtctcatggaacgcaatgttgggcggatatgtacatgcccatgaatgggatgaggcactggattttctcactttgatgcgccaggagattgaaaatattgataatgtcactcttgtgtggatcctaaatgtctgctctggtatatcagatgttcaaatggggaagcaagctcatggttttatctaccgacatggatatgatacgaatgtaattgtagccaatgcacttcttgatatgtatggaaaatgcgggaccttgcagagtgccaatatttggttccgccaaatgagtgaactaagggatgaggtttcatggaatgctttattgactggtgtagctcgagttggcaggagtgaacaagccttatctttctttgaagggatgcaagtggaggccaaaccaagcaaatacacactggcaacgctcttagcaggttgtgcgaacattcctgctttaaatttaggcaaagcaatccacggattcctgatcagagatggctataaaattgatgttgttatacggggtgcaatggttgacatgtattccaaatgccgatgtttcgactatgctatcgaagtattcaaagaggcagctacacgggacttgattctatggaactctattatccgtggatgttgtcgtaatggaagaagcaaggaggtctttgagttgttcatgcttttggaaaatgaaggagttaagcctgaccatgtcacctttttgggaatcttacaagcttgcatacgtgaaggtcatgtcgaactcggttttcagtatttcagttctatgagcaccaaatatcatatatcaccacaggttgagcattatgattgtatgattgaactctactgcaagtatggatgcttgcatcagcttgaagaatttctcctcttgatgccttttgatccacctatgcaaatgttgacaaggataaatgatgcttgccaaagataccgctggtcaaagttaggagcatgggctgctaaacggcttatgaatgatcattaccttcagccaccatga

SEQ ID NO: 29838 - protein, 700 aa, Arabidopsis thaliana
  misc_feature (1)..(700): Ceres Seq. ID no. 4931484
MAVTGVSSAFGRLFKQDKTHKRVIGTGTKLTVTRQILEHLEGGNVSKAVSVLFASPEPVSYWLYERLFRSCSSKALVVQARKVQSHLVTFSPLPPIFLLNRAIEAYGKCGCVDDARELFEEMPERDGGSWNAVITACAQNGVSDEVFRMFRRMNRDGVRATETSFAGVLKSCGLILDLRLLRQLHCAVVKYGYSGNVDLETSIVDVYGKCRVMSDARRVFDEIVNPSDVSWNVIVRRYLEMGFNDEAVVMFFKMLELNVRPLNHTVSSVMLACSRSLALEVGKVIHAIAVKLSVVADTVVSTSVFDMYVKCDRLESARRVFDQTRSKDLKSWTSAMSGYAMSGLTREARELFDLMPERNIVSWNAMLGGYVHAHEWDEALDFLTLMRQEIENIDNVTLVWILNVCSGISDVQMGKQAHGFIYRHGYDTNVIVANALLDMYGKCGTLQSANIWFRQMSELRDEVSWNALLTGVARVGRSEQALSFFEGMQVEAKPSKYTLATLLAGCANIPALNLGKAIHGFLIRDGYKIDVVIRGAMVDMYSKCRCFDYAIEVFKEAATRDLILWNSIIRGCCRNGRSKEVFELFMLLENEGVKPDHVTFLGILQACIREGHVELGFQYFSSMSTKYHISPQVEHYDCMIELYCKYGCLHQLEEFLLLMPFDPPMQMLTRINDACQRYRWSKLGAWAAKRLMNDHYLQPP

SEQ ID NO: 29839 - protein, 579 aa, Arabidopsis thaliana
  misc_feature (1)..(579): Ceres Seq. ID no. 4931485
MPERDGGSWNAVITACAQNGVSDEVFRMFRRMNRDGVRATETSFAGVLKSCGLILDLRLLRQLHCAVVKYGYSGNVDLETSIVDVYGKCRVMSDARRVFDEIVNPSDVSWNVIVRRYLEMGFNDEAVVMFFKMLELNVRPLNHTVSSVMLACSRSLALEVGKVIHAIAVKLSVVADTVVSTSVFDMYVKCDRLESARRVFDQTRSKDLKSWTSAMSGYAMSGLTREARELFDLMPERNIVSWNAMLGGYVHAHEWDEALDFLTLMRQEIENIDNVTLVWILNVCSGISDVQMGKQAHGFIYRHGYDTNVIVANALLDMYGKCGTLQSANIWFRQMSELRDEVSWNALLTGVARVGRSEQALSFFEGMQVEAKPSKYTLATLLAGCANIPALNLGKAIHGFLIRDGYKIDVVIRGAMVDMYSKCRCFDYAIEVFKEAATRDLILWNSIIRGCCRNGRSKEVFELFMLLENEGVKPDHVTFLGILQACIREGHVELGFQYFSSMSTKYHISPQVEHYDCMIELYCKYGCLHQLEEFLLLMPFDPPMQMLTRINDACQRYRWSKLGAWAAKRLMNDHYLQPP

SEQ ID NO: 29840 - protein, 552 aa, Arabidopsis thaliana
  misc_feature (1)..(552): Ceres Seq. ID no. 4931486
MFRRMNRDGVRATETSFAGVLKSCGLILDLRLLRQLHCAVVKYGYSGNVDLETSIVDVYGKCRVMSDARRVFDEIVNPSDVSWNVIVRRYLEMGFNDEAVVMFFKMLELNVRPLNHTVSSVMLACSRSLALEVGKVIHAIAVKLSVVADTVVSTSVFDMYVKCDRLESARRVFDQTRSKDLKSWTSAMSGYAMSGLTREARELFDLMPERNIVSWNAMLGGYVHAHEWDEALDFLTLMRQEIENIDNVTLVWILNVCSGISDVQMGKQAHGFIYRHGYDTNVIVANALLDMYGKCGTLQSANIWFRQMSELRDEVSWNALLTGVARVGRSEQALSFFEGMQVEAKPSKYTLATLLAGCANIPALNLGKAIHGFLIRDGYKIDVVIRGAMVDMYSKCRCFDYAIEVFKEAATRDLILWNSIIRGCCRNGRSKEVFELFMLLENEGVKPDHVTFLGILQACIREGHVELGFQYFSSMSTKYHISPQVEHYDCMIELYCKYGCLHQLEEFLLLMPFDPPMQMLTRINDACQRYRWSKLGAWAAKRLMNDHYLQPP

SEQ ID NO: 29841 - DNA, 1107 bp, Arabidopsis thaliana
  misc_feature (1)..(1107): Ceres Seq. ID no. 4931487
atggatcacgatctcgacaaattccctttactctcttacgtccttcatcaacatgactccaatctccacgcgccgccgtctatggccgcgcaagaaactctccttccttcttttcctcttctctccaatccagaaatcatgtctatgttgactcaatccatccccacaacgatcacacagacgcttttcgtcttcaactctctcggctctcgacctgatcccttagcggtttcctctgctcgattcaagatcgctcaaattatggattcgctctcgccggaggaagcagcgaaggagtcggagatttatgccggggttgtgcggttggatgaagtgcacgatagttacgagaagaagttgaaggatacagaggaggagctttctagggtttattctacggaggtggaatcgatgttgagaagcggtgaagaagtgaacgagaaggttcttgcggtgctcaaggaggcggaatccggcggaaccgttgagaggattgatctctccagccaagaacttaagcttatccctgaagctttttggaaagtagttggcttagtatacttgaatctctctggcaatgacttgacgtttataccggatgcaatctcgaaactcaagaagctagaagagctcgatgtatcttcaaattctttggaatctcttcctgactctatagggatgttgcttaaccttagaatccttaatgtgaatgcgaacaatctaaccgcactccctgagagcatcgcgcattgcagcaacaaccaaatccaagctataccagactcattttataggctgaggaagctagagaaactgaacttggaccaaaacccgcttgagatcccatctcaagaagtggctactcaaggagctgaagttgttagagagtttatgaggaagagatggggtgatatcatggcagagcagcaacagaggattggcgttgaggctgagcgacatggagatgaaaacgggtgggtctattggggaacctccatggttactaatcttgtttctggagtgacccataccattggatttggaggagcaactagcgatggtggagataagaaaccgggagactcgtacttttatcaccaaatctga

SEQ ID NO: 29842 - protein, 368 aa, Arabidopsis thaliana
  misc_feature (1)..(368): Ceres Seq. ID no. 4931488
MDHDLDKFPLLSYVLHQHDSNLHAPPSMAAQETLLPSFPLLSNPEIMSMLTQSIPTTITQTLFVFNSLGSRPDPLAVSSARFKIAQIMDSLSPEEAAKESEIYAGVVRLDEVHDSYEKKLKDTEEELSRVYSTEVESMLRSGEEVNEKVLAVLKEAESGGTVERIDLSSQELKLIPEAFWKVVGLVYLNLSGNDLTFIPDAISKLKKLEELDVSSNSLESLPDSIGMLLNLRILNVNANNLTALPESIAHCSNNQIQAIPDSFYRLRKLEKLNLDQNPLEIPSQEVATQGAEVVREFMRKRWGDIMAEQQQRIGVEAERHGDENGWVYWGTSMVTNLVSGVTHTIGFGGATSDGGDKKPGDSYFYHQI

SEQ ID NO: 29843 - protein, 341 aa, Arabidopsis thaliana
  misc_feature (1)..(341): Ceres Seq. ID no. 4931489
MAAQETLLPSFPLLSNPEIMSMLTQSIPTTITQTLFVFNSLGSRPDPLAVSSARFKIAQIMDSLSPEEAAKESEIYAGVVRLDEVHDSYEKKLKDTEEELSRVYSTEVESMLRSGEEVNEKVLAVLKEAESGGTVERIDLSSQELKLIPEAFWKVVGLVYLNLSGNDLTFIPDAISKLKKLEELDVSSNSLESLPDSIGMLLNLRILNVNANNLTALPESIAHCSNNQIQAIPDSFYRLRKLEKLNLDQNPLEIPSQEVATQGAEVVREFMRKRWGDIMAEQQQRIGVEAERHGDENGWVYWGTSMVTNLVSGVTHTIGFGGATSDGGDKKPGDSYFYHQI

SEQ ID NO: 29844 - protein, 322 aa, Arabidopsis thaliana
  misc_feature (1)..(322): Ceres Seq. ID no. 4931490
MSMLTQSIPTTITQTLFVFNSLGSRPDPLAVSSARFKIAQIMDSLSPEEAAKESEIYAGVVRLDEVHDSYEKKLKDTEEELSRVYSTEVESMLRSGEEVNEKVLAVLKEAESGGTVERIDLSSQELKLIPEAFWKVVGLVYLNLSGNDLTFIPDAISKLKKLEELDVSSNSLESLPDSIGMLLNLRILNVNANNLTALPESIAHCSNNQIQAIPDSFYRLRKLEKLNLDQNPLEIPSQEVATQGAEVVREFMRKRWGDIMAEQQQRIGVEAERHGDENGWVYWGTSMVTNLVSGVTHTIGFGGATSDGGDKKPGDSYFYHQI

SEQ ID NO: 29845 - DNA, 2799 bp, Arabidopsis thaliana
  misc_feature (1)..(2799): Ceres Seq. ID no. 4931839
atgggacctccgagaactccgttaagtaagatagataagtccaatccttatactccatgtggttccaaagttacagaggagaagattcttgtcactgttcggatgagaccattaaattggagggaacatgccaaatatgatctcattgcttgggaatgtcccgatgatgagactatcgtctttaagaatccgaatcctgacaaggctccaacaaaatattcatttgataaagtttttgagccaacttgtgcaactcaagaggtgtatgaaggtggttctagggacgttgcactatctgcattagcaggaacaaatgcaactatttttgcttatggtcagactagtagtggcaagacgtttacaatgaggggggttactgaaagtgttgttaaagatatatacgaacatataagaaaaactcaagaaaggagctttgtcttgaaagtatctgctttggagatttataacgagaccgtggttgaccttttaaatcgtgatactgggccccttagactgttagatgatccagagaaaggaaccattgtggaaaatctggtggaggaagtggtagaaagcaggcaacatttacagcatttaattagcatttgtgaagatcaaaggcaagtaggtgaaactgctttaaacgacaaaagttcaagatcgcatcagattattcggctgaccatccatagcagtctcagggaaatagcaggctgtgtgcagtctttcatggcaactctgaatcttgttgatcttgctggaagcgaacgtgcttttcaaacaaacgcagatggtctaagattgaaggaaggaagccacattaaccgtagtttattgacacttactacagtgatcagaaaactgagttctggaagaaaaagggatcacgtgccgtatagagactcaaagctgacaagaattttgcaaaattcacttggcgggaatgctagaacagcaattatatgtacgattagtccggcactgagtcatgttgaacagacaaaaaagacactttcttttgccatgagtgcgaaggaagtcaccaattgcgctaaagtaaacatggttgtctcagaaaaaaagctgctgaaacatctgcagcaaaaagtagctaaactcgagtcagagttaagaagcccggagcccagttcatccacctgcttaaagtctctgttaattgagaaagagatgaaaatccaacagatggaatccgaaatgaaagagctaaagcgtcagagagacattgcacagtctgaacttgatctagaaagaaaagcaaaggagcggaagggatcaagtgagtgtgaacctttttctcaagtggcaaggtgtctctcataccatacaaaggaggaatccattccaagcaaatctgttccgtcaagccgcagaacagctcgtgataggagaaaggataatgtgaggcagtctttaacttcggcggatccaacagcgctagtccaagaaattcgtttgcttgaaaaacatcaaaagaagttgggtgaagaagcaaaccaagcactggatctaattcacaaagaagtgacatcccataaactgggtgatcaacaagctgcagaaaaagttgcgaaaatgctgtcagaaatcagggacatgcagaagagcaaccttttaactgaggaaattgtagttggtgataaagccaacctgaaggaagaaataaatcggttgaattctcaagaaattgcagctttggagaagaagctagagtgtgttcagaacactattgacatgcttgtctcgtcttttcagacagatgaacagactccagatttcaggacccaggtgaaaaagaagagacttcttcccttcggcttaagtaatagtcctaacctacagcatatgatccggggaccatgttcacctctttctgggactgaaaataaggatcctgagagcaatgttgtgtctgctaattcagccccagtgtcttttggagctactccaccaaagagggatgataaccgatgtcgtacacagtcaagggaaggaacgcctgtatcacgacaagcaaattcagtcgatattaagagaatgaatcgaatgtataagaatgctgccgaagagaatatacgtaatatcaaatcttatgttactggattgaaagaacgtgtggcgaagcttcaataccagaagcagctgcttgtttgccaggcaaacgagacaggcgctgcttcggagtacgatgcaaccgatgaatctcagatggattggccattgtgttttgaagagcagagaaagcaaatcataatgttatggcatctgtgccacatttcaatcattcacagaacacaattctacatgttattcaaaggagacccagctgatcaaatctacatggaggttgagctccgcaggctgacatggctcgaacagcacttggctgagcttgggaatgcgagtcctgcattgcttggtgatgaaccagcaagctacgtagcatcgagtataagagctttgaagcaggagagagagtatttggcgaaacgggtaaacacaaagctaggagcagaggaaagagagatgctatacctgaaatgggatgtcccgccggtgggaaaacagaggagacaacagttcatcaacaaactctggacagatcctcacaacatgcaacacgtgagagagagtgcggagatcgtggctaagcttgtcggattctgtgactcgggagagaccataaggaaagaaatgtttgagctcaactttgcatctccttcagataagaagacttggatgatgggttggaacttcatatccaacttgttgcatctctag

SEQ ID NO: 29846 - protein, 932 aa, Arabidopsis thaliana
  misc_feature (1)..(932): Ceres Seq. ID no. 4931840
MGPPRTPLSKIDKSNPYTPCGSKVTEEKILVTVRMRPLNWREHAKYDLIAWECPDDETIVFKNPNPDKAPTKYSFDKVFEPTCATQEVYEGGSRDVALSALAGTNATIFAYGQTSSGKTFTMRGVTESVVKDIYEHIRKTQERSFVLKVSALEIYNETVVDLLNRDTGPLRLLDDPEKGTIVENLVEEVVESRQHLQHLISICEDQRQVGETALNDKSSRSHQIIRLTIHSSLREIAGCVQSFMATLNLVDLAGSERAFQTNADGLRLKEGSHINRSLLTLTTVIRKLSSGRKRDHVPYRDSKLTRILQNSLGGNARTAIICTISPALSHVEQTKKTLSFAMSAKEVTNCAKVNMVVSEKKLLKHLQQKVAKLESELRSPEPSSSTCLKSLLIEKEMKIQQMESEMKELKRQRDIAQSELDLERKAKERKGSSECEPFSQVARCLSYHTKEESIPSKSVPSSRRTARDRRKDNVRQSLTSADPTALVQEIRLLEKHQKKLGEEANQALDLIHKEVTSHKLGDQQAAEKVAKMLSEIRDMQKSNLLTEEIVVGDKANLKEEINRLNSQEIAALEKKLECVQNTIDMLVSSFQTDEQTPDFRTQVKKKRLLPFGLSNSPNLQHMIRGPCSPLSGTENKDPESNVVSANSAPVSFGATPPKRDDNRCRTQSREGTPVSRQANSVDIKRMNRMYKNAAEENIRNIKSYVTGLKERVAKLQYQKQLLVCQANETGAASEYDATDESQMDWPLCFEEQRKQIIMLWHLCHISIIHRTQFYMLFKGDPADQIYMEVELRRLTWLEQHLAELGNASPALLGDEPASYVASSIRALKQEREYLAKRVNTKLGAEEREMLYLKWDVPPVGKQRRQQFINKLWTDPHNMQHVRESAEIVAKLVGFCDSGETIRKEMFELNFASPSDKKTWMMGWNFISNLLHL

SEQ ID NO: 29847 - protein, 898 aa, Arabidopsis thaliana
  misc_feature (1)..(898): Ceres Seq. ID no. 4931841
MRPLNWREHAKYDLIAWECPDDETIVFKNPNPDKAPTKYSFDKVFEPTCATQEVYEGGSRDVALSALAGTNATIFAYGQTSSGKTFTMRGVTESVVKDIYEHIRKTQERSFVLKVSALEIYNETVVDLLNRDTGPLRLLDDPEKGTIVENLVEEVVESRQHLQHLISICEDQRQVGETALNDKSSRSHQIIRLTIHSSLREIAGCVQSFMATLNLVDLAGSERAFQTNADGLRLKEGSHINRSLLTLTTVIRKLSSGRKRDHVPYRDSKLTRILQNSLGGNARTAIICTISPALSHVEQTKKTLSFAMSAKEVTNCAKVNMVVSEKKLLKHLQQKVAKLESELRSPEPSSSTCLKSLLIEKEMKIQQMESEMKELKRQRDIAQSELDLERKAKERKGSSECEPFSQVARCLSYHTKEESIPSKSVPSSRRTARDRRKDNVRQSLTSADPTALVQEIRLLEKHQKKLGEEANQALDLIHKEVTSHKLGDQQAAEKVAKMLSEIRDMQKSNLLTEEIVVGDKANLKEEINRLNSQEIAALEKKLECVQNTIDMLVSSFQTDEQTPDFRTQVKKKRLLPFGLSNSPNLQHMIRGPCSPLSGTENKDPESNVVSANSAPVSFGATPPKRDDNRCRTQSREGTPVSRQANSVDIKRMNRMYKNAAEENIRNIKSYVTGLKERVAKLQYQKQLLVCQANETGAASEYDATDESQMDWPLCFEEQRKQIIMLWHLCHISIIHRTQFYMLFKGDPADQIYMEVELRRLTWLEQHLAELGNASPALLGDEPASYVASSIRALKQEREYLAKRVNTKLGAEEREMLYLKWDVPPVGKQRRQQFINKLWTDPHNMQHVRESAEIVAKLVGFCDSGETIRKEMFELNFASPSDKKTWMMGWNFISNLLHL

SEQ ID NO: 29848 - protein, 811 aa, Arabidopsis thaliana
  misc_feature (1)..(811): Ceres Seq. ID no. 4931842
MRGVTESVVKDIYEHIRKTQERSFVLKVSALEIYNETVVDLLNRDTGPLRLLDDPEKGTIVENLVEEVVESRQHLQHLISICEDQRQVGETALNDKSSRSHQIIRLTIHSSLREIAGCVQSFMATLNLVDLAGSERAFQTNADGLRLKEGSHINRSLLTLTTVIRKLSSGRKRDHVPYRDSKLTRILQNSLGGNARTAIICTISPALSHVEQTKKTLSFAMSAKEVTNCAKVNMVVSEKKLLKHLQQKVAKLESELRSPEPSSSTCLKSLLIEKEMKIQQMESEMKELKRQRDIAQSELDLERKAKERKGSSECEPFSQVARCLSYHTKEESIPSKSVPSSRRTARDRRKDNVRQSLTSADPTALVQEIRLLEKHQKKLGEEANQALDLIHKEVTSHKLGDQQAAEKVAKMLSEIRDMQKSNLLTEEIVVGDKANLKEEINRLNSQEIAALEKKLECVQNTIDMLVSSFQTDEQTPDFRTQVKKKRLLPFGLSNSPNLQHMIRGPCSPLSGTENKDPESNVVSANSAPVSFGATPPKRDDNRCRTQSREGTPVSRQANSVDIKRMNRMYKNAAEENIRNIKSYVTGLKERVAKLQYQKQLLVCQANETGAASEYDATDESQMDWPLCFEEQRKQIIMLWHLCHISIIHRTQFYMLFKGDPADQIYMEVELRRLTWLEQHLAELGNASPALLGDEPASYVASSIRALKQEREYLAKRVNTKLGAEEREMLYLKWDVPPVGKQRRQQFINKLWTDPHNMQHVRESAEIVAKLVGFCDSGETIRKEMFELNFASPSDKKTWMMGWNFISNLLHL

SEQ ID NO: 29849 - DNA, 1260 bp, Arabidopsis thaliana
  misc_feature (1)..(1260): Ceres Seq. ID no. 4932130
atgctgaatgtttttttttgggttgcaggggatgtggggagtgtctattttggtccgaatcacccgatgaaacctcacaggctttgtatgacccatcatcttatccttgcatatggcctgcatagcaagatggaagtttatcgtccacacaaagcatatcctatcgagatggctcagttccattctcctgactatgtagagttcctgcaacgaattaatccagaaaaccagaacttgttccccaatgaaatggctagatataatctgggagaggattgtcctgtctttgaagatttgtttgaattttgtcaactttacgccggcggaaccatagatgctgcacgcaggttaaacaacaaactctgtgacattgctataaattgggcgggcgggttgcaccatgccaaaaaatgtgatgcatctgggttttgctacatcaacgatctcgtgctaggaattcttgagttgttaaaacaccatccccgtgttctatacatagatatagatgttcatcatggtgatggggttgaagaagcgttttacttcactgacagagtaatgactgttagctttcataagtttggggataagttctttccagggacaggcgatgttaaggaaataggagaaagagaagggaaattttacgccattaatgtgccgctgaaggatggtatcgatgacagtagtttcaaccgtcttttcaggactgttgttgagatatatcaaccgggtgcaattgttcttcaatgcggggcagattcactagccagggatcgactaggatgctttaatctctctattgatggacatgctgaatgtgttaaattcgtgaagaagttcaatcttcccttactggttacaggaggtggaggatacacaaaggagaatgtagctcgttgttggaccgttgagactggcattcttttggacacagaacttcctaatgagattcctgaaaacgactacataaagtattttgcgccggatttttctttgaagataccgggtggtcacattgagaatcttaataccaaatcgtacatcagttccatcaaagtgcagattttggagaatttgcgatacattcaacacgctccaagcgtacaaatgcaggaggttccaccggatttctacataccggattttgatgaagacgaacaaaacccggatgtacgtgcggatcagcgttcacgggataagcagatccagagggatgatgaatatttcgatggagacaacgataacgatgcgtcataa

SEQ ID NO: 29850 - protein, 419 aa, Arabidopsis thaliana
  misc_feature (1)..(419): Ceres Seq. ID no. 4932131
MLNVFFWVAGDVGSVYFGPNHPMKPHRLCMTHHLILAYGLHSKMEVYRPHKAYPIEMAQFHSPDYVEFLQRINPENQNLFPNEMARYNLGEDCPVFEDLFEFCQLYAGGTIDAARRLNNKLCDIAINWAGGLHHAKKCDASGFCYINDLVLGILELLKHHPRVLYIDIDVHHGDGVEEAFYFTDRVMTVSFHKFGDKFFPGTGDVKEIGEREGKFYAINVPLKDGIDDSSFNRLFRTVVEIYQPGAIVLQCGADSLARDRLGCFNLSIDGHAECVKFVKKFNLPLLVTGGGGYTKENVARCWTVETGILLDTELPNEIPENDYIKYFAPDFSLKIPGGHIENLNTKSYISSIKVQILENLRYIQHAPSVQMQEVPPDFYIPDFDEDEQNPDVRADQRSRDKQIQRDDEYFDGDNDNDAS

SEQ ID NO: 29851 - protein, 397 aa, Arabidopsis thaliana
  misc_feature (1)..(397): Ceres Seq. ID no. 4932132
MKPHRLCMTHHLILAYGLHSKMEVYRPHKAYPIEMAQFHSPDYVEFLQRINPENQNLFPNEMARYNLGEDCPVFEDLFEFCQLYAGGTIDAARRLNNKLCDIAINWAGGLHHAKKCDASGFCYINDLVLGILELLKHHPRVLYIDIDVHHGDGVEEAFYFTDRVMTVSFHKFGDKFFPGTGDVKEIGEREGKFYAINVPLKDGIDDSSFNRLFRTVVEIYQPGAIVLQCGADSLARDRLGCFNLSIDGHAECVKFVKKFNLPLLVTGGGGYTKENVARCWTVETGILLDTELPNEIPENDYIKYFAPDFSLKIPGGHIENLNTKSYISSIKVQILENLRYIQHAPSVQMQEVPPDFYIPDFDEDEQNPDVRADQRSRDKQIQRDDEYFDGDNDNDAS

SEQ ID NO: 29852 - protein, 390 aa, Arabidopsis thaliana
  misc_feature (1)..(390): Ceres Seq. ID no. 4932133
MTHHLILAYGLHSKMEVYRPHKAYPIEMAQFHSPDYVEFLQRINPENQNLFPNEMARYNLGEDCPVFEDLFEFCQLYAGGTIDAARRLNNKLCDIAINWAGGLHHAKKCDASGFCYINDLVLGILELLKHHPRVLYIDIDVHHGDGVEEAFYFTDRVMTVSFHKFGDKFFPGTGDVKEIGEREGKFYAINVPLKDGIDDSSFNRLFRTVVEIYQPGAIVLQCGADSLARDRLGCFNLSIDGHAECVKFVKKFNLPLLVTGGGGYTKENVARCWTVETGILLDTELPNEIPENDYIKYFAPDFSLKIPGGHIENLNTKSYISSIKVQILENLRYIQHAPSVQMQEVPPDFYIPDFDEDEQNPDVRADQRSRDKQIQRDDEYFDGDNDNDAS

SEQ ID NO: 29853 - DNA, 4707 bp, Arabidopsis thaliana
  misc_feature (1)..(4707): Ceres Seq. ID no. 4932383
atgggtcagaagaaaaaagctcccgcgccgttggattcggctctgatcaagctcgaatgcgagaaggcactgaagtcattcggtcgtgggagctacaacaaagcgattcgtctcattaaggattcatgctctcgccatcaagactctgccctaatccaccgtgttcagggaactatctgcgtgaaggttgctgctgtctacgaagatctagctacgaaacagaagtatctccggaatgcaattgaatctgctagaaaagctgtggagttgtctcctgattcgattgagtttgggcatttttatgccaacttgctttacgaggctgctaatgatggaaagagagagtacgacgaagttgtgcaagagtgtcatcgtgctctctctatcgaaaatccgattgatcctgctaaagagagtttgcaggatgaaactcagcttaagatattgacacctgaggctcgtattgttcatgtgcaggatgagctcaggtcactaatacagaaatccaacattagttcattgtccacttggatgaataatctgggaaaaggtgaagagaagtttcggttgatacctattaggagaatggctgaggatcctattgagagtaacttggttcagaccaggaggcctaatgagattaaaaaggctaacaagagtattgaagagataaggaaggaggttgaagttagggtagctgcagctaggttgttgcagcagaagtcagagtgtgagaatgtaggcgctgttgacaacaagggatcagatgcaacattaggttcggggaagagaagcggtgagaggagaaagcatgggaatgcaaggagaaacggctccacagcggatagaagggatcgggttaagtcatactgggattctatgagcaaagaaatgaagaaacaattgcttagagttaagcttagcgatcttaagagtcattttagtgcttcaaaggatgggaatgaaaatgagattattagtgaagctctttccttttgtgaggccaataagacttggaggttctgggtttgctgccagtgtagcgaaaagttcataaagtctgaggcttatatgcatcatattgtgcaggtgcacatgggtaatgtcttacctaagatgcaaatggttctgcctcaaagttttgacactgagaggattgatatgcttcttacttccccatggaaaccgttggatctctctgctgcggtaaaatggcttcgcagtcggcagaaaatccaaaactctgagtttagtgagtttcacgctggagataatatggatgacggtgacgattgcttcaaggatgcacggaatgatacttcaccagagaaagaaagccttggagactcttgcaagggttgtgatgagaatgacccagaagaaggtaagctgtcaatcacatttcctcctcctgatggatggcctatatctgatgatcctgaacgtgcaaagctccttgaaaaaatccgtgcagcctttgagctactgatcagacacaaatatttagctgccagccatcatgataaggtgatacagtttacgctggatgaacttcagaatcttgcctcggtgtcacaattcttaaatcgtagcttgaaccagtcacccatatgcatctgctttttgggagcttcccagctcagaaaaattctcaaattcctgcaggacttgtctcaggcctgtggattgagtcgatattctgaacaaagtaaccccaacgatgaatttaattttggggccctgtgtagagaagttacagaggagattcttcttgatggtgaagattcatgtcttcttttggatgaaaaattgcttggcactgagtgcatccaagagatatatatgggctcagcattgcataatgtagctgtagcaagttctggggatattgctaatggaaatgatgtgtcttctggtgcggatggatttctttcatggatcttcacaggaccctctagcgaggaacaagttgtgtcatggatgcgcacaaaggaagagaaaacaaatcaaggactggagatcatgcaacatcttgagaaggagttctatcacttgcagaacctctgcgagagaaaatgcgagcacttaagctacgagggagcactgcagactgttgaggatctttgtcttgaagaaagccggaagagggagacttcagcagagtttacccatgaaagctatgaatctgtgctgaggaaacgaagagaagagctaaatgaaaatgaccttgagttggtgtttatcagtagtaggtttgagttagatgctttaacaaatgtgttgaaagatgctgaaactcttaaccacaatcaatttggatatgaagaatcatatggctgcacgagttctcagctacgtgatctggaatctggtgaagctgatgaatgggggatgaaagattccttacatgaggctgacagtttcatagaggttgcgatccagaaacaaaaagagcaattgtctgcagagcttagcagaattgacgcgcaaatgatgcgaaatgtcactgggatgcagcaattagagctaaagcttggaccggtttcctccaacgattatcagatagtattgttacctttggtgaagtcctacatgcgtgcacatttggaggcgttggcagagaaagatgccactgagaagtctgatgctgcaagagaagcgttactttttgagctagctcttgattctaagaaggagggtcgaggaagaaatgataattcaaaacacacgctggaaaagtcgaaggacaagaaaaagattaaagacactaggaaactgaagaatttgaaggctactattggaaacgaccatcgcttcaatggtgactcaattgagcacagcctcctttcggttgcatcttttggtgatcattcagaggctgacgttgtttctgaagccattgaagcgttaagtgatgaggaagaggaatacagacgttgtaacgagttagaggaagaggagaggaagcttgcaaaaactctagagtatcaaagaagaattgagaatgaagctaaggagaagcacatcgccgaacaaaaaaagaaatacagctgttcagatccgatgaatgtgacagaggcagtgtatgatgattgcatagaaaatttctttgatgatgctgatttacaagaacaagaaaaacccataaatcaggagaaatggaataaacaacttgatgacttggaaggagccaaagtgaatataaatggagttttcccgtcaacaaatcattgtgtgatatctgatactgcaaaggtgctggatgtaatatcccaagaagtagtgcctaacggtatagctattcaagctggtgttttccaatctgatcaacgccctgggaggaggggtagacgccaaaaagcttcaaacaagttggttgatggaaaatatcaggtcacactttctgagagcgaggatagtaaatctcagaggtcaggcaccgacagtgagagacaatctgaaactctacgtagcaatggtgatgcgggaccaaagacattaagacaattacaagctgaagacgatgaagaagaaagatttcaagctgaccttaaaagggcaaaacttcaaagccttgatgtgtaccgaggtcgtagaaatatgacatcatgtttgaagacatctctggaagacaacaatgattgggttttatctgatgtcacaaaggaatctcagagttcgcccggagttgccatatttggcacaggtcttcagaatgaagttggcgaatacaattgctttttaaatgttatcatacagtctctgtggaatctggggatgtttcgggctgagttcttgcggagctcaacactagagcaccatcactttggagatccttgtgttgtctgctcattgtatgcgatttttacagctttaagtactgcttcgagtgaaacacgaaaagaacctgttgctccttcatctctcaggattgctttaagtaacttgtatcctgatagcagtttcttccaagaggctcagatgaacgatgcttcagaagtattggccgtaatcttcgactgccttcatcgctcatttgctcaaagttcaagcgtgtctgacacagaatctgctgagagcaacagtacgggctcatgggactgtgccaatcgctcatgtattgcccattctctgtttggaatggatgtttctgagcaattgaattgctacagctgtgggctggagtccaggcatttgaagtacacttcctttttccataacatcaacgctagtgccctacgcaccatgaaggttacatgcgctgaaaattcatttgacgaacttctaaatcttgtcgagatgaaccatcaactagcttgtgatcgcgaagctggtgggtgtgggaaacgcaaccatatccaccatattctcaccactccaccacatgtttttactatagttttagggtggcaaaacacatgtgagactgtagaagacatagccgctactcttgcagctttgaatacagagatagacatcagcatcatgtaccgtggtgtggaccctaagaacacatatagcttagtttccgtggtttgttattatggacagcattatcactgttttgcatatagtcatgagcacgatcagtggatcatgtacgatgaccaaaacgtcaaggttatcggtagctggagtgatgttctttctatgtgtaagagaggacatttgcaaccacaggttcttctctacgaaaagaaactttaa

SEQ ID NO: 29854 - protein, 1568 aa, Arabidopsis thaliana
  misc_feature (1)..(1568): Ceres Seq. ID no. 4932384
MGQKKKAPAPLDSALIKLECEKALKSFGRGSYNKAIRLIKDSCSRHQDSALIHRVQGTICVKVAAVYEDLATKQKYLRNAIESARKAVELSPDSIEFGHFYANLLYEAANDGKREYDEVVQECHRALSIENPIDPAKESLQDETQLKILTPEARIVHVQDELRSLIQKSNISSLSTWMNNLGKGEEKFRLIPIRRMAEDPIESNLVQTRRPNEIKKANKSIEEIRKEVEVRVAAARLLQQKSECENVGAVDNKGSDATLGSGKRSGERRKHGNARRNGSTADRRDRVKSYWDSMSKEMKKQLLRVKLSDLKSHFSASKDGNENEIISEALSFCEANKTWRFWVCCQCSEKFIKSEAYMHHIVQVHMGNVLPKMQMVLPQSFDTERIDMLLTSPWKPLDLSAAVKWLRSRQKIQNSEFSEFHAGDNMDDGDDCFKDARNDTSPEKESLGDSCKGCDENDPEEGKLSITFPPPDGWPISDDPERAKLLEKIRAAFELLIRHKYLAASHHDKVIQFTLDELQNLASVSQFLNRSLNQSPICICFLGASQLRKILKFLQDLSQACGLSRYSEQSNPNDEFNFGALCREVTEEILLDGEDSCLLLDEKLLGTECIQEIYMGSALHNVAVASSGDIANGNDVSSGADGFLSWIFTGPSSEEQVVSWMRTKEEKTNQGLEIMQHLEKEFYHLQNLCERKCEHLSYEGALQTVEDLCLEESRKRETSAEFTHESYESVLRKRREELNENDLELVFISSRFELDALTNVLKDAETLNHNQFGYEESYGCTSSQLRDLESGEADEWGMKDSLHEADSFIEVAIQKQKEQLSAELSRIDAQMMRNVTGMQQLELKLGPVSSNDYQIVLLPLVKSYMRAHLEALAEKDATEKSDAAREALLFELALDSKKEGRGRNDNSKHTLEKSKDKKKIKDTRKLKNLKATIGNDHRFNGDSIEHSLLSVASFGDHSEADVVSEAIEALSDEEEEYRRCNELEEEERKLAKTLEYQRRIENEAKEKHIAEQKKKYSCSDPMNVTEAVYDDCIENFFDDADLQEQEKPINQEKWNKQLDDLEGAKVNINGVFPSTNHCVISDTAKVLDVISQEVVPNGIAIQAGVFQSDQRPGRRGRRQKASNKLVDGKYQVTLSESEDSKSQRSGTDSERQSETLRSNGDAGPKTLRQLQAEDDEEERFQADLKRAKLQSLDVYRGRRNMTSCLKTSLEDNNDWVLSDVTKESQSSPGVAIFGTGLQNEVGEYNCFLNVIIQSLWNLGMFRAEFLRSSTLEHHHFGDPCVVCSLYAIFTALSTASSETRKEPVAPSSLRIALSNLYPDSSFFQEAQMNDASEVLAVIFDCLHRSFAQSSSVSDTESAESNSTGSWDCANRSCIAHSLFGMDVSEQLNCYSCGLESRHLKYTSFFHNINASALRTMKVTCAENSFDELLNLVEMNHQLACDREAGGCGKRNHIHHILTTPPHVFTIVLGWQNTCETVEDIAATLAALNTEIDISIMYRGVDPKNTYSLVSVVCYYGQHYHCFAYSHEHDQWIMYDDQNVKVIGSWSDVLSMCKRGHLQPQVLLYEKKL

SEQ ID NO: 29855 - protein, 1391 aa, Arabidopsis thaliana
  misc_feature (1)..(1391): Ceres Seq. ID no. 4932385
MNNLGKGEEKFRLIPIRRMAEDPIESNLVQTRRPNEIKKANKSIEEIRKEVEVRVAAARLLQQKSECENVGAVDNKGSDATLGSGKRSGERRKHGNARRNGSTADRRDRVKSYWDSMSKEMKKQLLRVKLSDLKSHFSASKDGNENEIISEALSFCEANKTWRFWVCCQCSEKFIKSEAYMHHIVQVHMGNVLPKMQMVLPQSFDTERIDMLLTSPWKPLDLSAAVKWLRSRQKIQNSEFSEFHAGDNMDDGDDCFKDARNDTSPEKESLGDSCKGCDENDPEEGKLSITFPPPDGWPISDDPERAKLLEKIRAAFELLIRHKYLAASHHDKVIQFTLDELQNLASVSQFLNRSLNQSPICICFLGASQLRKILKFLQDLSQACGLSRYSEQSNPNDEFNFGALCREVTEEILLDGEDSCLLLDEKLLGTECIQEIYMGSALHNVAVASSGDIANGNDVSSGADGFLSWIFTGPSSEEQVVSWMRTKEEKTNQGLEIMQHLEKEFYHLQNLCERKCEHLSYEGALQTVEDLCLEESRKRETSAEFTHESYESVLRKRREELNENDLELVFISSRFELDALTNVLKDAETLNHNQFGYEESYGCTSSQLRDLESGEADEWGMKDSLHEADSFIEVAIQKQKEQLSAELSRIDAQMMRNVTGMQQLELKLGPVSSNDYQIVLLPLVKSYMRAHLEALAEKDATEKSDAAREALLFELALDSKKEGRGRNDNSKHTLEKSKDKKKIKDTRKLKNLKATIGNDHRFNGDSIEHSLLSVASFGDHSEADVVSEAIEALSDEEEEYRRCNELEEEERKLAKTLEYQRRIENEAKEKHIAEQKKKYSCSDPMNVTEAVYDDCIENFFDDADLQEQEKPINQEKWNKQLDDLEGAKVNINGVFPSTNHCVISDTAKVLDVISQEVVPNGIAIQAGVFQSDQRPGRRGRRQKASNKLVDGKYQVTLSESEDSKSQRSGTDSERQSETLRSNGDAGPKTLRQLQAEDDEEERFQADLKRAKLQSLDVYRGRRNMTSCLKTSLEDNNDWVLSDVTKESQSSPGVAIFGTGLQNEVGEYNCFLNVIIQSLWNLGMFRAEFLRSSTLEHHHFGDPCVVCSLYAIFTALSTASSETRKEPVAPSSLRIALSNLYPDSSFFQEAQMNDASEVLAVIFDCLHRSFAQSSSVSDTESAESNSTGSWDCANRSCIAHSLFGMDVSEQLNCYSCGLESRHLKYTSFFHNINASALRTMKVTCAENSFDELLNLVEMNHQLACDREAGGCGKRNHIHHILTTPPHVFTIVLGWQNTCETVEDIAATLAALNTEIDISIMYRGVDPKNTYSLVSVVCYYGQHYHCFAYSHEHDQWIMYDDQNVKVIGSWSDVLSMCKRGHLQPQVLLYEKKL

SEQ ID NO: 29856 - protein, 1373 aa, Arabidopsis thaliana
  misc_feature (1)..(1373): Ceres Seq. ID no. 4932386
MAEDPIESNLVQTRRPNEIKKANKSIEEIRKEVEVRVAAARLLQQKSECENVGAVDNKGSDATLGSGKRSGERRKHGNARRNGSTADRRDRVKSYWDSMSKEMKKQLLRVKLSDLKSHFSASKDGNENEIISEALSFCEANKTWRFWVCCQCSEKFIKSEAYMHHIVQVHMGNVLPKMQMVLPQSFDTERIDMLLTSPWKPLDLSAAVKWLRSRQKIQNSEFSEFHAGDNMDDGDDCFKDARNDTSPEKESLGDSCKGCDENDPEEGKLSITFPPPDGWPISDDPERAKLLEKIRAAFELLIRHKYLAASHHDKVIQFTLDELQNLASVSQFLNRSLNQSPICICFLGASQLRKILKFLQDLSQACGLSRYSEQSNPNDEFNFGALCREVTEEILLDGEDSCLLLDEKLLGTECIQEIYMGSALHNVAVASSGDIANGNDVSSGADGFLSWIFTGPSSEEQVVSWMRTKEEKTNQGLEIMQHLEKEFYHLQNLCERKCEHLSYEGALQTVEDLCLEESRKRETSAEFTHESYESVLRKRREELNENDLELVFISSRFELDALTNVLKDAETLNHNQFGYEESYGCTSSQLRDLESGEADEWGMKDSLHEADSFIEVAIQKQKEQLSAELSRIDAQMMRNVTGMQQLELKLGPVSSNDYQIVLLPLVKSYMRAHLEALAEKDATEKSDAAREALLFELALDSKKEGRGRNDNSKHTLEKSKDKKKIKDTRKLKNLKATIGNDHRFNGDSIEHSLLSVASFGDHSEADVVSEAIEALSDEEEEYRRCNELEEEERKLAKTLEYQRRIENEAKEKHIAEQKKKYSCSDPMNVTEAVYDDCIENFFDDADLQEQEKPINQEKWNKQLDDLEGAKVNINGVFPSTNHCVISDTAKVLDVISQEVVPNGIAIQAGVFQSDQRPGRRGRRQKASNKLVDGKYQVTLSESEDSKSQRSGTDSERQSETLRSNGDAGPKTLRQLQAEDDEEERFQADLKRAKLQSLDVYRGRRNMTSCLKTSLEDNNDWVLSDVTKESQSSPGVAIFGTGLQNEVGEYNCFLNVIIQSLWNLGMFRAEFLRSSTLEHHHFGDPCVVCSLYAIFTALSTASSETRKEPVAPSSLRIALSNLYPDSSFFQEAQMNDASEVLAVIFDCLHRSFAQSSSVSDTESAESNSTGSWDCANRSCIAHSLFGMDVSEQLNCYSCGLESRHLKYTSFFHNINASALRTMKVTCAENSFDELLNLVEMNHQLACDREAGGCGKRNHIHHILTTPPHVFTIVLGWQNTCETVEDIAATLAALNTEIDISIMYRGVDPKNTYSLVSVVCYYGQHYHCFAYSHEHDQWIMYDDQNVKVIGSWSDVLSMCKRGHLQPQVLLYEKKL

SEQ ID NO: 29857 - DNA, 3555 bp, Arabidopsis thaliana
  misc_feature (1)..(3555): Ceres Seq. ID no. 4932870
atgcgtagattctctaccattgttgatcttctcatcagcaaaaaaccatcttctcaagcaaattctagaattgatctcatttgtaaaaggttccatatttcaagagttctcaataacgatttcgtagaatcaacagagagaaagaatggggttggtttagtttgtccagagaagcatgaagatgaattcgccggtgaagtcgagaagatttacagaattttgcggaatcaccattctagagttccaaaattggagcttgctcttaacgaatcaggtattgatctgcgacccgggttgatcatacgagtgttgagtcgttgtggcgatgctgggaatctaggttatagattctttctgtgggcaacgaagcaacctggttattttcatagctatgaagtgtgtaaatcaatggtgatgattcttagtaaaatgcgacaatttggagctgtttggggtttaattgaagagatgaggaagacgaatccggagttgattgagccggagttgttcgttgtattgatgcggaggtttgcttctgctaacatggtgaagaaagcagttgaggtgctcgacgaaatgcctaagtatgggttagagcctgacgagtatgtttttggttgtttgttagatgctttgtgtaagaacggtagtgttaaggaggcttcaaaggtttttgaggatatgagagagaagtttcctccgaatttgcggtattttacttcgttgttgtatggttggtgtagggaagggaagttgatggaagctaaagaagttttggttcagatgaaggaagctgggcttgagcctgacattgtggttttcactaacttacttagtggatatgctcatgctgggaaaatggcggatgcgtatgatcttatgaatgatatgagaaagagagggtttgagccgaatgtgaattgttacacggttttgatccaggcgttgtgtaggacggagaagagaatggatgaggcgatgcgggtttttgttgagatggagaggtatggatgtgaggctgatattgtgacttataccgcgttgataagtgggttttgtaaatggggaatgattgataaaggttatagtgttttagatgatatgagaaagaaaggagtcatgccgtcgcaagtaacatatatgcagataatggtggctcatgagaagaaagaacaatttgaagagtgtttggagttgattgagaagatgaagcgaagaggttgtcatcctgatcttctcatttacaatgtagtgataagattggcttgtaagttaggggaagtgaaagaagctgttcggttatggaacgaaatggaagctaatgggctaagccctggagttgatacgtttgttattatgatcaacggatttacaagccaaggtttcctaatcgaagcctgtaatcacttcaaagaaatggtaagccgaggaatattctctgcgcctcaatatggaacgctgaagtcattgcttaataaccttgttagagatgataagctcgaaatggcgaaagatgtatggagttgcatatccaacaaaacctcttcctgtgagctgaatgtatcagcttggacaatatggatccatgctttgtacgcaaaaggtcacgtgaaggaagcgtgttcgtattgtcttgatatgatggagatggatttgatgccgcaacctaatacttatgcgaaacttatgaaaggattgaataaactgtataataggacgatcgctgcagagattacagagaaggtggtgaagatggcaagtgagagagagatgagttttaagatgtataagaagaaaggtgaggaggatttgattgagaaagctaaacctaaagggaataaagaaggaaagaagaaagggacagatcatcaaaggtataagggaagagtgtctcttgctcggaaccgtcttaggtcggaaacgccatcatcttttcttgctcgagaccgtcttaggtcaaaaacgccatcatcgtctccattttcttcgaagcggcatacgcctaagacaagcgaaatagaagaagagtcgactccaaaagattcagttttgttaaaccctaaagatccttcaagcgcacctaagctcttccttgtacagcctcgtttagcaccgccaaagtatctacaagcgaagctgaacgaagcgctttgtctcgcgaattcgcttgaagagcaacgatatgggtactttgaatctgatttctttgacaaggaattgccttctcatgttgttgttcaaaaccctgtccgtagatcgtctaaacctcgcgaagaagttgatgctgttttcgtaaacgccattttgaccgctatccaacaacggaatttagagcgaatatgggcaaaacctgtcttagaccgtgtgggtcttataatcgaaatatttaatgctcatgcgcatacaaaggaagcaaaactacaggctgagttagctgctttgatgtacaataagagcagactggttcgagtgcgtggtactgatggacgccatacttttgggcagtttggagaagctgaagttgtcagtgcccgagggagagcaggaagcaagggaaccggtggcggttttgtaggtggtgcaggagaaactgagcttcagcttcaacgccgaagaatatcagaccggaggattcgcttgttatcccaaattaaagaagcccagcgaacacggctattgcagcgtgctggacgtaagaaaagagtggggttagagggtgagagttcaggaaccattgctgttgttggttacacaaatgctggaaaatcgactctgataagtgcactaacaaagactgctctctactgcaatgagcgattgtttgccacattagatcctacactcaagagtgcccatcttccttctggaaactttgtgcttcttagtgacactgtcggattcatatcagatctgcctatacagctggtgaaagcttttcaatcgactctggaagaagttgttgaagctgatctacttctgcatgtagttgattcaacagctccaaatatcgaggagcatcgttcaacagtgcttcatgtcctaaatcaaattggagtacctgaagagaagcttcaaaatatgattgaagtctggaataagattgattatgaagaagacgaagtggaggaagagaaatatctagatgatggcgaaggagtaggagaagaagacgaagacgaagctgatttaaaagctgaagaaactgttgatgcatctgaagcaacagtagatgaagaccaaatccaaaacggagacggtgacgacgctgatgggtggctattgtctgaagatgaaaatgctgacgaccctgagttctggaaagttccggaagttgctaaagtagatgctgcaaataagaaaggaccagatgttagagtttctgcattaaccggagttggtttgaaggagttgctgtatcttattgatgacaaaatgaaagagaagaagctcaagtctccgactatagtcgaaaggagtgagcttcataagcgtaaatggaggccacctcgtaacgatgatgaagaggagagattaatcccgttagatcaacgttga

SEQ ID NO: 29858 - protein, 1184 aa, Arabidopsis thaliana
  misc_feature (1)..(1184): Ceres Seq. ID no. 4932871
MRRFSTIVDLLISKKPSSQANSRIDLICKRFHISRVLNNDFVESTERKNGVGLVCPEKHEDEFAGEVEKIYRILRNHHSRVPKLELALNESGIDLRPGLIIRVLSRCGDAGNLGYRFFLWATKQPGYFHSYEVCKSMVMILSKMRQFGAVWGLIEEMRKTNPELIEPELFVVLMRRFASANMVKKAVEVLDEMPKYGLEPDEYVFGCLLDALCKNGSVKEASKVFEDMREKFPPNLRYFTSLLYGWCREGKLMEAKEVLVQMKEAGLEPDIVVFTNLLSGYAHAGKMADAYDLMNDMRKRGFEPNVNCYTVLIQALCRTEKRMDEAMRVFVEMERYGCEADIVTYTALISGFCKWGMIDKGYSVLDDMRKKGVMPSQVTYMQIMVAHEKKEQFEECLELIEKMKRRGCHPDLLIYNVVIRLACKLGEVKEAVRLWNEMEANGLSPGVDTFVIMINGFTSQGFLIEACNHFKEMVSRGIFSAPQYGTLKSLLNNLVRDDKLEMAKDVWSCISNKTSSCELNVSAWTIWIHALYAKGHVKEACSYCLDMMEMDLMPQPNTYAKLMKGLNKLYNRTIAAEITEKVVKMASEREMSFKMYKKKGEEDLIEKAKPKGNKEGKKKGTDHQRYKGRVSLARNRLRSETPSSFLARDRLRSKTPSSSPFSSKRHTPKTSEIEEESTPKDSVLLNPKDPSSAPKLFLVQPRLAPPKYLQAKLNEALCLANSLEEQRYGYFESDFFDKELPSHVVVQNPVRRSSKPREEVDAVFVNAILTAIQQRNLERIWAKPVLDRVGLIIEIFNAHAHTKEAKLQAELAALMYNKSRLVRVRGTDGRHTFGQFGEAEVVSARGRAGSKGTGGGFVGGAGETELQLQRRRISDRRIRLLSQIKEAQRTRLLQRAGRKKRVGLEGESSGTIAVVGYTNAGKSTLISALTKTALYCNERLFATLDPTLKSAHLPSGNFVLLSDTVGFISDLPIQLVKAFQSTLEEVVEADLLLHVVDSTAPNIEEHRSTVLHVLNQIGVPEEKLQNMIEVWNKIDYEEDEVEEEKYLDDGEGVGEEDEDEADLKAEETVDASEATVDEDQIQNGDGDDADGWLLSEDENADDPEFWKVPEVAKVDAANKKGPDVRVSALTGVGLKELLYLIDDKMKEKKLKSPTIVERSELHKRKWRPPRNDDEEERLIPLDQR

SEQ ID NO: 29859 - protein, 1048 aa, Arabidopsis thaliana
  misc_feature (1)..(1048): Ceres Seq. ID no. 4932872
MVMILSKMRQFGAVWGLIEEMRKTNPELIEPELFVVLMRRFASANMVKKAVEVLDEMPKYGLEPDEYVFGCLLDALCKNGSVKEASKVFEDMREKFPPNLRYFTSLLYGWCREGKLMEAKEVLVQMKEAGLEPDIVVFTNLLSGYAHAGKMADAYDLMNDMRKRGFEPNVNCYTVLIQALCRTEKRMDEAMRVFVEMERYGCEADIVTYTALISGFCKWGMIDKGYSVLDDMRKKGVMPSQVTYMQIMVAHEKKEQFEECLELIEKMKRRGCHPDLLIYNVVIRLACKLGEVKEAVRLWNEMEANGLSPGVDTFVIMINGFTSQGFLIEACNHFKEMVSRGIFSAPQYGTLKSLLNNLVRDDKLEMAKDVWSCISNKTSSCELNVSAWTIWIHALYAKGHVKEACSYCLDMMEMDLMPQPNTYAKLMKGLNKLYNRTIAAEITEKVVKMASEREMSFKMYKKKGEEDLIEKAKPKGNKEGKKKGTDHQRYKGRVSLARNRLRSETPSSFLARDRLRSKTPSSSPFSSKRHTPKTSEIEEESTPKDSVLLNPKDPSSAPKLFLVQPRLAPPKYLQAKLNEALCLANSLEEQRYGYFESDFFDKELPSHVVVQNPVRRSSKPREEVDAVFVNAILTAIQQRNLERIWAKPVLDRVGLIIEIFNAHAHTKEAKLQAELAALMYNKSRLVRVRGTDGRHTFGQFGEAEVVSARGRAGSKGTGGGFVGGAGETELQLQRRRISDRRIRLLSQIKEAQRTRLLQRAGRKKRVGLEGESSGTIAVVGYTNAGKSTLISALTKTALYCNERLFATLDPTLKSAHLPSGNFVLLSDTVGFISDLPIQLVKAFQSTLEEVVEADLLLHVVDSTAPNIEEHRSTVLHVLNQIGVPEEKLQNMIEVWNKIDYEEDEVEEEKYLDDGEGVGEEDEDEADLKAEETVDASEATVDEDQIQNGDGDDADGWLLSEDENADDPEFWKVPEVAKVDAANKKGPDVRVSALTGVGLKELLYLIDDKMKEKKLKSPTIVERSELHKRKWRPPRNDDEEERLIPLDQR

SEQ ID NO: 29860 - protein, 1046 aa, Arabidopsis thaliana
  misc_feature (1)..(1046): Ceres Seq. ID no. 4932873
MILSKMRQFGAVWGLIEEMRKTNPELIEPELFVVLMRRFASANMVKKAVEVLDEMPKYGLEPDEYVFGCLLDALCKNGSVKEASKVFEDMREKFPPNLRYFTSLLYGWCREGKLMEAKEVLVQMKEAGLEPDIVVFTNLLSGYAHAGKMADAYDLMNDMRKRGFEPNVNCYTVLIQALCRTEKRMDEAMRVFVEMERYGCEADIVTYTALISGFCKWGMIDKGYSVLDDMRKKGVMPSQVTYMQIMVAHEKKEQFEECLELIEKMKRRGCHPDLLIYNVVIRLACKLGEVKEAVRLWNEMEANGLSPGVDTFVIMINGFTSQGFLIEACNHFKEMVSRGIFSAPQYGTLKSLLNNLVRDDKLEMAKDVWSCISNKTSSCELNVSAWTIWIHALYAKGHVKEACSYCLDMMEMDLMPQPNTYAKLMKGLNKLYNRTIAAEITEKVVKMASEREMSFKMYKKKGEEDLIEKAKPKGNKEGKKKGTDHQRYKGRVSLARNRLRSETPSSFLARDRLRSKTPSSSPFSSKRHTPKTSEIEEESTPKDSVLLNPKDPSSAPKLFLVQPRLAPPKYLQAKLNEALCLANSLEEQRYGYFESDFFDKELPSHVVVQNPVRRSSKPREEVDAVFVNAILTAIQQRNLERIWAKPVLDRVGLIIEIFNAHAHTKEAKLQAELAALMYNKSRLVRVRGTDGRHTFGQFGEAEVVSARGRAGSKGTGGGFVGGAGETELQLQRRRISDRRIRLLSQIKEAQRTRLLQRAGRKKRVGLEGESSGTIAVVGYTNAGKSTLISALTKTALYCNERLFATLDPTLKSAHLPSGNFVLLSDTVGFISDLPIQLVKAFQSTLEEVVEADLLLHVVDSTAPNIEEHRSTVLHVLNQIGVPEEKLQNMIEVWNKIDYEEDEVEEEKYLDDGEGVGEEDEDEADLKAEETVDASEATVDEDQIQNGDGDDADGWLLSEDENADDPEFWKVPEVAKVDAANKKGPDVRVSALTGVGLKELLYLIDDKMKEKKLKSPTIVERSELHKRKWRPPRNDDEEERLIPLDQR

SEQ ID NO: 29861 - DNA, 1956 bp, Arabidopsis thaliana
  misc_feature (1)..(1956): Ceres Seq. ID no. 4932983
atggcggttttgtgggtcgaacaatctccttgtagtaacaacggctataagaataagatttggtgcgcggagattgctcttgaaaaacaagaaagttgtgaaatttggggagaagttgagtggtttggtcatgtgcttacagttccttcaacattcattgtccgaagctcaaatttcattgtcgtgattctcttcctcaacctcgtcactttcttctcccttgtctcctccaatgaacttgtctttgctgtgggtgaaactggttcactacaagtgactccaagaacagaggtgatatattcacctggtctgaaacgaggtataacatcgatatgtgagagattacatatccatggattacaaagaagacttgagcacattgatagatatgcacattcactaaagttgactcttttgagtaataatgcttccaacagtatcgacgtttgcttccacaggaattcgtcgcgtgcaattggaatgtgtcctgataatcagtggaagagagtgtccaaagggttaccttgggttgggataatgtcaccttttgactataagattcttgatataagaacatttggtggctcatctaatgtcagcaccgtggagttggttgctaaacaagagtttttcatataccggattgtgtttttaatcatggggatagtgttactgagtttggcttctagacttagcaaatcagttgcgttttactatatcggtgcaatgtctattgggattgtcattcttgtaactcttatcattaatcaggggataaagcgtctaccaactagagggaagagtcgttttcagttatttttctactcgtctatgattggtgtgggaggttactttcttcaatacatacgcggtttagttcaagatttgctaatgcagatagaaatcagtgaagatttgtacatccctctggcgattcttttggttgtgtttgtatttatgttgggagcgtggtcaggattttggactgtcaagaaatttgttgtgacaaaagatggttctgttgacattagtacatcaatctttgtctcttggtccatccgagcttttgctgtggctctgatccttcagagctctttagatccattacttgctggaggagcgttgataactggaattctcatctcattgattctaaagagtattagcagaaagctgttagctcaaagaatatatgagcaagatgatgaaactgagagttgtagccccggcttgatccatgctacctcgtttgcttctcctcttcctagaggttccaacaagaagttgaggacagtaccattatctgagtcagatatctttccttcttcattccacaaaacaccagaagggagaaggaagctaacgaaggaagagttgcaaaaattcactaaagagagcacggaaaatgcattgaaggaattggtttcttcacctgaagaaggttcctctggttctgaaaagcaagcagctaggggaacttctgaaccagtcggagagtgtacgaagaaaaagaagcaaagagttcgttataaagaaagaaataaaccctcagataagagcataacagagaagaagaagaagatgtcttatcaagacccacaacatcccgttagtgctcctcctcctcaagggtatcctcctaaggaaggatatccaccagcagggtatcctccaccagcaggttatcctccaccacaatatcctcaagcgggatatcctccagcaggttatcctccaccgcagcaaggatacggtcaaggatatccagcacaaggctatcctccaccgcaatatcctcaaggtcatccaccacaatatccttatcaaggtcctccaccaccgcattatggtcaggctccaccgaaaaataagaaagataagaaggattcaggaggcttcatggaaggatgtttggctatgctctgctgttgcgttctcttggaagcttgcttttga

SEQ ID NO: 29862 - protein, 651 aa, Arabidopsis thaliana
  misc_feature (1)..(651): Ceres Seq. ID no. 4932984
MAVLWVEQSPCSNNGYKNKIWCAEIALEKQESCEIWGEVEWFGHVLTVPSTFIVRSSNFIVVILFLNLVTFFSLVSSNELVFAVGETGSLQVTPRTEVIYSPGLKRGITSICERLHIHGLQRRLEHIDRYAHSLKLTLLSNNASNSIDVCFHRNSSRAIGMCPDNQWKRVSKGLPWVGIMSPFDYKILDIRTFGGSSNVSTVELVAKQEFFIYRIVFLIMGIVLLSLASRLSKSVAFYYIGAMSIGIVILVTLIINQGIKRLPTRGKSRFQLFFYSSMIGVGGYFLQYIRGLVQDLLMQIEISEDLYIPLAILLVVFVFMLGAWSGFWTVKKFVVTKDGSVDISTSIFVSWSIRAFAVALILQSSLDPLLAGGALITGILISLILKSISRKLLAQRIYEQDDETESCSPGLIHATSFASPLPRGSNKKLRTVPLSESDIFPSSFHKTPEGRRKLTKEELQKFTKESTENALKELVSSPEEGSSGSEKQAARGTSEPVGECTKKKKQRVRYKERNKPSDKSITEKKKKMSYQDPQHPVSAPPPQGYPPKEGYPPAGYPPPAGYPPPQYPQAGYPPAGYPPPQQGYGQGYPAQGYPPPQYPQGHPPQYPYQGPPPPHYGQAPPKNKKDKKDSGGFMEGCLAMLCCCVLLEACF

SEQ ID NO: 29863 - protein, 491 aa, Arabidopsis thaliana
  misc_feature (1)..(491): Ceres Seq. ID no. 4932985
MCPDNQWKRVSKGLPWVGIMSPFDYKILDIRTFGGSSNVSTVELVAKQEFFIYRIVFLIMGIVLLSLASRLSKSVAFYYIGAMSIGIVILVTLIINQGIKRLPTRGKSRFQLFFYSSMIGVGGYFLQYIRGLVQDLLMQIEISEDLYIPLAILLVVFVFMLGAWSGFWTVKKFVVTKDGSVDISTSIFVSWSIRAFAVALILQSSLDPLLAGGALITGILISLILKSISRKLLAQRIYEQDDETESCSPGLIHATSFASPLPRGSNKKLRTVPLSESDIFPSSFHKTPEGRRKLTKEELQKFTKESTENALKELVSSPEEGSSGSEKQAARGTSEPVGECTKKKKQRVRYKERNKPSDKSITEKKKKMSYQDPQHPVSAPPPQGYPPKEGYPPAGYPPPAGYPPPQYPQAGYPPAGYPPPQQGYGQGYPAQGYPPPQYPQGHPPQYPYQGPPPPHYGQAPPKNKKDKKDSGGFMEGCLAMLCCCVLLEACF

SEQ ID NO: 29864 - protein, 472 aa, Arabidopsis thaliana
  misc_feature (1)..(472): Ceres Seq. ID no. 4932986
MSPFDYKILDIRTFGGSSNVSTVELVAKQEFFIYRIVFLIMGIVLLSLASRLSKSVAFYYIGAMSIGIVILVTLIINQGIKRLPTRGKSRFQLFFYSSMIGVGGYFLQYIRGLVQDLLMQIEISEDLYIPLAILLVVFVFMLGAWSGFWTVKKFVVTKDGSVDISTSIFVSWSIRAFAVALILQSSLDPLLAGGALITGILISLILKSISRKLLAQRIYEQDDETESCSPGLIHATSFASPLPRGSNKKLRTVPLSESDIFPSSFHKTPEGRRKLTKEELQKFTKESTENALKELVSSPEEGSSGSEKQAARGTSEPVGECTKKKKQRVRYKERNKPSDKSITEKKKKMSYQDPQHPVSAPPPQGYPPKEGYPPAGYPPPAGYPPPQYPQAGYPPAGYPPPQQGYGQGYPAQGYPPPQYPQGHPPQYPYQGPPPPHYGQAPPKNKKDKKDSGGFMEGCLAMLCCCVLLEACF

SEQ ID NO: 29865 - DNA, 528 bp, Arabidopsis thaliana
  misc_feature (1)..(528): Ceres Seq. ID no. 4933025
atgaaccaatcaaaaacaaatccagccattgatcgtaaaacctttccaccaccgcacaccccctcgccgggggtagtgcgtcgcatacacgcgccaccgttaccttctacttctctcttgaagcaacactcgtggtctcctgatctaatccgcgaggaagcttggtcaaaacgtcaagatatctcccgccaccgtcatctccgccgtggtaagagcttgaccgacgaagatctcgacgagcttaaagcaagtttcgaactcggattcggtttcggatctcccgaaaacgctgatccaagactttccaacacgcttcccgcgttagaactttacttcgccgttcaaaaaagctacaacgacgccgtttctaacaaatcaacaacgtcgtcgtcttcactctccgacggcgataccagtcctcaccacaccgtataccaaaccagtgatgatccgcaaacggtgaagacgaagctgaagcaatgggcgagagtggtggcgtgcaccgtgaaccaatcgccgccgagatga

SEQ ID NO: 29866 - protein, 175 aa, Arabidopsis thaliana
  misc_feature (1)..(175): Ceres Seq. ID no. 4933026
MNQSKTNPAIDRKTFPPPHTPSPGVVRRIHAPPLPSTSLLKQHSWSPDLIREEAWSKRQDISRHRHLRRGKSLTDEDLDELKASFELGFGFGSPENADPRLSNTLPALELYFAVQKSYNDAVSNKSTTSSSSLSDGDTSPHHTVYQTSDDPQTVKTKLKQWARVVACTVNQSPPR

SEQ ID NO: 29867 - DNA, 1227 bp, Arabidopsis thaliana
  misc_feature (1)..(1227): Ceres Seq. ID no. 4933133
atggctctccgagaagacgacgacgatgttaacatcggagaaaaagtagtcgacgtagaatcggagcttcagaagtaccggatcaattcgatcgaatcaacggttgtgattcgtcagttaccgacacaaggcattgccttcaagctctggatacctgcaacaactctcgtcacgcttttagataactaccgtcgtgacccaaacattagtcctctcaatcgcaccttctcgagttttcaatccgacggttcagattcttcttctccgattaacatcgtcgagctcggatctggaacgggaatcgtcggtatcgcagcggctgcgacactaggtgctaatgtcacggtgacggatctcccaaacgtaatcgagaatctcaaattcaacgccgacgcaaacgctcaagtcgtggctaagttcggtgggaaagtccacgtggcgtctcttcgttggggcgaaatcgatgacgtggaaagtttgggtcaaaacgttgacttgattctagcgtctgacgtggtttatcacgttcatctttatgaacctctcctcaaaacgctgcgttttctgctcttagaaggatcatccgagagagtgtttcttatggctcacctcaagagatggaagaaagaatcgatttttttcaagaaagctcggagattcttcgatgttgatgttatacattgtgatgatcctcaagaaggtgctagaatcggagttgtacttcgaacccgtgaccttgtaagcagagcacttctgattaaaatacagagaacgaagactgaggaaagagagaagaaaatgactctgggactgataaacgcgaatccagtggtgcaagctaagaaggaagggcttgttcgtagagaagatcaatatagagatgatgatataagagatccagaacacccttatactttggagcagctaagggttgtctctgaagaatctgttactgtcgatgacaagctcgatcgcatcctgataacgtttacaccgacgattcagcattgtagtatggcaaatataattggtctgtgtctgagagctaagcttaaagaatgtttgcaacttcattacaaggttgatatcagagtgtctccgggttctcacgctgatgaagtttcagttaacaaacaactgaatgataaagaaagagtggtggctgcattggagaatcctaatctccgtcagctcgtggatgagtgtatctactccgatgagatatga

SEQ ID NO: 29868 - protein, 408 aa, Arabidopsis thaliana
  misc_feature (1)..(408): Ceres Seq. ID no. 4933134
MALREDDDDVNIGEKVVDVESELQKYRINSIESTVVIRQLPTQGIAFKLWIPATTLVTLLDNYRRDPNISPLNRTFSSFQSDGSDSSSPINIVELGSGTGIVGIAAAATLGANVTVTDLPNVIENLKFNADANAQVVAKFGGKVHVASLRWGEIDDVESLGQNVDLILASDVVYHVHLYEPLLKTLRFLLLEGSSERVFLMAHLKRWKKESIFFKKARRFFDVDVIHCDDPQEGARIGVVLRTRDLVSRALLIKIQRTKTEEREKKMTLGLINANPVVQAKKEGLVRREDQYRDDDIRDPEHPYTLEQLRVVSEESVTVDDKLDRILITFTPTIQHCSMANIIGLCLRAKLKECLQLHYKVDIRVSPGSHADEVSVNKQLNDKERVVAALENPNLRQLVDECIYSDEI

SEQ ID NO: 29869 - protein, 208 aa, Arabidopsis thaliana
  misc_feature (1)..(208): Ceres Seq. ID no. 4933135
MAHLKRWKKESIFFKKARRFFDVDVIHCDDPQEGARIGVVLRTRDLVSRALLIKIQRTKTEEREKKMTLGLINANPVVQAKKEGLVRREDQYRDDDIRDPEHPYTLEQLRVVSEESVTVDDKLDRILITFTPTIQHCSMANIIGLCLRAKLKECLQLHYKVDIRVSPGSHADEVSVNKQLNDKERVVAALENPNLRQLVDECIYSDEI

SEQ ID NO: 29870 - DNA, 1449 bp, Arabidopsis thaliana
  misc_feature (1)..(1449): Ceres Seq. ID no. 4933244
atatttttgtgattagaaattaggatcttacagaaatctttcaaaaaaaaattcataacagttccattttttttggtaagattcataaaaaaattcaagttaaatgcattttataaaaatgtaggaaaaactttcatcaaaaatcgttgagaagaacatacagtatatcttatccactctcttcctcatccacgcggcaaaggcacaaacctctttagaaaaatgtcgtcagcttattgttcctccgccgtggctgtatccgccgcagccaccgcttcctccgccgctacctttaatccattactctcctcccactccaattcccaactcttctatcgctttacaccaaaatccttcaaactcgttgccaattgccctaatccactaatcctccactcaaatatccgccgccaccgcttcttctgcgccgccgaaaccgaagctagttccgccgatgatgaaatccaggcatcagtagaagaagaagaagaggtagaagaagaaggagatgaaggtgaagaagaagtagaggaagaaaaacagacgacgcaagcgagtggtgaagaagggaggctttacgttgggaatttaccttacacaatcacttcttctgagctctctcagatttttggagaagctggaactgtcgtcgatgttcagattgtttatgataaagttactgatagaagcagaggatttggatttgtaacaatgggaagcattgaagaagctaaagaagcgatgcagatgtttaacagctctcaaattggtggtagaacggtgaaagtgaacttcccggaggtgccgagaggcggtgagaacgaagtaatgagaaccaaaatccgtgataataaccggagttatgttgatagtcctcataaggtatatgcaggaaaccttggttggaatctaacctcacaaggtttaaaggatgcatttggtgatcaacctggtgtgcttggtgctaaagttatctatgaaagaaatactgggaggtctagggggtttggtttcatctcgttcgagtcagcggaaaatgttcagtctgctttggctacaatgaatggcgtggaagttgaaggacgagcgctgaggctaaatttggcttcagagagagagaaacccactgtgtctcctccttccgtagaagaaggagaaaccgaggaggccagtctagagagtaacgaggtgctttcgaatgttagtgcatgaagcagcaaaagcacaatagattccggataagtttcagactgatctgctcgaggtgccaaaaatgaaaattttgttgtctttataaatgtgttgttttgttctagtgaggctgaagaagaagacaatatatgagatagaaaacaagagattgtttgtaatttttattgagaatgtttttaatccataaatggtgtaatgtaacaacatatcttgattccagtaaactgcaaatttctg

SEQ ID NO: 29871 - protein, 329 aa, Arabidopsis thaliana
  misc_feature (1)..(329): Ceres Seq. ID no. 4933245
MSSAYCSSAVAVSAAATASSAATFNPLLSSHSNSQLFYRFTPKSFKLVANCPNPLILHSNIRRHRFFCAAETEASSADDEIQASVEEEEEVEEEGDEGEEEVEEEKQTTQASGEEGRLYVGNLPYTITSSELSQIFGEAGTVVDVQIVYDKVTDRSRGFGFVTMGSIEEAKEAMQMFNSSQIGGRTVKVNFPEVPRGGENEVMRTKIRDNNRSYVDSPHKVYAGNLGWNLTSQGLKDAFGDQPGVLGAKVIYERNTGRSRGFGFISFESAENVQSALATMNGVEVEGRALRLNLASEREKPTVSPPSVEEGETEEASLESNEVLSNVSA

SEQ ID NO: 29872 - protein, 166 aa, Arabidopsis thaliana
  misc_feature (1)..(166): Ceres Seq. ID no. 4933246
MGSIEEAKEAMQMFNSSQIGGRTVKVNFPEVPRGGENEVMRTKIRDNNRSYVDSPHKVYAGNLGWNLTSQGLKDAFGDQPGVLGAKVIYERNTGRSRGFGFISFESAENVQSALATMNGVEVEGRALRLNLASEREKPTVSPPSVEEGETEEASLESNEVLSNVSA

SEQ ID NO: 29873 - DNA, 678 bp, Arabidopsis thaliana
  misc_feature (1)..(678): Ceres Seq. ID no. 4933296
atgatgtgctgtataaatgcacctttcaagtttatgaggggatcaaaagaccaacaacaagggcaatctcgtcctcaggaagcttcttcacagtcgccatggtactcgccttctttagttagctcgccaagctcatcccggcctcaaagttcaggtcagatttcagcacaagtatcaccgggtgaagcagctggcattatcgtcttcttgaaagacaaaagcgtggatgaactcaggaagcttctctctgacaaagatgcgtatcagcaatttctgctctctcttgaccaggtcaaagtccagaataatatcaaagatgagctccgtagagaaacattgcagctagctagagacaacttggagaaggagccacagataatggagctcagaaaccaatgcagaattatccgtacaactgagctcgcaactgcgcaagaaaagcttaatgagcttgagaggcaaaaagaagagatcctcaaattctactcccctggttctcttcttcataaacttcaagaggctatgaatcaggtggatgaagaatccgaagccctgcaagaaaagttcctagagaaggagattgatacagcagcatttgtgcagaaatacaagaagcttcgtactacctatcatcgacgagcattgatccatcttgccgctaaaacgtcaaacatttga

SEQ ID NO: 29874 - protein, 225 aa, Arabidopsis thaliana
  misc_feature (1)..(225): Ceres Seq. ID no. 4933297
MMCCINAPFKFMRGSKDQQQGQSRPQEASSQSPWYSPSLVSSPSSSRPQSSGQISAQVSPGEAAGIIVFLKDKSVDELRKLLSDKDAYQQFLLSLDQVKVQNNIKDELRRETLQLARDNLEKEPQIMELRNQCRIIRTTELATAQEKLNELERQKEEILKFYSPGSLLHKLQEAMNQVDEESEALQEKFLEKEIDTAAFVQKYKKLRTTYHRRALIHLAAKTSNI

SEQ ID NO: 29875 - protein, 224 aa, Arabidopsis thaliana
  misc_feature (1)..(224): Ceres Seq. ID no. 4933298
MCCINAPFKFMRGSKDQQQGQSRPQEASSQSPWYSPSLVSSPSSSRPQSSGQISAQVSPGEAAGIIVFLKDKSVDELRKLLSDKDAYQQFLLSLDQVKVQNNIKDELRRETLQLARDNLEKEPQIMELRNQCRIIRTTELATAQEKLNELERQKEEILKFYSPGSLLHKLQEAMNQVDEESEALQEKFLEKEIDTAAFVQKYKKLRTTYHRRALIHLAAKTSNI

SEQ ID NO: 29876 - protein, 214 aa, Arabidopsis thaliana
  misc_feature (1)..(214): Ceres Seq. ID no. 4933299
MRGSKDQQQGQSRPQEASSQSPWYSPSLVSSPSSSRPQSSGQISAQVSPGEAAGIIVFLKDKSVDELRKLLSDKDAYQQFLLSLDQVKVQNNIKDELRRETLQLARDNLEKEPQIMELRNQCRIIRTTELATAQEKLNELERQKEEILKFYSPGSLLHKLQEAMNQVDEESEALQEKFLEKEIDTAAFVQKYKKLRTTYHRRALIHLAAKTSNI

SEQ ID NO: 29877 - DNA, 654 bp, Arabidopsis thaliana
  misc_feature (1)..(654): Ceres Seq. ID no. 4933353
atgttcaatttctggggatcaaaagaccaacaacaagggcaatctcgtcctcaggaagcttcttcacagtcgccatggtactcgccttctttagttagctcgccaagctcatcccggcctcaaagttcaggtcagatttcagcacaagtatcaccgggtgaagcagctggcattatcgtcttcttgaaagacaaaagcgtggatgaactcaggaagcttctctctgacaaagatgcgtatcagcaatttctgctctctcttgaccaggtcaaagtccagaataatatcaaagatgagctccgtagagaaacattgcagctagctagagacaacttggagaaggagccacagataatggagctcagaaaccaatgcagaattatccgtacaactgagctcgcaactgcgcaagaaaagcttaatgagcttgagaggcaaaaagaagagatcctcaaattctactcccctggttctcttcttcataaacttcaagaggctatgaatcaggtggatgaagaatccgaagccctgcaagaaaagttcctagagaaggagattgatacagcagcatttgtgcagaaatacaagaagcttcgtactacctatcatcgacgagcattgatccatcttgccgctaaaacgtcaaacatttga

SEQ ID NO: 29878 - protein, 217 aa, Arabidopsis thaliana
  misc_feature (1)..(217): Ceres Seq. ID no. 4933354
MFNFWGSKDQQQGQSRPQEASSQSPWYSPSLVSSPSSSRPQSSGQISAQVSPGEAAGIIVFLKDKSVDELRKLLSDKDAYQQFLLSLDQVKVQNNIKDELRRETLQLARDNLEKEPQIMELRNQCRIIRTTELATAQEKLNELERQKEEILKFYSPGSLLHKLQEAMNQVDEESEALQEKFLEKEIDTAAFVQKYKKLRTTYHRRALIHLAAKTSNI

SEQ ID NO: 29879 - DNA, 948 bp, Arabidopsis thaliana
  misc_feature (1)..(948): Ceres Seq. ID no. 4933359
atgagagtttcggggtttagagttcttctcttggtttcttgtttcttctgcaaatccaaaggagctgttgttcctgcactcatcatgtttggcgactccattgttgacgttggcaacaacaataacttactcagcattgtcaaatccaactttcttccttacggtagagacttcatcgaccaaagacccaccggaagattctgcaacggaaaactcgctgtagatttctcagccgagtaccttggtttctcttcatacccacctgcattcctaagccgggaagcaagcaacgagaatatcctgatcggtgccaactttgcatcagcttcttcaggatactatgatgccacatctgttccatttggctcgatctccttaacacgacagctgagctattacagggcgtatcaaaatagagtaacgagaatgatcgggagggggaacgcgcgcatactgttctctagaggtatccacattttgagtgcgggatctagcgactttcttcagaattattacatcaatcctctactcaacatcctaaatacacctgatcagttcgctgacattctcctgagatccttctcagaattcatccagaatctgtatgaactaggagcaaggagaatcggagtgatatcgctaccgccgatgggttgcctgcctgcagctatcactcttttcggtgcaggaaacaaaagttgtgttgagagactgaacaatgatgctatcatgttcaatactaaacttgagaacacaacccggttactgatgaatagacactcaggcctcagactcgtcgcctttaatgtctaccaacctttcctggacatcatcaccaacccaactgacaatggatatgtgttttgggatggatttcatcccacagaggctgtaaacgagctgttggctggtcaactactgggtcaagggatttctctaatcaattga

SEQ ID NO: 29880 - protein, 315 aa, Arabidopsis thaliana
  misc_feature (1)..(315): Ceres Seq. ID no. 4933360
MRVSGFRVLLLVSCFFCKSKGAVVPALIMFGDSIVDVGNNNNLLSIVKSNFLPYGRDFIDQRPTGRFCNGKLAVDFSAEYLGFSSYPPAFLSREASNENILIGANFASASSGYYDATSVPFGSISLTRQLSYYRAYQNRVTRMIGRGNARILFSRGIHILSAGSSDFLQNYYINPLLNILNTPDQFADILLRSFSEFIQNLYELGARRIGVISLPPMGCLPAAITLFGAGNKSCVERLNNDAIMFNTKLENTTRLLMNRHSGLRLVAFNVYQPFLDIITNPTDNGYVFWDGFHPTEAVNELLAGQLLGQGISLIN

SEQ ID NO: 29881 - protein, 287 aa, Arabidopsis thaliana
  misc_feature (1)..(287): Ceres Seq. ID no. 4933361
MFGDSIVDVGNNNNLLSIVKSNFLPYGRDFIDQRPTGRFCNGKLAVDFSAEYLGFSSYPPAFLSREASNENILIGANFASASSGYYDATSVPFGSISLTRQLSYYRAYQNRVTRMIGRGNARILFSRGIHILSAGSSDFLQNYYINPLLNILNTPDQFADILLRSFSEFIQNLYELGARRIGVISLPPMGCLPAAITLFGAGNKSCVERLNNDAIMFNTKLENTTRLLMNRHSGLRLVAFNVYQPFLDIITNPTDNGYVFWDGFHPTEAVNELLAGQLLGQGISLIN

SEQ ID NO: 29882 - protein, 173 aa, Arabidopsis thaliana
  misc_feature (1)..(173): Ceres Seq. ID no. 4933362
MIGRGNARILFSRGIHILSAGSSDFLQNYYINPLLNILNTPDQFADILLRSFSEFIQNLYELGARRIGVISLPPMGCLPAAITLFGAGNKSCVERLNNDAIMFNTKLENTTRLLMNRHSGLRLVAFNVYQPFLDIITNPTDNGYVFWDGFHPTEAVNELLAGQLLGQGISLIN

SEQ ID NO: 29883 - DNA, 1179 bp, Arabidopsis thaliana
  misc_feature (1)..(1179): Ceres Seq. ID no. 4933703
atggcttttaagaaaaggaatgaaatttgcaagaatcttcttcctagcagtagtggtctcgatgatcttcatctctcgagctgtaaatcttcatcatcagctacagctcataagacagaaggagaaatccttagctcaacgaccgtcaaaagctttagctttaatgaacttaaactcgctactagaaacttcagatcggactctgttgttggagaaggtggctttggttgtgtctttagaggttggcttgatgagactactcttactcctaccaaatctagctctggtcttgttattgctgttaaacgacttaaccctgatggttttcaaggtcaccgagaatggctgacagagattaactatttggggcagttaagtcacccgaatttggttaaattgattggttattgcttggaagatgaacaacggcttcttgtgtatgagtttatgcacaagggtagtcttgagaatcatctgtttgcaaatggaaataaggattttaagccgctatcttggattctacggattaaggttgcacttgatgcagctaaaggtcttgcatttcttcatagtgatcccgtcaaagtcatttacagagacatcaaggcgtcaaacatcttactggactcggacttcaacgcaaagctttcagactttggtttagcgagagacggtccaatgggagaacaaagttatgttagtacaagggtcatgggtacttttgggtacgcagctcctgagtatgtctcaacaggccacttaaatgctagaagcgacgtatacagtttcggggttgttctgctagaactactatgtggaaggcaagcactagaccataaccgcccggccaaggagcaaaaccttgtggattgggctcgaccatacctcacaagcaggcgaaaggttctactaattgtggacactcggcttaactcacagtacaaacccgaaggagcagtgagactggcaagcattgctgtgcaatgcctatcattcgaacccaaatcacgtccgaccatggaccaagtggttcgagccttggtacagctgcaagacagcgtggttaaaccggccaatgttgacccgcttaaggttaaggataccaagaaacttgtgggattgaaaacagaagacaagtaccagagaaacggtttaaacaaaaaaaccgttggattgtag

SEQ ID NO: 29884 - protein, 392 aa, Arabidopsis thaliana
  misc_feature (1)..(392): Ceres Seq. ID no. 4933704
MAFKKRNEICKNLLPSSSGLDDLHLSSCKSSSSATAHKTEGEILSSTTVKSFSFNELKLATRNFRSDSVVGEGGFGCVFRGWLDETTLTPTKSSSGLVIAVKRLNPDGFQGHREWLTEINYLGQLSHPNLVKLIGYCLEDEQRLLVYEFMHKGSLENHLFANGNKDFKPLSWILRIKVALDAAKGLAFLHSDPVKVIYRDIKASNILLDSDFNAKLSDFGLARDGPMGEQSYVSTRVMGTFGYAAPEYVSTGHLNARSDVYSFGVVLLELLCGRQALDHNRPAKEQNLVDWARPYLTSRRKVLLIVDTRLNSQYKPEGAVRLASIAVQCLSFEPKSRPTMDQVVRALVQLQDSVVKPANVDPLKVKDTKKLVGLKTEDKYQRNGLNKKTVGL

SEQ ID NO: 29885 - protein, 243 aa, Arabidopsis thaliana
  misc_feature (1)..(243): Ceres Seq. ID no. 4933705
MHKGSLENHLFANGNKDFKPLSWILRIKVALDAAKGLAFLHSDPVKVIYRDIKASNILLDSDFNAKLSDFGLARDGPMGEQSYVSTRVMGTFGYAAPEYVSTGHLNARSDVYSFGVVLLELLCGRQALDHNRPAKEQNLVDWARPYLTSRRKVLLIVDTRLNSQYKPEGAVRLASIAVQCLSFEPKSRPTMDQVVRALVQLQDSVVKPANVDPLKVKDTKKLVGLKTEDKYQRNGLNKKTVGL

SEQ ID NO: 29886 - DNA, 2412 bp, Arabidopsis thaliana
  misc_feature (1)..(2412): Ceres Seq. ID no. 4933882
atgattgttttgggtataaaacccgataattatgcgttccctgctttgctaaaggctgtagcagatcttcaggacatggaactggggaaacagattcatgcccatgtgtataaatttgggtacggtgtggattccgtgactgtggctaatacccttgtgaatttgtatagaaagtgtggagatttcggagctgtctataaggtgttcgatagaatatctgagagaaaccaagtctcttggaattctttaatttcttctttgtgtagttttgagaagtgggaaatggcgttagaggcatttcggtgtatgttggatgaaaatgtggaacctagttcgtttaccttggtgagtgtggttactgcttgttcgaatttgcctatgcctgagggattaatgatgggtaagcaggttcacgcctatggtttgagaaagggtgaattgaattcgtttataatcaacacattggtggctatgtatggtaaactgggaaaattagcatcttctaaagtcttacttggttcttttggaggccgtgacttggtcacatggaacactgtgttgagctcgttatgtcagaacgagcagttgcttgaagcattggaatatttgcgtgaaatggtgcttgaaggtgttgaaccagatgagttcactatttcaagtgttcttcctgcttgttcacacttggagatgcttcgcacagggaaagaattgcatgcttatgctttgaaaaatggctctttggatgagaattcctttgttggtagtgctttggttgacatgtattgcaattgcaagcaagtgttgagtggtcgtcgagtatttgatggaatgtttgatagaaagattggtctgtggaatgctatgatcgctgggtattcccagaatgagcatgacaaggaagcgttgttgcttttcattggaatggaagaaagtgctgggcttctggctaactctaccacaatggcaggtgttgttcctgcttgtgtccgttctggtgcgttctctagaaaggaagctatccatggatttgttgtgaagagaggtttagatagagacaggtttgtgcagaatacactgatggatatgtattctaggctgggaaagatcgatatcgccatgcggatattcggtaaaatggaagatagagatttagttacgtggaacacgatgattacgggttatgtattctcagaacaccatgaggacgcacttctcctgctacacaagatgcaaaaccttgaaagaaaagtgagcaagggggctagccgagttagtcttaaacctaattccatcactctgatgacaatccttcccagttgtgctgcactatcagcattagcaaaaggaaaagaaattcatgcttatgccatcaagaacaatttggcaactgatgtggctgtcggaagcgctttagttgacatgtacgcaaaatgcgggtgcctacagatgtcgagaaaagtgtttgatcagattccacaaaaaaatgttattacttggaatgtgattataatggcttacgggatgcatggaaacggtcaagaagccatagatctgctaagaatgatgatggttcagggagtaaaaccaaacgaggttacattcatctcagtatttgcagcttgtagccactcaggcatggtggatgaaggattaaggatattctatgttatgaaacccgactacggggttgaaccaagctcagatcattatgcttgtgttgtagatttgcttggaagggctggtagaattaaagaagcatatcaactcatgaatatgatgcctcgtgatttcaacaaagctggagcatggagtagcctccttggtgccagtcggattcacaataacctagaaattggagaaattgctgctcaaaatctcattcaactggaaccaaatgtagctagtcactatgtgttacttgccaatatttattcatcagcaggcctctgggataaagcaacagaggtaagaagaaatatgaaagagcaaggcgtgagaaaagaacctggatgtagctggattgagcatggcgatgaagtacataaatttgtagccggtgactcatctcacccgcaaagcgaaaagctcagtggatatctcgagacattgtgggagagaatgagaaaagaaggatatgtacctgacacatcttgtgtactccacaatgtagaggaagatgaaaaagagattctgctttgtggacacagtgagaagctagcaattgcgtttgggatacttaacacatcacccggtacaattattagggtggctaaaaacctcagggtttgtaatgattgtcatcttgcaaccaagtttatctcaaagattgttgatagagaaatcatcttgagagatgttaggaggtttcatcgtttcaagaatggaacttgctcctgtggagactattggtga

SEQ ID NO: 29887 - protein, 803 aa, Arabidopsis thaliana
  misc_feature (1)..(803): Ceres Seq. ID no. 4933883
MIVLGIKPDNYAFPALLKAVADLQDMELGKQIHAHVYKFGYGVDSVTVANTLVNLYRKCGDFGAVYKVFDRISERNQVSWNSLISSLCSFEKWEMALEAFRCMLDENVEPSSFTLVSVVTACSNLPMPEGLMMGKQVHAYGLRKGELNSFIINTLVAMYGKLGKLASSKVLLGSFGGRDLVTWNTVLSSLCQNEQLLEALEYLREMVLEGVEPDEFTISSVLPACSHLEMLRTGKELHAYALKNGSLDENSFVGSALVDMYCNCKQVLSGRRVFDGMFDRKIGLWNAMIAGYSQNEHDKEALLLFIGMEESAGLLANSTTMAGVVPACVRSGAFSRKEAIHGFVVKRGLDRDRFVQNTLMDMYSRLGKIDIAMRIFGKMEDRDLVTWNTMITGYVFSEHHEDALLLLHKMQNLERKVSKGASRVSLKPNSITLMTILPSCAALSALAKGKEIHAYAIKNNLATDVAVGSALVDMYAKCGCLQMSRKVFDQIPQKNVITWNVIIMAYGMHGNGQEAIDLLRMMMVQGVKPNEVTFISVFAACSHSGMVDEGLRIFYVMKPDYGVEPSSDHYACVVDLLGRAGRIKEAYQLMNMMPRDFNKAGAWSSLLGASRIHNNLEIGEIAAQNLIQLEPNVASHYVLLANIYSSAGLWDKATEVRRNMKEQGVRKEPGCSWIEHGDEVHKFVAGDSSHPQSEKLSGYLETLWERMRKEGYVPDTSCVLHNVEEDEKEILLCGHSEKLAIAFGILNTSPGTIIRVAKNLRVCNDCHLATKFISKIVDREIILRDVRRFHRFKNGTCSCGDYW

SEQ ID NO: 29888 - protein, 778 aa, Arabidopsis thaliana
  misc_feature (1)..(778): Ceres Seq. ID no. 4933884
MELGKQIHAHVYKFGYGVDSVTVANTLVNLYRKCGDFGAVYKVFDRISERNQVSWNSLISSLCSFEKWEMALEAFRCMLDENVEPSSFTLVSVVTACSNLPMPEGLMMGKQVHAYGLRKGELNSFIINTLVAMYGKLGKLASSKVLLGSFGGRDLVTWNTVLSSLCQNEQLLEALEYLREMVLEGVEPDEFTISSVLPACSHLEMLRTGKELHAYALKNGSLDENSFVGSALVDMYCNCKQVLSGRRVFDGMFDRKIGLWNAMIAGYSQNEHDKEALLLFIGMEESAGLLANSTTMAGVVPACVRSGAFSRKEAIHGFVVKRGLDRDRFVQNTLMDMYSRLGKIDIAMRIFGKMEDRDLVTWNTMITGYVFSEHHEDALLLLHKMQNLERKVSKGASRVSLKPNSITLMTILPSCAALSALAKGKEIHAYAIKNNLATDVAVGSALVDMYAKCGCLQMSRKVFDQIPQKNVITWNVIIMAYGMHGNGQEAIDLLRMMMVQGVKPNEVTFISVFAACSHSGMVDEGLRIFYVMKPDYGVEPSSDHYACVVDLLGRAGRIKEAYQLMNMMPRDFNKAGAWSSLLGASRIHNNLEIGEIAAQNLIQLEPNVASHYVLLANIYSSAGLWDKATEVRRNMKEQGVRKEPGCSWIEHGDEVHKFVAGDSSHPQSEKLSGYLETLWERMRKEGYVPDTSCVLHNVEEDEKEILLCGHSEKLAIAFGILNTSPGTIIRVAKNLRVCNDCHLATKFISKIVDREIILRDVRRFHRFKNGTCSCGDYW

SEQ ID NO: 29889 - protein, 709 aa, Arabidopsis thaliana
  misc_feature (1)..(709): Ceres Seq. ID no. 4933885
MALEAFRCMLDENVEPSSFTLVSVVTACSNLPMPEGLMMGKQVHAYGLRKGELNSFIINTLVAMYGKLGKLASSKVLLGSFGGRDLVTWNTVLSSLCQNEQLLEALEYLREMVLEGVEPDEFTISSVLPACSHLEMLRTGKELHAYALKNGSLDENSFVGSALVDMYCNCKQVLSGRRVFDGMFDRKIGLWNAMIAGYSQNEHDKEALLLFIGMEESAGLLANSTTMAGVVPACVRSGAFSRKEAIHGFVVKRGLDRDRFVQNTLMDMYSRLGKIDIAMRIFGKMEDRDLVTWNTMITGYVFSEHHEDALLLLHKMQNLERKVSKGASRVSLKPNSITLMTILPSCAALSALAKGKEIHAYAIKNNLATDVAVGSALVDMYAKCGCLQMSRKVFDQIPQKNVITWNVIIMAYGMHGNGQEAIDLLRMMMVQGVKPNEVTFISVFAACSHSGMVDEGLRIFYVMKPDYGVEPSSDHYACVVDLLGRAGRIKEAYQLMNMMPRDFNKAGAWSSLLGASRIHNNLEIGEIAAQNLIQLEPNVASHYVLLANIYSSAGLWDKATEVRRNMKEQGVRKEPGCSWIEHGDEVHKFVAGDSSHPQSEKLSGYLETLWERMRKEGYVPDTSCVLHNVEEDEKEILLCGHSEKLAIAFGILNTSPGTIIRVAKNLRVCNDCHLATKFISKIVDREIILRDVRRFHRFKNGTCSCGDYW

SEQ ID NO: 29890 - DNA, 2970 bp, Arabidopsis thaliana
  misc_feature (1)..(2970): Ceres Seq. ID no. 4933996
atggcggttggaatggagaacgcgacggcgtctggtgaatgtggcgagatacttaagccacgcaccgacaagagagagtatcggaggattgttctgaagaattcgctggaggtgttgttaatcagcgacccagagactgacaagtgtgctgcttcaatgaacgttagcgttggatcgtttacggacccagaaggattggaagggctagctcatttccttgagcatatgctgttttatgcaagtgaaaaataccctgaggaagatagttactccaagtacatcacagagcatggagggagcacaaatgcttatacttccagtgaagatacaaactaccatttcgatatcaacactgattctttttatgaagctttggacaggtttgcacagttctttatccagccactgatgtcaactgatgccaccatgagggagatcaaggcggtcgactctgagcatcagaataacttgttgtctgactcttggcgtatggcccagttacagaagcatctaagtagagaagaccatccatatcacaaatttagcacagggaatatggatactcttcacgtacgacccgaagaaaatggagtggatacaaggagtgaactaattaaattttatgacgaacactattctgccaacatcatgcatctggttgtttatggcaaggaaaatcttgataaaactcaaggtctagtggaagcgttgttccagggaattcgaaacaccaaccagggtattccaagatttcctggtcagccgtgtactctagaccatttgcaggttctcgtgaaggctgttcctataatgcagggtcacgagcttagtgtttcatggcctgtaactcctagcatctctcattatgaagaggcaccatgcaggtatcttggtgatctaattggtcatgaaggcgaaggaagtctgtttcatgccttaaaaatcttgggttgggcaacaggactctatgctggtgaagcagactggagtatggaatattctttcttcaatgtttcaattgatcttactgatgctggtcatgagcatatgcaagatattttagggttgttgttcgaatacattaaggttttacaacagtctggtgtttcccagtggatttttgatgagctctcagctatatgtgaggcagaatttcattatcaagccaaaatagatccaatttcttatgcagtggatatttcttcaaacatgaagatatatccaaccaagcattggctggtaggatcatcactgccttcgaaatttaatccagctattgtgcaaaaggttctcgatgagctttctcccaataatccctcagtccccaatgtgttatgttcatacaatttacatgtagttcaagcattgaatcctgactgcttacggcctaggcaaactgacaaggttgagccatggtataacactgcttattcacttgagaagataaccaaattcaccattcaggagtggatgcagtcagcccctgatgtaaacctgcttctaccaacacctaatgtcttcattcctacggatttttcattaaaggatttaaaggataaggatatctttcctgttttgctgagaaagacatcatactcaagattgtggtataagcctgacacaaagttcttcaaaccaaaggcatacgttaagatggattttaactgcccccttgcagtcagctctcccgacgctgcggttctttcagatatttttgtttggttgctagtggactatttgaatgaatatgctctcatcaatcttgactatgtttcagcttattatgctcaggctgctggtcttgactatggattaagtctttcggacaatggctttgagctctctcttgctggctttaatcacaaattgaggatcttgctggaagctgtcattcaaaagatagcaaaattcgaagttaaacctgacaggttttccgttatcaaggaaacagtcacaaaggcataccaaaataacaaattccaacaaccacatgaacaagcaacgaattactgctcactagtattacaagatcagatttggccttggacagaggaactagatgctctttctcatttggaagctgaagacttggctaatttcgttccgatgctattatcaaggacatttgttgagtgctatatagcagggaatgttgagaaggacgaagctgagtcaatggtcaagcatattgaagatgttctttttaccgactcaaaacctatttgtcgtccgttatttccatcccagttcctgacaaatagggttacagagctcggaacaggaatgaaacacttttactatcaggaaggttcaaactccagtgatgaaaattctgccctagtgcattatattcaggttcataaagatgagttttccatgaatagtaaacttcagcttttcgaactaattgcaaaacaagacacgtttcaccagcttagaacgattgagcaacttggctacatcacctcactttctctgagcaacgattctggcgtctatggtgtacaattcattatccagtcttcagttaagggtccaggacatattgattcgagagttgagtcactactaaaggacctggagagtaaattttacaatatgagcgatgaagaattcaagagcaatgtaacaaatttgatagatatgaagcttgaaaaggacaagaacttggatgaggaatcctggttttactgggcagagattcaaaccgggacactcaaattcaaccgcatagatgcagaggtggctgcactgagactgctaaagaaggacgaatggatagatttctttgacgaatacataaaggttgacgcaccaaataagaaatcgttgagcatatgcgtttacggaaaccaacatttgaaggaaatgcgaaatgacaaagacaagattccatcaacatccatagaaatcgaagacattgtctgtttcagaaagtctcaacctctttacgggtcgttgaaactatga

SEQ ID NO: 29891 - protein, 989 aa, Arabidopsis thaliana
  misc_feature (1)..(989): Ceres Seq. ID no. 4933997
MAVGMENATASGECGEILKPRTDKREYRRIVLKNSLEVLLISDPETDKCAASMNVSVGSFTDPEGLEGLAHFLEHMLFYASEKYPEEDSYSKYITEHGGSTNAYTSSEDTNYHFDINTDSFYEALDRFAQFFIQPLMSTDATMREIKAVDSEHQNNLLSDSWRMAQLQKHLSREDHPYHKFSTGNMDTLHVRPEENGVDTRSELIKFYDEHYSANIMHLVVYGKENLDKTQGLVEALFQGIRNTNQGIPRFPGQPCTLDHLQVLVKAVPIMQGHELSVSWPVTPSISHYEEAPCRYLGDLIGHEGEGSLFHALKILGWATGLYAGEADWSMEYSFFNVSIDLTDAGHEHMQDILGLLFEYIKVLQQSGVSQWIFDELSAICEAEFHYQAKIDPISYAVDISSNMKIYPTKHWLVGSSLPSKFNPAIVQKVLDELSPNNPSVPNVLCSYNLHVVQALNPDCLRPRQTDKVEPWYNTAYSLEKITKFTIQEWMQSAPDVNLLLPTPNVFIPTDFSLKDLKDKDIFPVLLRKTSYSRLWYKPDTKFFKPKAYVKMDFNCPLAVSSPDAAVLSDIFVWLLVDYLNEYALINLDYVSAYYAQAAGLDYGLSLSDNGFELSLAGFNHKLRILLEAVIQKIAKFEVKPDRFSVIKETVTKAYQNNKFQQPHEQATNYCSLVLQDQIWPWTEELDALSHLEAEDLANFVPMLLSRTFVECYIAGNVEKDEAESMVKHIEDVLFTDSKPICRPLFPSQFLTNRVTELGTGMKHFYYQEGSNSSDENSALVHYIQVHKDEFSMNSKLQLFELIAKQDTFHQLRTIEQLGYITSLSLSNDSGVYGVQFIIQSSVKGPGHIDSRVESLLKDLESKFYNMSDEEFKSNVTNLIDMKLEKDKNLDEESWFYWAEIQTGTLKFNRIDAEVAALRLLKKDEWIDFFDEYIKVDAPNKKSLSICVYGNQHLKEMRNDKDKIPSTSIEIEDIVCFRKSQPLYGSLKL

SEQ ID NO: 29892 - protein, 985 aa, Arabidopsis thaliana
  misc_feature (1)..(985): Ceres Seq. ID no. 4933998
MENATASGECGEILKPRTDKREYRRIVLKNSLEVLLISDPETDKCAASMNVSVGSFTDPEGLEGLAHFLEHMLFYASEKYPEEDSYSKYITEHGGSTNAYTSSEDTNYHFDINTDSFYEALDRFAQFFIQPLMSTDATMREIKAVDSEHQNNLLSDSWRMAQLQKHLSREDHPYHKFSTGNMDTLHVRPEENGVDTRSELIKFYDEHYSANIMHLVVYGKENLDKTQGLVEALFQGIRNTNQGIPRFPGQPCTLDHLQVLVKAVPIMQGHELSVSWPVTPSISHYEEAPCRYLGDLIGHEGEGSLFHALKILGWATGLYAGEADWSMEYSFFNVSIDLTDAGHEHMQDILGLLFEYIKVLQQSGVSQWIFDELSAICEAEFHYQAKIDPISYAVDISSNMKIYPTKHWLVGSSLPSKFNPAIVQKVLDELSPNNPSVPNVLCSYNLHVVQALNPDCLRPRQTDKVEPWYNTAYSLEKITKFTIQEWMQSAPDVNLLLPTPNVFIPTDFSLKDLKDKDIFPVLLRKTSYSRLWYKPDTKFFKPKAYVKMDFNCPLAVSSPDAAVLSDIFVWLLVDYLNEYALINLDYVSAYYAQAAGLDYGLSLSDNGFELSLAGFNHKLRILLEAVIQKIAKFEVKPDRFSVIKETVTKAYQNNKFQQPHEQATNYCSLVLQDQIWPWTEELDALSHLEAEDLANFVPMLLSRTFVECYIAGNVEKDEAESMVKHIEDVLFTDSKPICRPLFPSQFLTNRVTELGTGMKHFYYQEGSNSSDENSALVHYIQVHKDEFSMNSKLQLFELIAKQDTFHQLRTIEQLGYITSLSLSNDSGVYGVQFIIQSSVKGPGHIDSRVESLLKDLESKFYNMSDEEFKSNVTNLIDMKLEKDKNLDEESWFYWAEIQTGTLKFNRIDAEVAALRLLKKDEWIDFFDEYIKVDAPNKKSLSICVYGNQHLKEMRNDKDKIPSTSIEIEDIVCFRKSQPLYGSLKL

SEQ ID NO: 29893 - protein, 937 aa, Arabidopsis thaliana
  misc_feature (1)..(937): Ceres Seq. ID no. 4933999
MNVSVGSFTDPEGLEGLAHFLEHMLFYASEKYPEEDSYSKYITEHGGSTNAYTSSEDTNYHFDINTDSFYEALDRFAQFFIQPLMSTDATMREIKAVDSEHQNNLLSDSWRMAQLQKHLSREDHPYHKFSTGNMDTLHVRPEENGVDTRSELIKFYDEHYSANIMHLVVYGKENLDKTQGLVEALFQGIRNTNQGIPRFPGQPCTLDHLQVLVKAVPIMQGHELSVSWPVTPSISHYEEAPCRYLGDLIGHEGEGSLFHALKILGWATGLYAGEADWSMEYSFFNVSIDLTDAGHEHMQDILGLLFEYIKVLQQSGVSQWIFDELSAICEAEFHYQAKIDPISYAVDISSNMKIYPTKHWLVGSSLPSKFNPAIVQKVLDELSPNNPSVPNVLCSYNLHVVQALNPDCLRPRQTDKVEPWYNTAYSLEKITKFTIQEWMQSAPDVNLLLPTPNVFIPTDFSLKDLKDKDIFPVLLRKTSYSRLWYKPDTKFFKPKAYVKMDFNCPLAVSSPDAAVLSDIFVWLLVDYLNEYALINLDYVSAYYAQAAGLDYGLSLSDNGFELSLAGFNHKLRILLEAVIQKIAKFEVKPDRFSVIKETVTKAYQNNKFQQPHEQATNYCSLVLQDQIWPWTEELDALSHLEAEDLANFVPMLLSRTFVECYIAGNVEKDEAESMVKHIEDVLFTDSKPICRPLFPSQFLTNRVTELGTGMKHFYYQEGSNSSDENSALVHYIQVHKDEFSMNSKLQLFELIAKQDTFHQLRTIEQLGYITSLSLSNDSGVYGVQFIIQSSVKGPGHIDSRVESLLKDLESKFYNMSDEEFKSNVTNLIDMKLEKDKNLDEESWFYWAEIQTGTLKFNRIDAEVAALRLLKKDEWIDFFDEYIKVDAPNKKSLSICVYGNQHLKEMRNDKDKIPSTSIEIEDIVCFRKSQPLYGSLKL

SEQ ID NO: 29894 - DNA, 1605 bp, Arabidopsis thaliana
  misc_feature (1)..(1605): Ceres Seq. ID no. 4934348
atgtactcgaagaaaaactcgttcggccgatcagatttcccagagggtttccttttcggtacagcttcatcggcttaccaatatgaaggagccagaaacgaagctcctcgaggagagagtgtttgggacacatttgttcgcaaatatccagagagaaattgctactctaatgcggaccaagcaatcgagttctataaccattacaaggacgatatccagagaatgaaggatattaacatggatgctttcagattctctatctcttggcctaggatttttcctcttggaaagaaaagcaaaggagtgaacaaagaaggaatacaattctataacgatctcatcgatgaactcctcgctaacggaataacacctctcgccactttatttcactgggatactcctcaagcacttgaagatgaatacagtggatttttaagcgaagaagctgttgatgacttcaaggattttgcggccttatgttttgaggagtttggcgaccgtgtaaaattgtgggtcacactaaacgaaccatgggtgtacagtattggtggctatgacacgggaagaaaagcccccggacgtgcctccaaatacatgaacgaagcagccgtggcaggagaatctggtctcgaggtttacactgttagtcacaatctacttctggctcacgccgaagctgttgaggtcttcaggaacaatcccaaatgtaaagatggcaagatcggtatcgctcattgtcccgtatggttcgagccttatgactcgaactgccctaaagacatagaagcatgcgaacgagctatggagtttatgtttggatggcacatggatcctacggtgtatggagattaccctgcagtcatgaaaaaatcgatcggaaaaagattaccatcatttaccgcagcacaatccaagaagcttagaggatcttttgatttcgttggggtgaattattacagtgctttctacgtcaaaaatattgatgaagtgaatcatgacaagcccaattggagatcagacgcacgcatcgaatggagaaaagaaaacaacgcagggcaaacattaggtgtaagaggtggttcggaatgggactttctatatccacaaggccttagaaagtttctaaattatgccaagaataaatatgaaagcccgaaatttatgattaccgaaaacggacactgtgatatagattatgagaaaaagcctaaactttctaacttgatggatctccaaaggacagagtaccacaagaaacatctccaaagcatccaacaagccatccaggaggatggggttgtagttgaaggatactttgcgtggtcattactagacaattgtgaatggaacgccggttatggagttcgatatggactattctacgtcgattataacaatggactaaaacgtttcccgaaaatgtcggcgatgtggttcaaagaattcttgaagagagaagaagaaattgaagattcagaagaagaagagtacgtgttgaagtcaacaatgaacaagaagagattcttattagcaactggttcatcagcttcatgctttattcctaagatgtctgaatcttctaaagccctcgaactattattctag

SEQ ID NO: 29895 - protein, 534 aa, Arabidopsis thaliana; identical to SEQ ID NO: 28567
  misc_feature (1)..(534): Ceres Seq. ID no. 4934349

SEQ ID NO: 29896 - protein, 460 aa, Arabidopsis thaliana; identical to SEQ ID NO: 28568
  misc_feature (1)..(460): Ceres Seq. ID no. 4934350

SEQ ID NO: 29897 - protein, 455 aa, Arabidopsis thaliana
  misc_feature (1)..(455): Ceres Seq. ID no. 4934351
MDAFRFSISWPRIFPLGKKSKGVNKEGIQFYNDLIDELLANGITPLATLFHWDTPQALEDEYSGFLSEEAVDDFKDFAALCFEEFGDRVKLWVTLNEPWVYSIGGYDTGRKAPGRASKYMNEAAVAGESGLEVYTVSHNLLLAHAEAVEVFRNNPKCKDGKIGIAHCPVWFEPYDSNCPKDIEACERAMEFMFGWHMDPTVYGDYPAVMKKSIGKRLPSFTAAQSKKLRGSFDFVGVNYYSAFYVKNIDEVNHDKPNWRSDARIEWRKENNAGQTLGVRGGSEWDFLYPQGLRKFLNYAKNKYESPKFMITENGHCDIDYEKKPKLSNLMDLQRTEYHKKHLQSIQQAIQEDGVVVEGYFAWSLLDNCEWNAGYGVRYGLFYVDYNNGLKRFPKMSAMWFKEFLKREEEIEDSEEEEYVLKSTMNKKRFLLATGSSASCFIPKMSESSKALELLF

SEQ ID NO: 29898 - DNA, 1884 bp, Arabidopsis thaliana
  misc_feature (1)..(1884): Ceres Seq. ID no. 4934675
atggagagtttgattgcgcttgtgaacaagattcagagagcctgtacggctctgggagatcacggcgagggaagctccctcccaactctctgggactcattgcctgcaattgccgtcgtcggtggtcagagttctggaaagtcttcagtgctagagagtgttgttggaaaagattttctacctcgtggagctgggattgttacacgcagacctcttgtcctgcagcttcatagaattgatgaagggaaagagtatgcagagtttatgcatcttccaaagaagaagttcacagattttggtattgtttgggaggagtttatgctccttagttttcctgtgactgcttgcactgctgtgaggcaggagatctcggatgagacagatcgtgaaactggtcgcagcagcaaagtaatatccacagtcccaattcatctcagtatcttctctcctaatgttgtgaatttgacacttgtcgatcttcctgggctaacaaaggtagctgttgatggccagcctgaaagcattgttcaagacatcgagaacatggtcagatcgtttattgagaagcccaactgcatcatacttgctatttcccctgcaaatcaggatcttgcaacatctgatgccattaagatctctcgtgaagttgatcccaaaggagacaggacttttggagttttaacaaaaattgatctcatggaccaaggcactaatgctgttgatatacttgaaggaaggggatacaaattaaggtatccttgggttggtgttgtaaaccggtctcaagctgacattaataaaagtgttgatatgattgctgctcgtcggcgtgaacgtgattacttccagactagcccagagtacagacatttaactgaaagaatgggttcagagtatttaggaaagatgctctctaagcatttggaagttgttatcaagtctagaatcccgggacttcagtctcttatcacaaagacaatttccgagttagagacagagctaagccgtcttgggaagcctgtagcagctgatgctggtggaaaactttatatgatcatggaaatttgccgtgcctttgatcaaacttttaaagaacacctggatggcacgcgttcaggtggtgaaaagataaattctgtgttcgacaatcaattcccagctgccattaaaagactgcaattcgacaaacatctctccatggacaatgtacggaaactgatcactgaagcagatggatatcaacctcatctcatagctcctgaacaaggttatcgccggctcatagaatcatgcttagtctccattagaggccctgctgaagcagctgttgatgcggttcattccattctcaaggatcttatccacaaatccatgggcgaaacatctgaactgaagcaatatccaacactcagagtagaagtatcaggtgcagccgtggattcattggatcgaatgagagacgaaagcaggaaagcaactctgttactagtggacatggagtctggttacttaacggtcgagttcttcaggaaactcccgcaagattctgaaaaaggtgggaatccgacacattcgatattcgacagatacaacgatgcttatctccgaagaatcggctcaaatgtgttgtcatatgtgaacatggtctgcgctggcttgagaaactccataccgaaatccattgtttactgtcaagtccgtgaagcaaaacgaagccttctagacatcttcttcaccgaacttggccagaaagagatgagcaaattgtcgaaattgttggatgaggatcctgcggttcagcagcgaaggacttcgattgcgaagaggctggaattgtatagaagtgctcaaacggatattgaagcagttgcttggtccaagtag

SEQ ID NO: 29899 - protein, 627 aa, Arabidopsis thaliana
  misc_feature (1)..(627): Ceres Seq. ID no. 4934676
MESLIALVNKIQRACTALGDHGEGSSLPTLWDSLPAIAVVGGQSSGKSSVLESVVGKDFLPRGAGIVTRRPLVLQLHRIDEGKEYAEFMHLPKKKFTDFGIVWEEFMLLSFPVTACTAVRQEISDETDRETGRSSKVISTVPIHLSIFSPNVVNLTLVDLPGLTKVAVDGQPESIVQDIENMVRSFIEKPNCIILAISPANQDLATSDAIKISREVDPKGDRTFGVLTKIDLMDQGTNAVDILEGRGYKLRYPWVGVVNRSQADINKSVDMIAARRRERDYFQTSPEYRHLTERMGSEYLGKMLSKHLEVVIKSRIPGLQSLITKTISELETELSRLGKPVAADAGGKLYMIMEICRAFDQTFKEHLDGTRSGGEKINSVFDNQFPAAIKRLQFDKHLSMDNVRKLITEADGYQPHLIAPEQGYRRLIESCLVSIRGPAEAAVDAVHSILKDLIHKSMGETSELKQYPTLRVEVSGAAVDSLDRMRDESRKATLLLVDMESGYLTVEFFRKLPQDSEKGGNPTHSIFDRYNDAYLRRIGSNVLSYVNMVCAGLRNSIPKSIVYCQVREAKRSLLDIFFTELGQKEMSKLSKLLDEDPAVQQRRTSIAKRLELYRSAQTDIEAVAWSK

SEQ ID NO: 29900 - protein, 539 aa, Arabidopsis thaliana
  misc_feature (1)..(539): Ceres Seq. ID no. 4934677
MHLPKKKFTDFGIVWEEFMLLSFPVTACTAVRQEISDETDRETGRSSKVISTVPIHLSIFSPNVVNLTLVDLPGLTKVAVDGQPESIVQDIENMVRSFIEKPNCIILAISPANQDLATSDAIKISREVDPKGDRTFGVLTKIDLMDQGTNAVDILEGRGYKLRYPWVGVVNRSQADINKSVDMIAARRRERDYFQTSPEYRHLTERMGSEYLGKMLSKHLEVVIKSRIPGLQSLITKTISELETELSRLGKPVAADAGGKLYMIMEICRAFDQTFKEHLDGTRSGGEKINSVFDNQFPAAIKRLQFDKHLSMDNVRKLITEADGYQPHLIAPEQGYRRLIESCLVSIRGPAEAAVDAVHSILKDLIHKSMGETSELKQYPTLRVEVSGAAVDSLDRMRDESRKATLLLVDMESGYLTVEFFRKLPQDSEKGGNPTHSIFDRYNDAYLRRIGSNVLSYVNMVCAGLRNSIPKSIVYCQVREAKRSLLDIFFTELGQKEMSKLSKLLDEDPAVQQRRTSIAKRLELYRSAQTDIEAVAWSK

SEQ ID NO: 29901 - protein, 521 aa, Arabidopsis thaliana
  misc_feature (1)..(521): Ceres Seq. ID no. 4934678
MLLSFPVTACTAVRQEISDETDRETGRSSKVISTVPIHLSIFSPNVVNLTLVDLPGLTKVAVDGQPESIVQDIENMVRSFIEKPNCIILAISPANQDLATSDAIKISREVDPKGDRTFGVLTKIDLMDQGTNAVDILEGRGYKLRYPWVGVVNRSQADINKSVDMIAARRRERDYFQTSPEYRHLTERMGSEYLGKMLSKHLEVVIKSRIPGLQSLITKTISELETELSRLGKPVAADAGGKLYMIMEICRAFDQTFKEHLDGTRSGGEKINSVFDNQFPAAIKRLQFDKHLSMDNVRKLITEADGYQPHLIAPEQGYRRLIESCLVSIRGPAEAAVDAVHSILKDLIHKSMGETSELKQYPTLRVEVSGAAVDSLDRMRDESRKATLLLVDMESGYLTVEFFRKLPQDSEKGGNPTHSIFDRYNDAYLRRIGSNVLSYVNMVCAGLRNSIPKSIVYCQVREAKRSLLDIFFTELGQKEMSKLSKLLDEDPAVQQRRTSIAKRLELYRSAQTDIEAVAWSK

SEQ ID NO: 29902 - DNA, 1458 bp, Arabidopsis thaliana
  misc_feature (1)..(1458): Ceres Seq. ID no. 4935487
atggagaatttgccaaatcacgaagaaaacgacgatgtgggctatcatcagtcacctggtcccatcgatccaaatgatcattcagcatctgaaactccggtttactcaacaatgagcacagattcttttgcttatcatcgaacatgttctgaaacctctggaggaggcttttcagaccaaatagatgaaaccagcagtttctgcactgaggcttctcctagtgattggcctgtcttaaccgaatccaacaactctgcgagctcaaattttccaactgtcttcgacttgaaacataatcagattgagactgatgagcaccttgcggtccaagaaatttcagagccagagctggagacgatgaaggaaagattctcgaagcttctgcttggggaagatatgtcaggaagcggcaaaggcgtttgcaccgcagtgacaatctcaaacgctataaccaatctttatgctactgtttttggacagaatctaagattagaaccattggagatagagcagaagacgacgtggaagagagaaatgaattgccttctctctgtgtgtgactatattttcgagtttatcccaaagtcacagaatctaagcaatggagccactgttgaggtcatggagagtagaccaagagcagatatctacatcaatctgcctgcactcagaaaactagattccatgcttatggaggcattggatagttttcaaaagacagagttttggtatgcagaagaaggaagcttgtcgatgaagtcaacgcgttccgcaactggatcattcaggaaagtgattgtgcagaggaaagaagagaaatggtggttaccgattcctctggttccattacaaggtttatcagagaaggcaaggaaacaacttaagagcaagcgagagagcactaatcaaatccataaagctgctatggccatcaatagcagcatactcggtgaaatggatattcctgattcttacatggcaactcttccaaagagcggaaaagcgagcacaggagatgcaatctatcgacacatgacgagttcagggcggttttcaccagaaaaacttctagatcgtctcaagattgtatcagaacatgaagcgcttcagctggcagatagagtagaagcttcaatgtacacatggagacgcaaagcttgtcttaacaattccaagtcttcatggaatatggtgaaagatttaatgtcaattacagagagaagtgacaagaactatgttttggctgagagagcagagtctttgctcttctgtttgaaacaacggtacccagaattgtctcagacatcgttagatatttgcaagattcattgcaacaaggatgttggaaaagctgtgttagagagttattcaagagttcttgaaggtttagcttttaacatagttgcttggattgatgatgttctttatgtagacaaaacaatgagaggagaagaatga

SEQ ID NO: 29903 - protein, 485 aa, Arabidopsis thaliana
  misc_feature (1)..(485): Ceres Seq. ID no. 4935488
MENLPNHEENDDVGYHQSPGPIDPNDHSASETPVYSTMSTDSFAYHRTCSETSGGGFSDQIDETSSFCTEASPSDWPVLTESNNSASSNFPTVFDLKHNQIETDEHLAVQEISEPELETMKERFSKLLLGEDMSGSGKGVCTAVTISNAITNLYATVFGQNLRLEPLEIEQKTTWKREMNCLLSVCDYIFEFIPKSQNLSNGATVEVMESRPRADIYINLPALRKLDSMLMEALDSFQKTEFWYAEEGSLSMKSTRSATGSFRKVIVQRKEEKWWLPIPLVPLQGLSEKARKQLKSKRESTNQIHKAAMAINSSILGEMDIPDSYMATLPKSGKASTGDAIYRHMTSSGRFSPEKLLDRLKIVSEHEALQLADRVEASMYTWRRKACLNNSKSSWNMVKDLMSITERSDKNYVLAERAESLLFCLKQRYPELSQTSLDICKIHCNKDVGKAVLESYSRVLEGLAFNIVAWIDDVLYVDKTMRGEE

SEQ ID NO: 29904 - protein, 448 aa, Arabidopsis thaliana
  misc_feature (1)..(448): Ceres Seq. ID no. 4935489
MSTDSFAYHRTCSETSGGGFSDQIDETSSFCTEASPSDWPVLTESNNSASSNFPTVFDLKHNQIETDEHLAVQEISEPELETMKERFSKLLLGEDMSGSGKGVCTAVTISNAITNLYATVFGQNLRLEPLEIEQKTTWKREMNCLLSVCDYIFEFIPKSQNLSNGATVEVMESRPRADIYINLPALRKLDSMLMEALDSFQKTEFWYAEEGSLSMKSTRSATGSFRKVIVQRKEEKWWLPIPLVPLQGLSEKARKQLKSKRESTNQIHKAAMAINSSILGEMDIPDSYMATLPKSGKASTGDAIYRHMTSSGRFSPEKLLDRLKIVSEHEALQLADRVEASMYTWRRKACLNNSKSSWNMVKDLMSITERSDKNYVLAERAESLLFCLKQRYPELSQTSLDICKIHCNKDVGKAVLESYSRVLEGLAFNIVAWIDDVLYVDKTMRGEE

SEQ ID NO: 29905 - protein, 366 aa, Arabidopsis thaliana
  misc_feature (1)..(366): Ceres Seq. ID no. 4935490
MKERFSKLLLGEDMSGSGKGVCTAVTISNAITNLYATVFGQNLRLEPLEIEQKTTWKREMNCLLSVCDYIFEFIPKSQNLSNGATVEVMESRPRADIYINLPALRKLDSMLMEALDSFQKTEFWYAEEGSLSMKSTRSATGSFRKVIVQRKEEKWWLPIPLVPLQGLSEKARKQLKSKRESTNQIHKAAMAINSSILGEMDIPDSYMATLPKSGKASTGDAIYRHMTSSGRFSPEKLLDRLKIVSEHEALQLADRVEASMYTWRRKACLNNSKSSWNMVKDLMSITERSDKNYVLAERAESLLFCLKQRYPELSQTSLDICKIHCNKDVGKAVLESYSRVLEGLAFNIVAWIDDVLYVDKTMRGEE

SEQ ID NO: 29906 - DNA, 1461 bp, Arabidopsis thaliana
  misc_feature (1)..(1461): Ceres Seq. ID no. 4935571
atggagaatttgccaaatcacgaagaaaacgacgatgtgggctatcatcagtcacctggtcccatcgatccaaatgatcattcagcatctgaaactccggtttactcaacaatgagcacagattcttttgcttatcatcgaacatgttctgaaacctctggaggaggcttttcagaccaaatagatgaaaccagcagtttctgcactgaggcttctcctagtgattggcctgtcttaaccgaatccaacaactctgcgagctcaaattttccaactgtcttcgacttgaaacataatcagattgagactgatgagcaccttgcggtccaagaaatttcagagccagcagagctggagacgatgaaggaaagattctcgaagcttctgcttggggaagatatgtcaggaagcggcaaaggcgtttgcaccgcagtgacaatctcaaacgctataaccaatctttatgctactgtttttggacagaatctaagattagaaccattggagatagagcagaagacgacgtggaagagagaaatgaattgccttctctctgtgtgtgactatattttcgagtttatcccaaagtcacagaatctaagcaatggagccactgttgaggtcatggagagtagaccaagagcagatatctacatcaatctgcctgcactcagaaaactagattccatgcttatggaggcattggatagttttcaaaagacagagttttggtatgcagaagaaggaagcttgtcgatgaagtcaacgcgttccgcaactggatcattcaggaaagtgattgtgcagaggaaagaagagaaatggtggttaccgattcctctggttccattacaaggtttatcagagaaggcaaggaaacaacttaagagcaagcgagagagcactaatcaaatccataaagctgctatggccatcaatagcagcatactcggtgaaatggatattcctgattcttacatggcaactcttccaaagagcggaaaagcgagcacaggagatgcaatctatcgacacatgacgagttcagggcggttttcaccagaaaaacttctagatcgtctcaagattgtatcagaacatgaagcgcttcagctggcagatagagtagaagcttcaatgtacacatggagacgcaaagcttgtcttaacaattccaagtcttcatggaatatggtgaaagatttaatgtcaattacagagagaagtgacaagaactatgttttggctgagagagcagagtctttgctcttctgtttgaaacaacggtacccagaattgtctcagacatcgttagatatttgcaagattcattgcaacaaggatgttggaaaagctgtgttagagagttattcaagagttcttgaaggtttagcttttaacatagttgcttggattgatgatgttctttatgtagacaaaacaatgagaggagaagaatga

SEQ ID NO: 29907 - protein, 486 aa, Arabidopsis thaliana
  misc_feature (1)..(486): Ceres Seq. ID no. 4935572
MENLPNHEENDDVGYHQSPGPIDPNDHSASETPVYSTMSTDSFAYHRTCSETSGGGFSDQIDETSSFCTEASPSDWPVLTESNNSASSNFPTVFDLKHNQIETDEHLAVQEISEPAELETMKERFSKLLLGEDMSGSGKGVCTAVTISNAITNLYATVFGQNLRLEPLEIEQKTTWKREMNCLLSVCDYIFEFIPKSQNLSNGATVEVMESRPRADIYINLPALRKLDSMLMEALDSFQKTEFWYAEEGSLSMKSTRSATGSFRKVIVQRKEEKWWLPIPLVPLQGLSEKARKQLKSKRESTNQIHKAAMAINSSILGEMDIPDSYMATLPKSGKASTGDAIYRHMTSSGRFSPEKLLDRLKIVSEHEALQLADRVEASMYTWRRKACLNNSKSSWNMVKDLMSITERSDKNYVLAERAESLLFCLKQRYPELSQTSLDICKIHCNKDVGKAVLESYSRVLEGLAFNIVAWIDDVLYVDKTMRGEE

SEQ ID NO: 29908 - protein, 449 aa, Arabidopsis thaliana
  misc_feature (1)..(449): Ceres Seq. ID no. 4935573
MSTDSFAYHRTCSETSGGGFSDQIDETSSFCTEASPSDWPVLTESNNSASSNFPTVFDLKHNQIETDEHLAVQEISEPAELETMKERFSKLLLGEDMSGSGKGVCTAVTISNAITNLYATVFGQNLRLEPLEIEQKTTWKREMNCLLSVCDYIFEFIPKSQNLSNGATVEVMESRPRADIYINLPALRKLDSMLMEALDSFQKTEFWYAEEGSLSMKSTRSATGSFRKVIVQRKEEKWWLPIPLVPLQGLSEKARKQLKSKRESTNQIHKAAMAINSSILGEMDIPDSYMATLPKSGKASTGDAIYRHMTSSGRFSPEKLLDRLKIVSEHEALQLADRVEASMYTWRRKACLNNSKSSWNMVKDLMSITERSDKNYVLAERAESLLFCLKQRYPELSQTSLDICKIHCNKDVGKAVLESYSRVLEGLAFNIVAWIDDVLYVDKTMRGEE

SEQ ID NO: 29909 - protein, 366 aa, Arabidopsis thaliana; identical to SEQ ID NO: 29905
  misc_feature (1)..(366): Ceres Seq. ID no. 4935574

SEQ ID NO: 29910 - DNA, 1140 bp, Arabidopsis thaliana
  misc_feature (1)..(1140): Ceres Seq. ID no. 4935674
atgtacccgccacctccctcaagcatctacgctcctccgatgctggtgaattgctccggttgccggacgcctctccagctcccatccggcgcccgatctattcgctgcgctctctgccaggctgttactcatatcgccgaccctcgcaccgcccctcctccgcaaccttcctccgccccttctccgcctccccaaatccacgcgcctcccggtcagctgcctcacccccatggcaggaagagggccgtgatctgtggcatctcgtatcgtttctctcgccacgagctcaaaggctgcatcaacgacgccaagtgcatgcgtcaccttctcatcaacaaattcaaattctccccagattcaattctcatgcttaccgaggaagaaactgatccatatcgtatcccgaccaagcaaaacatgaggatggcattgtattggctcgtacagggatgcacagcaggcgactcacttgtcttccactactctggtcatggttcgcgtcaaagaaactacaacggtgatgaagttgatggctatgatgaaacactctgtcctctggattttgaaactcaggggatgattgtagacgatgagatcaacgcaaccattgtacgccctcttccacatggtgtcaagctccattcaattatcgatgcttgccatagtggtaccgttctggatttacccttcctatgcagaatgaacagagctgggcagtatgtgtgggaggatcatcggcctaggtcaggtttgtggaaaggaactgctggtggagaagccatttcaattagtggatgtgatgatgatcagacttcggccgacacatcattggttcctcctctcatgattaaaacacatacacaggcgctgtcgaagatcacgtctacgggtgctatgactttctgttttattcaagcaattgaacgcagcgcacaaggcacaacctatggaagccttctgaattctatgcgcaccacaataaggaatacagggaatgatggtggtggtagtggtggagttgtgacgactgtgctgagcatgcttctgacagggggaagtgcgattgggggattaagacaggagcctcaactgactgcttgccaaacattcgatgtctatgcaaagcctttcactctctag

SEQ ID NO: 29911 - protein, 379 aa, Arabidopsis thaliana
  misc_feature (1)..(379): Ceres Seq. ID no. 4935675
MYPPPPSSIYAPPMLVNCSGCRTPLQLPSGARSIRCALCQAVTHIADPRTAPPPQPSSAPSPPPQIHAPPGQLPHPHGRKRAVICGISYRFSRHELKGCINDAKCMRHLLINKFKFSPDSILMLTEEETDPYRIPTKQNMRMALYWLVQGCTAGDSLVFHYSGHGSRQRNYNGDEVDGYDETLCPLDFETQGMIVDDEINATIVRPLPHGVKLHSIIDACHSGTVLDLPFLCRMNRAGQYVWEDHRPRSGLWKGTAGGEAISISGCDDDQTSADTSLVPPLMIKTHTQALSKITSTGAMTFCFIQAIERSAQGTTYGSLLNSMRTTIRNTGNDGGGSGGVVTTVLSMLLTGGSAIGGLRQEPQLTACQTFDVYAKPFTL

SEQ ID NO: 29912 - protein, 366 aa, Arabidopsis thaliana
  misc_feature (1)..(366): Ceres Seq. ID no. 4935676
MLVNCSGCRTPLQLPSGARSIRCALCQAVTHIADPRTAPPPQPSSAPSPPPQIHAPPGQLPHPHGRKRAVICGISYRFSRHELKGCINDAKCMRHLLINKFKFSPDSILMLTEEETDPYRIPTKQNMRMALYWLVQGCTAGDSLVFHYSGHGSRQRNYNGDEVDGYDETLCPLDFETQGMIVDDEINATIVRPLPHGVKLHSIIDACHSGTVLDLPFLCRMNRAGQYVWEDHRPRSGLWKGTAGGEAISISGCDDDQTSADTSLVPPLMIKTHTQALSKITSTGAMTFCFIQAIERSAQGTTYGSLLNSMRTTIRNTGNDGGGSGGVVTTVLSMLLTGGSAIGGLRQEPQLTACQTFDVYAKPFTL

SEQ ID NO: 29913 - protein, 274 aa, Arabidopsis thaliana
  misc_feature (1)..(274): Ceres Seq. ID no. 4935677
MRHLLINKFKFSPDSILMLTEEETDPYRIPTKQNMRMALYWLVQGCTAGDSLVFHYSGHGSRQRNYNGDEVDGYDETLCPLDFETQGMIVDDEINATIVRPLPHGVKLHSIIDACHSGTVLDLPFLCRMNRAGQYVWEDHRPRSGLWKGTAGGEAISISGCDDDQTSADTSLVPPLMIKTHTQALSKITSTGAMTFCFIQAIERSAQGTTYGSLLNSMRTTIRNTGNDGGGSGGVVTTVLSMLLTGGSAIGGLRQEPQLTACQTFDVYAKPFTL

SEQ ID NO: 29914 - DNA, 1104 bp, Arabidopsis thaliana
  misc_feature (1)..(1104): Ceres Seq. ID no. 4935733
atgtacccgccacctccctcaagcatctacgctcctccgatgctggtgaattgctccggttgccggacgcctctccagctcccatccggcgcccgatctattcgctgcgctctctgccaggctgttactcatatcgccgaccctcgcaccgcccctcctccgcaaccttcctccgccccttctccgcctccccaaatccacgcgcctcccggtcagctgcctcacccccatggcaggaagagggccgtgatctgtggcatctcgtatcgtttctctcgccacgagctcaaaggctgcatcaacgacgccaagtgcatgcgtcaccttctcatcaacaaattcaaattctccccagattcaattctcatgcttaccgaggaagaaactgatccatatcgtatcccgaccaagcaaaacatgaggatggcattgtattggctcgtacagggatgcacagcaggcgactcacttgtcttccactactctggtcatggttcgcgtcaaagaaactacaacggtgatgaagttgatggctatgatgaaacactctgtcctctggattttgaaactcaggggatgattgtagacgatgagatcaacgcaaccattgtacgccctcttccacatggtgtcaagctccattcaattatcgatgcttgccatagtggtaccgttctggatttacccttcctatgcagaatgaacagagctgggcagtatgtgtgggaggatcatcggcctaggtcaggtttgtggaaaggaactgctggtggagaagccatttcaattagtggatgtgatgatgatcagacttcggccgacacatcagcgctgtcgaagatcacgtctacgggtgctatgactttctgttttattcaagcaattgaacgcagcgcacaaggcacaacctatggaagccttctgaattctatgcgcaccacaataaggaatacagggaatgatggtggtggtagtggtggagttgtgacgactgtgctgagcatgcttctgacagggggaagtgcgattgggggattaagacaggagcctcaactgactgcttgccaaacattcgatgtctatgcaaagcctttcactctctag

SEQ ID NO: 29915 - protein, 367 aa, Arabidopsis thaliana
  misc_feature (1)..(367): Ceres Seq. ID no. 4935734
MYPPPPSSIYAPPMLVNCSGCRTPLQLPSGARSIRCALCQAVTHIADPRTAPPPQPSSAPSPPPQIHAPPGQLPHPHGRKRAVICGISYRFSRHELKGCINDAKCMRHLLINKFKFSPDSILMLTEEETDPYRIPTKQNMRMALYWLVQGCTAGDSLVFHYSGHGSRQRNYNGDEVDGYDETLCPLDFETQGMIVDDEINATIVRPLPHGVKLHSIIDACHSGTVLDLPFLCRMNRAGQYVWEDHRPRSGLWKGTAGGEAISISGCDDDQTSADTSALSKITSTGAMTFCFIQAIERSAQGTTYGSLLNSMRTTIRNTGNDGGGSGGVVTTVLSMLLTGGSAIGGLRQEPQLTACQTFDVYAKPFTL

SEQ ID NO: 29916 - protein, 354 aa, Arabidopsis thaliana
  misc_feature (1)..(354): Ceres Seq. ID no. 4935735
MLVNCSGCRTPLQLPSGARSIRCALCQAVTHIADPRTAPPPQPSSAPSPPPQIHAPPGQLPHPHGRKRAVICGISYRFSRHELKGCINDAKCMRHLLINKFKFSPDSILMLTEEETDPYRIPTKQNMRMALYWLVQGCTAGDSLVFHYSGHGSRQRNYNGDEVDGYDETLCPLDFETQGMIVDDEINATIVRPLPHGVKLHSIIDACHSGTVLDLPFLCRMNRAGQYVWEDHRPRSGLWKGTAGGEAISISGCDDDQTSADTSALSKITSTGAMTFCFIQAIERSAQGTTYGSLLNSMRTTIRNTGNDGGGSGGVVTTVLSMLLTGGSAIGGLRQEPQLTACQTFDVYAKPFTL

SEQ ID NO: 29917 - protein, 262 aa, Arabidopsis thaliana
  misc_feature (1)..(262): Ceres Seq. ID no. 4935736
MRHLLINKFKFSPDSILMLTEEETDPYRIPTKQNMRMALYWLVQGCTAGDSLVFHYSGHGSRQRNYNGDEVDGYDETLCPLDFETQGMIVDDEINATIVRPLPHGVKLHSIIDACHSGTVLDLPFLCRMNRAGQYVWEDHRPRSGLWKGTAGGEAISISGCDDDQTSADTSALSKITSTGAMTFCFIQAIERSAQGTTYGSLLNSMRTTIRNTGNDGGGSGGVVTTVLSMLLTGGSAIGGLRQEPQLTACQTFDVYAKPFTL

SEQ ID NO: 29918 - DNA, 1278 bp, Arabidopsis thaliana
  misc_feature (1)..(1278): Ceres Seq. ID no. 4936090
atgaatggccccatcgtgtctattgcgcgtgaacttgggtttgaaggcaattctattcttgagggtcttgttgtgagcatatttattgccggtgcatttattggtagcatagtcgccggtccactagttgacaagtttggctaccgacgcacctttcagattttcacgatacccctcattcttggtgcccttgtgagtgcacaagctcactccttggatgagatcttatgtggaagatttcttgttggtcttggtattggcgtcaacacagttcttgttccaatatatatatccgaggttgctccgacgaaatacagaggttcccttggaactttatgtcaaattggcacttgtctcgggataatcttttctcttctcttagggattcctgcagaagatgaccctcattggtggaggacaatgctctatgtagcgagtatgcctggttttcttcttgcacttggtatgcaatttgcagtagaaagtccccgttggctctgtaaggttggacgacttgatgatgccaaagtagtgataagaaacatctggggaggatctgaagtcgagaaagctgtagaagattttcagtcggttatgaagaatagtggctccaacttaaatagcagatggctggaactccttgataaaccacattcacgagttgcattcattgggggctccctttttgtcctacagcaattcgcgggcataaatggcgttctttatttctcatctttaacattccaaaatgttggaatcacgagtggtgctcaagcaagtctatatgttggagtcacaaattttgcaggtgctctgtgtgcgtcttatttgattgataagcaaggaagaaagaagcttcttatcggtagctacttgggaatggcagtctctatgtttcttattgtttatgctgttggtttccccttggatgaagatctgagccagagtttgtcaatacttggaacactcatgtatatattcagttttgcaattggagctggtcctgtaacaggtctcatcatccctgagctaagcagcaacagaacgcgtggaaaaatcatgggtttcagcttctctgtacattgggtctccaacttcttggttggtttgttcttcctggatctggtggagaaatacggggttggaacggtctatgccagctttggctcagtatcattgttggcagcggcattctcacacctcttcacggtggaaacaaagggtcgatcactagaagagatcgaactgtctttgaactccagagacgacctgagttaa

SEQ ID NO: 29919 - protein, 425 aa, Arabidopsis thaliana
  misc_feature (1)..(425): Ceres Seq. ID no. 4936091
MNGPIVSIARELGFEGNSILEGLVVSIFIAGAFIGSIVAGPLVDKFGYRRTFQIFTIPLILGALVSAQAHSLDEILCGRFLVGLGIGVNTVLVPIYISEVAPTKYRGSLGTLCQIGTCLGIIFSLLLGIPAEDDPHWWRTMLYVASMPGFLLALGMQFAVESPRWLCKVGRLDDAKVVIRNIWGGSEVEKAVEDFQSVMKNSGSNLNSRWLELLDKPHSRVAFIGGSLFVLQQFAGINGVLYFSSLTFQNVGITSGAQASLYVGVTNFAGALCASYLIDKQGRKKLLIGSYLGMAVSMFLIVYAVGFPLDEDLSQSLSILGTLMYIFSFAIGAGPVTGLIIPELSSNRTRGKIMGFSFSVHWVSNFLVGLFFLDLVEKYGVGTVYASFGSVSLLAAAFSHLFTVETKGRSLEEIELSLNSRDDLS

SEQ ID NO: 29920 - protein, 285 aa, Arabidopsis thaliana
  misc_feature (1)..(285): Ceres Seq. ID no. 4936092
MLYVASMPGFLLALGMQFAVESPRWLCKVGRLDDAKVVIRNIWGGSEVEKAVEDFQSVMKNSGSNLNSRWLELLDKPHSRVAFIGGSLFVLQQFAGINGVLYFSSLTFQNVGITSGAQASLYVGVTNFAGALCASYLIDKQGRKKLLIGSYLGMAVSMFLIVYAVGFPLDEDLSQSLSILGTLMYIFSFAIGAGPVTGLIIPELSSNRTRGKIMGFSFSVHWVSNFLVGLFFLDLVEKYGVGTVYASFGSVSLLAAAFSHLFTVETKGRSLEEIELSLNSRDDLS

SEQ ID NO: 29921 - protein, 279 aa, Arabidopsis thaliana
  misc_feature (1)..(279): Ceres Seq. ID no. 4936093
MPGFLLALGMQFAVESPRWLCKVGRLDDAKVVIRNIWGGSEVEKAVEDFQSVMKNSGSNLNSRWLELLDKPHSRVAFIGGSLFVLQQFAGINGVLYFSSLTFQNVGITSGAQASLYVGVTNFAGALCASYLIDKQGRKKLLIGSYLGMAVSMFLIVYAVGFPLDEDLSQSLSILGTLMYIFSFAIGAGPVTGLIIPELSSNRTRGKIMGFSFSVHWVSNFLVGLFFLDLVEKYGVGTVYASFGSVSLLAAAFSHLFTVETKGRSLEEIELSLNSRDDLS

SEQ ID NO: 29922 - DNA, 1267 bp, Arabidopsis thaliana
  misc_feature (1)..(1267): Ceres Seq. ID no. 4936105
attccaaaagttttttctgttgtgtgtaaaaagcccggatttagagagagatttagttttttttttttttccggcacttgggtccttcaaagtctccgccttctgccgtgttgaagttcgatggcgataggagaccgcaagaagattatcatcgatactgatcctggaatcgatgatgcaatggcgatattcgtagctttaaattcacctgaagttgatgtcattggcctcactactatctttggaaacgtgtataccactctcgccactcgaaacgccttgcatttgttggaggttgcgggtaggaccgatattccggtggctgaaggaacacataaaaccttcttgaacgatacgaagcttcgaatagctgactttgttcatggaaaagatgggcttggcaaccaaaacttccctccacctaaaggaaaaccaattgaaaagtctggacctgagtttttagttgaacaagcaaagctttgccctggtgaaatcacggttgttgctttgggaccactaacaaatctcgcgttggctgttcagcttgatccagagttttcgaaaaatgtcggacaaattgttcttcttggtggagcatttgcagtaaacggaaatgtaaatccagcttcggaagctaatatttttggcgatcccgaagctgcagatattgtgttcacatgtggggccgatataattgctgtgggaatcaatgtgacccatcaagttattatgacagctgatgacaaggacaaactagcatcatcgaaggggaaattagctcaatatctctgtaaaatccttgatgtgtactatgattatcatctcacggcttacgaaatcaaaggtgtgtaccttcatgatcctgcgacgatccttgcggctttccttccttctctattcacttatacagaaggagttgctagagtgcagacaagtggtatcactaggggactcactttactgtacaacaatcttaagaggtttgaggaagcgaacgagtggtcagacaaaccaacggtaaaagtggcagtgacggttgatgctcctgcagtcgtgaagctcataatggataggcttatggagtcttaaaccatcttgggtcgttaattagttatctctttctctttgatgtttcactattgcgagccatttctcttgttaaaaataaggctcctcttgctgcattatttatttattgtttaatctttattaaaacgaatattattatgttaccaattaccaataataaagttaagatttttcctcc

SEQ ID NO: 29923 - protein, 322 aa, Arabidopsis thaliana
  misc_feature (1)..(322): Ceres Seq. ID no. 4936106
MAIGDRKKIIIDTDPGIDDAMAIFVALNSPEVDVIGLTTIFGNVYTTLATRNALHLLEVAGRTDIPVAEGTHKTFLNDTKLRIADFVHGKDGLGNQNFPPPKGKPIEKSGPEFLVEQAKLCPGEITVVALGPLTNLALAVQLDPEFSKNVGQIVLLGGAFAVNGNVNPASEANIFGDPEAADIVFTCGADIIAVGINVTHQVIMTADDKDKLASSKGKLAQYLCKILDVYYDYHLTAYEIKGVYLHDPATILAAFLPSLFTYTEGVARVQTSGITRGLTLLYNNLKRFEEANEWSDKPTVKVAVTVDAPAVVKLIMDRLMES

SEQ ID NO: 29924 - protein, 302 aa, Arabidopsis thaliana
  misc_feature (1)..(302): Ceres Seq. ID no. 4936107
MAIFVALNSPEVDVIGLTTIFGNVYTTLATRNALHLLEVAGRTDIPVAEGTHKTFLNDTKLRIADFVHGKDGLGNQNFPPPKGKPIEKSGPEFLVEQAKLCPGEITVVALGPLTNLALAVQLDPEFSKNVGQIVLLGGAFAVNGNVNPASEANIFGDPEAADIVFTCGADIIAVGINVTHQVIMTADDKDKLASSKGKLAQYLCKILDVYYDYHLTAYEIKGVYLHDPATILAAFLPSLFTYTEGVARVQTSGITRGLTLLYNNLKRFEEANEWSDKPTVKVAVTVDAPAVVKLIMDRLMES

SEQ ID NO: 29925 - DNA, 1320 bp, Arabidopsis thaliana
  misc_feature (1)..(1320): Ceres Seq. ID no. 4936172
atgacactcgccggcgtagagcctaaccacatcactttcatagctctactctccgggtgtggtgattttacctccggaagtgaagccttgggcgatttgcttcatgggtatgcttgtaaacttggtcttgatagaaaccatgtcatggttggcaccgcaattatcggcatgtactccaaacgcggccgttttaagaaggctagattggtttttgattacatggaagataaaaattcggttacttggaatacaatgatcgatgggtacatgagaagtggtcaagtcgataacgctgctaagatgttcgacaaaatgcctgaacgagacttgatttcttggacggctatgataaatggctttgttaagaaaggttatcaagaggaagctttgttatggttccgtgaaatgcagatttctggagtaaaaccagattacgttgctattattgctgctcttaacgcttgcacaaaccttggtgctctctcatttggattatgggtacatcgttatgttttgagtcaggatttcaagaacaatgtgagggtgagtaattcactgatcgatttgtattgtcgatgcgggtgtgtggagtttgctcgacaagttttttacaacatggagaaacgaaccgtagtttcgtggaattcagtcattgttggttttgctgctaatggaaatgcacatgaatcattagtctacttcaggaaaatgcaagagaaaggctttaaacctgacgcagtcactttcactggggcgcttaccgcgtgtagccatgtaggtctagttgaagaaggtcttcgatattttcaaattatgaaatgtgattacagaatctcgcctcgaattgagcattatggatgcttagtggatttgtatagtcgggctgggagattggaagacgctttgaagttggtgcagagcatgccaatgaagccaaatgaagttgtgattggatcgttgcttgcagcttgcagcaatcatgggaacaatatcgtcttagcagagaggctgatgaagcatcttaccgacctgaatgtgaaaagccattcaaattatgtgattctctcgaatatgtatgctgctgatggaaaatgggaaggagcaagtaagatgagaaggaagatgaagggtctcggtctaaaaaagcagcctgggtttagttcgatagagattgatgattgcatgcatgtgttcatggccggtgacaatgcccatgttgagaccacttatatccgcgaggtcctggagcttatttcttctgatttgcgattacagggctgtgtagttgaaacccttgctggtgatctcctcaatgcttga

SEQ ID NO: 29926 - protein, 439 aa, Arabidopsis thaliana
  misc_feature (1)..(439): Ceres Seq. ID no. 4936173
MTLAGVEPNHITFIALLSGCGDFTSGSEALGDLLHGYACKLGLDRNHVMVGTAIIGMYSKRGRFKKARLVFDYMEDKNSVTWNTMIDGYMRSGQVDNAAKMFDKMPERDLISWTAMINGFVKKGYQEEALLWFREMQISGVKPDYVAIIAALNACTNLGALSFGLWVHRYVLSQDFKNNVRVSNSLIDLYCRCGCVEFARQVFYNMEKRTVVSWNSVIVGFAANGNAHESLVYFRKMQEKGFKPDAVTFTGALTACSHVGLVEEGLRYFQIMKCDYRISPRIEHYGCLVDLYSRAGRLEDALKLVQSMPMKPNEVVIGSLLAACSNHGNNIVLAERLMKHLTDLNVKSHSNYVILSNMYAADGKWEGASKMRRKMKGLGLKKQPGFSSIEIDDCMHVFMAGDNAHVETTYIREVLELISSDLRLQGCVVETLAGDLLNA

SEQ ID NO: 29927 - protein, 391 aa, Arabidopsis thaliana
  misc_feature (1)..(391): Ceres Seq. ID no. 4936174
MVGTAIIGMYSKRGRFKKARLVFDYMEDKNSVTWNTMIDGYMRSGQVDNAAKMFDKMPERDLISWTAMINGFVKKGYQEEALLWFREMQISGVKPDYVAIIAALNACTNLGALSFGLWVHRYVLSQDFKNNVRVSNSLIDLYCRCGCVEFARQVFYNMEKRTVVSWNSVIVGFAANGNAHESLVYFRKMQEKGFKPDAVTFTGALTACSHVGLVEEGLRYFQIMKCDYRISPRIEHYGCLVDLYSRAGRLEDALKLVQSMPMKPNEVVIGSLLAACSNHGNNIVLAERLMKHLTDLNVKSHSNYVILSNMYAADGKWEGASKMRRKMKGLGLKKQPGFSSIEIDDCMHVFMAGDNAHVETTYIREVLELISSDLRLQGCVVETLAGDLLNA

SEQ ID NO: 29928 - protein, 383 aa, Arabidopsis thaliana
  misc_feature (1)..(383): Ceres Seq. ID no. 4936175
MYSKRGRFKKARLVFDYMEDKNSVTWNTMIDGYMRSGQVDNAAKMFDKMPERDLISWTAMINGFVKKGYQEEALLWFREMQISGVKPDYVAIIAALNACTNLGALSFGLWVHRYVLSQDFKNNVRVSNSLIDLYCRCGCVEFARQVFYNMEKRTVVSWNSVIVGFAANGNAHESLVYFRKMQEKGFKPDAVTFTGALTACSHVGLVEEGLRYFQIMKCDYRISPRIEHYGCLVDLYSRAGRLEDALKLVQSMPMKPNEVVIGSLLAACSNHGNNIVLAERLMKHLTDLNVKSHSNYVILSNMYAADGKWEGASKMRRKMKGLGLKKQPGFSSIEIDDCMHVFMAGDNAHVETTYIREVLELISSDLRLQGCVVETLAGDLLNA

SEQ ID NO: 29929 - DNA, 1503 bp, Arabidopsis thaliana
  misc_feature (1)..(1503): Ceres Seq. ID no. 4936269
atgggtctccttcccgtcgtcggaattacttcgccggcgctcatcacccacaaaaatcacgccaatccaaagatacagagacataatcaatctacctccgagaccactgtttcatggacttctcgcatcaatctcctcacgcgcaatggtcgattagcggaggcagcgaaggaattctccgatatgacactcgccggcgtagagcctaaccacatcactttcatagctctactctccgggtgtggtgattttacctccggaagtgaagccttgggcgatttgcttcatgggtatgcttgtaaacttggtcttgatagaaaccatgtcatggttggcaccgcaattatcggcatgtactccaaacgcggccgttttaagaaggctagattggtttttgattacatggaagataaaaattcggttacttggaatacaatgatcgatgggtacatgagaagtggtcaagtcgataacgctgctaagatgttcgacaaaatgcctgaacgagacttgatttcttggacggctatgataaatggctttgttaagaaaggttatcaagaggaagctttgttatggttccgtgaaatgcagatttctggagtaaaaccagattacgttgctattattgctgctcttaacgcttgcacaaaccttggtgctctctcatttggattatgggtacatcgttatgttttgagtcaggatttcaagaacaatgtgagggtgagtaattcactgatcgatttgtattgtcgatgcgggtgtgtggagtttgctcgacaagttttttacaacatggagaaacgaaccgtagtttcgtggaattcagtcattgttggttttgctgctaatggaaatgcacatgaatcattagtctacttcaggaaaatgcaagagaaaggctttaaacctgacgcagtcactttcactggggcgcttaccgcgtgtagccatgtaggtctagttgaagaaggtcttcgatattttcaaattatgaaatgtgattacagaatctcgcctcgaattgagcattatggatgcttagtggatttgtatagtcgggctgggagattggaagacgctttgaagttggtgcagagcatgccaatgaagccaaatgaagttgtgattggatcgttgcttgcagcttgcagcaatcatgggaacaatatcgtcttagcagagaggctgatgaagcatcttaccgacctgaatgtgaaaagccattcaaattatgtgattctctcgaatatgtatgctgctgatggaaaatgggaaggagcaagtaagatgagaaggaagatgaagggtctcggtctaaaaaagcagcctgggtttagttcgatagagattgatgattgcatgcatgtgttcatggccggtgacaatgcccatgttgagaccacttatatccgcgaggtcctggagcttatttcttctgatttgcgattacagggctgtgtagttgaaacccttgctggtgatctcctcaatgcttga

SEQ ID NO: 29930 - protein, 500 aa, Arabidopsis thaliana
  misc_feature (1)..(500): Ceres Seq. ID no. 4936270
MGLLPVVGITSPALITHKNHANPKIQRHNQSTSETTVSWTSRINLLTRNGRLAEAAKEFSDMTLAGVEPNHITFIALLSGCGDFTSGSEALGDLLHGYACKLGLDRNHVMVGTAIIGMYSKRGRFKKARLVFDYMEDKNSVTWNTMIDGYMRSGQVDNAAKMFDKMPERDLISWTAMINGFVKKGYQEEALLWFREMQISGVKPDYVAIIAALNACTNLGALSFGLWVHRYVLSQDFKNNVRVSNSLIDLYCRCGCVEFARQVFYNMEKRTVVSWNSVIVGFAANGNAHESLVYFRKMQEKGFKPDAVTFTGALTACSHVGLVEEGLRYFQIMKCDYRISPRIEHYGCLVDLYSRAGRLEDALKLVQSMPMKPNEVVIGSLLAACSNHGNNIVLAERLMKHLTDLNVKSHSNYVILSNMYAADGKWEGASKMRRKMKGLGLKKQPGFSSIEIDDCMHVFMAGDNAHVETTYIREVLELISSDLRLQGCVVETLAGDLLNA

SEQ ID NO: 29931 - protein, 439 aa, Arabidopsis thaliana; identical to SEQ ID NO: 29926
  misc_feature (1)..(439): Ceres Seq. ID no. 4936271

SEQ ID NO: 29932 - protein, 391 aa, Arabidopsis thaliana; identical to SEQ ID NO: 29927
  misc_feature (1)..(391): Ceres Seq. ID no. 4936272

SEQ ID NO: 29933 - DNA, 3060 bp, Arabidopsis thaliana
  misc_feature (1)..(3060): Ceres Seq. ID no. 4936388
atggcagctaatatgatgagaccggcgtttgcttacactgttgtgtacgtgaaggacgtagctaaatctgtagaattctactctagagcttttggtcacaacgtccgtcgtcttgacgaatcccacaggtggggggagctagagagcgggcaaaccacgatagcgttcacaccgcttcaccagcatgagaccgacgacctaaccgggaaggttcaggctacgcagtcagcacgtgaaagagcacccatcgaagtctgcttctgttaccctgatgttgatgccgctttcaagagagcggtggagaacggtgcggaggcagtgagcaagccggaagataaagaatgggggcagaaggagatagggaagaagctagggaagaaagattgggacttcaacaaagatccatgtagtggtgaaggcacttggattgtaacaacttacacaaccaaagggtttgagagtaatatcacttgtgattgctcctttcttcctcaaaactcttcttgccacgtcattagaatagtagtggctagtttaatgatggtgacaatgaaggggaaaaccactaaattccttggtgaagctctgaagtcgcagaacttaacaggcattgtccctccagaattctctaagcttcgtcaccttaaagttttagacctaagccgtaactctctgactggttccattccaaaggaatgggcttctatgcgcttggaagatttatctttcatggggaaccgattgtctggtccgtttccgaaagtcctgacccgccttacaatgctcagaaacttgagcctagaaggaaatcagttttcaggaccaatccctcctgatattggacagttggttcatttggagaaacttcatctcccttcaaatgctttcactggtccattgactgaaaaacttggattgctcaagaacctgactgatatgaggataagtgataataatttcactggaccaataccagatttcatcagcaattggacaagaatactgaaactgcagatgcatggttgcggtttggatggtccgataccttccagtatttctagcttaacaagcttgaccgacctgagaattagcgacttaggaggcaaaccgtcttccttccccccactgaagaatttggaatctatcaagacgcttgacctcagttttaatctcctaagtggtgagattccttcatcgtttgaaaatatgaagaaagccgatttcatagatgtttcttttaataacttcaccgatgaaagttcaattcctagccatgactgtaaccgagttacttcacacaagggttcaacctgttttcttcaacgcatgccttgtgttcatcctaagagatatcgaggtgaagtaaaagtggataaagaaataacatatcaggctgatgacgaacccaaaggtgcttctatgtacgtccttggcgctaacaagcgctgggcgttgagcagcaccgggaacttcatggacaatgatgacgatgctgatgagtatactgtgcagaacacatccaggttatcagttaatgcttcctctcccagctttggactttataggacagctcgagtctctcctttatcgttgacttactacggaatctgtcttggaaatgggaactacactgtgaatctccactttgctgagatcatctttaccgatgacaatacattatacagtctcggcaaacgtttgtttgatatttatgttcaggatcagttggtgattaaaaactttaacattcaagaagctgctcgaggatcagggacaacaggcattccgattagaggggtatatggtcctatgatttcagctatatctgtggaacccaatttcaaacctccggtatattatgacacaaaggatatcatactaaaagtgggggtacctgtcgctgcagcaacacttcttttgtttatcatagtgggtgtattctggaaaaaaaggcgtgacaaaaatgatattgacaaagagctaaggggtctagatcttcaaactggaacttttactctacggcagataaaagcagccactgataatttcgatgtaacaagaaagattggtgaaggtggatttggctctgtttacaagggtgaattatctgaggggaaattaattgcagttaaacaactgtctgcaaaatcgaggcagggaaatcgcgagtttgtaaatgagataggaatgatctcagctcttcaacatccgaatcttgtgaagctatatggatgttgtgttgaaggaaaccaattgatattggtgtatgagtacttggagaacaactgtctatctcgagcgttatttggaaaggatgagagttctagactgaaactagactggtcaacaaggaagaagatttttttggggatagccaagggactgacatttctccatgaagaatctaggataaagattgtacacagagatataaaggcaagcaatgtgttactcgataaggatctcaacgctaaaatttctgactttggtttggcaaagctgaatgatgatggaaacacacacatcagcactcgtattgcaggaactataggttatatggctcctgaatatgcaatgcgtggttacttgactgaaaaagcggatgtttatagcttcggcgtcgttgcactcgaaatcgttagtggaaagagtaacacaaactttaggccaaccgaggactttgtttaccttcttgattgggcttacgttttgcaagagagaggaagcttactagagctggttgatccaacgttagcctcagattactcagaagaggaagccatgttgatgctgaacgtggcattgatgtgcactaacgcatcaccgactctaaggcctacaatgtcgcaggtggtgagtctcatagaggggaagacagcgatgcaagagttgctgtcggatccgagcttctcaacggttaacccgaagcttaaagccttgaggaaccatttttggcaaaacgagctgagcagatcgcttagcttctccacaagcgggcctcgtactgcctctgctaactcactcgttgatgcagaggagaaaaccggacttttggattaa

SEQ ID NO: 29934 - protein, 1019 aa, Arabidopsis thaliana
  misc_feature (1)..(1019): Ceres Seq. ID no. 4936389
MAANMMRPAFAYTVVYVKDVAKSVEFYSRAFGHNVRRLDESHRWGELESGQTTIAFTPLHQHETDDLTGKVQATQSARERAPIEVCFCYPDVDAAFKRAVENGAEAVSKPEDKEWGQKEIGKKLGKKDWDFNKDPCSGEGTWIVTTYTTKGFESNITCDCSFLPQNSSCHVIRIVVASLMMVTMKGKTTKFLGEALKSQNLTGIVPPEFSKLRHLKVLDLSRNSLTGSIPKEWASMRLEDLSFMGNRLSGPFPKVLTRLTMLRNLSLEGNQFSGPIPPDIGQLVHLEKLHLPSNAFTGPLTEKLGLLKNLTDMRISDNNFTGPIPDFISNWTRILKLQMHGCGLDGPIPSSISSLTSLTDLRISDLGGKPSSFPPLKNLESIKTLDLSFNLLSGEIPSSFENMKKADFIDVSFNNFTDESSIPSHDCNRVTSHKGSTCFLQRMPCVHPKRYRGEVKVDKEITYQADDEPKGASMYVLGANKRWALSSTGNFMDNDDDADEYTVQNTSRLSVNASSPSFGLYRTARVSPLSLTYYGICLGNGNYTVNLHFAEIIFTDDNTLYSLGKRLFDIYVQDQLVIKNFNIQEAARGSGTTGIPIRGVYGPMISAISVEPNFKPPVYYDTKDIILKVGVPVAAATLLLFIIVGVFWKKRRDKNDIDKELRGLDLQTGTFTLRQIKAATDNFDVTRKIGEGGFGSVYKGELSEGKLIAVKQLSAKSRQGNREFVNEIGMISALQHPNLVKLYGCCVEGNQLILVYEYLENNCLSRALFGKDESSRLKLDWSTRKKIFLGIAKGLTFLHEESRIKIVHRDIKASNVLLDKDLNAKISDFGLAKLNDDGNTHISTRIAGTIGYMAPEYAMRGYLTEKADVYSFGVVALEIVSGKSNTNFRPTEDFVYLLDWAYVLQERGSLLELVDPTLASDYSEEEAMLMLNVALMCTNASPTLRPTMSQVVSLIEGKTAMQELLSDPSFSTVNPKLKALRNHFWQNELSRSLSFSTSGPRTASANSLVDAEEKTGLLD

SEQ ID NO: 29935 - protein, 1015 aa, Arabidopsis thaliana
  misc_feature (1)..(1015): Ceres Seq. ID no. 4936390
MMRPAFAYTVVYVKDVAKSVEFYSRAFGHNVRRLDESHRWGELESGQTTIAFTPLHQHETDDLTGKVQATQSARERAPIEVCFCYPDVDAAFKRAVENGAEAVSKPEDKEWGQKEIGKKLGKKDWDFNKDPCSGEGTWIVTTYTTKGFESNITCDCSFLPQNSSCHVIRIVVASLMMVTMKGKTTKFLGEALKSQNLTGIVPPEFSKLRHLKVLDLSRNSLTGSIPKEWASMRLEDLSFMGNRLSGPFPKVLTRLTMLRNLSLEGNQFSGPIPPDIGQLVHLEKLHLPSNAFTGPLTEKLGLLKNLTDMRISDNNFTGPIPDFISNWTRILKLQMHGCGLDGPIPSSISSLTSLTDLRISDLGGKPSSFPPLKNLESIKTLDLSFNLLSGEIPSSFENMKKADFIDVSFNNFTDESSIPSHDCNRVTSHKGSTCFLQRMPCVHPKRYRGEVKVDKEITYQADDEPKGASMYVLGANKRWALSSTGNFMDNDDDADEYTVQNTSRLSVNASSPSFGLYRTARVSPLSLTYYGICLGNGNYTVNLHFAEIIFTDDNTLYSLGKRLFDIYVQDQLVIKNFNIQEAARGSGTTGIPIRGVYGPMISAISVEPNFKPPVYYDTKDIILKVGVPVAAATLLLFIIVGVFWKKRRDKNDIDKELRGLDLQTGTFTLRQIKAATDNFDVTRKIGEGGFGSVYKGELSEGKLIAVKQLSAKSRQGNREFVNEIGMISALQHPNLVKLYGCCVEGNQLILVYEYLENNCLSRALFGKDESSRLKLDWSTRKKIFLGIAKGLTFLHEESRIKIVHRDIKASNVLLDKDLNAKISDFGLAKLNDDGNTHISTRIAGTIGYMAPEYAMRGYLTEKADVYSFGVVALEIVSGKSNTNFRPTEDFVYLLDWAYVLQERGSLLELVDPTLASDYSEEEAMLMLNVALMCTNASPTLRPTMSQVVSLIEGKTAMQELLSDPSFSTVNPKLKALRNHFWQNELSRSLSFSTSGPRTASANSLVDAEEKTGLLD

SEQ ID NO: 29936 - protein, 1014 aa, Arabidopsis thaliana
  misc_feature (1)..(1014): Ceres Seq. ID no. 4936391
MRPAFAYTVVYVKDVAKSVEFYSRAFGHNVRRLDESHRWGELESGQTTIAFTPLHQHETDDLTGKVQATQSARERAPIEVCFCYPDVDAAFKRAVENGAEAVSKPEDKEWGQKEIGKKLGKKDWDFNKDPCSGEGTWIVTTYTTKGFESNITCDCSFLPQNSSCHVIRIVVASLMMVTMKGKTTKFLGEALKSQNLTGIVPPEFSKLRHLKVLDLSRNSLTGSIPKEWASMRLEDLSFMGNRLSGPFPKVLTRLTMLRNLSLEGNQFSGPIPPDIGQLVHLEKLHLPSNAFTGPLTEKLGLLKNLTDMRISDNNFTGPIPDFISNWTRILKLQMHGCGLDGPIPSSISSLTSLTDLRISDLGGKPSSFPPLKNLESIKTLDLSFNLLSGEIPSSFENMKKADFIDVSFNNFTDESSIPSHDCNRVTSHKGSTCFLQRMPCVHPKRYRGEVKVDKEITYQADDEPKGASMYVLGANKRWALSSTGNFMDNDDDADEYTVQNTSRLSVNASSPSFGLYRTARVSPLSLTYYGICLGNGNYTVNLHFAEIIFTDDNTLYSLGKRLFDIYVQDQLVIKNFNIQEAARGSGTTGIPIRGVYGPMISAISVEPNFKPPVYYDTKDIILKVGVPVAAATLLLFIIVGVFWKKRRDKNDIDKELRGLDLQTGTFTLRQIKAATDNFDVTRKIGEGGFGSVYKGELSEGKLIAVKQLSAKSRQGNREFVNEIGMISALQHPNLVKLYGCCVEGNQLILVYEYLENNCLSRALFGKDESSRLKLDWSTRKKIFLGIAKGLTFLHEESRIKIVHRDIKASNVLLDKDLNAKISDFGLAKLNDDGNTHISTRIAGTIGYMAPEYAMRGYLTEKADVYSFGVVALEIVSGKSNTNFRPTEDFVYLLDWAYVLQERGSLLELVDPTLASDYSEEEAMLMLNVALMCTNASPTLRPTMSQVVSLIEGKTAMQELLSDPSFSTVNPKLKALRNHFWQNELSRSLSFSTSGPRTASANSLVDAEEKTGLLD

SEQ ID NO: 29937 - DNA, 2571 bp, Arabidopsis thaliana
  misc_feature (1)..(2571): Ceres Seq. ID no. 4936442
atgaaaaacctccgtggacttctattggccttcctagttttgtctttaggcatttccgattttcttcgagcacaagatcaacaaggattcatcagtttggattgcgggttgcaagccgatgagtctccttataccgaaccattaacaaagttaacattcacatcagacgccgatttcatcaaaagtggaaaaagcggcaagattcaaaatgttccggggatggagtatataaagccatacacggttttgagatattttccagatggagtacgaaactgttatactcttatcgtcatacaaggcacaaactatctgatcgtagccatgtttacttatggaaactacgataatcttaacacacacccaaagttcgacctttatcttggtccaaatatatggaccacggtcgatttgcaaagaaatgtaaacggaacaagggcggaaatcattcacataccaaggtcaacttctttgcagatttgtcttgttaagacgggaacaactacgccgctaatatcagctttagaactacgaccattgagaaataatacttatattcctcaatctggttccctcaagacattgttccgcgtccatttgactgattccaaagaaactgttcggtatccagaagatgtccatgatcgtctttggagtccatttttcatgccggaatggagactgttaagaacaagtctcacggtcaacacttctgatgataacggctatgacataccggaagacgtagtggttacggcagccacacctgcaaatgtgagttcaccattaaccatttcttggaatttggaaacacctgacgacttagtttatgcatacctccacgtcgctgagatccaatccttaagggaaaatgataccagggaattcaacattagcgcaggccaagatgttaactatggacctgttagtcctgacgagtttctagtgggtactctattcaatacatcaccagttaaatgtgaaggagggacatgccatttgcaactaataaaaactccaaaatcaactctccctcccctcctcaatgctattgaggcttttataacagtggagtttccgcagtctgaaactaatgcaaatgacgtccttgctatcaagagcatagaaacaagctatggattaagtagaattagttggcaaggagatccatgtgttcctcaacaattattgtgggatggtcttacctgcgagtacaccaatatgtctacaccaccaagaatccattccttagacttgtcctcaagtgaactaactggaattatagttcctgagatccaaaatcttacggagcttaaaaaattggacttttcaaataataatctaacaggtggagtacctgaatttctagccaaaatgaaatcattgttagtcataaacttaagcggaaacaaccttagtggatcagtccctcaagctcttctcaacaaagtgaaaaatggttcatgcaacaaaaagaaaaatagcatcatgttaccagttgttgcatcacttgcttctttggctgctataatagcaatgatcgctctgctttttgtttgtattaaaagacgctcatcaagcagaaaaggtccatcaccaagccaacaatcaatagaaacaataaagaaaagatatacatatgccgaagttcttgccatgacaaagaaatttgaaagggttttgggtaaaggaggatttggaatggtctatcatggttatataaatggtactgaagaagtagcggtcaagctactctctccatcatcagctcaaggctataaagagttcaaaacagaggtagaacttcttctaagggtttaccacacaaatctggtaagtcttgttggatactgtgatgaaaaagatcatctggccctcatctaccagtacatggtcaatggcgatttgaaaaaacatttttcaggtagctccatcattagctgggttgatagactaaacatagctgttgatgcagcgtcaggtttggagtacttgcatattggttgcaaaccgctgatagttcatagagatgtaaaaagttctaacatactattggacgatcaattacaagctaagcttgcagattttgggctttctagatcttttcccattggggatgaatctcatgtgtctacacttgttgctggaacatttggataccttgatcatgaatactaccaaactaataggttgtctgagaagagtgatgtctacagttttggtgttgtactgctagaaattattacaaacaaaccggtgatcgatcataaccgcgacatgcctcacatagcagaatgggtgaaacttatgcttactagaggagacattagcaatattatggatcctaaacttcaaggggtctatgactctggttctgcatggaaagctcttgaattagcaatgacatgtgtgaatccttcttccttgaaaagacccaacatgtcccatgttgttcatgagctgaaggagtgtctggtatctgaaaacaacaggacaagagacatagacacatcgagatccatggacattaacttaagctttggcacagatgtgaaccccaaggcacgttag

SEQ ID NO: 29938 - protein, 856 aa, Arabidopsis thaliana
  misc_feature (1)..(856): Ceres Seq. ID no. 4936443
MKNLRGLLLAFLVLSLGISDFLRAQDQQGFISLDCGLQADESPYTEPLTKLTFTSDADFIKSGKSGKIQNVPGMEYIKPYTVLRYFPDGVRNCYTLIVIQGTNYLIVAMFTYGNYDNLNTHPKFDLYLGPNIWTTVDLQRNVNGTRAEIIHIPRSTSLQICLVKTGTTTPLISALELRPLRNNTYIPQSGSLKTLFRVHLTDSKETVRYPEDVHDRLWSPFFMPEWRLLRTSLTVNTSDDNGYDIPEDVVVTAATPANVSSPLTISWNLETPDDLVYAYLHVAEIQSLRENDTREFNISAGQDVNYGPVSPDEFLVGTLFNTSPVKCEGGTCHLQLIKTPKSTLPPLLNAIEAFITVEFPQSETNANDVLAIKSIETSYGLSRISWQGDPCVPQQLLWDGLTCEYTNMSTPPRIHSLDLSSSELTGIIVPEIQNLTELKKLDFSNNNLTGGVPEFLAKMKSLLVINLSGNNLSGSVPQALLNKVKNGSCNKKKNSIMLPVVASLASLAAIIAMIALLFVCIKRRSSSRKGPSPSQQSIETIKKRYTYAEVLAMTKKFERVLGKGGFGMVYHGYINGTEEVAVKLLSPSSAQGYKEFKTEVELLLRVYHTNLVSLVGYCDEKDHLALIYQYMVNGDLKKHFSGSSIISWVDRLNIAVDAASGLEYLHIGCKPLIVHRDVKSSNILLDDQLQAKLADFGLSRSFPIGDESHVSTLVAGTFGYLDHEYYQTNRLSEKSDVYSFGVVLLEIITNKPVIDHNRDMPHIAEWVKLMLTRGDISNIMDPKLQGVYDSGSAWKALELAMTCVNPSSLKRPNMSHVVHELKECLVSENNRTRDIDTSRSMDINLSFGTDVNPKAR

SEQ ID NO: 29939 - protein, 783 aa, Arabidopsis thaliana
  misc_feature (1)..(783): Ceres Seq. ID no. 4936444
MEYIKPYTVLRYFPDGVRNCYTLIVIQGTNYLIVAMFTYGNYDNLNTHPKFDLYLGPNIWTTVDLQRNVNGTRAEIIHIPRSTSLQICLVKTGTTTPLISALELRPLRNNTYIPQSGSLKTLFRVHLTDSKETVRYPEDVHDRLWSPFFMPEWRLLRTSLTVNTSDDNGYDIPEDVVVTAATPANVSSPLTISWNLETPDDLVYAYLHVAEIQSLRENDTREFNISAGQDVNYGPVSPDEFLVGTLFNTSPVKCEGGTCHLQLIKTPKSTLPPLLNAIEAFITVEFPQSETNANDVLAIKSIETSYGLSRISWQGDPCVPQQLLWDGLTCEYTNMSTPPRIHSLDLSSSELTGIIVPEIQNLTELKKLDFSNNNLTGGVPEFLAKMKSLLVINLSGNNLSGSVPQALLNKVKNGSCNKKKNSIMLPVVASLASLAAIIAMIALLFVCIKRRSSSRKGPSPSQQSIETIKKRYTYAEVLAMTKKFERVLGKGGFGMVYHGYINGTEEVAVKLLSPSSAQGYKEFKTEVELLLRVYHTNLVSLVGYCDEKDHLALIYQYMVNGDLKKHFSGSSIISWVDRLNIAVDAASGLEYLHIGCKPLIVHRDVKSSNILLDDQLQAKLADFGLSRSFPIGDESHVSTLVAGTFGYLDHEYYQTNRLSEKSDVYSFGVVLLEIITNKPVIDHNRDMPHIAEWVKLMLTRGDISNIMDPKLQGVYDSGSAWKALELAMTCVNPSSLKRPNMSHVVHELKECLVSENNRTRDIDTSRSMDINLSFGTDVNPKAR

SEQ ID NO: 29940 - protein, 748 aa, Arabidopsis thaliana
  misc_feature (1)..(748): Ceres Seq. ID no. 4936445
MFTYGNYDNLNTHPKFDLYLGPNIWTTVDLQRNVNGTRAEIIHIPRSTSLQICLVKTGTTTPLISALELRPLRNNTYIPQSGSLKTLFRVHLTDSKETVRYPEDVHDRLWSPFFMPEWRLLRTSLTVNTSDDNGYDIPEDVVVTAATPANVSSPLTISWNLETPDDLVYAYLHVAEIQSLRENDTREFNISAGQDVNYGPVSPDEFLVGTLFNTSPVKCEGGTCHLQLIKTPKSTLPPLLNAIEAFITVEFPQSETNANDVLAIKSIETSYGLSRISWQGDPCVPQQLLWDGLTCEYTNMSTPPRIHSLDLSSSELTGIIVPEIQNLTELKKLDFSNNNLTGGVPEFLAKMKSLLVINLSGNNLSGSVPQALLNKVKNGSCNKKKNSIMLPVVASLASLAAIIAMIALLFVCIKRRSSSRKGPSPSQQSIETIKKRYTYAEVLAMTKKFERVLGKGGFGMVYHGYINGTEEVAVKLLSPSSAQGYKEFKTEVELLLRVYHTNLVSLVGYCDEKDHLALIYQYMVNGDLKKHFSGSSIISWVDRLNIAVDAASGLEYLHIGCKPLIVHRDVKSSNILLDDQLQAKLADFGLSRSFPIGDESHVSTLVAGTFGYLDHEYYQTNRLSEKSDVYSFGVVLLEIITNKPVIDHNRDMPHIAEWVKLMLTRGDISNIMDPKLQGVYDSGSAWKALELAMTCVNPSSLKRPNMSHVVHELKECLVSENNRTRDIDTSRSMDINLSFGTDVNPKAR

SEQ ID NO: 29941 - DNA, 1350 bp, Arabidopsis thaliana
  misc_feature (1)..(1350): Ceres Seq. ID no. 4936528
atgggtaaagagaagtttcacatcaacattgtggtcattggccacgtcgattctggaaagtcgacaaccactggacacttgatctacaagttgggtggtattgacaagcgtgtgatcgagaggttcgagaaggaggctgctgagatgaacaagaggtccttcaagtacgcatgggtgttggacaaacttaaggctgagcgtgagcgtggtatcaccattgacattgctctctggaagttcgagaccaccaagtactactgcactgtcattgatgctcctggtcatcgtgatttcatcaagaacatgatcactggtacctcccaggctgattgtgctgtccttatcattgactccaccactggtggttttgaggctggtatctccaaggatggtcagacccgtgagcacgctctccttgctttcacccttggtgtcaagcagatgatctgctgttgtaacaagatggatgccactacccccaagtactccaaggccaggtacgatgaaatcatcaaggaggtgtcttcctacttgaagaaggttggttacaaccccgacaaaatcccatttgtgcccatctctggatttgagggtgacaacatgattgagaggtccaccaaccttgactggtacaagggaccaactctccttgaggctcttgaccagatcaacgagcccaagaggccgtcagacaagccccttcgtctcccacttcaggatgtctacaagattggtggtattggaacggtgccagtgggacgtgttgagactggtatgatcaagcctggtatggttgtgacctttgctcccacaggattgaccactgaggtcaagtctgttgagatgcaccacgagtctcttcttgaggcacttccaggtgacaacgttgggttcaatgttaagaatgttgccgtgaaggatcttaagagagggtacgtcgcctccaactccaaggatgaccctgccaagggtgctgctaacttcacctcccaggtcatcatcatgaaccaccctggtcagattggtaacggttacgccccagtcttggattgccacacctctcacattgcagtcaagttctctgagatcttgaccaagattgacaggcgttctggtaaggagattgagaaggagcccaaattcttgaagaatggtgatgctggtatggtgaagatgactccaaccaagcccatggttgtggagaccttctctgagtacccaccacttggacgtttcgctgttagggacatgaggcagactgttgcagtcggtgttatcaagagtgttgacaagaaggacccaaccggagccaaggttaccaaggctgcagttaagaagggtgcaaagtga

SEQ ID NO: 29942 - protein, 449 aa, Arabidopsis thaliana
  misc_feature (1)..(449): Ceres Seq. ID no. 4936529
MGKEKFHINIVVIGHVDSGKSTTTGHLIYKLGGIDKRVIERFEKEAAEMNKRSFKYAWVLDKLKAERERGITIDIALWKFETTKYYCTVIDAPGHRDFIKNMITGTSQADCAVLIIDSTTGGFEAGISKDGQTREHALLAFTLGVKQMICCCNKMDATTPKYSKARYDEIIKEVSSYLKKVGYNPDKIPFVPISGFEGDNMIERSTNLDWYKGPTLLEALDQINEPKRPSDKPLRLPLQDVYKIGGIGTVPVGRVETGMIKPGMVVTFAPTGLTTEVKSVEMHHESLLEALPGDNVGFNVKNVAVKDLKRGYVASNSKDDPAKGAANFTSQVIIMNHPGQIGNGYAPVLDCHTSHIAVKFSEILTKIDRRSGKEIEKEPKFLKNGDAGMVKMTPTKPMVVETFSEYPPLGRFAVRDMRQTVAVGVIKSVDKKDPTGAKVTKAAVKKGAK

SEQ ID NO: 29943 - protein, 401 aa, Arabidopsis thaliana
  misc_feature (1)..(401): Ceres Seq. ID no. 4936530
MNKRSFKYAWVLDKLKAERERGITIDIALWKFETTKYYCTVIDAPGHRDFIKNMITGTSQADCAVLIIDSTTGGFEAGISKDGQTREHALLAFTLGVKQMICCCNKMDATTPKYSKARYDEIIKEVSSYLKKVGYNPDKIPFVPISGFEGDNMIERSTNLDWYKGPTLLEALDQINEPKRPSDKPLRLPLQDVYKIGGIGTVPVGRVETGMIKPGMVVTFAPTGLTTEVKSVEMHHESLLEALPGDNVGFNVKNVAVKDLKRGYVASNSKDDPAKGAANFTSQVIIMNHPGQIGNGYAPVLDCHTSHIAVKFSEILTKIDRRSGKEIEKEPKFLKNGDAGMVKMTPTKPMVVETFSEYPPLGRFAVRDMRQTVAVGVIKSVDKKDPTGAKVTKAAVKKGAK

SEQ ID NO: 29944 - protein, 348 aa, Arabidopsis thaliana
  misc_feature (1)..(348): Ceres Seq. ID no. 4936531
MITGTSQADCAVLIIDSTTGGFEAGISKDGQTREHALLAFTLGVKQMICCCNKMDATTPKYSKARYDEIIKEVSSYLKKVGYNPDKIPFVPISGFEGDNMIERSTNLDWYKGPTLLEALDQINEPKRPSDKPLRLPLQDVYKIGGIGTVPVGRVETGMIKPGMVVTFAPTGLTTEVKSVEMHHESLLEALPGDNVGFNVKNVAVKDLKRGYVASNSKDDPAKGAANFTSQVIIMNHPGQIGNGYAPVLDCHTSHIAVKFSEILTKIDRRSGKEIEKEPKFLKNGDAGMVKMTPTKPMVVETFSEYPPLGRFAVRDMRQTVAVGVIKSVDKKDPTGAKVTKAAVKKGAK

SEQ ID NO: 29945 - DNA, 1215 bp, Arabidopsis thaliana
  misc_feature (1)..(1215): Ceres Seq. ID no. 4936568
ataaaaagtagtactcgtgtcttactcgtgccagccactcgcatttctccagattttattatccttcctcgaaacaagtagatccacgattcgttgctgcgatcggcgttattatcgtcagctctctcgtttctgttctgtggttcgatattgctgagtttctaggctaatcttacgaatctgtgaaagtttttgagagatttggcttctgtagctcactcctgcttgatttagagcttagctaagatgacgaagaactacccaaccgtgagcgaagattacaagaaggctgttgagaagtgcaggaggaagctcagaggtttgatcgctgagaagaactgtgcacccatcatggtccgactcgcatggcactctgctggaactttcgattgtcaatcaaggactggaggtccattcggaacaatgaggtttgacgctgagcaagctcatggagccaacagtggtatccacattgctcttaggttgttggaccccatcagggagcaattccctaccatctcttttgctgatttccatcagcttgctggtgttgtggccgttgaagttactggtggccctgacattcctttccaccctggaagagaggacaagccccaaccacctccagagggtcgtcttcctgatgctaccaagggttgtgaccatttgagagatgtctttgctaagcagatgggcttatctgacaaagacattgtcgctttatctggtgcccacactctgggacgatgccacaaggataggtctggcttcgaaggtgcatggacatcaaaccctctaatcttcgacaactcttacttcaaggaactcttgagcggagagaaggaaggccttcttcagcttgtctctgacaaagcactattggacgaccctgttttccgtcctttggtcgagaaatacgctgctgatgaagatgcctttttcgctgattacgctgaggcccacatgaagctttctgagcttgggtttgctgatgcttaagctgtgacgtatgctctgtgtgtgtgtgtgtgtctccccgagagtcatggctgtttttggttgggggctggaggggtcgcattgcatttgaactttgtcatatgattgcttaatgtactctcggatttacgtatctgtttttttcggtgggttgcgatttgaacacatccgttgcgcttttgctgcttagacacattaataaaattaatttctctc

SEQ ID NO: 29946 - protein, 250 aa, Arabidopsis thaliana
  misc_feature (1)..(250): Ceres Seq. ID no. 4936569
MTKNYPTVSEDYKKAVEKCRRKLRGLIAEKNCAPIMVRLAWHSAGTFDCQSRTGGPFGTMRFDAEQAHGANSGIHIALRLLDPIREQFPTISFADFHQLAGVVAVEVTGGPDIPFHPGREDKPQPPPEGRLPDATKGCDHLRDVFAKQMGLSDKDIVALSGAHTLGRCHKDRSGFEGAWTSNPLIFDNSYFKELLSGEKEGLLQLVSDKALLDDPVFRPLVEKYAADEDAFFADYAEAHMKLSELGFADA

SEQ ID NO: 29947 - protein, 215 aa, Arabidopsis thaliana
  misc_feature (1)..(215): Ceres Seq. ID no. 4936570
MVRLAWHSAGTFDCQSRTGGPFGTMRFDAEQAHGANSGIHIALRLLDPIREQFPTISFADFHQLAGVVAVEVTGGPDIPFHPGREDKPQPPPEGRLPDATKGCDHLRDVFAKQMGLSDKDIVALSGAHTLGRCHKDRSGFEGAWTSNPLIFDNSYFKELLSGEKEGLLQLVSDKALLDDPVFRPLVEKYAADEDAFFADYAEAHMKLSELGFADA

SEQ ID NO: 29948 - protein, 191 aa, Arabidopsis thaliana
  misc_feature (1)..(191): Ceres Seq. ID no. 4936571
MRFDAEQAHGANSGIHIALRLLDPIREQFPTISFADFHQLAGVVAVEVTGGPDIPFHPGREDKPQPPPEGRLPDATKGCDHLRDVFAKQMGLSDKDIVALSGAHTLGRCHKDRSGFEGAWTSNPLIFDNSYFKELLSGEKEGLLQLVSDKALLDDPVFRPLVEKYAADEDAFFADYAEAHMKLSELGFADA

SEQ ID NO: 29949 - DNA, 1124 bp, Arabidopsis thaliana
  misc_feature (1)..(1124): Ceres Seq. ID no. 4936572
ataaaaagtagtactcgtgtcttactcgtgccagccactcgcatttctccagattttattatccttcctcgaaacaagtagatccacgattcgttgctgcgatcggcgttattatcgtcagctctctcgtttctgttctgtgagcttagctaagatgacgaagaactacccaaccgtgagcgaagattacaagaaggctgttgagaagtgcaggaggaagctcagaggtttgatcgctgagaagaactgtgcacccatcatggtccgactcgcatggcactctgctggaactttcgattgtcaatcaaggactggaggtccattcggaacaatgaggtttgacgctgagcaagctcatggagccaacagtggtatccacattgctcttaggttgttggaccccatcagggagcaattccctaccatctcttttgctgatttccatcagcttgctggtgttgtggccgttgaagttactggtggccctgacattcctttccaccctggaagagaggacaagccccaaccacctccagagggtcgtcttcctgatgctaccaagggttgtgaccatttgagagatgtctttgctaagcagatgggcttatctgacaaagacattgtcgctttatctggtgcccacactctgggacgatgccacaaggataggtctggcttcgaaggtgcatggacatcaaaccctctaatcttcgacaactcttacttcaaggaactcttgagcggagagaaggaaggccttcttcagcttgtctctgacaaagcactattggacgaccctgttttccgtcctttggtcgagaaatacgctgctgatgaagatgcctttttcgctgattacgctgaggcccacatgaagctttctgagcttgggtttgctgatgcttaagctgtgacgtatgctctgtgtgtgtgtgtgtgtctccccgagagtcatggctgtttttggttgggggctggaggggtcgcattgcatttgaactttgtcatatgattgcttaatgtactctcggatttacgtatctgtttttttcggtgggttgcgatttgaacacatccgttgcgcttttgctgcttagacacattaataaaattaatttctctcg

SEQ ID NO: 29950 - protein, 250 aa, Arabidopsis thaliana; identical to SEQ ID NO: 29946
  misc_feature (1)..(250): Ceres Seq. ID no. 4936573

SEQ ID NO: 29951 - protein, 215 aa, Arabidopsis thaliana; identical to SEQ ID NO: 29947
  misc_feature (1)..(215): Ceres Seq. ID no. 4936574

SEQ ID NO: 29952 - protein, 191 aa, Arabidopsis thaliana; identical to SEQ ID NO: 29948
  misc_feature (1)..(191): Ceres Seq. ID no. 4936575

SEQ ID NO: 29953 - DNA, 2517 bp, Arabidopsis thaliana
  misc_feature (1)..(2517): Ceres Seq. ID no. 4936655
atggaatcttcgtcagaaggtgagacaaacaagatttcccgatgcaaagccactggttcagacaatcctgatgaggactacgtcgagatcacactcgaagtgcgagacgaaaccatcaacacaatgaaggccaaggcgacacttcgttcggttctttccgggaggctgaaaacgatggttaagtcgctatcgtttgcttcacgccggctcgaccgtagtaagtcgttcggtgctatgtttgctcttcgagggttgaggttcattgccaaaaacgacgccgttggtagaggctgggatgaggttgcaatgaggtttgataagttggccgttgaagggaaactccctaaatccaaatttggacattgcataggaatggttgaatctagcgaatttgtgaacgagctttttgaggcgttggtccgaaggagagggactacgtcatcgtcaatcaccaaaactgaattgtttgaattctgggagcagatcacaggcaatagttttgatgataggctgcaaatcttttttgatatggtggacaaaaatttggacggacgtattacaggagatgaggttaaggagataattgctttaagtgcttcggctaacaagctatcaaagattaaagaaaatgtagatgaatatgctgccttgatcatggaagaactagatcgcgacaacctcggatatattgagttacataacttggaaacattgcttctccaagttcctagccaatcaaataacagtccatcttccgcgaacaaacgtgcactcaacaagatgttgagccagaagctcataccaacaaaagatcgaaacccggtgaaaagatttgctatgaatatatcatacttcttcttggaaaattggaaaaggatttgggtgttaacattgtggatatccatttgcatcactctcttcacttggaaatttctccagtataaacgcaaaaccgtgttcgaggtgatgggctactgtgttaccgtggccaaaggcagtgcagagaccttgaaattcaacatggctctcattctcttgcccgtttgtaggaacactatcacttggctaaggaccaagtccaagcttattgggtctgttgttccatttgatgacaatatcaatttccacaaggttgttgcatttgggatcgcggttggaataggcttgcacgctatatctcacctggcatgtgatttcccgcgtttgctgcatgcaaaaaatgtagagtttgagccaatgaaaaagtttttcggagacgagaggcctgaaaattatggatggttcatgaaagggacagacgggtggaccggtgttaccatggtggttcttatgttagtggcctacgtcttggcgcagtcgtggttcagacgaaaccgggcaaacctaccaaaatcgttgaaacgattgactggtttcaacgcattttggtactcacaccatttgtttgtcatcgtttatgttcttctcatcgtgcatggctattttgtttatctctcaaaggaatggtaccacaagacgacgtggatgtatctggcagttcccgtactactatatgcatttgaacgattgattcgtgcatttagaccaggtgccaaggctgtcaaggttttgaaggtggcagtatatccaggaaatgtactttcactttacatgtcgaagcctaaaggtttcaagtacacaagtggacagtacatatatattaactgttctgacgtctcaccattacaatggcatccgttttcaattacttcggcttccggggatgattacctcagcgttcatatccgcacactcggagactggacatcgcaactcaaatccttatattccaaggtttgtcaacttccctcaacaagtcaaagtgggctcttcatagctgacataggtcaagccaacaatataaccaggtttccgaggctgttaatcgatggtccatatggtgcacccgcacaagattaccggaactacgatgtattgcttctagtaggtctagggatcggagcgacgccattaatcagcataatcagggacgtccttaacaacatcaagaaccagaattccatcgaacgaggcactaaccaacacataaaaaactatgttgccacaaaacgagcttatttttattgggtaacaagagagcaaggatcattggaatggttcagtgaggtcatgaacgaggtagctgagtatgatagtgaggggatgattgaactacataattactgcactagcgtgtatgaggaaggagatgcgaggtcagcactaatcaccatgttgcagtcattgcaccacgccaagagcggcattgacatcgtatcgggcactcgggtccgaacccatttcgctcgacccaattggcgtagtgtcttcaagcacgtcgcagtcaaccacgtcaatcaacgagttggggttttctactgtggtaatacatgcatcataggagagttaaagagactggctcaagatttctctaggaaaactacgaccaagtttgagttccacaaggaaaatttctag

SEQ ID NO: 29954 - protein, 838 aa, Arabidopsis thaliana
  misc_feature (1)..(838): Ceres Seq. ID no. 4936656
MESSSEGETNKISRCKATGSDNPDEDYVEITLEVRDETINTMKAKATLRSVLSGRLKTMVKSLSFASRRLDRSKSFGAMFALRGLRFIAKNDAVGRGWDEVAMRFDKLAVEGKLPKSKFGHCIGMVESSEFVNELFEALVRRRGTTSSSITKTELFEFWEQITGNSFDDRLQIFFDMVDKNLDGRITGDEVKEIIALSASANKLSKIKENVDEYAALIMEELDRDNLGYIELHNLETLLLQVPSQSNNSPSSANKRALNKMLSQKLIPTKDRNPVKRFAMNISYFFLENWKRIWVLTLWISICITLFTWKFLQYKRKTVFEVMGYCVTVAKGSAETLKFNMALILLPVCRNTITWLRTKSKLIGSVVPFDDNINFHKVVAFGIAVGIGLHAISHLACDFPRLLHAKNVEFEPMKKFFGDERPENYGWFMKGTDGWTGVTMVVLMLVAYVLAQSWFRRNRANLPKSLKRLTGFNAFWYSHHLFVIVYVLLIVHGYFVYLSKEWYHKTTWMYLAVPVLLYAFERLIRAFRPGAKAVKVLKVAVYPGNVLSLYMSKPKGFKYTSGQYIYINCSDVSPLQWHPFSITSASGDDYLSVHIRTLGDWTSQLKSLYSKVCQLPSTSQSGLFIADIGQANNITRFPRLLIDGPYGAPAQDYRNYDVLLLVGLGIGATPLISIIRDVLNNIKNQNSIERGTNQHIKNYVATKRAYFYWVTREQGSLEWFSEVMNEVAEYDSEGMIELHNYCTSVYEEGDARSALITMLQSLHHAKSGIDIVSGTRVRTHFARPNWRSVFKHVAVNHVNQRVGVFYCGNTCIIGELKRLAQDFSRKTTTKFEFHKENF

SEQ ID NO: 29955 - protein, 797 aa, Arabidopsis thaliana
  misc_feature (1)..(797): Ceres Seq. ID no. 4936657
MKAKATLRSVLSGRLKTMVKSLSFASRRLDRSKSFGAMFALRGLRFIAKNDAVGRGWDEVAMRFDKLAVEGKLPKSKFGHCIGMVESSEFVNELFEALVRRRGTTSSSITKTELFEFWEQITGNSFDDRLQIFFDMVDKNLDGRITGDEVKEIIALSASANKLSKIKENVDEYAALIMEELDRDNLGYIELHNLETLLLQVPSQSNNSPSSANKRALNKMLSQKLIPTKDRNPVKRFAMNISYFFLENWKRIWVLTLWISICITLFTWKFLQYKRKTVFEVMGYCVTVAKGSAETLKFNMALILLPVCRNTITWLRTKSKLIGSVVPFDDNINFHKVVAFGIAVGIGLHAISHLACDFPRLLHAKNVEFEPMKKFFGDERPENYGWFMKGTDGWTGVTMVVLMLVAYVLAQSWFRRNRANLPKSLKRLTGFNAFWYSHHLFVIVYVLLIVHGYFVYLSKEWYHKTTWMYLAVPVLLYAFERLIRAFRPGAKAVKVLKVAVYPGNVLSLYMSKPKGFKYTSGQYIYINCSDVSPLQWHPFSITSASGDDYLSVHIRTLGDWTSQLKSLYSKVCQLPSTSQSGLFIADIGQANNITRFPRLLIDGPYGAPAQDYRNYDVLLLVGLGIGATPLISIIRDVLNNIKNQNSIERGTNQHIKNYVATKRAYFYWVTREQGSLEWFSEVMNEVAEYDSEGMIELHNYCTSVYEEGDARSALITMLQSLHHAKSGIDIVSGTRVRTHFARPNWRSVFKHVAVNHVNQRVGVFYCGNTCIIGELKRLAQDFSRKTTTKFEFHKENF

SEQ ID NO: 29956 - protein, 780 aa, Arabidopsis thaliana
  misc_feature (1)..(780): Ceres Seq. ID no. 4936658
MVKSLSFASRRLDRSKSFGAMFALRGLRFIAKNDAVGRGWDEVAMRFDKLAVEGKLPKSKFGHCIGMVESSEFVNELFEALVRRRGTTSSSITKTELFEFWEQITGNSFDDRLQIFFDMVDKNLDGRITGDEVKEIIALSASANKLSKIKENVDEYAALIMEELDRDNLGYIELHNLETLLLQVPSQSNNSPSSANKRALNKMLSQKLIPTKDRNPVKRFAMNISYFFLENWKRIWVLTLWISICITLFTWKFLQYKRKTVFEVMGYCVTVAKGSAETLKFNMALILLPVCRNTITWLRTKSKLIGSVVPFDDNINFHKVVAFGIAVGIGLHAISHLACDFPRLLHAKNVEFEPMKKFFGDERPENYGWFMKGTDGWTGVTMVVLMLVAYVLAQSWFRRNRANLPKSLKRLTGFNAFWYSHHLFVIVYVLLIVHGYFVYLSKEWYHKTTWMYLAVPVLLYAFERLIRAFRPGAKAVKVLKVAVYPGNVLSLYMSKPKGFKYTSGQYIYINCSDVSPLQWHPFSITSASGDDYLSVHIRTLGDWTSQLKSLYSKVCQLPSTSQSGLFIADIGQANNITRFPRLLIDGPYGAPAQDYRNYDVLLLVGLGIGATPLISIIRDVLNNIKNQNSIERGTNQHIKNYVATKRAYFYWVTREQGSLEWFSEVMNEVAEYDSEGMIELHNYCTSVYEEGDARSALITMLQSLHHAKSGIDIVSGTRVRTHFARPNWRSVFKHVAVNHVNQRVGVFYCGNTCIIGELKRLAQDFSRKTTTKFEFHKENF

SEQ ID NO: 29957 - DNA, 2736 bp, Arabidopsis thaliana
  misc_feature (1)..(2736): Ceres Seq. ID no. 4936782
atgcaggtcaattttgatgaaacttgtgattcagtgattagaatgaatgctaatgagcaaactcgatccgccaatggcattggcaatggcaatggtgagtctattcccgggattccagatgacttacggtgcaagagatcggatggtaaacagtggagatgcactgcaatgtccatggctgataagactgtttgtgagaagcactacatccaagcaaagaagcgggcggctaattctgctttcagggcgaaccagaagaaagcgaaaaggcgatcatcgttaggcgaaacagatacgtattcggaagggaagatggatgatttcgagttaccagtcaccagcattgaccactataataacggtcttgcctctgcttccaagagtaatggtagactagagaagagacataataaaagcctgatgcggtactcgcccgagacaccgatgatgaggagtttctctccacgtgttgcagtggatttgaatgatgacttgggtagagatgttgtaatgtttgaagagggctacagatcttataggacaccaccatctgttgctgttatggatccgacacgaaacagatcacaccaaagcaccagtcctatggaatactcagcagcaagcacagatgtgtctgcagagtctttgggggaaatctgccatcaatgccagagaaaagatagagagagaatcatttcttgcctcaaatgcaatcaaagagccttctgccacaattgtctatcggcaaggtactcggagatatcacttgaagaagtcgagaaagtttgccctgcatgtcgtggcttgtgtgattgcaaatcttgcctgcgttcagataatacaataaaggttcggatccgggaaatacccgttttggacaagttgcagtatctttatcgtctattatcagctgtcctaccagtcataaagcagatccatcttgaacaatgtatggaagttgaactagagaagaggcttcgtgaagttgagattgatcttgtcagggcaagattgaaagcagatgagcagatgtgctgcaacgtgtgtcggataccagttgttgactactaccgtcactgtccgaactgctcatatgacctttgcctgagatgctgtcaagatctacgggaagagtcttcagtgacgattagtgggactaaccaaaacgtacaagatagaaaaggagctcccaaactaaaactaaacttttcatacaagtttcctgagtgggaagccaacggtgatgggagcatcccttgccctcctaaggagtatggaggctgcggttcacattctttgaatcttgcccgcattttcaagatgaattgggttgcaaagcttgtgaaaaatgctgaggagattgttagtggctgcaaattatctgatcttctgaaccctgatatgtgtgattcaagattctgcaaatttgctgagagagaagagagcggtgacaactacgtgtacagcccgtcgcttgaaacgattaaaactgatggagtagctaagtttgagcaacaatgggcagagggtcggcttgttactgtgaaaatggtacttgatgactcatcttgctctagatgggatcctgagactatttggagggatatagacgagctttcggacgagaaactgagagaacatgatccattcttgaaggccattaattgcttggatggtttagaggttgatgtaagacttggggagtttacaagagcatataaagatggaaagaaccaagagacaggtcttccgctattgtggaagttaaaggactggccgagcccaagtgcttccgaggagttcattttctaccaaagacctgagtttatcagaagttttccgtttctcgagtacattcatccccggttaggccttctgaatgttgcagccaagttacctcattactcgctccaaaacgattcaggtccaaagatttatgtgtcttgtgggacgtaccaagaaatcagtgctggcgattcattgactggtattcactacaacatgcgtgacatggtatacctattggtgcacacgtctgaagaaacaacattcgaaagggtgagaaaaacaaaacctgttccagaggaacctgaccagaagatgagcgaaaatgagtcacttcttagccctgagcagaaattaagggacggagagttacatgatctatcacttggtgaagccagtatggagaagaatgaacctgagttggcgttgactgtgaatccagagaacttaacggaaaacggtgacaacatggaatcttcttgcacatcttcatgtgcaggaggagcccagtgggatgtctttcgacgccaagacgtcccaaagttgtccgggtatttgcagagaacattccagaagcctgataatatccagactgattttgtgtcacgcccgttgtatgaaggattgttcttaaatgaacaccacaagagacaactaagagacgagtttggagttgagccatggacatttgagcaacatcgtggtgaggctatcttcattccggctggatgtccgttccaaatcactaatcttcagtcgaatattcaggtggcacttgacttcttgtgccctgaaagcgttggagagtcagcaagactagctgaagaaatccggtgtttaccaaacgaccacgaggcaaaacttcagattctagagattggaaagatatcattatacgcagctagctcagccattaaagaggttcagaaactggtcttggatccaaagtaa

SEQ ID NO: 29958 - protein, 911 aa, Arabidopsis thaliana
  misc_feature (1)..(911): Ceres Seq. ID no. 4936783
MQVNFDETCDSVIRMNANEQTRSANGIGNGNGESIPGIPDDLRCKRSDGKQWRCTAMSMADKTVCEKHYIQAKKRAANSAFRANQKKAKRRSSLGETDTYSEGKMDDFELPVTSIDHYNNGLASASKSNGRLEKRHNKSLMRYSPETPMMRSFSPRVAVDLNDDLGRDVVMFEEGYRSYRTPPSVAVMDPTRNRSHQSTSPMEYSAASTDVSAESLGEICHQCQRKDRERIISCLKCNQRAFCHNCLSARYSEISLEEVEKVCPACRGLCDCKSCLRSDNTIKVRIREIPVLDKLQYLYRLLSAVLPVIKQIHLEQCMEVELEKRLREVEIDLVRARLKADEQMCCNVCRIPVVDYYRHCPNCSYDLCLRCCQDLREESSVTISGTNQNVQDRKGAPKLKLNFSYKFPEWEANGDGSIPCPPKEYGGCGSHSLNLARIFKMNWVAKLVKNAEEIVSGCKLSDLLNPDMCDSRFCKFAEREESGDNYVYSPSLETIKTDGVAKFEQQWAEGRLVTVKMVLDDSSCSRWDPETIWRDIDELSDEKLREHDPFLKAINCLDGLEVDVRLGEFTRAYKDGKNQETGLPLLWKLKDWPSPSASEEFIFYQRPEFIRSFPFLEYIHPRLGLLNVAAKLPHYSLQNDSGPKIYVSCGTYQEISAGDSLTGIHYNMRDMVYLLVHTSEETTFERVRKTKPVPEEPDQKMSENESLLSPEQKLRDGELHDLSLGEASMEKNEPELALTVNPENLTENGDNMESSCTSSCAGGAQWDVFRRQDVPKLSGYLQRTFQKPDNIQTDFVSRPLYEGLFLNEHHKRQLRDEFGVEPWTFEQHRGEAIFIPAGCPFQITNLQSNIQVALDFLCPESVGESARLAEEIRCLPNDHEAKLQILEIGKISLYAASSAIKEVQKLVLDPK

SEQ ID NO: 29959 - protein, 897 aa, Arabidopsis thaliana
  misc_feature (1)..(897): Ceres Seq. ID no. 4936784
MNANEQTRSANGIGNGNGESIPGIPDDLRCKRSDGKQWRCTAMSMADKTVCEKHYIQAKKRAANSAFRANQKKAKRRSSLGETDTYSEGKMDDFELPVTSIDHYNNGLASASKSNGRLEKRHNKSLMRYSPETPMMRSFSPRVAVDLNDDLGRDVVMFEEGYRSYRTPPSVAVMDPTRNRSHQSTSPMEYSAASTDVSAESLGEICHQCQRKDRERIISCLKCNQRAFCHNCLSARYSEISLEEVEKVCPACRGLCDCKSCLRSDNTIKVRIREIPVLDKLQYLYRLLSAVLPVIKQIHLEQCMEVELEKRLREVEIDLVRARLKADEQMCCNVCRIPVVDYYRHCPNCSYDLCLRCCQDLREESSVTISGTNQNVQDRKGAPKLKLNFSYKFPEWEANGDGSIPCPPKEYGGCGSHSLNLARIFKMNWVAKLVKNAEEIVSGCKLSDLLNPDMCDSRFCKFAEREESGDNYVYSPSLETIKTDGVAKFEQQWAEGRLVTVKMVLDDSSCSRWDPETIWRDIDELSDEKLREHDPFLKAINCLDGLEVDVRLGEFTRAYKDGKNQETGLPLLWKLKDWPSPSASEEFIFYQRPEFIRSFPFLEYIHPRLGLLNVAAKLPHYSLQNDSGPKIYVSCGTYQEISAGDSLTGIHYNMRDMVYLLVHTSEETTFERVRKTKPVPEEPDQKMSENESLLSPEQKLRDGELHDLSLGEASMEKNEPELALTVNPENLTENGDNMESSCTSSCAGGAQWDVFRRQDVPKLSGYLQRTFQKPDNIQTDFVSRPLYEGLFLNEHHKRQLRDEFGVEPWTFEQHRGEAIFIPAGCPFQITNLQSNIQVALDFLCPESVGESARLAEEIRCLPNDHEAKLQILEIGKISLYAASSAIKEVQKLVLDPK

SEQ ID NO: 29960 - protein, 855 aa, Arabidopsis thaliana
  misc_feature (1)..(855): Ceres Seq. ID no. 4936785
MSMADKTVCEKHYIQAKKRAANSAFRANQKKAKRRSSLGETDTYSEGKMDDFELPVTSIDHYNNGLASASKSNGRLEKRHNKSLMRYSPETPMMRSFSPRVAVDLNDDLGRDVVMFEEGYRSYRTPPSVAVMDPTRNRSHQSTSPMEYSAASTDVSAESLGEICHQCQRKDRERIISCLKCNQRAFCHNCLSARYSEISLEEVEKVCPACRGLCDCKSCLRSDNTIKVRIREIPVLDKLQYLYRLLSAVLPVIKQIHLEQCMEVELEKRLREVEIDLVRARLKADEQMCCNVCRIPVVDYYRHCPNCSYDLCLRCCQDLREESSVTISGTNQNVQDRKGAPKLKLNFSYKFPEWEANGDGSIPCPPKEYGGCGSHSLNLARIFKMNWVAKLVKNAEEIVSGCKLSDLLNPDMCDSRFCKFAEREESGDNYVYSPSLETIKTDGVAKFEQQWAEGRLVTVKMVLDDSSCSRWDPETIWRDIDELSDEKLREHDPFLKAINCLDGLEVDVRLGEFTRAYKDGKNQETGLPLLWKLKDWPSPSASEEFIFYQRPEFIRSFPFLEYIHPRLGLLNVAAKLPHYSLQNDSGPKIYVSCGTYQEISAGDSLTGIHYNMRDMVYLLVHTSEETTFERVRKTKPVPEEPDQKMSENESLLSPEQKLRDGELHDLSLGEASMEKNEPELALTVNPENLTENGDNMESSCTSSCAGGAQWDVFRRQDVPKLSGYLQRTFQKPDNIQTDFVSRPLYEGLFLNEHHKRQLRDEFGVEPWTFEQHRGEAIFIPAGCPFQITNLQSNIQVALDFLCPESVGESARLAEEIRCLPNDHEAKLQILEIGKISLYAASSAIKEVQKLVLDPK

SEQ ID NO: 29961 - DNA, 1587 bp, Arabidopsis thaliana
  misc_feature (1)..(1587): Ceres Seq. ID no. 4937167
atggtttcgccgtcagagatgacggagacggcaccggcaattatgacaacggaaagcgaaaggatagagagttcgagggaactcgtggataatgaagaggaggagaaaatacgccgtcagaagaagctcgaagaagctctcgaagccaaatctcttcgccgcattatcagtgcttacctcaattacccagaggcttcggaagaggatttgaaaagatgggaaagatcatatcggaagctgtctcctgcacacaaggcattggtaccccattaccctatgaagtttcagagattaagaaggtgtatatcggcgaattcatatttcatatttaatatgcttcaggcttttgagcctcctatagacttgagtcaggaacttgatggttgtgaagactcaaatcttgactgcgctccacatgagagatacactctagatgaaaggcacgactcttcttgtcagccggccttgaccaatagttgtacatataaggaagaaagcaaacacattcgtgacccaataacaggagtgtctatcgaggagcttcagaggaaagaagctcatgatcattctcccaaggatgactctgcagacacaagaatcaacgataagacatgtgattgtcatgaaggccagttaaatcatgaccatggcagtgtatcattttcatcccatgattggttggattcatcgttacagacacatgttcctctggttgatgtagataagcgtgagacaaagatcattatgtgtcatgttagaacttattctcaatctctattagttccattaggcagtttggttcgttgtattataaggaatattgttcgagactgggcagcagagggtcagagagaacgagatcaatgctacaagcctatccttgaagagcttgattccttgtttcctgaccgtttgaaggagagcacccctcctgcctgtttagtccctggtgctggacttggacgtctggcccttgaaatttcttgtctaggtttcataagccaaggaaatgaattttcatactacatgatgatatgctcaagttttattctgaattatacacaagtccctggtgagtggacaatatacccctggatacacagcaactgcaattcgctctcggacaatgatcagctacgccctattgcgattcctgatattcatcctgcaagtgcaggaataacagaaggtttctctatgtgtggtggtgattttgttgaagtatacaatgaatcaagtcatgcaggaatgtgggatgcagttgttacttgctttttcatcgacactgctcataatgtcatcgagtacattcaaaccatatccaagatcctaaaagatggaggagtttggataaatttaggacctctgttgtatcattttgcggacacatatggccatgaaaatgaaatgtctatcgagctaagtttggaggatgtaaagagggttgcttcacattttgggtttgtgatcgagaaagaaagaacaattgaaacaacttacactacaaatccccgggctatgatgcagaaccgatactatactgccttctggacaatgaggaagaaatgtgctataacaacaacttaa

SEQ ID NO: 29962 - protein, 528 aa, Arabidopsis thaliana
  misc_feature (1)..(528): Ceres Seq. ID no. 4937168
MVSPSEMTETAPAIMTTESERIESSRELVDNEEEEKIRRQKKLEEALEAKSLRRIISAYLNYPEASEEDLKRWERSYRKLSPAHKALVPHYPMKFQRLRRCISANSYFIFNMLQAFEPPIDLSQELDGCEDSNLDCAPHERYTLDERHDSSCQPALTNSCTYKEESKHIRDPITGVSIEELQRKEAHDHSPKDDSADTRINDKTCDCHEGQLNHDHGSVSFSSHDWLDSSLQTHVPLVDVDKRETKIIMCHVRTYSQSLLVPLGSLVRCIIRNIVRDWAAEGQRERDQCYKPILEELDSLFPDRLKESTPPACLVPGAGLGRLALEISCLGFISQGNEFSYYMMICSSFILNYTQVPGEWTIYPWIHSNCNSLSDNDQLRPIAIPDIHPASAGITEGFSMCGGDFVEVYNESSHAGMWDAVVTCFFIDTAHNVIEYIQTISKILKDGGVWINLGPLLYHFADTYGHENEMSIELSLEDVKRVASHFGFVIEKERTIETTYTTNPRAMMQNRYYTAFWTMRKKCAITTT

SEQ ID NO: 29963 - protein, 522 aa, Arabidopsis thaliana
  misc_feature (1)..(522): Ceres Seq. ID no. 4937169
MTETAPAIMTTESERIESSRELVDNEEEEKIRRQKKLEEALEAKSLRRIISAYLNYPEASEEDLKRWERSYRKLSPAHKALVPHYPMKFQRLRRCISANSYFIFNMLQAFEPPIDLSQELDGCEDSNLDCAPHERYTLDERHDSSCQPALTNSCTYKEESKHIRDPITGVSIEELQRKEAHDHSPKDDSADTRINDKTCDCHEGQLNHDHGSVSFSSHDWLDSSLQTHVPLVDVDKRETKIIMCHVRTYSQSLLVPLGSLVRCIIRNIVRDWAAEGQRERDQCYKPILEELDSLFPDRLKESTPPACLVPGAGLGRLALEISCLGFISQGNEFSYYMMICSSFILNYTQVPGEWTIYPWIHSNCNSLSDNDQLRPIAIPDIHPASAGITEGFSMCGGDFVEVYNESSHAGMWDAVVTCFFIDTAHNVIEYIQTISKILKDGGVWINLGPLLYHFADTYGHENEMSIELSLEDVKRVASHFGFVIEKERTIETTYTTNPRAMMQNRYYTAFWTMRKKCAITTT

SEQ ID NO: 29964 - protein, 514 aa, Arabidopsis thaliana
  misc_feature (1)..(514): Ceres Seq. ID no. 4937170
MTTESERIESSRELVDNEEEEKIRRQKKLEEALEAKSLRRIISAYLNYPEASEEDLKRWERSYRKLSPAHKALVPHYPMKFQRLRRCISANSYFIFNMLQAFEPPIDLSQELDGCEDSNLDCAPHERYTLDERHDSSCQPALTNSCTYKEESKHIRDPITGVSIEELQRKEAHDHSPKDDSADTRINDKTCDCHEGQLNHDHGSVSFSSHDWLDSSLQTHVPLVDVDKRETKIIMCHVRTYSQSLLVPLGSLVRCIIRNIVRDWAAEGQRERDQCYKPILEELDSLFPDRLKESTPPACLVPGAGLGRLALEISCLGFISQGNEFSYYMMICSSFILNYTQVPGEWTIYPWIHSNCNSLSDNDQLRPIAIPDIHPASAGITEGFSMCGGDFVEVYNESSHAGMWDAVVTCFFIDTAHNVIEYIQTISKILKDGGVWINLGPLLYHFADTYGHENEMSIELSLEDVKRVASHFGFVIEKERTIETTYTTNPRAMMQNRYYTAFWTMRKKCAITTT

SEQ ID NO: 29965 - DNA, 513 bp, Arabidopsis thaliana
  misc_feature (1)..(513): Ceres Seq. ID no. 4937246
atgacaaatgctgttggtaaagccttgttctctaaagcaggggagctttgtgtgcctgttggcttcatgtgcatgaagggtctagatcttcacattgcagaaattgaggaactttgcacagaatttccaaagacaactgttttactagatcacgctggattctgcaaagtaccagaaagtggtgaggcaaagcttgcttattctcaactcatgaagctgtctagatttccacaggtatatgtgaaattcagtgctctattcaggatctcaagaaccggcttcccgtatcaggacctatcgcctctcctatctcaacttgtgtcccattttggggcaaatcgtgtcatgtggggcagtgacttcccatttgttgttcttgaatgtggatataaagaagctaaagaagctgtgactatcattgcaaaagaagcatccttgtcaagttctgagatggactggattctgggaaagactctgatgcagctcttccctggacaatgggttcttccttga

SEQ ID NO: 29966 - protein, 170 aa, Arabidopsis thaliana
  misc_feature (1)..(170): Ceres Seq. ID no. 4937247
MTNAVGKALFSKAGELCVPVGFMCMKGLDLHIAEIEELCTEFPKTTVLLDHAGFCKVPESGEAKLAYSQLMKLSRFPQVYVKFSALFRISRTGFPYQDLSPLLSQLVSHFGANRVMWGSDFPFVVLECGYKEAKEAVTIIAKEASLSSSEMDWILGKTLMQLFPGQWVLP

SEQ ID NO: 29967 - protein, 148 aa, Arabidopsis thaliana
  misc_feature (1)..(148): Ceres Seq. ID no. 4937248
MCMKGLDLHIAEIEELCTEFPKTTVLLDHAGFCKVPESGEAKLAYSQLMKLSRFPQVYVKFSALFRISRTGFPYQDLSPLLSQLVSHFGANRVMWGSDFPFVVLECGYKEAKEAVTIIAKEASLSSSEMDWILGKTLMQLFPGQWVLP

SEQ ID NO: 29968 - protein, 146 aa, Arabidopsis thaliana
  misc_feature (1)..(146): Ceres Seq. ID no. 4937249
MKGLDLHIAEIEELCTEFPKTTVLLDHAGFCKVPESGEAKLAYSQLMKLSRFPQVYVKFSALFRISRTGFPYQDLSPLLSQLVSHFGANRVMWGSDFPFVVLECGYKEAKEAVTIIAKEASLSSSEMDWILGKTLMQLFPGQWVLP

SEQ ID NO: 29969 - DNA, 1413 bp, Arabidopsis thaliana
  misc_feature (1)..(1413): Ceres Seq. ID no. 4937361
atggccactgaaaagaatactctggattctgaggctacttttgcgcaaacagtaccagctcttgattctacaacaaagaaacaggatgagtctcctccaaagagtaccccgtctcttactgtcactgcttgtgctaatggatctgatgtagtatcttctcagccaaatgacaatggccaagcacatactacagattttcgaaagggaaatcaccgtgacaaaaacagctcagatgtctatgctgattcgactttgcgtggagatcgaccaaaaggaagcaattgtttgtctcaaacttctttttcggctcctaagcctcttggaaatttcaatggtgctggtagacttcctcccaatacacaagcacatgcattcagaccaccatttaagggaaaggaagccgcaggacagttcttaacattctccaatcagaagacaagctgtgtcccatattctggttacattaatggaaactcaaataatggtttctgggatcaaagggatcataataagaaacctgagagaaatggagagtctgactacttggttgaattgaaatgtggtccgagagccaatgcaaagactcgtcctccttccgagtcgtcaccactgaagcaaaacaattcgtttgccttggctcttcgtagagagatgtataacctccctgactttcagactgactatgaagatgccaagtttttcgtaatcaagtcgtacagcgaagatgatgttcacaagagtatcaaatattctgtgtggtcaagcactatcaacggaaacaagaaactcgatgcagctttccgtgatgctgaaacaaaaacactcgaggatggcaagaaacgtccaatatttctcttcttctcggtgaatgcgagtagacaatttgtgggattagctgagatggttggatatgtggacttcaacaaggatttggatttctggcaggttgataagtggagtggctttttccctgttgaatggcatgtggttaaagatattcctaactgggaactacgccatatcatcctcgacaacaatgaggacaagccagttactcatacgagagatactcacgagatcaaactcaaagaaggtctccaaatgctttcgatattcaagaagtactctgcggtaacatttttgttagacgacatggacttctacgaagagcgagagaagtctcttcgagcgaagaaggagcataaaccagccactcttcgcatggatctcttcaaagagaaagactatgactatgagatggaaggcaacaggagaatgaatcaccaagaaagaggatataattggaacagaagtagcaatagcaaaacacaagcatctcttgtcaatcaaaccaagtatctttccataagaggctactctggttacaagaagaacactggcaattcaacatga

SEQ ID NO: 29970 - protein, 470 aa, Arabidopsis thaliana
  misc_feature (1)..(470): Ceres Seq. ID no. 4937362
MATEKNTLDSEATFAQTVPALDSTTKKQDESPPKSTPSLTVTACANGSDVVSSQPNDNGQAHTTDFRKGNHRDKNSSDVYADSTLRGDRPKGSNCLSQTSFSAPKPLGNFNGAGRLPPNTQAHAFRPPFKGKEAAGQFLTFSNQKTSCVPYSGYINGNSNNGFWDQRDHNKKPERNGESDYLVELKCGPRANAKTRPPSESSPLKQNNSFALALRREMYNLPDFQTDYEDAKFFVIKSYSEDDVHKSIKYSVWSSTINGNKKLDAAFRDAETKTLEDGKKRPIFLFFSVNASRQFVGLAEMVGYVDFNKDLDFWQVDKWSGFFPVEWHVVKDIPNWELRHIILDNNEDKPVTHTRDTHEIKLKEGLQMLSIFKKYSAVTFLLDDMDFYEEREKSLRAKKEHKPATLRMDLFKEKDYDYEMEGNRRMNHQERGYNWNRSSNSKTQASLVNQTKYLSIRGYSGYKKNTGNST

SEQ ID NO: 29971 - protein, 253 aa, Arabidopsis thaliana
  misc_feature (1)..(253): Ceres Seq. ID no. 4937363
MYNLPDFQTDYEDAKFFVIKSYSEDDVHKSIKYSVWSSTINGNKKLDAAFRDAETKTLEDGKKRPIFLFFSVNASRQFVGLAEMVGYVDFNKDLDFWQVDKWSGFFPVEWHVVKDIPNWELRHIILDNNEDKPVTHTRDTHEIKLKEGLQMLSIFKKYSAVTFLLDDMDFYEEREKSLRAKKEHKPATLRMDLFKEKDYDYEMEGNRRMNHQERGYNWNRSSNSKTQASLVNQTKYLSIRGYSGYKKNTGNST

SEQ ID NO: 29972 - DNA, 1086 bp, Arabidopsis thaliana
  misc_feature (1)..(1086): Ceres Seq. ID no. 4937451
atgaaaggagctgagacgacggagcaaggtaattgctctgcctttgcctccagcggtaaccttcctcactgctgtctcgagcgaccaaccatagtcgaccttcttcccggtgcttctctcaacgttcaagttgccaattgttgccgtggaggcgtcttgacttccatgtctcaggaccacgccaatcacgtctctgcttttcacatgacagttggaagctctcctgatggccctgaggagttcaatatgccttctaatttcgatataggggtcccgggttatagctgcgacaatgctacatccgtgtccccgactaagtttagtactgataagggccgtcgcaaaacacaagctctagcaacatgggaggcagtgtgtgtatactcgcagtttcggtcatcaccatcgccaaaatgctgcgtttcactctctgccttctactaccaaaacattgttccttgtcctacctgtagctgcggctgctcgagttcccattgtgtcaaggatggagagttgccgccatatcttgaacagaaacatgatccagatgaggaagtatcgcctgtcgtgaagtgttcggatcatatgtgtcccatccgcatccactggcatgtgaaagtgaactatagagagtattggagggttaagatcacagcaacaaatttcaacacaatgaagaattacactaattggaacttagtggtgcttcatccaaacttgaaaagcgtccaacaagtctttagctttaactacaaatctttgacaccatatcaaaacagcatcaatgacacagggatgttttggggagtccagttttataatgatgttttgcttcaagaaggaaagattgggaatgttcaaacagagttattgctgaagaaggatatgggaaatttcactttcagagaaggttgggctttcccaaggagaatcttgttcaatggtgatgaatgtgttatgccttctccagatgactttccaaggctgccaaaatctgctcattcctcttcgtcttcctctgctgttattagctctgtttcagtcgttttctgttttctccttcatcatcttcttctactagtttga

SEQ ID NO: 29973 - protein, 361 aa, Arabidopsis thaliana
  misc_feature (1)..(361): Ceres Seq. ID no. 4937452
MKGAETTEQGNCSAFASSGNLPHCCLERPTIVDLLPGASLNVQVANCCRGGVLTSMSQDHANHVSAFHMTVGSSPDGPEEFNMPSNFDIGVPGYSCDNATSVSPTKFSTDKGRRKTQALATWEAVCVYSQFRSSPSPKCCVSLSAFYYQNIVPCPTCSCGCSSSHCVKDGELPPYLEQKHDPDEEVSPVVKCSDHMCPIRIHWHVKVNYREYWRVKITATNFNTMKNYTNWNLVVLHPNLKSVQQVFSFNYKSLTPYQNSINDTGMFWGVQFYNDVLLQEGKIGNVQTELLLKKDMGNFTFREGWAFPRRILFNGDECVMPSPDDFPRLPKSAHSSSSSSAVISSVSVVFCFLLHHLLLLV

SEQ ID NO: 29974 - protein, 306 aa, Arabidopsis thaliana
  misc_feature (1)..(306): Ceres Seq. ID no. 4937453
MSQDHANHVSAFHMTVGSSPDGPEEFNMPSNFDIGVPGYSCDNATSVSPTKFSTDKGRRKTQALATWEAVCVYSQFRSSPSPKCCVSLSAFYYQNIVPCPTCSCGCSSSHCVKDGELPPYLEQKHDPDEEVSPVVKCSDHMCPIRIHWHVKVNYREYWRVKITATNFNTMKNYTNWNLVVLHPNLKSVQQVFSFNYKSLTPYQNSINDTGMFWGVQFYNDVLLQEGKIGNVQTELLLKKDMGNFTFREGWAFPRRILFNGDECVMPSPDDFPRLPKSAHSSSSSSAVISSVSVVFCFLLHHLLLLV

SEQ ID NO: 29975 - protein, 293 aa, Arabidopsis thaliana
  misc_feature (1)..(293): Ceres Seq. ID no. 4937454
MTVGSSPDGPEEFNMPSNFDIGVPGYSCDNATSVSPTKFSTDKGRRKTQALATWEAVCVYSQFRSSPSPKCCVSLSAFYYQNIVPCPTCSCGCSSSHCVKDGELPPYLEQKHDPDEEVSPVVKCSDHMCPIRIHWHVKVNYREYWRVKITATNFNTMKNYTNWNLVVLHPNLKSVQQVFSFNYKSLTPYQNSINDTGMFWGVQFYNDVLLQEGKIGNVQTELLLKKDMGNFTFREGWAFPRRILFNGDECVMPSPDDFPRLPKSAHSSSSSSAVISSVSVVFCFLLHHLLLLV

SEQ ID NO: 29976 - DNA, 927 bp, Arabidopsis thaliana
  misc_feature (1)..(927): Ceres Seq. ID no. 4937922
aaataacgaattcgattttaaccggaaactgaaccggaagctgagtctcgtgcctgccttctctaggcttctttgtttccgatcagaatctcgagctcaactgtcaaaactagccgaccactaagtcgttgtcctaactttctctctgttcctcatcgaacattattgggaggagagagagagagagagaagaccaagaaacaacgaggatagatccgaggaaattgtcggaaccaaaaggaggaagatgggagatatctggacatggcttatttccttcttcttcctcatcgctcttgtcggaatcatcgtctatcagcttgtttgcttagcggatctcgagtttgattacatcaacccttacgactctgcgtcgagaataaactcagtggttttaccggagttcattgttcaaggagttctatgcgtattctacctcctaacaggacactggttcatgacactcttatgtctcccctatctatactacaacttccatctttactcgaagcgacaacacttagtagatgtcaccgagatcttcaatttgcttaactgggaaaagaagaaacggctgttcaagcttgcttacattgtccttaacctctttctcactatcttctggatgatttattcggcgctggatgattacgaggactgactaatgaagaagacatggtccatcttcttcggtttattgacactacgcttaaagatacagcgacatgcttgtggacatgaaaaaaagcaaggaaaagtgtttgctttgtgatgtttgtaagattagtggcaggaagatttgtgtatttatttctttcttagaaacatgttcagattaactgttttttttatgtcttgatcattatttgtacaagcaatcaagctcgtaaactactggttacagtaacaatgaaactgaataatttc

SEQ ID NO: 29977 - protein, 137 aa, Arabidopsis thaliana
  misc_feature (1)..(137): Ceres Seq. ID no. 4937923
MGDIWTWLISFFFLIALVGIIVYQLVCLADLEFDYINPYDSASRINSVVLPEFIVQGVLCVFYLLTGHWFMTLLCLPYLYYNFHLYSKRQHLVDVTEIFNLLNWEKKKRLFKLAYIVLNLFLTIFWMIYSALDDYED

SEQ ID NO: 29978 - DNA, 1256 bp, Arabidopsis thaliana
  misc_feature (1)..(1256): Ceres Seq. ID no. 4937924
agattctttcttctaaccccattcgctctctccgatcaacacaacatttgatctaacggtttaattttctcgagaaaccgaaggaaaacaaacagagcaatggcgtcgatgggacggtgcctgagctgaaattgagagtcgaagaagattccgataatggtgattatctgaaattgagaggaggatcaaatgaagaagatgaaggatcatcggcggaatcatcgagatgtccgataggatcggttacttctgtctggttctgggtgaaattgatctccttggtcgtttgtttgggttcattggcctttgttatcatcaaatgggttggtccctttttgattgaaaaggagctgattccatttataaattgggtgagaaacacattcagcataccggttctcggtcttctactatttgcctcagtggcattgtttccaagcattcttcttccttcttccccttccatgtggatggctggtcttacatttggttatggaaaagggtttcttctgattttatcagctgcttccatcggtgttactcttcctttcttaattggacatctcttcctccacaagatgcaagaatggttgaagaaataccctaaaaaagcagccatacttagagctgctggtgaaggaacctggtttcatcagtttcaagcagtcacactaatccgtgtctctccatttccttacatcatttacaactactgcgctttagcgactggagttcattatggtccttatatcttaggctctcttgttggaatggttcctgagatctttgtctcaatttacacgggtataatgctaaggacactagcagttgcatcagacacgagacacacactttcggttgtggagatagtcgtgaatgttcttggcttctgtgtaactgcgagcgcgactatagtctgcacaatctatgcgaagaagaagctaagtgcgatgcaatcagaggacgtagagacattacaaaatccaatactttattaactcttttcaccatgaccacaacataccatcatctaacacgatcttgaaattgataatatataatgtttttttttttttttgttattcttattcatttgaaaatgaatatttatgtctttttctcttgtatatatgatatgtatcaattgaattttgaaaatttccaatgtatatttattagatcatctaagtctttttctttccttgcatataatccaccttatgtatcatggaacaatgtcttgttgggttttgttc

SEQ ID NO: 29979 - protein, 177 aa, Arabidopsis thaliana
  misc_feature (1)..(177): Ceres Seq. ID no. 4937925
MWMAGLTFGYGKGFLLILSAASIGVTLPFLIGHLFLHKMQEWLKKYPKKAAILRAAGEGTWFHQFQAVTLIRVSPFPYIIYNYCALATGVHYGPYILGSLVGMVPEIFVSIYTGIMLRTLAVASDTRHTLSVVEIVVNVLGFCVTASATIVCTIYAKKKLSAMQSEDVETLQNPILY

SEQ ID NO: 29980 - protein, 175 aa, Arabidopsis thaliana
  misc_feature (1)..(175): Ceres Seq. ID no. 4937926
MAGLTFGYGKGFLLILSAASIGVTLPFLIGHLFLHKMQEWLKKYPKKAAILRAAGEGTWFHQFQAVTLIRVSPFPYIIYNYCALATGVHYGPYILGSLVGMVPEIFVSIYTGIMLRTLAVASDTRHTLSVVEIVVNVLGFCVTASATIVCTIYAKKKLSAMQSEDVETLQNPILY

SEQ ID NO: 29981 - protein, 139 aa, Arabidopsis thaliana
  misc_feature (1)..(139): Ceres Seq. ID no. 4937927
MQEWLKKYPKKAAILRAAGEGTWFHQFQAVTLIRVSPFPYIIYNYCALATGVHYGPYILGSLVGMVPEIFVSIYTGIMLRTLAVASDTRHTLSVVEIVVNVLGFCVTASATIVCTIYAKKKLSAMQSEDVETLQNPILY

SEQ ID NO: 29982 - DNA, 861 bp, Arabidopsis thaliana
  misc_feature (1)..(861): Ceres Seq. ID no. 4937932
attgtcaatttccctttattttctcgacggaatcataaataaaaaccctaaacctaaagtcacaaattcattcttcatctgttattcacgatttgtgttgtcttttcttttgcagtaagatttcgactttggaattgggagatctttccattatgggttctgagcaaaacgacagcacaagcttctctccttcagagccaaagctctgcgtcaaaggatgtggcttcttcggatctccatcgaacatgaacctctgctctaaatgctacagagacatccgagccacggaggaacaaaccgcttccgctaaagccgccgtcgagaaatctctaaaccctaataaacccaaaactcaaccacaacagagccaagaaatcactcaaggcgtcctcggatctggatcgtcttcctcatcaacgagagggggtgattcggctgctgctccgttggatccaccgaaatcgacggctacgagatgcttgagctgtaacaagaaagttggcgtgacgggtttcaagtgtaggtgtggaagcactttctgtggaactcatagatatccagagagtcacgagtgccaattcgatttcaaaggagttgcgagagaagctattgctaaagctaatcctgtggtgaaggctgataaggttgataggatatgaattggtgaagaaactgttgtgttctcttttgtttttttattttcaagtctcgtgatgttggtggtttggctctctgttttctgctcttattatggttttatttgcttttagggtttcttaggaaaggccttagattctgctattatgtggtttcatgttttgcaacattggatttgttgttctgtaataaagtgttggttat

SEQ ID NO: 29983 - protein, 168 aa, Arabidopsis thaliana
  misc_feature (1)..(168): Ceres Seq. ID no. 4937933
MGSEQNDSTSFSPSEPKLCVKGCGFFGSPSNMNLCSKCYRDIRATEEQTASAKAAVEKSLNPNKPKTQPQQSQEITQGVLGSGSSSSSTRGGDSAAAPLDPPKSTATRCLSCNKKVGVTGFKCRCGSTFCGTHRYPESHECQFDFKGVAREAIAKANPVVKADKVDRI

SEQ ID NO: 29984 - protein, 137 aa, Arabidopsis thaliana
  misc_feature (1)..(137): Ceres Seq. ID no. 4937934
MNLCSKCYRDIRATEEQTASAKAAVEKSLNPNKPKTQPQQSQEITQGVLGSGSSSSSTRGGDSAAAPLDPPKSTATRCLSCNKKVGVTGFKCRCGSTFCGTHRYPESHECQFDFKGVAREAIAKANPVVKADKVDRI

SEQ ID NO: 29985 - DNA, 1041 bp, Arabidopsis thaliana
  misc_feature (1)..(1041): Ceres Seq. ID no. 4938370
atggccagtttcaaattcttctttgcagccataattttggttctgtttcatccggcagcaataacttttgttgcttcgtatggctcattacagcttggcgatcaatgctcatcggacgaagactgcaatgttggacttggttgttttaaatgcggtatagatgttgcaagatgcgttagatccaatatcacagatcagttctccattgtgaacaattcgatgccgtttaataaatatgcatttttgacgacccacaattcatatgccattgaagggaaagcgcttcatgtggcgacccaagaagatactatagttcaacaactcaacagtggtgttcgagcattgatgttggatacgtacgattacgaaggagacgtatggttttgccattccttcgacgaacaatgctttgagttcaccaaatttaatcgggcgatagacacattcaaggagatattcgcgttcttgacagcgaatccatcagagatcgtgacattgatcttggaggattacgtcaaatcgcaaaacgggttaaccaaagtatttaccgattccggtttgaagaaattttggtttccggttcaaaatatgcctataggtggccaagattggccgttggttaaggatatggtcgccaataaccaccggttaatcgttttcacttcagctaaatctaagcaagaaaccgaaggaatagcttaccagtggaattacatggtggaaaatcaatatggagacgatggagttaaaccagatgaatgtagcaatagagcagattctgcactgttaaccgataaaacgaaagctttggtttcggtaaaccatttcaagacagttccggttaagatattgacttgtgaggagaactctgagcaacttctcgatatgattaagacatgttacgtagccgcagggaaccgatgggccaattttgtcgccgtcaacttttacaagaggagtaatggaggaggaacgtttcaagcaattgataaactaaacggagagcttctatgtggacgtgatgatgtgcatgcttgttaa

SEQ ID NO: 29986 - protein, 346 aa, Arabidopsis thaliana
  misc_feature (1)..(346): Ceres Seq. ID no. 4938371
MASFKFFFAAIILVLFHPAAITFVASYGSLQLGDQCSSDEDCNVGLGCFKCGIDVARCVRSNITDQFSIVNNSMPFNKYAFLTTHNSYAIEGKALHVATQEDTIVQQLNSGVRALMLDTYDYEGDVWFCHSFDEQCFEFTKFNRAIDTFKEIFAFLTANPSEIVTLILEDYVKSQNGLTKVFTDSGLKKFWFPVQNMPIGGQDWPLVKDMVANNHRLIVFTSAKSKQETEGIAYQWNYMVENQYGDDGVKPDECSNRADSALLTDKTKALVSVNHFKTVPVKILTCEENSEQLLDMIKTCYVAAGNRWANFVAVNFYKRSNGGGTFQAIDKLNGELLCGRDDVHAC

SEQ ID NO: 29987 - protein, 273 aa, Arabidopsis thaliana
  misc_feature (1)..(273): Ceres Seq. ID no. 4938372
MPFNKYAFLTTHNSYAIEGKALHVATQEDTIVQQLNSGVRALMLDTYDYEGDVWFCHSFDEQCFEFTKFNRAIDTFKEIFAFLTANPSEIVTLILEDYVKSQNGLTKVFTDSGLKKFWFPVQNMPIGGQDWPLVKDMVANNHRLIVFTSAKSKQETEGIAYQWNYMVENQYGDDGVKPDECSNRADSALLTDKTKALVSVNHFKTVPVKILTCEENSEQLLDMIKTCYVAAGNRWANFVAVNFYKRSNGGGTFQAIDKLNGELLCGRDDVHAC

SEQ ID NO: 29988 - protein, 231 aa, Arabidopsis thaliana
  misc_feature (1)..(231): Ceres Seq. ID no. 4938373
MLDTYDYEGDVWFCHSFDEQCFEFTKFNRAIDTFKEIFAFLTANPSEIVTLILEDYVKSQNGLTKVFTDSGLKKFWFPVQNMPIGGQDWPLVKDMVANNHRLIVFTSAKSKQETEGIAYQWNYMVENQYGDDGVKPDECSNRADSALLTDKTKALVSVNHFKTVPVKILTCEENSEQLLDMIKTCYVAAGNRWANFVAVNFYKRSNGGGTFQAIDKLNGELLCGRDDVHAC

SEQ ID NO: 29989 - DNA, 903 bp, Arabidopsis thaliana
  misc_feature (1)..(903): Ceres Seq. ID no. 4938449
atgcagcttggcgatcaatgctcatcggacgaagactgcaatgttggacttggttgttttaaatgcggtatagatgttgcaagatgcgttagatccaatatcacagatcagttctccattgtgaacaattcgatgccgtttaataaatatgcatttttgacgacccacaattcatatgccattgaagggaaagcgcttcatgtggcgacccaagaagatactatagttcaacaactcaacagtggtgttcgagcattgatgttggatacgtacgattacgaaggagacaatcgggcgatagacacattcaaggagatattcgcgttcttgacagcgaatccatcagagatcgtgacattgatcttggaggattacgtcaaatcgcaaaacgggttaaccaaagtatttaccgattccggtttgaagaaattttggtttccggttcaaaatatgcctataggtggccaagattggccgttggttaaggatatggtcgccaataaccaccggttaatcgttttcacttcagctaaatctaagcaagaaaccgaaggaatagcttaccagtggaattacatggtggaaaatcaatatggagacgatggagttaaaccagatgaatgtagcaatagagcagattctgcactgttaaccgataaaacgaaagctttggtttcggtaaaccatttcaagacagttccggttaagatattgacttgtgaggagaactctgagcaacttctcgatatgattaagacatgttacgtagccgcagggaaccgatgggccaattttgtcgccgtcaacttttacaagaggagtaatggaggaggaacgtttcaagcaattgataaactaaacggagagcttctatgtggacgtgatgatgtgcatgcttgttaa

SEQ ID NO: 29990 - protein, 300 aa, Arabidopsis thaliana
  misc_feature (1)..(300): Ceres Seq. ID no. 4938450
MQLGDQCSSDEDCNVGLGCFKCGIDVARCVRSNITDQFSIVNNSMPFNKYAFLTTHNSYAIEGKALHVATQEDTIVQQLNSGVRALMLDTYDYEGDNRAIDTFKEIFAFLTANPSEIVTLILEDYVKSQNGLTKVFTDSGLKKFWFPVQNMPIGGQDWPLVKDMVANNHRLIVFTSAKSKQETEGIAYQWNYMVENQYGDDGVKPDECSNRADSALLTDKTKALVSVNHFKTVPVKILTCEENSEQLLDMIKTCYVAAGNRWANFVAVNFYKRSNGGGTFQAIDKLNGELLCGRDDVHAC

SEQ ID NO: 29991 - protein, 256 aa, Arabidopsis thaliana
  misc_feature (1)..(256): Ceres Seq. ID no. 4938451
MPFNKYAFLTTHNSYAIEGKALHVATQEDTIVQQLNSGVRALMLDTYDYEGDNRAIDTFKEIFAFLTANPSEIVTLILEDYVKSQNGLTKVFTDSGLKKFWFPVQNMPIGGQDWPLVKDMVANNHRLIVFTSAKSKQETEGIAYQWNYMVENQYGDDGVKPDECSNRADSALLTDKTKALVSVNHFKTVPVKILTCEENSEQLLDMIKTCYVAAGNRWANFVAVNFYKRSNGGGTFQAIDKLNGELLCGRDDVHAC

SEQ ID NO: 29992 - protein, 214 aa, Arabidopsis thaliana
  misc_feature (1)..(214): Ceres Seq. ID no. 4938452
MLDTYDYEGDNRAIDTFKEIFAFLTANPSEIVTLILEDYVKSQNGLTKVFTDSGLKKFWFPVQNMPIGGQDWPLVKDMVANNHRLIVFTSAKSKQETEGIAYQWNYMVENQYGDDGVKPDECSNRADSALLTDKTKALVSVNHFKTVPVKILTCEENSEQLLDMIKTCYVAAGNRWANFVAVNFYKRSNGGGTFQAIDKLNGELLCGRDDVHAC

SEQ ID NO: 29993 - DNA, 1257 bp, Arabidopsis thaliana
  misc_feature (1)..(1257): Ceres Seq. ID no. 4938538
atttcactttccgattttataaaattgattcttctcttcttcttaaacccatgaagagttcatgatttcttaagctcgcagcataatcgatggcgaatttgagtttgagcttgtatctaatcctccggatttacgctcttttgttgctgttcaatgtctccttcgctaaaacacttaaacgagacatgaaagctttgaatgagataaagaaattggtgggatggagattggtatactcttgggttggagatgatccttgtggcgatggagttttgcctccgtggtctggagttacttgctctaaagttggcgattatcgtgtcgtcgtcaagctagaagtgtattcaatgtcgatagttgggaatttcccaaaggctataacgaagctcttagatctcactgttttggatatgcataataacaaattaacaggtcctattcctccagaaattgggcggcttaagcggcttatcacactgaatttgaggtggaacaaacttcaacaggcactgcctcctgaaattggtggattgaagagtctaacttatctgtacctgagttttaacaatttcaaaggagaaatccccaaagaacttgcaaatctccatgagctccagtacttacatattcaggagaatcattttactgggcgaattccagcagagctgggaacattacaaaaacttcgccacttggatgctggcaacaataacttagtggggagtataagcgatctttttcgcattgaaggatgctttccagctcttagaaacctgtttttaaacaataattacttgactggaggactcccaaacaagcttgcaaatctaacaaacctggagatcttgtacttatctttcaacaaaatgactggagcaatacccgctgcacttgccagtataccaagactaactaacttgcacttggaccacaatctattcaatggaagtatacctgaagccttctacaagcatccaaacctaaaagatatgtacatagaagggaatgctttcaaatcagacgtgaaggcgattggtgcacataaggtcctcgaactttctgacacagacttccttgtttagttatgtatagcacaactttgtttcatttacagataggaatttggcagtgttaactggttatttaagattcattttctctgttaaagcgagattgtagttgatgtgttttctgaatgtaaaagattccttatccatgtatgaaaattgaatataaaaggaatctggtttgttcttt

SEQ ID NO: 29994 - protein, 330 aa, Arabidopsis thaliana
  misc_feature (1)..(330): Ceres Seq. ID no. 4938539
MANLSLSLYLILRIYALLLLFNVSFAKTLKRDMKALNEIKKLVGWRLVYSWVGDDPCGDGVLPPWSGVTCSKVGDYRVVVKLEVYSMSIVGNFPKAITKLLDLTVLDMHNNKLTGPIPPEIGRLKRLITLNLRWNKLQQALPPEIGGLKSLTYLYLSFNNFKGEIPKELANLHELQYLHIQENHFTGRIPAELGTLQKLRHLDAGNNNLVGSISDLFRIEGCFPALRNLFLNNNYLTGGLPNKLANLTNLEILYLSFNKMTGAIPAALASIPRLTNLHLDHNLFNGSIPEAFYKHPNLKDMYIEGNAFKSDVKAIGAHKVLELSDTDFLV

SEQ ID NO: 29995 - protein, 298 aa, Arabidopsis thaliana
  misc_feature (1)..(298): Ceres Seq. ID no. 4938540
MKALNEIKKLVGWRLVYSWVGDDPCGDGVLPPWSGVTCSKVGDYRVVVKLEVYSMSIVGNFPKAITKLLDLTVLDMHNNKLTGPIPPEIGRLKRLITLNLRWNKLQQALPPEIGGLKSLTYLYLSFNNFKGEIPKELANLHELQYLHIQENHFTGRIPAELGTLQKLRHLDAGNNNLVGSISDLFRIEGCFPALRNLFLNNNYLTGGLPNKLANLTNLEILYLSFNKMTGAIPAALASIPRLTNLHLDHNLFNGSIPEAFYKHPNLKDMYIEGNAFKSDVKAIGAHKVLELSDTDFLV

SEQ ID NO: 29996 - protein, 244 aa, Arabidopsis thaliana
  misc_feature (1)..(244): Ceres Seq. ID no. 4938541
MSIVGNFPKAITKLLDLTVLDMHNNKLTGPIPPEIGRLKRLITLNLRWNKLQQALPPEIGGLKSLTYLYLSFNNFKGEIPKELANLHELQYLHIQENHFTGRIPAELGTLQKLRHLDAGNNNLVGSISDLFRIEGCFPALRNLFLNNNYLTGGLPNKLANLTNLEILYLSFNKMTGAIPAALASIPRLTNLHLDHNLFNGSIPEAFYKHPNLKDMYIEGNAFKSDVKAIGAHKVLELSDTDFLV

SEQ ID NO: 29997 - DNA, 675 bp, Arabidopsis thaliana
  misc_feature (1)..(675): Ceres Seq. ID no. 4938762
atgaatctctcaggggatcgaacaactctaaagcgtcactcgtcgctttcaacacttgtggctcatttctttggcatcttagctgttgttctgatgctaatttggcttctccactaccgtgaaggcatcgagtatggctccgacaacccccttaaggttttaaatgtgcacccatttctcatgtactgtggatttctcttcctcgtgggccaagcaatgatgacttacaaaacggcgtacgcgtcgcaccaagttcagaaaatggttcacggtgggcttcacttaataggcttagttctaggtattgtcggaatctgcgccgcctttagattccacgacaaagtaaacctaaaagacatggtctctcttcactcctggatcggtctcaccactttcatcctcctcggcgtccagtggctattcggtgcgttcacattcttagcgccgcaatcatcgtcgggaacaaggacgaggatgatgccgtggcacgtcttaggtggtcgggctctactttatatgggtattgtcgcagcactgaccggactcatgcagagagctacgatgcttggtcagagcacaaacgctgagtcacgtctaattaacttcctcgggttagccattctactctttggcgtttccgtcgacttctccgtcgcccttggccgttacaactga

SEQ ID NO: 29998 - protein, 224 aa, Arabidopsis thaliana
  misc_feature (1)..(224): Ceres Seq. ID no. 4938763
MNLSGDRTTLKRHSSLSTLVAHFFGILAVVLMLIWLLHYREGIEYGSDNPLKVLNVHPFLMYCGFLFLVGQAMMTYKTAYASHQVQKMVHGGLHLIGLVLGIVGICAAFRFHDKVNLKDMVSLHSWIGLTTFILLGVQWLFGAFTFLAPQSSSGTRTRMMPWHVLGGRALLYMGIVAALTGLMQRATMLGQSTNAESRLINFLGLAILLFGVSVDFSVALGRYN

SEQ ID NO: 29999 - protein, 193 aa, Arabidopsis thaliana
  misc_feature (1)..(193): Ceres Seq. ID no. 4938764
MLIWLLHYREGIEYGSDNPLKVLNVHPFLMYCGFLFLVGQAMMTYKTAYASHQVQKMVHGGLHLIGLVLGIVGICAAFRFHDKVNLKDMVSLHSWIGLTTFILLGVQWLFGAFTFLAPQSSSGTRTRMMPWHVLGGRALLYMGIVAALTGLMQRATMLGQSTNAESRLINFLGLAILLFGVSVDFSVALGRYN

SEQ ID NO: 30000 - protein, 164 aa, Arabidopsis thaliana
  misc_feature (1)..(164): Ceres Seq. ID no. 4938765
MYCGFLFLVGQAMMTYKTAYASHQVQKMVHGGLHLIGLVLGIVGICAAFRFHDKVNLKDMVSLHSWIGLTTFILLGVQWLFGAFTFLAPQSSSGTRTRMMPWHVLGGRALLYMGIVAALTGLMQRATMLGQSTNAESRLINFLGLAILLFGVSVDFSVALGRYN

SEQ ID NO: 30001 - DNA, 1399 bp, Arabidopsis thaliana
  misc_feature (1)..(1399): Ceres Seq. ID no. 4939096
attatttacaggagtgcgataatattctttgaagctttaacattgttgcgaagaccagactctcagactcagactcgggagtgatttcacttcaactttctgctcagatggcagtccactactggacagccctgtttctattgttgccatgccttttctgtatttcaaatgctagtgctggcgatgctgatccagattacaggacatgtgtttcagaatgtgagataagcggttgtgttggacaactttgctttcctcagtgcaattcttcatccgatggtggtccatggtacatccaagaacctttgtatttacaatggaaaaaatggggttgtcaaggtgattgccgttatcaatgtatggttaatagagagactgaacgggaaactctcggtcaagccccagtcaagtaccatggtaaatggcccttcaagcgtgtacttgggattcaggagcctgcttctgttgctttctctgtactcaacctagcaatgcatttccatggttggctttcctttttcatcatgatctactataagttgcctctgaaacaagataggacagcgtactatgaatacgttggtttgtggcatatctacggtctcctgtccatgaactcttggttctggagtgctgttttccacagccgggatgttgaccttacagagaggttggactactcatccgcagtagcgattctcggattctcactcatcttagccattttacgaacatttgatattcgggttgaggctgcaagggtcatggtatccgctccaatactagcttttgtaaccacccacatactctacataaacttctacaaactcgactatggctggaacatgattgtgtgtgtggcaatgggagtctcacagcttttcctatgggcaagatgggccgctgtctcaagccacccttctaattggaaactttgggtggttgtgatagctggaggattagccatgcttctagagatatatgattttcctccatatgaaggctacttcgatgctcactcgatctggcacgctgccacaattcccttaaccattctctggtggagcttcattagagacgatgctgagttcagaacttccagcctcctcaagaaaactaagacgaaggcaaagtgagtctctttgctaagttttacaaggatttttatccgaccatacgagtatgcagacacgagggaaaaacaaaagatggaaatggatttaaacatcacgaagaaggcagagtcttttgtttaaagctagctggtttatggattcacaggtttcttcagttttttttattttatattgttacattaactgttgaatttgctttgagcctttcagtgtttttctttggccttacttttggttaagaaagattttgatatcatttactc

SEQ ID NO: 30002 - protein, 342 aa, Arabidopsis thaliana
  misc_feature (1)..(342): Ceres Seq. ID no. 4939097
MAVHYWTALFLLLPCLFCISNASAGDADPDYRTCVSECEISGCVGQLCFPQCNSSSDGGPWYIQEPLYLQWKKWGCQGDCRYQCMVNRETERETLGQAPVKYHGKWPFKRVLGIQEPASVAFSVLNLAMHFHGWLSFFIMIYYKLPLKQDRTAYYEYVGLWHIYGLLSMNSWFWSAVFHSRDVDLTERLDYSSAVAILGFSLILAILRTFDIRVEAARVMVSAPILAFVTTHILYINFYKLDYGWNMIVCVAMGVSQLFLWARWAAVSSHPSNWKLWVVVIAGGLAMLLEIYDFPPYEGYFDAHSIWHAATIPLTILWWSFIRDDAEFRTSSLLKKTKTKAK

SEQ ID NO: 30003 - protein, 258 aa, Arabidopsis thaliana
  misc_feature (1)..(258): Ceres Seq. ID no. 4939098
MVNRETERETLGQAPVKYHGKWPFKRVLGIQEPASVAFSVLNLAMHFHGWLSFFIMIYYKLPLKQDRTAYYEYVGLWHIYGLLSMNSWFWSAVFHSRDVDLTERLDYSSAVAILGFSLILAILRTFDIRVEAARVMVSAPILAFVTTHILYINFYKLDYGWNMIVCVAMGVSQLFLWARWAAVSSHPSNWKLWVVVIAGGLAMLLEIYDFPPYEGYFDAHSIWHAATIPLTILWWSFIRDDAEFRTSSLLKKTKTKAK

SEQ ID NO: 30004 - protein, 214 aa, Arabidopsis thaliana
  misc_feature (1)..(214): Ceres Seq. ID no. 4939099
MHFHGWLSFFIMIYYKLPLKQDRTAYYEYVGLWHIYGLLSMNSWFWSAVFHSRDVDLTERLDYSSAVAILGFSLILAILRTFDIRVEAARVMVSAPILAFVTTHILYINFYKLDYGWNMIVCVAMGVSQLFLWARWAAVSSHPSNWKLWVVVIAGGLAMLLEIYDFPPYEGYFDAHSIWHAATIPLTILWWSFIRDDAEFRTSSLLKKTKTKAK

SEQ ID NO: 30005 - DNA, 1159 bp, Arabidopsis thaliana
  misc_feature (1)..(1159): Ceres Seq. ID no. 4939439
atcaacgagtattaatctcttcattacatagccaaaaagaaaacactctctataatggaatccaaaaccataaacgacgtcgtcgtatcagagtcaaatcacgagttagcatcttcgtcgccatcagaatttgagaagaaccagaaacattaccaagaaatcatcgcaactcttcctcacaaagatggctggagaccaaaagatccgttcgttgagtacggtggtcactggtggctacaacctcttcttgaaggtttacttcacgcccagaagttcttcaaggcacgtcccaatgatttcttcgtctgcagctacccaaaaaccggcacgacttggctcaaagccttaactttcgcaatcgcaaatcgctccaagttcgacgtttcaacaaaccctcttctcaaacgtaatccacacgagtttgtgccttacatcgaaatcgacttcccgtttttcccaagcgttgatgttcttaaagacgaaggaaacacgcttttctcgactcatatcccttatgatctcttacctgaatcagttgtgaaatctggttgcaagattgtttacatatggagagacccaaaggacacgtttgtgtcgatgtggacttttgctcacaaggagagatcacaacaaggaccagtgggtattggaaagcttaccaagcaaacccggatcagattttgtttctcaagtatgagacaatgagagctgatccattgccttatgtgaagagattagctgagtttatgggttatgggttcacgaaggaggaagaggagggaaatgttgttgagaaagtagtgaagctttgtagctttgagactttgaagaatcttgaagctaacaaaggtgagaaagatagagaagatcgtcctgctgtttatgccaacagtgcgtatttcaggaaagggaaagttggggattggcagaattatctgactccggagatggtggctcgtattgatggtttgatggaagagaagtttaaaggaactggctttctttcttcaaaatcatgaatgtgatcttcttttgtcttgttttcgagctatgaatgtctgattcttctgatccttttgctggttatagcataagttgcttttgtttactagtatactctccattggaggaatatgtggtgaactgctgtattgttgct

SEQ ID NO: 30006 - protein, 216 aa, Arabidopsis thaliana
  misc_feature (1)..(216): Ceres Seq. ID no. 4939440
MESKTINDVVVSESNHELASSSPSEFEKNQKHYQEIIATLPHKDGWRPKDPFVEYGGHWWLQPLLEGLLHAQKFFKARPNDFFVCSYPKTGTTWLKALTFAIANRSKFDVSTNPLLKRNPHEFVPYIEIDFPFFPSVDVLKDEGNTLFSTHIPYDLLPESVVKSGCKIVYIWRDPKDTFVSMWTFAHKERSQQGPVGIGKLTKQTRIRFCFSSMRQ

SEQ ID NO: 30007 - protein, 150 aa, Arabidopsis thaliana
  misc_feature (1)..(150): Ceres Seq. ID no. 4939441
MERPKGHVCVDVDFCSQGEITTRTSGYWKAYQANPDQILFLKYETMRADPLPYVKRLAEFMGYGFTKEEEEGNVVEKVVKLCSFETLKNLEANKGEKDREDRPAVYANSAYFRKGKVGDWQNYLTPEMVARIDGLMEEKFKGTGFLSSKS

SEQ ID NO: 30008 - DNA, 1818 bp, Arabidopsis thaliana
  misc_feature (1)..(1818): Ceres Seq. ID no. 4939477
atgaatccttcaactccaagtttactctacacatccatcttcttctacttcacaataatagcaactcaaaccctctctcttgatccaaagttcaaggcttgtgagccgaaatcatgcggcaaaggtccccagatctcctatccattttatctatctggaaagcaagaatctttttgtggttatccaagttttgaactcacttgtgatgatgaagaaaagctccctgttctcgggatctccggtgaggaatatgtcatcaagaacatatcttacttaacacagtcgtttcaggtcgtgaactcaaaggcttctcatgatccatgtcccagaccgctgaacaatcttaccctccataggactcctttctttgtgaacccttctcatatcaacttcactatactttacaattgttccgatcacctgctggaggattttaggacataccctcttacttgtgctcgaaacacgagtcttcttcgatcttttggggtctttgacagaaagaaacttggaaaagagaaacaaattgcatccatgtcgtgccagaaactagtggatgttcctgttttagctagtaatgagtctgatgtgatgggtatgacttatgttgagattttgaagaggggttttgttctgaattggactgcaaacagttgcttccgctgcatcaccagcggcgggagatgtggaactgatcaacaagaattcgtatgcttgtgtcctgatggacctaaacttcatgatacttgcacgaatgcattgcttccaagaaacatctcatcagatccatctgcaaagtcttttgacatcgagaaagcagaggaattattagtcggagttcatattttctcttacgaagaacttgaagaagccactaataacttcgacccatctaaagaactcggtgatggaggctttggtactgtctattacggtaagcttaaagatggacgaagcgtagccgttaaacggttatacgataacaacttcaaaagagcagagcaattcaggaatgaagttgagatcttaacgggtttacgccatccaaacctcgtggctctctttggatgctcctcaaaacagagccgggacttactgctagtgtatgagtatgttgcaaacggcacgttagctgatcatctacatggtccacaggcaaaccctagctcacttccttggtctattcggctcaaaatcgctgttgaaactgcctctgccttgaagtatctccacgcctccaagatcatccaccgtgatgttaaatccaacaacatccttctcgaccaaaacttcaatgtcaaggttgcggattttggactctctagactgtttcctatggataaaacgcacgtatctaccgctccacaaggaactccgggatatgtcgacccggattaccacttatgctatcaactctcaaacaaaagcgacgtgtacagctttgcggtagtgttaatggagcttatctcttcacttccagcagtcgacatcacaagaccgcgccaagagatcaacctctcgaacatggcagtcgttaaaatccagaaccacgagctccgcgacatggtggatccgtcacttgggtttgacacggatacaagagtgagacagacggtgatcgctgtcgctgagctggcgttccaatgcttgcagtcggataaagatcttaggccatgtatgtcgcacgtgcaggatacgttgacgaggatacagaacaatggatttggttcggaaatggatgttgtagatgtgaacaagagtggaccgttggttgcacagtctccagatagtgtcattgtgaaatgggacagtaagtaa

SEQ ID NO: 30009 - protein, 605 aa, Arabidopsis thaliana
  misc_feature (1)..(605): Ceres Seq. ID no. 4939478
MNPSTPSLLYTSIFFYFTIIATQTLSLDPKFKACEPKSCGKGPQISYPFYLSGKQESFCGYPSFELTCDDEEKLPVLGISGEEYVIKNISYLTQSFQVVNSKASHDPCPRPLNNLTLHRTPFFVNPSHINFTILYNCSDHLLEDFRTYPLTCARNTSLLRSFGVFDRKKLGKEKQIASMSCQKLVDVPVLASNESDVMGMTYVEILKRGFVLNWTANSCFRCITSGGRCGTDQQEFVCLCPDGPKLHDTCTNALLPRNISSDPSAKSFDIEKAEELLVGVHIFSYEELEEATNNFDPSKELGDGGFGTVYYGKLKDGRSVAVKRLYDNNFKRAEQFRNEVEILTGLRHPNLVALFGCSSKQSRDLLLVYEYVANGTLADHLHGPQANPSSLPWSIRLKIAVETASALKYLHASKIIHRDVKSNNILLDQNFNVKVADFGLSRLFPMDKTHVSTAPQGTPGYVDPDYHLCYQLSNKSDVYSFAVVLMELISSLPAVDITRPRQEINLSNMAVVKIQNHELRDMVDPSLGFDTDTRVRQTVIAVAELAFQCLQSDKDLRPCMSHVQDTLTRIQNNGFGSEMDVVDVNKSGPLVAQSPDSVIVKWDSK

SEQ ID NO: 30010 - protein, 427 aa, Arabidopsis thaliana
  misc_feature (1)..(427): Ceres Seq. ID no. 4939479
MSCQKLVDVPVLASNESDVMGMTYVEILKRGFVLNWTANSCFRCITSGGRCGTDQQEFVCLCPDGPKLHDTCTNALLPRNISSDPSAKSFDIEKAEELLVGVHIFSYEELEEATNNFDPSKELGDGGFGTVYYGKLKDGRSVAVKRLYDNNFKRAEQFRNEVEILTGLRHPNLVALFGCSSKQSRDLLLVYEYVANGTLADHLHGPQANPSSLPWSIRLKIAVETASALKYLHASKIIHRDVKSNNILLDQNFNVKVADFGLSRLFPMDKTHVSTAPQGTPGYVDPDYHLCYQLSNKSDVYSFAVVLMELISSLPAVDITRPRQEINLSNMAVVKIQNHELRDMVDPSLGFDTDTRVRQTVIAVAELAFQCLQSDKDLRPCMSHVQDTLTRIQNNGFGSEMDVVDVNKSGPLVAQSPDSVIVKWDSK

SEQ ID NO: 30011 - protein, 408 aa, Arabidopsis thaliana
  misc_feature (1)..(408): Ceres Seq. ID no. 4939480
MGMTYVEILKRGFVLNWTANSCFRCITSGGRCGTDQQEFVCLCPDGPKLHDTCTNALLPRNISSDPSAKSFDIEKAEELLVGVHIFSYEELEEATNNFDPSKELGDGGFGTVYYGKLKDGRSVAVKRLYDNNFKRAEQFRNEVEILTGLRHPNLVALFGCSSKQSRDLLLVYEYVANGTLADHLHGPQANPSSLPWSIRLKIAVETASALKYLHASKIIHRDVKSNNILLDQNFNVKVADFGLSRLFPMDKTHVSTAPQGTPGYVDPDYHLCYQLSNKSDVYSFAVVLMELISSLPAVDITRPRQEINLSNMAVVKIQNHELRDMVDPSLGFDTDTRVRQTVIAVAELAFQCLQSDKDLRPCMSHVQDTLTRIQNNGFGSEMDVVDVNKSGPLVAQSPDSVIVKWDSK

SEQ ID NO: 30012 - DNA, 897 bp, Arabidopsis thaliana
  misc_feature (1)..(897): Ceres Seq. ID no. 4939488
atgaaagctgtagcttttcccgctaaaatcgcaaatcttagcttcccttctaactgttgctcactattcttccgatcaccggcgacgtttttatcgccggcattgccttgtcggaagctgacgaaaggaataagaggtctcgaaggcttgatgtctcagtgtttatcatcatcgtcacaatcattgtcattttcatcgaattcattctcctctcaaccggaatcagagttacttcaagctttaccttcttcgaagccaaaatctccgccactgcagctgccatggctcattgttggtttgggtaatcccggcaagaagtaccagggcacgcgccacaacgttggttttgagatggtggacgctttggctgatgcagaaggcatctccatgaacactgttaacttcaaggccttgtttgggaaaggcgttattggaaatataccgattatgctggctaaaccacaaactttcatgaacctaagtggtgagtctgttggacaaatcgtttcattttacaagatcccgttaaagcaagtacttgtggtttacgatgatttagatttgccctttggtaaactacgtttattgccaaaaggtggtcacggaggccacaatgggtacaatgcttttcactctctatctggcctgatgagaagtattatagaccgcctcaaaggtagccgtgattttcctcgactaagaatagggatcggacgtcctccagggaagatggatacagccaattttgttctccgccagttcaatagacaggaacaggaagagttggatcacacattccaaaccgggttagaggcaataaggattcttttgcttgaggggttcaacaaaagtgcaacatttgtcaacactcgaaaatctatggagcaactcagttag

SEQ ID NO: 30013 - protein, 298 aa, Arabidopsis thaliana
  misc_feature (1)..(298): Ceres Seq. ID no. 4939489
MKAVAFPAKIANLSFPSNCCSLFFRSPATFLSPALPCRKLTKGIRGLEGLMSQCLSSSSQSLSFSSNSFSSQPESELLQALPSSKPKSPPLQLPWLIVGLGNPGKKYQGTRHNVGFEMVDALADAEGISMNTVNFKALFGKGVIGNIPIMLAKPQTFMNLSGESVGQIVSFYKIPLKQVLVVYDDLDLPFGKLRLLPKGGHGGHNGYNAFHSLSGLMRSIIDRLKGSRDFPRLRIGIGRPPGKMDTANFVLRQFNRQEQEELDHTFQTGLEAIRILLLEGFNKSATFVNTRKSMEQLS

SEQ ID NO: 30014 - protein, 248 aa, Arabidopsis thaliana
  misc_feature (1)..(248): Ceres Seq. ID no. 4939490
MSQCLSSSSQSLSFSSNSFSSQPESELLQALPSSKPKSPPLQLPWLIVGLGNPGKKYQGTRHNVGFEMVDALADAEGISMNTVNFKALFGKGVIGNIPIMLAKPQTFMNLSGESVGQIVSFYKIPLKQVLVVYDDLDLPFGKLRLLPKGGHGGHNGYNAFHSLSGLMRSIIDRLKGSRDFPRLRIGIGRPPGKMDTANFVLRQFNRQEQEELDHTFQTGLEAIRILLLEGFNKSATFVNTRKSMEQLS

SEQ ID NO: 30015 - protein, 181 aa, Arabidopsis thaliana
  misc_feature (1)..(181): Ceres Seq. ID no. 4939491
MVDALADAEGISMNTVNFKALFGKGVIGNIPIMLAKPQTFMNLSGESVGQIVSFYKIPLKQVLVVYDDLDLPFGKLRLLPKGGHGGHNGYNAFHSLSGLMRSIIDRLKGSRDFPRLRIGIGRPPGKMDTANFVLRQFNRQEQEELDHTFQTGLEAIRILLLEGFNKSATFVNTRKSMEQLS

SEQ ID NO: 30016 - DNA, 1438 bp, Arabidopsis thaliana
  misc_feature (1)..(1438): Ceres Seq. ID no. 4939528
cgattctctgtttcttctagattgaatttaaaaaccctacttttgaattttcacatgggagaacaatcaccttctcaaccatcgactcaatgccaaagtcatccacaatcacccaaacccgatactcataacctaatcccaccggaatccaccgatgaatgtctcgattcagctggagtttcaggctcaatcgtctcatctaccacaatcgacgctcgacggatcactgaactaggcaatgtatcgtctccgccgtccaaaatccctctccgccctcggaaaatccggaaactcacactcgacggagacgtctccggtgaagattataaggcggaggatatctcctcatctcaagtaaactctccgctcgcgacggatggaaaatctcccggtaaaggtaaattgtcgcacttacgagctataactgtgccgaggatccaagctcgtcctctgacatgtgaaggtgagctcgaaacagcgattcactatctccgtaacgcggatcctttgctcgcggcgttaatcgacgttcatccaccgccgacgtttgagtcttttaagactccgttcttagctctgatacgaaacatcctctaccaacagcttgcaatgaaagctgggaattcaatctacacacgatttgtttctctctgcggcggcgaaaatttggttgtacctgagacggtcttatcattaaatcctcagcagcttcgtcaaattggtgtctcgggacgtaaggcgagttatcttcatgatttagctagaaagtatcaaaacggaatcttgtcggattcggcgattttgaacatggatgagaagtctttgttcacgatgctaacaatggttaatggaattgggtcatggtctgttcatatgttcatgataaattctcttcatcgaccagatgttttgccggttaatgatctcggtgttaggaaaggagtgcagttgctgtatggcttagatgacctgcctcggccatcgcagatggagcagcattgtgctaagtggagaccgtacagatcagtgggttcgtggtacatgtggcggctcattgaagctaagagcacatcaacgagtgctgctgttgcagccggagtgtcattacctccattggaagatattcaacaagaacatcagcagcaacagcttatggaccctcttaatggtgtgttcagtatcggggcttggggacaatcgtagctgttcttccacgttggtcctggatggtctgatggcttacatgagttattttgttctggacttggggtttgtgcctagtaaaaaaaaaactgtgggagaaagaataataaaaggatgtgctagtctgggttccttgagacacaagctgaagtaacagtgaatatgatcttcttagttgagtgaaagagtctgtaatgttaagagtgagtagctaatgacaaagtagtgtcttctt

SEQ ID NO: 30017 - protein, 400 aa, Arabidopsis thaliana
  misc_feature (1)..(400): Ceres Seq. ID no. 4939529
RFSVSSRLNLKTLLLNFHMGEQSPSQPSTQCQSHPQSPKPDTHNLIPPESTDECLDSAGVSGSIVSSTTIDARRITELGNVSSPPSKIPLRPRKIRKLTLDGDVSGEDYKAEDISSSQVNSPLATDGKSPGKGKLSHLRAITVPRIQARPLTCEGELETAIHYLRNADPLLAALIDVHPPPTFESFKTPFLALIRNILYQQLAMKAGNSIYTRFVSLCGGENLVVPETVLSLNPQQLRQIGVSGRKASYLHDLARKYQNGILSDSAILNMDEKSLFTMLTMVNGIGSWSVHMFMINSLHRPDVLPVNDLGVRKGVQLLYGLDDLPRPSQMEQHCAKWRPYRSVGSWYMWRLIEAKSTSTSAAVAAGVSLPPLEDIQQEHQQQQLMDPLNGVFSIGAWGQS

SEQ ID NO: 30018 - protein, 382 aa, Arabidopsis thaliana
  misc_feature (1)..(382): Ceres Seq. ID no. 4939530
MGEQSPSQPSTQCQSHPQSPKPDTHNLIPPESTDECLDSAGVSGSIVSSTTIDARRITELGNVSSPPSKIPLRPRKIRKLTLDGDVSGEDYKAEDISSSQVNSPLATDGKSPGKGKLSHLRAITVPRIQARPLTCEGELETAIHYLRNADPLLAALIDVHPPPTFESFKTPFLALIRNILYQQLAMKAGNSIYTRFVSLCGGENLVVPETVLSLNPQQLRQIGVSGRKASYLHDLARKYQNGILSDSAILNMDEKSLFTMLTMVNGIGSWSVHMFMINSLHRPDVLPVNDLGVRKGVQLLYGLDDLPRPSQMEQHCAKWRPYRSVGSWYMWRLIEAKSTSTSAAVAAGVSLPPLEDIQQEHQQQQLMDPLNGVFSIGAWGQS

SEQ ID NO: 30019 - DNA, 1279 bp, Arabidopsis thaliana
  misc_feature (1)..(1279): Ceres Seq. ID no. 4939692
tttccagagattgatgataggtgtagaagaaccatgaaatcgatattaattggatttgttttctttcttttatcatcatttcgtagcttcttcgtgaccactacctattcccaagtgatccatcaccgacgtctacggccatggccaccgccagaatctgggtccggcccatcacctggcccatctccatcaccacataacaaaaccacaccggcagtgtttttctttggggattcgatcatagatacaggaaataataataatctaacaacagaaatgaaatgtaattttagtccttatggtaaggattttccactcggagttgcaactggtagattcagcaacggaaaggtcgtttccgattatatatctgaatatttgggagtaaaaccaattgtaccagcatattttgaccccaatgtacaactagaagatcttctcacgggtgtatcatttgcttcagagagtaaagtcaatgttggagcaattgacatatttccaacgacacatagcgagagtaaagaggttagtaggggaagagaagacggatcaactgttagccaagggcttatccgttgtggtcgcaggcagcaacgatttggctattacatattatggtcatggtgctcaattgctcaaagatgatatccactactttacttcaaagatggcaaattccgcggcaagttttgttatgcaattatacgaatatggagcaagacaaatagcagttctaggaacaccaccacttggctgcgtaccaatactaagaactctaaaaggaggtcttcgtagagagtgtgctcaagatataaactatgcttctcagcttttcaacgtcaaactctccaacattttggaccaattggcaaaaaacctaccaaattccaatctcatttacattgacatatactctgctttcagtcacatcttagaaaattcagcagattatgggtttgaagaaataaagagaggttgttgtggaactggatttgtggaagctggtccactttgcaatcgattcacaacatttgtgtgctccaatgtatctgcttacatgttttgggatagtctccatcctacccaaagattctataaaatcttaaccaaaatactttttgagaaatacatccacaatttaaattgagtagtgtgatcaaatgactcacattgtatgcttttatttttcttaaagcttgtgcagttgttataaattgtacaaaattattgtaagtcactatattgattaccaattgattttaagagaaacttttatcac

SEQ ID NO: 30020 - protein, 223 aa, Arabidopsis thaliana
  misc_feature (1)..(223): Ceres Seq. ID no. 4939693
MLEQLTYFQRHIARVKRLVGEEKTDQLLAKGLSVVVAGSNDLAITYYGHGAQLLKDDIHYFTSKMANSAASFVMQLYEYGARQIAVLGTPPLGCVPILRTLKGGLRRECAQDINYASQLFNVKLSNILDQLAKNLPNSNLIYIDIYSAFSHILENSADYGFEEIKRGCCGTGFVEAGPLCNRFTTFVCSNVSAYMFWDSLHPTQRFYKILTKILFEKYIHNLN

SEQ ID NO: 30021 - protein, 214 aa, Arabidopsis thaliana
  misc_feature (1)..(214): Ceres Seq. ID no. 4939694
FPEIDDRCRRTMKSILIGFVFFLLSSFRSFFVTTTYSQVIHHRRLRPWPPPESGSGPSPGPSPSPHNKTTPAVFFFGDSIIDTGNNNNLTTEMKCNFSPYGKDFPLGVATGRFSNGKVVSDYISEYLGVKPIVPAYFDPNVQLEDLLTGVSFASESKVNVGAIDIFPTTHSESKEVSRGREDGSTVSQGLIRCGRRQQRFGYYILWSWCSIAQR

SEQ ID NO: 30022 - protein, 203 aa, Arabidopsis thaliana
  misc_feature (1)..(203): Ceres Seq. ID no. 4939695
MKSILIGFVFFLLSSFRSFFVTTTYSQVIHHRRLRPWPPPESGSGPSPGPSPSPHNKTTPAVFFFGDSIIDTGNNNNLTTEMKCNFSPYGKDFPLGVATGRFSNGKVVSDYISEYLGVKPIVPAYFDPNVQLEDLLTGVSFASESKVNVGAIDIFPTTHSESKEVSRGREDGSTVSQGLIRCGRRQQRFGYYILWSWCSIAQR

SEQ ID NO: 30023 - DNA, 1713 bp, Arabidopsis thaliana
  misc_feature (1)..(1713): Ceres Seq. ID no. 4940024
atgtcgatctccggcgctgttgatgaagctgggactccacttctcgctgtcaccgtcgactacaggaacaaacccgccgtcaaatcttcctccggtggctggagatccgccggattcatcatcggtgtggaggttgctgagcgatttgcttactatgggatatcgtcgaatctgataacgtatttgaccggaccactgggacaatcgacggcggctgcggcggctaacgtgaacgcttggtctggaacggcgtcgttgcttcctctccttggtgcttttgtcgctgactcgtttctaggtcgtttccggacaatcctcgccgcctctgctctctatatagtgatgagtctgaagttgtatagtgatttgattgaacaacaggggctgggtgtattgactttatctgcaatgattccttcagactgcaaagtttcgaatctactctcgtcatgctctcctcgatttcaagtaattacattctttagtgcattgtatctagtggctttagctcaaggtggtcacaagccgtgtgttcaggcttttggagcggatcagtttgatgaaaaggaacctgaagagtgcaaagcaaagagttctttctttaattggtggtattttggtatgtgctttgggacgttaacaactctatgggtgttgaattatatccaagataatctaagttgggcgttaggctttggtattccatgcattgctatggtagttgctttggttgttctcttgcttggaacctgcacttatcggttcagtattcgaagagaagatcaaagtccttttgtgaggattggaaatgtttatgtagcggctgtaaagaactggagtgtttcagctttagatgtagctgctgcagaggagagacttggtcttgtgtcttgcagtagctctcagcaatttagttttctcaacaaagctctggtcgcaaagaatggttcttgtagtatagatgaacttgaagaagcaaaatcagtgcttaggttagctccgatatggttaacatgcttggtttatgcggttgtgtttgcgcagtctccaactttcttcaccaaacaaggagctacaatggagagatcaatcacacctggttacaagatctctccggctaccctccagtccttcatcagcctctctatagtcatcttcatcccaatctacgaccgtgtactaatcccaattgcaagatcatttacacataaaccaggcggaatcacaatgcttcagagaatcggcacaggcatattcctctctttccttgctatggttgtagccgctctagtggagatgaaaaggcttaaaactgctgcggattacgggctcgtagattcacctgacgctacggttccaatgagtgtgtggtggttagttcctcagtatgttctctttggtatcacggatgttttcgcaatggtgggtcttcaagagttcttctatgaccaagtcccgaatgagctgaggagtgtggggttggctctgtacttgagcatattcggtattggtaactttctcagcagtttcatgatatcaatcattgagaaagcgacaagccaatctggtcaagcgagttggttcgcaaacaacctgaaccaagctcatctcgattacttttactggttactcgcttgtctcagcttcattggcttagcctcctacttgtatgttgcaaagtcttacgtctctaaaaggctcgacaccagttaa

SEQ ID NO: 30024 - protein, 570 aa, Arabidopsis thaliana
  misc_feature (1)..(570): Ceres Seq. ID no. 4940025
MSISGAVDEAGTPLLAVTVDYRNKPAVKSSSGGWRSAGFIIGVEVAERFAYYGISSNLITYLTGPLGQSTAAAAANVNAWSGTASLLPLLGAFVADSFLGRFRTILAASALYIVMSLKLYSDLIEQQGLGVLTLSAMIPSDCKVSNLLSSCSPRFQVITFFSALYLVALAQGGHKPCVQAFGADQFDEKEPEECKAKSSFFNWWYFGMCFGTLTTLWVLNYIQDNLSWALGFGIPCIAMVVALVVLLLGTCTYRFSIRREDQSPFVRIGNVYVAAVKNWSVSALDVAAAEERLGLVSCSSSQQFSFLNKALVAKNGSCSIDELEEAKSVLRLAPIWLTCLVYAVVFAQSPTFFTKQGATMERSITPGYKISPATLQSFISLSIVIFIPIYDRVLIPIARSFTHKPGGITMLQRIGTGIFLSFLAMVVAALVEMKRLKTAADYGLVDSPDATVPMSVWWLVPQYVLFGITDVFAMVGLQEFFYDQVPNELRSVGLALYLSIFGIGNFLSSFMISIIEKATSQSGQASWFANNLNQAHLDYFYWLLACLSFIGLASYLYVAKSYVSKRLDTS

SEQ ID NO: 30025 - protein, 456 aa, Arabidopsis thaliana
  misc_feature (1)..(456): Ceres Seq. ID no. 4940026
MSLKLYSDLIEQQGLGVLTLSAMIPSDCKVSNLLSSCSPRFQVITFFSALYLVALAQGGHKPCVQAFGADQFDEKEPEECKAKSSFFNWWYFGMCFGTLTTLWVLNYIQDNLSWALGFGIPCIAMVVALVVLLLGTCTYRFSIRREDQSPFVRIGNVYVAAVKNWSVSALDVAAAEERLGLVSCSSSQQFSFLNKALVAKNGSCSIDELEEAKSVLRLAPIWLTCLVYAVVFAQSPTFFTKQGATMERSITPGYKISPATLQSFISLSIVIFIPIYDRVLIPIARSFTHKPGGITMLQRIGTGIFLSFLAMVVAALVEMKRLKTAADYGLVDSPDATVPMSVWWLVPQYVLFGITDVFAMVGLQEFFYDQVPNELRSVGLALYLSIFGIGNFLSSFMISIIEKATSQSGQASWFANNLNQAHLDYFYWLLACLSFIGLASYLYVAKSYVSKRLDTS

SEQ ID NO: 30026 - protein, 434 aa, Arabidopsis thaliana; identical to SEQ ID NO: 28055
  misc_feature (1)..(434): Ceres Seq. ID no. 4940027

SEQ ID NO: 30027 - DNA, 1363 bp, Arabidopsis thaliana
  misc_feature (1)..(1363): Ceres Seq. ID no. 4940134
atattaaccccttgtgtctctcacaatcccactagtactgaaacatagagatagacttagctcaagataagctaatttgttttcactctaatatagagagagagagaaagagatcggagaggaaaaaatggcgggaggaatagggctgggagacacgacatacacgaaggtgtttgtgggaggattagcttgggagacgcataaggagacgatgaagaagcactttgagcagtttggagagattttggaagccgtagtcatcaccgacaaggcctccggtagatccaagggctacggattcgtgacattcagggaagcggaggcggcgaggagtgcttgtgtggatgctactccggtgatcgacgggagaagagcaaattgcaacctcgcctctctcggtcttcaaagatccaaaccctccactcctaaccatggaggaggaggcaggattaacaatatgagagtgatgatgagcacaatgcagactggttttggaccacctccaccaccacaaccacccaccttcactcactatccccatctccctctcaatctctttgggtactctccatactcgccagactactcatcattccctacgaacttatacggcatgtacggctgcacttctggaggacaatacggagtctatggaaacagaaacagcggaggcggtggactaaccgcagcagccgcatccgctactcctttttatccttgtggtggaggacatggtggggtccagttctctcaaccacaaccattttatcatcacttgtcttcttataaccctcaccattactctcctccgaccttttctatgcaacaagtgtgttttgttgtgccacaggcgtaacaggctttccgcttcaaccacctcttattccttaccgttaaagaagcttagagtctttggtagctatcaagcttcatatcatcatcttcttcttctcaggtcaagagccattctatggtttaaaggatgctcctggctaatctcagcacttagtttctctccctctgctctaaaagctaccccattttatggaatttggaggtggctttttaagcagatcccaatgggatctcctgtttcagatggtgatcatgtcgtatttgtcatctctcaccttcttgcaattgcatcttctcgagagaatgggtttctctttgagagatattgctaatggagcatcatcatcatcaatcactcatgtgccaatctcaagctgatgcatgtatcagcttaattagtttatgttgttttagcctaaggatggctaatcaacaagacaaagaaaatgtctgttaggataatgtaaaaaaaaaatcaagcaccaaaacaattttctgtttgaaagac

SEQ ID NO: 30028 - protein, 242 aa, Arabidopsis thaliana
  misc_feature (1)..(242): Ceres Seq. ID no. 4940135
MAGGIGLGDTTYTKVFVGGLAWETHKETMKKHFEQFGEILEAVVITDKASGRSKGYGFVTFREAEAARSACVDATPVIDGRRANCNLASLGLQRSKPSTPNHGGGGRINNMRVMMSTMQTGFGPPPPPQPPTFTHYPHLPLNLFGYSPYSPDYSSFPTNLYGMYGCTSGGQYGVYGNRNSGGGGLTAAAASATPFYPCGGGHGGVQFSQPQPFYHHLSSYNPHHYSPPTFSMQQVCFVVPQA

SEQ ID NO: 30029 - protein, 214 aa, Arabidopsis thaliana
  misc_feature (1)..(214): Ceres Seq. ID no. 4940136
MKKHFEQFGEILEAVVITDKASGRSKGYGFVTFREAEAARSACVDATPVIDGRRANCNLASLGLQRSKPSTPNHGGGGRINNMRVMMSTMQTGFGPPPPPQPPTFTHYPHLPLNLFGYSPYSPDYSSFPTNLYGMYGCTSGGQYGVYGNRNSGGGGLTAAAASATPFYPCGGGHGGVQFSQPQPFYHHLSSYNPHHYSPPTFSMQQVCFVVPQA

SEQ ID NO: 30030 - protein, 151 aa, Arabidopsis thaliana
  misc_feature (1)..(151): Ceres Seq. ID no. 4940137
MVGSSSLNHNHFIITCLLITLTITLLRPFLCNKCVLLCHRRNRLSASTTSYSLPLKKLRVFGSYQASYHHLLLLRSRAILWFKGCSWLISALSFSPSALKATPFYGIWRWLFKQIPMGSPVSDGDHVVFVISHLLAIASSRENGFLFERYC

SEQ ID NO: 30031 - DNA, 1180 bp, Arabidopsis thaliana
  misc_feature (1)..(1180): Ceres Seq. ID no. 4940146
attttaatttttcatgttactctctccttcttcttcacttgttctctttctcatcgcctcttgattcacgcgaacgagaaagcgacgatcgtaaccaccggcgctgaccaaaaagtaatcgattctcttcccgagctgatctctcagcttcaggtgtcttgaatctgaatctgtggctatatttggtgctcggtggtgagcaggaagggagggggatattgtcagggttttaatgtacgtcagatgaatagagcaactaatgttactggcagtagaaggagggggtttattctcagcgtccgcgtctgggtatagtaagggattgacccttcttttctctggtgataaagacgtagataggcccatgagagttgtcccgtggaatcactaccaggtggttgaccaagagcctgaggctgaccctgttcttcagctggattctattaagaaccgagtttcccgcggttgcgctgcttccttcagttgttttggtggcgcttccgcgggacttgagaccccttctcctcttaaagttgaacctgtgcagcagcagcatcgtgaaatatcatcaccagagtctgttgttgttgtttctgaaaagggtaaagaccaaataagtgaagctgataatggcagcagcaaagaagctttcaaactctcgttgaggagtagcttgaagaggccctctgttgcggaatcacgctctctagaagatataaaagaatacgagacgttgagtgtggatggtagcgatctcactggtgacatggcaaggcggaaagttcagtggcctgatgcttgtggtagtgaactcactcaagttagagaatttgagccgagtgagatgggattatcagatgaagaatgggaggtaggacgacaaagaacatgttcgtgtgtgatcatgtaaattcagaaatcatcggtatcactctttactcatgtcttgtgtgcattgctcatatatttaaagtgtatctgttattacaaaagttctcttcaaggttttggcttgtacattattccctttgttttgagtggcaacttgttccgggtttctgttttctaaaaacgataagacaacatccaaatcgatgcaaagtggaagagagtggcaataactcttgttcttgtaacgctctcaaccacattacgtacgtgtacaacaaaactagaatgc

SEQ ID NO: 30032 - protein, 216 aa, Arabidopsis thaliana
  misc_feature (1)..(216): Ceres Seq. ID no. 4940147
MLLAVEGGGLFSASASGYSKGLTLLFSGDKDVDRPMRVVPWNHYQVVDQEPEADPVLQLDSIKNRVSRGCAASFSCFGGASAGLETPSPLKVEPVQQQHREISSPESVVVVSEKGKDQISEADNGSSKEAFKLSLRSSLKRPSVAESRSLEDIKEYETLSVDGSDLTGDMARRKVQWPDACGSELTQVREFEPSEMGLSDEEWEVGRQRTCSCVIM

SEQ ID NO: 30033 - protein, 181 aa, Arabidopsis thaliana
  misc_feature (1)..(181): Ceres Seq. ID no. 4940148
MRVVPWNHYQVVDQEPEADPVLQLDSIKNRVSRGCAASFSCFGGASAGLETPSPLKVEPVQQQHREISSPESVVVVSEKGKDQISEADNGSSKEAFKLSLRSSLKRPSVAESRSLEDIKEYETLSVDGSDLTGDMARRKVQWPDACGSELTQVREFEPSEMGLSDEEWEVGRQRTCSCVIM

SEQ ID NO: 30034 - DNA, 1269 bp, Arabidopsis thaliana
  misc_feature (1)..(1269): Ceres Seq. ID no. 4940181
atgaatcttgttgttctgctaatcctaacattactccttttcattgtttcttatgtagtagacgcaggccaagtcattttggttgattccaacataactcgctcttttgtcgacatggaagctgatttctctccatcagtgactacggtggaaaccggagtggtttatgtagctgagcctctcaacgcttgccgaaacttgaggaataaaccggagcagagcccttatggtacttcccctcttgtgttgatcataagaggaggctgcagttttgagtacaaagtcagaaacgcgcagagaagcggtttcaaggctgccattgtctatgacaatgtggaccgcaacttcttatccgcaatggggggagactcggacggtataaagattcaagcggtttttgtgatgaagagagccggagaaatgctcaagaagtacgcgggttcggaggaaatggaagtcatgttggttcctcctaatacagaggactcggtgtggtcattgtacgcttccatagcattgatcttgtcgctggctattttttgtgttatggttacttgtgtcttcttctatagatattgctcaacaattagaaactctacatctcaattcaatgggatgtgccgtagaacggtgaaagcaatgccgagtgttacattcacttgtgcaaaaatagacaacactacaggtttctcttgcgctatctgccttgaagactacattgttggagacaagctcagggtcttaccttgcagtcacaagtttcatgtcgcttgcgtagactcgtggcttatatcatggagaacgttttgtccagtgtgtaaacgggatgcgagaacgaccgcagatgagccactagctacagagagcacaccgtttctcagttcttccattgcaacatcatctctagtgtgtatagactctcctcctttgggatcctcagtttctttctctccagcgcatgtgagctcgtccttcattcatcaatttgtcaggtcttcgccaatgaatggcagccgtatctcagagaatcttaggcgacaagcctcaccattacagtcatcatcacagcgatcacacctctctatgaagtcttcccattcactgggttattcgaccatgtcacctctcaacgcgatgggcatgtcaccataccggccatacccaagcaatgcatcgcctggattattcagttcaacaaatcatctgctttccaattatacagcaaatacattctctcatttcgcctctgcacactcgcttccggactag

SEQ ID NO: 30035 - protein, 422 aa, Arabidopsis thaliana
  misc_feature (1)..(422): Ceres Seq. ID no. 4940182
MNLVVLLILTLLLFIVSYVVDAGQVILVDSNITRSFVDMEADFSPSVTTVETGVVYVAEPLNACRNLRNKPEQSPYGTSPLVLIIRGGCSFEYKVRNAQRSGFKAAIVYDNVDRNFLSAMGGDSDGIKIQAVFVMKRAGEMLKKYAGSEEMEVMLVPPNTEDSVWSLYASIALILSLAIFCVMVTCVFFYRYCSTIRNSTSQFNGMCRRTVKAMPSVTFTCAKIDNTTGFSCAICLEDYIVGDKLRVLPCSHKFHVACVDSWLISWRTFCPVCKRDARTTADEPLATESTPFLSSSIATSSLVCIDSPPLGSSVSFSPAHVSSSFIHQFVRSSPMNGSRISENLRRQASPLQSSSQRSHLSMKSSHSLGYSTMSPLNAMGMSPYRPYPSNASPGLFSSTNHLLSNYTANTFSHFASAHSLPD

SEQ ID NO: 30036 - protein, 384 aa, Arabidopsis thaliana
  misc_feature (1)..(384): Ceres Seq. ID no. 4940183
MEADFSPSVTTVETGVVYVAEPLNACRNLRNKPEQSPYGTSPLVLIIRGGCSFEYKVRNAQRSGFKAAIVYDNVDRNFLSAMGGDSDGIKIQAVFVMKRAGEMLKKYAGSEEMEVMLVPPNTEDSVWSLYASIALILSLAIFCVMVTCVFFYRYCSTIRNSTSQFNGMCRRTVKAMPSVTFTCAKIDNTTGFSCAICLEDYIVGDKLRVLPCSHKFHVACVDSWLISWRTFCPVCKRDARTTADEPLATESTPFLSSSIATSSLVCIDSPPLGSSVSFSPAHVSSSFIHQFVRSSPMNGSRISENLRRQASPLQSSSQRSHLSMKSSHSLGYSTMSPLNAMGMSPYRPYPSNASPGLFSSTNHLLSNYTANTFSHFASAHSLPD

SEQ ID NO: 30037 - protein, 303 aa, Arabidopsis thaliana
  misc_feature (1)..(303): Ceres Seq. ID no. 4940184
MGGDSDGIKIQAVFVMKRAGEMLKKYAGSEEMEVMLVPPNTEDSVWSLYASIALILSLAIFCVMVTCVFFYRYCSTIRNSTSQFNGMCRRTVKAMPSVTFTCAKIDNTTGFSCAICLEDYIVGDKLRVLPCSHKFHVACVDSWLISWRTFCPVCKRDARTTADEPLATESTPFLSSSIATSSLVCIDSPPLGSSVSFSPAHVSSSFIHQFVRSSPMNGSRISENLRRQASPLQSSSQRSHLSMKSSHSLGYSTMSPLNAMGMSPYRPYPSNASPGLFSSTNHLLSNYTANTFSHFASAHSLPD

SEQ ID NO: 30038 - DNA, 852 bp, Arabidopsis thaliana
  misc_feature (1)..(852): Ceres Seq. ID no. 4940228
atgacgtcgccgtcatcgtctttctggaacacagcttcacgagaagccatgaaaagcggcatgtttgtcgcgaaagtctactgctttcttcatgtaacaacaaactatctcggattcatggcttatgcttatggtccgagcatgattccgacgcttcatccttcgggaaatatgttattagctgagagaatctcgaagcggtatcagaaaccgagtcgtggagatatagttgtgatacgatctccagagaaccctaataagactccgattaagagagttgttggtgttgaaggtgattgtataagctttgtgattgatccagtgaagagtgatgaatctcaaaccattgtggttcctaaaggacatgtctttgttcaaggatcatcataccatccacaaagatgggagaatctaaacgctcaggaaaacattgaaagtcttgggaaggataacacgacaggcattgtaacacaagttgtcttggacactgcgttgttgagagagacaactaatggactcagaatcaaaacataccagggaggttctggttacgttcagggtattcgattcacaaacgtagagatgcaagatacctccgcggttaaaatcagccatataatgtaccggaacataaccaaaagtgcgaaagccatcaaatttgcgtgcagcgacacagtcccttgcagccacattgtcctcaacaatgtgaatcttgaaggcaaagacggtcaagtcgaagcgtactgtaattcagctgaaggatttgggtatggagtctactcgcacaacgacaaaggcttggaccagactcacaagtcagaggaagccgagactggccacgatgagctttga

SEQ ID NO: 30039 - protein, 283 aa, Arabidopsis thaliana
  misc_feature (1)..(283): Ceres Seq. ID no. 4940229
MTSPSSSFWNTASREAMKSGMFVAKVYCFLHVTTNYLGFMAYAYGPSMIPTLHPSGNMLLAERISKRYQKPSRGDIVVIRSPENPNKTPIKRVVGVEGDCISFVIDPVKSDESQTIVVPKGHVFVQGSSYHPQRWENLNAQENIESLGKDNTTGIVTQVVLDTALLRETTNGLRIKTYQGGSGYVQGIRFTNVEMQDTSAVKISHIMYRNITKSAKAIKFACSDTVPCSHIVLNNVNLEGKDGQVEAYCNSAEGFGYGVYSHNDKGLDQTHKSEEAETGHDEL

SEQ ID NO: 30040 - protein, 267 aa, Arabidopsis thaliana
  misc_feature (1)..(267): Ceres Seq. ID no. 4940230
MKSGMFVAKVYCFLHVTTNYLGFMAYAYGPSMIPTLHPSGNMLLAERISKRYQKPSRGDIVVIRSPENPNKTPIKRVVGVEGDCISFVIDPVKSDESQTIVVPKGHVFVQGSSYHPQRWENLNAQENIESLGKDNTTGIVTQVVLDTALLRETTNGLRIKTYQGGSGYVQGIRFTNVEMQDTSAVKISHIMYRNITKSAKAIKFACSDTVPCSHIVLNNVNLEGKDGQVEAYCNSAEGFGYGVYSHNDKGLDQTHKSEEAETGHDEL

SEQ ID NO: 30041 - protein, 263 aa, Arabidopsis thaliana
  misc_feature (1)..(263): Ceres Seq. ID no. 4940231
MFVAKVYCFLHVTTNYLGFMAYAYGPSMIPTLHPSGNMLLAERISKRYQKPSRGDIVVIRSPENPNKTPIKRVVGVEGDCISFVIDPVKSDESQTIVVPKGHVFVQGSSYHPQRWENLNAQENIESLGKDNTTGIVTQVVLDTALLRETTNGLRIKTYQGGSGYVQGIRFTNVEMQDTSAVKISHIMYRNITKSAKAIKFACSDTVPCSHIVLNNVNLEGKDGQVEAYCNSAEGFGYGVYSHNDKGLDQTHKSEEAETGHDEL

SEQ ID NO: 30042 - DNA, 929 bp, Arabidopsis thaliana
  misc_feature (1)..(929): Ceres Seq. ID no. 4940501
aaaatttctctgccggtgttgacttcaaactctctttgattagatcggcgccaacttctaaacgcaaatgggaatcacgagaaacttgatcctgggtttggcttgtttagcctttgtctccattgctaaagctctgcctcatgaaccagaacttggctcggctcgtgtcgtcttccagactagttatggagatatcgaatttgggttctatcccactgtggcacccaagacagtggatcacatcttcaagcttgttcgtttaggaggatacaacactaatcatttcttcagggttgataaaggttttgttgctcaagttgcggatgtggcgagtggacgatcagctccaatgaatgaggagcaaaggaaagaagctgagaagaaaattgtgggagagttcagtgatgttaagcatgtcagaggtactctttccatgggaagatatgacgatccaaacagtgcacaatcttcattttcgatgcttcttggcaatgctcctcatcttgatcgccagtatgctgtgtttggtaaagttactaaaggagatgaaacattgagtaagctagaagaagttcccactcgccgcgaggggatttttgttatgccgacggagcggatcacgattttgtcgacatactattacgacactaaaatggagagctgtgaagaagagagatctgtcctgaaaagaaggcttcaagcatcttttgtggaggtcgaaagacagagaatgaagtgcttcccgtgaatgaagttaacacataagaaactgttcaacaaaagccttaaaacgccagggaacacaaaggtaaatgtatgtctagtaaaaaaactcagaatgctagacagtttatgagtggtttatcagtgtgagagattgtagttaacagtgtaaacagtttgagacattgaatcatggattgtttcct

SEQ ID NO: 30043 - protein, 226 aa, Arabidopsis thaliana
  misc_feature (1)..(226): Ceres Seq. ID no. 4940502
MGITRNLILGLACLAFVSIAKALPHEPELGSARVVFQTSYGDIEFGFYPTVAPKTVDHIFKLVRLGGYNTNHFFRVDKGFVAQVADVASGRSAPMNEEQRKEAEKKIVGEFSDVKHVRGTLSMGRYDDPNSAQSSFSMLLGNAPHLDRQYAVFGKVTKGDETLSKLEEVPTRREGIFVMPTERITILSTYYYDTKMESCEEERSVLKRRLQASFVEVERQRMKCFP

SEQ ID NO: 30044 - protein, 132 aa, Arabidopsis thaliana
  misc_feature (1)..(132): Ceres Seq. ID no. 4940503
MNEEQRKEAEKKIVGEFSDVKHVRGTLSMGRYDDPNSAQSSFSMLLGNAPHLDRQYAVFGKVTKGDETLSKLEEVPTRREGIFVMPTERITILSTYYYDTKMESCEEERSVLKRRLQASFVEVERQRMKCFP

SEQ ID NO: 30045 - DNA, 1428 bp, Arabidopsis thaliana
  misc_feature (1)..(1428): Ceres Seq. ID no. 4940877
atggccggaagaggaggagagctcacggaggctctggtgaaaaagaccggcagagaagaagaggatgagttggggatgaaggagaaggtttggattgaatcaaagaaactgtgggttgtggcggcgccagcgatcttcacaagatactctacgttcggagtttcaatggtaactcaagctttcattggccatcttggcccaaccgagttggccgcttactctatcaccttcaccattctcctccgtttcagtaatggtatcttgttaggtatggccggtgcactaggaacattatgtggtcaagcctacggagccaaacaataccagatgctcgggatctacctccaaaggtcatggatcgtcctcacaggtggtaccatttgcctcatgcccgtcttcatctttgcgggccctatcctcttagctttaggtcaagaggaacgcattgttcgtgtggctcgggtcttagccctatgggtcataggcatcaacttctccttcgtgccctccttcacttgccaaatgtttctccaagctcagagcaagaacaagattatttcctacgtgactgctgtctccttagggctccatgtcttcttctcgtggctcctagtggctcatttcaattttgggatcactggtgcgatgacctctatgctaattgcgttctggttgcctatcattgtgcagctcttgtatgtaacatgtggtggatgtaaggatacatggagaggattctctatgttggccttcaaagatttgtggcccgtcttaaaactatctttgtcttccggtggaatgctttgcttggagttatggtacaactcggtattggtattgctcactggaaatttgaaaaacgcagaggtggctcttgatgcactagcaatctgcatcagcataaatgcactggagatgatgatagcacttgggtttttggcagcagtaagtgtaagagtgtccaacgagctcggtagtggaaaccccaaaggagccaagtttgcaacattgatagcggttttcacgggaagaatttcctacattttcactacaagtgaagctgtcgcggccgaagttgctgatctttctccacttttagcattttccatcctcttgaacagtgttcaacctgttctctctggagtggcaatcggagcgggatggcaaggatatgtggcttacgttaaccttgcttgctattaccttgtcggaattcctattggtgttatccttggttatgttgttggtttgcaagtgaaaggtgtatggataggaatgctttttggaatattcgttcagacttgtgtgctcaccgtcatgactctcagaacagattgggatcaacaggtatctacgtcgttgagaaatataaaccggtgggttgtaccagaatctagagatgcaaatcaaatttcatcagaggaataa

SEQ ID NO: 30046 - protein, 475 aa, Arabidopsis thaliana
  misc_feature (1)..(475): Ceres Seq. ID no. 4940878
MAGRGGELTEALVKKTGREEEDELGMKEKVWIESKKLWVVAAPAIFTRYSTFGVSMVTQAFIGHLGPTELAAYSITFTILLRFSNGILLGMAGALGTLCGQAYGAKQYQMLGIYLQRSWIVLTGGTICLMPVFIFAGPILLALGQEERIVRVARVLALWVIGINFSFVPSFTCQMFLQAQSKNKIISYVTAVSLGLHVFFSWLLVAHFNFGITGAMTSMLIAFWLPIIVQLLYVTCGGCKDTWRGFSMLAFKDLWPVLKLSLSSGGMLCLELWYNSVLVLLTGNLKNAEVALDALAICISINALEMMIALGFLAAVSVRVSNELGSGNPKGAKFATLIAVFTGRISYIFTTSEAVAAEVADLSPLLAFSILLNSVQPVLSGVAIGAGWQGYVAYVNLACYYLVGIPIGVILGYVVGLQVKGVWIGMLFGIFVQTCVLTVMTLRTDWDQQVSTSLRNINRWVVPESRDANQISSEE

SEQ ID NO: 30047 - protein, 450 aa, Arabidopsis thaliana
  misc_feature (1)..(450): Ceres Seq. ID no. 4940879
MKEKVWIESKKLWVVAAPAIFTRYSTFGVSMVTQAFIGHLGPTELAAYSITFTILLRFSNGILLGMAGALGTLCGQAYGAKQYQMLGIYLQRSWIVLTGGTICLMPVFIFAGPILLALGQEERIVRVARVLALWVIGINFSFVPSFTCQMFLQAQSKNKIISYVTAVSLGLHVFFSWLLVAHFNFGITGAMTSMLIAFWLPIIVQLLYVTCGGCKDTWRGFSMLAFKDLWPVLKLSLSSGGMLCLELWYNSVLVLLTGNLKNAEVALDALAICISINALEMMIALGFLAAVSVRVSNELGSGNPKGAKFATLIAVFTGRISYIFTTSEAVAAEVADLSPLLAFSILLNSVQPVLSGVAIGAGWQGYVAYVNLACYYLVGIPIGVILGYVVGLQVKGVWIGMLFGIFVQTCVLTVMTLRTDWDQQVSTSLRNINRWVVPESRDANQISSEE

SEQ ID NO: 30048 - protein, 420 aa, Arabidopsis thaliana
  misc_feature (1)..(420): Ceres Seq. ID no. 4940880
MVTQAFIGHLGPTELAAYSITFTILLRFSNGILLGMAGALGTLCGQAYGAKQYQMLGIYLQRSWIVLTGGTICLMPVFIFAGPILLALGQEERIVRVARVLALWVIGINFSFVPSFTCQMFLQAQSKNKIISYVTAVSLGLHVFFSWLLVAHFNFGITGAMTSMLIAFWLPIIVQLLYVTCGGCKDTWRGFSMLAFKDLWPVLKLSLSSGGMLCLELWYNSVLVLLTGNLKNAEVALDALAICISINALEMMIALGFLAAVSVRVSNELGSGNPKGAKFATLIAVFTGRISYIFTTSEAVAAEVADLSPLLAFSILLNSVQPVLSGVAIGAGWQGYVAYVNLACYYLVGIPIGVILGYVVGLQVKGVWIGMLFGIFVQTCVLTVMTLRTDWDQQVSTSLRNINRWVVPESRDANQISSEE

SEQ ID NO: 30049 - DNA, 1200 bp, Arabidopsis thaliana
  misc_feature (1)..(1200): Ceres Seq. ID no. 4940912
atgggaatgggaaggtatcagaaatctgcaacttctggtgtttcagctagatgggtttttgttctctgtatttctagcttccttcttggtgttcttgtcgttaacaggcttttggcaagttttgaaaccgtagatggcattgagagagcttcacctgagcaaaatgatcaatctagatcacttaatcctcttgttgattgtgagagcaaggaaggagacattctatctcgagtttcgcatactcatgatgttatcaagacattagacaagacaatttcttctcttgaggtagaactagctacagctcgagcagcaagatctgatggtagagatggatctccagctgttgcaaaaacagtagcagaccaatcgaagattcggcctcggatgttctttgtgatgggaatcatgactgctttcagtagcagaaaacgaagagactccataagaggaacttggcttcctaaaggggatgaattgaaaagattagagacagagaagggaatcattatgagatttgttataggtcacagttcttctcctggaggagtcttggaccacaccattgaagctgaagaagaacaacacaaagacttctttcgactgaatcacatagaaggttatcatgaattatcatctaaaacccaaatatacttctcatctgctgttgcaaaatgggatgcagacttctacatcaaagtggatgatgatgttcacgtaaatctcggaatgcttggttctacattggctcgccacagatcaaaaccgcgagtgtacattggttgcatgaagtctggacctgtccttgctcaaaaaggagtcaaataccatgagccagaatattggaagtttggtgaagaaggaaacaaatacttcagacatgcaactggacaaatctatgcaatctccaaagatttagcaacttatatctcagttaaccggcaactacttcacaagtatgcaaatgaagatgtctctttaggttcttggttcattggtctcgatgttgaacatatcgacgatagaagcctctgctgtggaacacctttagattgtgagtggaagggtcaagcaggaaacccttgcgcagcatcgttcgattggagctgtagtggaatctgcaaatccgtagatagaatgcttgaagtacatcaacgttgtggtgaaggcgatggagcaatttggcatagtagtttctaa

SEQ ID NO: 30050 - protein, 399 aa, Arabidopsis thaliana
  misc_feature (1)..(399): Ceres Seq. ID no. 4940913
MGMGRYQKSATSGVSARWVFVLCISSFLLGVLVVNRLLASFETVDGIERASPEQNDQSRSLNPLVDCESKEGDILSRVSHTHDVIKTLDKTISSLEVELATARAARSDGRDGSPAVAKTVADQSKIRPRMFFVMGIMTAFSSRKRRDSIRGTWLPKGDELKRLETEKGIIMRFVIGHSSSPGGVLDHTIEAEEEQHKDFFRLNHIEGYHELSSKTQIYFSSAVAKWDADFYIKVDDDVHVNLGMLGSTLARHRSKPRVYIGCMKSGPVLAQKGVKYHEPEYWKFGEEGNKYFRHATGQIYAISKDLATYISVNRQLLHKYANEDVSLGSWFIGLDVEHIDDRSLCCGTPLDCEWKGQAGNPCAASFDWSCSGICKSVDRMLEVHQRCGEGDGAIWHSSF

SEQ ID NO: 30051 - protein, 397 aa, Arabidopsis thaliana
  misc_feature (1)..(397): Ceres Seq. ID no. 4940914
MGRYQKSATSGVSARWVFVLCISSFLLGVLVVNRLLASFETVDGIERASPEQNDQSRSLNPLVDCESKEGDILSRVSHTHDVIKTLDKTISSLEVELATARAARSDGRDGSPAVAKTVADQSKIRPRMFFVMGIMTAFSSRKRRDSIRGTWLPKGDELKRLETEKGIIMRFVIGHSSSPGGVLDHTIEAEEEQHKDFFRLNHIEGYHELSSKTQIYFSSAVAKWDADFYIKVDDDVHVNLGMLGSTLARHRSKPRVYIGCMKSGPVLAQKGVKYHEPEYWKFGEEGNKYFRHATGQIYAISKDLATYISVNRQLLHKYANEDVSLGSWFIGLDVEHIDDRSLCCGTPLDCEWKGQAGNPCAASFDWSCSGICKSVDRMLEVHQRCGEGDGAIWHSSF

SEQ ID NO: 30052 - protein, 270 aa, Arabidopsis thaliana
  misc_feature (1)..(270): Ceres Seq. ID no. 4940915
MFFVMGIMTAFSSRKRRDSIRGTWLPKGDELKRLETEKGIIMRFVIGHSSSPGGVLDHTIEAEEEQHKDFFRLNHIEGYHELSSKTQIYFSSAVAKWDADFYIKVDDDVHVNLGMLGSTLARHRSKPRVYIGCMKSGPVLAQKGVKYHEPEYWKFGEEGNKYFRHATGQIYAISKDLATYISVNRQLLHKYANEDVSLGSWFIGLDVEHIDDRSLCCGTPLDCEWKGQAGNPCAASFDWSCSGICKSVDRMLEVHQRCGEGDGAIWHSSF

SEQ ID NO: 30053 - DNA, 2985 bp, Arabidopsis thaliana
  misc_feature (1)..(2985): Ceres Seq. ID no. 4942550
atgaaggccatggagactatacaggatctgatcgaagaagctaaagtacgagccgtatggtggtgcttgtgcatcttctccgtcacctatttcttgacccatacaagtatctattggtggctgaatttgccaattgcaatcctcatttgtggcggtgcgcggtttttttttaaccattttgagttcagatggaaagttccggcgactcctaggcagagtcagttgtcttatcttgagaagaagcagttgtctgtgaatgatccacgtctttctggtatcccacctcctccaaggtggaagaagaaaatagattctcctgttgtggaagctgcgattaatgattttattgacaagatccttaatgatttcgtggtgaatttgtggtactctttgattactcctgataaagaagcgcctgaacttatacgtgcagtgatcatggatgctcttggtgagatttcagttagggtgaaagagatcaatattgttgacttgttaaccagggatatagttgatctgataggtgatcatttggaaagttttagaagaaaccaagctgctataggtactgatgtgatgaaaactttgtcatctgaggagagagatgaaagattgaaataccatcttatggcttctggggaactctatcctgcactcgtgtcacctgagagtgaatacaaggttcttcagaaaatagttgctggcatattatctgtggttctcagaccacgagaagctcagtgccctcttgttcgaacaatagctagagagattgttacttgcttggtaattcaacctcttttgaatttagcatgccccgagcgtatcaatgaagtgtttgagatcattatcaatcttattaaagaaggaaactttgagcagtttacggcggaagagcagaatgtaaattctgccccattgtcagccttcgatagtcaagcaaaaaatatgaatttgacaaaagctattgagcagaaatcaccaaacataaatgacagacacccagatctacacgttcaacagcactctgctgattgggctcggtcgctagaggttgcgacgcaaaggagaacagaggttcttagacctgaaaaccttgaaaacatgtggacgaaaggaaggaactatcaaaagaaggagtacaaaaaatctctgaaaaagggttcttctactggagcaaaagaaaacgcagtggcgcagttaccccctaaagtgagcactgataagcagtcacaagcacagatggctgaggaatttagtaaatcatctttacatgatggagggcaccagatttatgaggctgatgttagaaaggaatctcgttcagatggaaataaaaataggcttaaaagatccaatagtacatcagatcttaatctacgtcctgaaacgagtctagcactcttaggagtcagtgaggggccgctaatcacagaattttacaccacagattttatcaagcacaatgataactacataagtgataataaatcccaaagcattgttcttcacaaagagggtcagcactgcctgaagctcaaatgtcgcgttcttggagcttattttgagaagcaaggatcaaaatcatttgcagtatattctattgcggtgacagatgtggaaaacaaaacttggtttgttaagagaagatacagtaattttgagcgattacatcgtcaactcaaagaaatcccgaactacaatttacagttgcctcccaagcgtattttctcatcaagcaccgaagatgcttttgttcatcgtcgctgtattcagctggacaagtatctacaagatctcttgtgtatagctaatgttgctgaacagcatgaagtttgggattttctaagcgcagcctctaagaattattcttttggaaagtcttcatcagtgatgaaaactcttgcagtcaatgttgatgatgccatggacgatattgtacgtcagttcaaaggtgtctcagatggccttatgcgcaaggttgtaggatctccacttgatgaacatgatcatgctcctacccgccacctctcctggagtgtaaatgaaataagcactcagctctctagggaaagcgcaactgaatctatgcacagcagcatttctgatactgaagacatcgacaaacttggagagaacactcaaggggaaggtagatttgattcagaagccaatgggtggcactcagataatgaattggactctaagtatgttccaccgagagtggttagacgtcttggagagcctgagagttcgccctcagagaaggaaaatgattttaaggcaaaatctcaagttagggggtccaccgattttcagcatgctgatccattgacagctttagtccaaaatccccatggcatacccgagtggatgccacccaatgtcagtgtgccaattttgaacttagttgataaagtgtttcagttaaatagaagaggttggttaaggaggcaagttttctggatatcaaagcaaatattacaattagttatggaagatgctgtggatgacttgctcatgagggagatatgttggctgcggaatgaagacacaattgctcaaggaattcgttgggctcaagatattctatggccaaatggtgtattctttaccagattgaatgatagtcaagaggcatcagatgagaccgaccctagtgaaaaaacttaccaaatggcaggccaacttggtggcatgaaggtgactaaacccagttcctttgagcagcaactcgaggcttttcgtagagctagtgaaataaaaaaattccttttcgatggcgccccaacagccttagtgagtttggtagggcacaatcagtacaggagatgtgcaagagacattttctatttcactcagtcaaacatatgcataaagcaactcacatttgcaatactggagctgctactccgatcggtattccccgagctgcaagatcttctaagagacataagggagaatccgcaaggtcggtcagagtaa

SEQ ID NO: 30054 - protein, 994 aa, Arabidopsis thaliana
  misc_feature (1)..(994): Ceres Seq. ID no. 4942551
MKAMETIQDLIEEAKVRAVWWCLCIFSVTYFLTHTSIYWWLNLPIAILICGGARFFFNHFEFRWKVPATPRQSQLSYLEKKQLSVNDPRLSGIPPPPRWKKKIDSPVVEAAINDFIDKILNDFVVNLWYSLITPDKEAPELIRAVIMDALGEISVRVKEINIVDLLTRDIVDLIGDHLESFRRNQAAIGTDVMKTLSSEERDERLKYHLMASGELYPALVSPESEYKVLQKIVAGILSVVLRPREAQCPLVRTIAREIVTCLVIQPLLNLACPERINEVFEIIINLIKEGNFEQFTAEEQNVNSAPLSAFDSQAKNMNLTKAIEQKSPNINDRHPDLHVQQHSADWARSLEVATQRRTEVLRPENLENMWTKGRNYQKKEYKKSLKKGSSTGAKENAVAQLPPKVSTDKQSQAQMAEEFSKSSLHDGGHQIYEADVRKESRSDGNKNRLKRSNSTSDLNLRPETSLALLGVSEGPLITEFYTTDFIKHNDNYISDNKSQSIVLHKEGQHCLKLKCRVLGAYFEKQGSKSFAVYSIAVTDVENKTWFVKRRYSNFERLHRQLKEIPNYNLQLPPKRIFSSSTEDAFVHRRCIQLDKYLQDLLCIANVAEQHEVWDFLSAASKNYSFGKSSSVMKTLAVNVDDAMDDIVRQFKGVSDGLMRKVVGSPLDEHDHAPTRHLSWSVNEISTQLSRESATESMHSSISDTEDIDKLGENTQGEGRFDSEANGWHSDNELDSKYVPPRVVRRLGEPESSPSEKENDFKAKSQVRGSTDFQHADPLTALVQNPHGIPEWMPPNVSVPILNLVDKVFQLNRRGWLRRQVFWISKQILQLVMEDAVDDLLMREICWLRNEDTIAQGIRWAQDILWPNGVFFTRLNDSQEASDETDPSEKTYQMAGQLGGMKVTKPSSFEQQLEAFRRASEIKKFLFDGAPTALVSLVGHNQYRRCARDIFYFTQSNICIKQLTFAILELLLRSVFPELQDLLRDIRENPQGRSE

SEQ ID NO: 30055 - protein, 991 aa, Arabidopsis thaliana
  misc_feature (1)..(991): Ceres Seq. ID no. 4942552
METIQDLIEEAKVRAVWWCLCIFSVTYFLTHTSIYWWLNLPIAILICGGARFFFNHFEFRWKVPATPRQSQLSYLEKKQLSVNDPRLSGIPPPPRWKKKIDSPVVEAAINDFIDKILNDFVVNLWYSLITPDKEAPELIRAVIMDALGEISVRVKEINIVDLLTRDIVDLIGDHLESFRRNQAAIGTDVMKTLSSEERDERLKYHLMASGELYPALVSPESEYKVLQKIVAGILSVVLRPREAQCPLVRTIAREIVTCLVIQPLLNLACPERINEVFEIIINLIKEGNFEQFTAEEQNVNSAPLSAFDSQAKNMNLTKAIEQKSPNINDRHPDLHVQQHSADWARSLEVATQRRTEVLRPENLENMWTKGRNYQKKEYKKSLKKGSSTGAKENAVAQLPPKVSTDKQSQAQMAEEFSKSSLHDGGHQIYEADVRKESRSDGNKNRLKRSNSTSDLNLRPETSLALLGVSEGPLITEFYTTDFIKHNDNYISDNKSQSIVLHKEGQHCLKLKCRVLGAYFEKQGSKSFAVYSIAVTDVENKTWFVKRRYSNFERLHRQLKEIPNYNLQLPPKRIFSSSTEDAFVHRRCIQLDKYLQDLLCIANVAEQHEVWDFLSAASKNYSFGKSSSVMKTLAVNVDDAMDDIVRQFKGVSDGLMRKVVGSPLDEHDHAPTRHLSWSVNEISTQLSRESATESMHSSISDTEDIDKLGENTQGEGRFDSEANGWHSDNELDSKYVPPRVVRRLGEPESSPSEKENDFKAKSQVRGSTDFQHADPLTALVQNPHGIPEWMPPNVSVPILNLVDKVFQLNRRGWLRRQVFWISKQILQLVMEDAVDDLLMREICWLRNEDTIAQGIRWAQDILWPNGVFFTRLNDSQEASDETDPSEKTYQMAGQLGGMKVTKPSSFEQQLEAFRRASEIKKFLFDGAPTALVSLVGHNQYRRCARDIFYFTQSNICIKQLTFAILELLLRSVFPELQDLLRDIRENPQGRSE

SEQ ID NO: 30056 - protein, 848 aa, Arabidopsis thaliana
  misc_feature (1)..(848): Ceres Seq. ID no. 4942553
MDALGEISVRVKEINIVDLLTRDIVDLIGDHLESFRRNQAAIGTDVMKTLSSEERDERLKYHLMASGELYPALVSPESEYKVLQKIVAGILSVVLRPREAQCPLVRTIAREIVTCLVIQPLLNLACPERINEVFEIIINLIKEGNFEQFTAEEQNVNSAPLSAFDSQAKNMNLTKAIEQKSPNINDRHPDLHVQQHSADWARSLEVATQRRTEVLRPENLENMWTKGRNYQKKEYKKSLKKGSSTGAKENAVAQLPPKVSTDKQSQAQMAEEFSKSSLHDGGHQIYEADVRKESRSDGNKNRLKRSNSTSDLNLRPETSLALLGVSEGPLITEFYTTDFIKHNDNYISDNKSQSIVLHKEGQHCLKLKCRVLGAYFEKQGSKSFAVYSIAVTDVENKTWFVKRRYSNFERLHRQLKEIPNYNLQLPPKRIFSSSTEDAFVHRRCIQLDKYLQDLLCIANVAEQHEVWDFLSAASKNYSFGKSSSVMKTLAVNVDDAMDDIVRQFKGVSDGLMRKVVGSPLDEHDHAPTRHLSWSVNEISTQLSRESATESMHSSISDTEDIDKLGENTQGEGRFDSEANGWHSDNELDSKYVPPRVVRRLGEPESSPSEKENDFKAKSQVRGSTDFQHADPLTALVQNPHGIPEWMPPNVSVPILNLVDKVFQLNRRGWLRRQVFWISKQILQLVMEDAVDDLLMREICWLRNEDTIAQGIRWAQDILWPNGVFFTRLNDSQEASDETDPSEKTYQMAGQLGGMKVTKPSSFEQQLEAFRRASEIKKFLFDGAPTALVSLVGHNQYRRCARDIFYFTQSNICIKQLTFAILELLLRSVFPELQDLLRDIRENPQGRSE

SEQ ID NO: 30057 - DNA, 1497 bp, Arabidopsis thaliana
  misc_feature (1)..(1497): Ceres Seq. ID no. 4943579
atgaacgttgactttcaaaactgtttgatcttaatcctcctctgcctcctttccttcctctgttactctttcttcttcaagaaaccaaaggatggtttcaatttgccaccgagccctccctctctaccgatcattggccatcttcatcatctcctctctctttttatgcacagatctttgcaaaaactctcctccaagtatggacctctcctctatcttcacgtcttcaatgttcccatactccttgtctcgtctccctcaatagcctatgagatctttaggacacaagacgtaaacgtttcctcgcgcgactttcctacgaacgaagggtctctcctcttcggatcctttggcttcggcaccgcaccttcctcgggcctcaagcactcgagaggtcacaaaaagtccgtgcagaggagttattacttaaacctattagataaggcggtgaagaaggagagcgttgagattgctgaggaagctatgaagctggtcaacaataccgtttgccagatgattatggggaggagttgttcagaggaaaacggtgaagcagagagagtcagaggcttggtgaccaagacagatgccttgacgaagaagtttatcttggcaggcatcttgcggaaaccgcttcagaagattgggatctcactgttcaaaaaggagttaatggatgcttcctgcaagttcaacgaggtgttggagaagattcttgtagaatataaagagaaagttgaagagcatcatcaaggtactgacatgatggataagctcttagaagtttatggagacgaaaaagcagagtataagatcactagagaccatatcaagtccttgtttgtggatcttttctttgcaggcactgacacctggacgcacgctatacaatggattatggccgagatcattaacaactcgtacattcttgagagattgagagaagaaattgattctgttgtaggaaaaacaaggttgattcaagaaactgatctaccgaacctcccgtgcttgcaagcaaccgtcaaagaagggctaaggttgcaccctccggttcctcttgtgttaagaacgtttaaagaagggtgtacgattggaggcttttatgttccggagaagacaacacttgttgttaatgggtatgctatgatgagagatcctgaatactgggaagatcctcaagaatttaagccagagagatttctagcttcttcaagatcaagccaaaatgatgagataagagacgaactcctaaaataccttcctttcgggaatggaagaagagcctgtccaggagctaacctagcttatatctctgtaggaaccgcgattggagtgatggttcagtgctttgactgggagatcaaaggagataagatcaacatggatgaggctcctggaaaaataacgttgaccatggctcatcctcttaactgcactcttgttcctcgaaccctaatccctgttacttcaactgtacagattcctagttcttga

SEQ ID NO: 30058 - protein, 498 aa, Arabidopsis thaliana
  misc_feature (1)..(498): Ceres Seq. ID no. 4943580
MNVDFQNCLILILLCLLSFLCYSFFFKKPKDGFNLPPSPPSLPIIGHLHHLLSLFMHRSLQKLSSKYGPLLYLHVFNVPILLVSSPSIAYEIFRTQDVNVSSRDFPTNEGSLLFGSFGFGTAPSSGLKHSRGHKKSVQRSYYLNLLDKAVKKESVEIAEEAMKLVNNTVCQMIMGRSCSEENGEAERVRGLVTKTDALTKKFILAGILRKPLQKIGISLFKKELMDASCKFNEVLEKILVEYKEKVEEHHQGTDMMDKLLEVYGDEKAEYKITRDHIKSLFVDLFFAGTDTWTHAIQWIMAEIINNSYILERLREEIDSVVGKTRLIQETDLPNLPCLQATVKEGLRLHPPVPLVLRTFKEGCTIGGFYVPEKTTLVVNGYAMMRDPEYWEDPQEFKPERFLASSRSSQNDEIRDELLKYLPFGNGRRACPGANLAYISVGTAIGVMVQCFDWEIKGDKINMDEAPGKITLTMAHPLNCTLVPRTLIPVTSTVQIPSS

SEQ ID NO: 30059 - protein, 443 aa, Arabidopsis thaliana
  misc_feature (1)..(443): Ceres Seq. ID no. 4943581
MHRSLQKLSSKYGPLLYLHVFNVPILLVSSPSIAYEIFRTQDVNVSSRDFPTNEGSLLFGSFGFGTAPSSGLKHSRGHKKSVQRSYYLNLLDKAVKKESVEIAEEAMKLVNNTVCQMIMGRSCSEENGEAERVRGLVTKTDALTKKFILAGILRKPLQKIGISLFKKELMDASCKFNEVLEKILVEYKEKVEEHHQGTDMMDKLLEVYGDEKAEYKITRDHIKSLFVDLFFAGTDTWTHAIQWIMAEIINNSYILERLREEIDSVVGKTRLIQETDLPNLPCLQATVKEGLRLHPPVPLVLRTFKEGCTIGGFYVPEKTTLVVNGYAMMRDPEYWEDPQEFKPERFLASSRSSQNDEIRDELLKYLPFGNGRRACPGANLAYISVGTAIGVMVQCFDWEIKGDKINMDEAPGKITLTMAHPLNCTLVPRTLIPVTSTVQIPSS

SEQ ID NO: 30060 - protein, 337 aa, Arabidopsis thaliana
  misc_feature (1)..(337): Ceres Seq. ID no. 4943582
MKLVNNTVCQMIMGRSCSEENGEAERVRGLVTKTDALTKKFILAGILRKPLQKIGISLFKKELMDASCKFNEVLEKILVEYKEKVEEHHQGTDMMDKLLEVYGDEKAEYKITRDHIKSLFVDLFFAGTDTWTHAIQWIMAEIINNSYILERLREEIDSVVGKTRLIQETDLPNLPCLQATVKEGLRLHPPVPLVLRTFKEGCTIGGFYVPEKTTLVVNGYAMMRDPEYWEDPQEFKPERFLASSRSSQNDEIRDELLKYLPFGNGRRACPGANLAYISVGTAIGVMVQCFDWEIKGDKINMDEAPGKITLTMAHPLNCTLVPRTLIPVTSTVQIPSS

SEQ ID NO: 30061 - DNA, 3375 bp, Arabidopsis thaliana
  misc_feature (1)..(3375): Ceres Seq. ID no. 4943891
atgttcgtcagaaaatttctgcagaaatcctccggcggtcagaatcctcctcctcctatagctcctccgcctcggggatgtttgatggcagaagatttggatcctcatattatcacccactctgggataccttcgacggcgtctcttcttgcctttgaccctattcaatgcctcttggctgtgggaacactagatggaaggataaaagtgattggtggcgataacatcgaggcaattcttgcatctcctaagcagttacctttcaaaaacttagagttcatgcagaaccaaggctttctggttagcatctcaaatgaaaacgagattcaggtttgggacttggatcttaggcaaccagcatcaagcttaaagtgggagtcaaacattactgcgtttgcaatccttcatggcactggttacatgtatgttggtgatgagtacggtatggtgtctgttctaaactacagcgctgacgaagggaaattactgcagcttccttattatgttccaactgatgctttatctgaagcagcggggctttcatctcctattgattatccggttgttggacttctttcccagccttgttcaaagggaactagattgttgattgcattttcaaatggattactttttctttgggatgcatcagaagatcatgtcgtgttagttcgggggaacaaagatctacctgtggagggtaaaacagttgctgattctcttgaagcttcacatgatgagctttccaatcttgaactcgatggaaaagagataagttctttgtgttgggcatcaactgatggttcagttcttgctgttggctatgtggatggggatatattattttgggacttttctgatgggcaaaaggggaagccatctaatcacgttgttaagttacagttgtcttcggctgagaaaagacttcctgtcattgttatgcattggtgtttggatgtatcccgcaagagtagtggtggaaaactcttcatctatggtggtgatatcattggatctgacgaagtacttacgatgttaggtcttgattggtcttctggtatgggaggtctgaaatgtgttggccgtgctgacctgacccttagtggttcatttgctgatatggtcttgtctccaattgccagttcaaggcagagtggggtgtttttatttctgttgacaaatccaggacaactgcaagcatatgacgatacctctctggcttctctgatgtctcagaaagagaataagatttctgtttctccactgccatatccaatggttgtaccaacgatggatccacatatgacagtagcaacgttttctgcattaaatgtgaatgataaaacgtcattagctctttctgagatagtcttagctgcaaaagctcgaacccctcgtaccccatccggagaaagtgcacaatggcctctgacaggtggtgttccaagccacgttgatgactacaagcttgaaagactttacatggcaggatatcaagatgggtctatgcgaatatgggatgcaacctatccatgtctgtcccttatttatattttggagccaaaggcaagtgttattgacataactggagtagatgcatctgtaacggcattttgcttctgctctaagacttcttgtttggctgttggtaacgaatgtggtatggttcgcctatacaagttggtcggccatacaagtggaggaactttggaagttgttaccaacactgagaagaaaggtttggctattgttacaacgttgacactatggatttgttatgctttatctcatgctgttggttcattacttgtagctcaccatttgcatcaagaagatggtcctcaatggttggctgcgttttccttcctgagttccccagtgtgcaccctgcaatttgtacagtctacaagaaggcttgccgtgggatttaaatgtggcaaggttgcagtgcttgacattggtgtgccgtcagtattatttgttacaaatagcttatctgactcaggttctccgatcaagtcactctatgtgaaatcctcttcagctccaacaggctcaaaaagtgatccaactgatcacaactccataaattctgaagatgatttactcttgtgtgcaatgaccaaagatggacagaccattcttttggatggcaatactgggaaaatacttgcctcttgcctgagacctctaaagaacccaactgcgatttgtatgcacattatagagaactgctatgaaaactatgaaacgcccagtgaaaaaccagctgaaaatccatctgggaaggataaacatgagaacaaatctcatataatcaaagctagtgagagtcattcaccagacggtgaacagaatgctgtcacagaaacaaaacttattgatcagatatttgcgaattcattatttctcatgtgttctgaggatgcactgcgcttgtatactgtaaagtctctatctcagggaagtcttgagagcattatggaggtaaatcttccaaggccgtgttgctggatgggaatcctaaaaaaagatggaagggaatgtgcagtactcctgttttaccgaacagggcatattgaaataagatctttcccgaatcttgaagttgtgggagagagctctttgctgtcacttcttaggtggaacttcaagcctaacatggagaagacagtatgttcagatgatttcggccatgtcgtcctggtaaatggttgtgaagttgccatcctttcgtttttggcccacgcaaacggcttcaggctcccagagtctttacctttgcttcatgacaaagtccttgcagcagctgctgacgctacctttagccatatctctgttcataagaaaaatcatgatggcgctcccaaattcctaagtaacattatcaaaggcttcagatcaagcactgaacagaagatggaccaagtacaagatttctcccacctggggaacatcttttctaatccaccatacttaaaaccttctgataccggtggcgacgacgaaaagattgttgagctaaacatagatgacatcgagatagatgaacctgtgatcatcttgccgttgacagagaaagacaaaaaagaaaagaaagataagagaacggataaggaaaagctgttcgacggtgcatccagcgatgcacaacccaaaacaagaacagtggatgaaattaagtccaaatacagaaaagctggggaaacctcagcaatagcttcacaagcgaaggacaaacttcatgagcggggagaaaaactcgagagaatcagccaacgcacagctgagcttcaagacaatgctgagaactttgcatccatggcacatgaacttgctaagcaaatggagaagcgaaaatggtggaacatatga

SEQ ID NO: 30062 - protein, 1124 aa, Arabidopsis thaliana
  misc_feature (1)..(1124): Ceres Seq. ID no. 4943892
MFVRKFLQKSSGGQNPPPPIAPPPRGCLMAEDLDPHIITHSGIPSTASLLAFDPIQCLLAVGTLDGRIKVIGGDNIEAILASPKQLPFKNLEFMQNQGFLVSISNENEIQVWDLDLRQPASSLKWESNITAFAILHGTGYMYVGDEYGMVSVLNYSADEGKLLQLPYYVPTDALSEAAGLSSPIDYPVVGLLSQPCSKGTRLLIAFSNGLLFLWDASEDHVVLVRGNKDLPVEGKTVADSLEASHDELSNLELDGKEISSLCWASTDGSVLAVGYVDGDILFWDFSDGQKGKPSNHVVKLQLSSAEKRLPVIVMHWCLDVSRKSSGGKLFIYGGDIIGSDEVLTMLGLDWSSGMGGLKCVGRADLTLSGSFADMVLSPIASSRQSGVFLFLLTNPGQLQAYDDTSLASLMSQKENKISVSPLPYPMVVPTMDPHMTVATFSALNVNDKTSLALSEIVLAAKARTPRTPSGESAQWPLTGGVPSHVDDYKLERLYMAGYQDGSMRIWDATYPCLSLIYILEPKASVIDITGVDASVTAFCFCSKTSCLAVGNECGMVRLYKLVGHTSGGTLEVVTNTEKKGLAIVTTLTLWICYALSHAVGSLLVAHHLHQEDGPQWLAAFSFLSSPVCTLQFVQSTRRLAVGFKCGKVAVLDIGVPSVLFVTNSLSDSGSPIKSLYVKSSSAPTGSKSDPTDHNSINSEDDLLLCAMTKDGQTILLDGNTGKILASCLRPLKNPTAICMHIIENCYENYETPSEKPAENPSGKDKHENKSHIIKASESHSPDGEQNAVTETKLIDQIFANSLFLMCSEDALRLYTVKSLSQGSLESIMEVNLPRPCCWMGILKKDGRECAVLLFYRTGHIEIRSFPNLEVVGESSLLSLLRWNFKPNMEKTVCSDDFGHVVLVNGCEVAILSFLAHANGFRLPESLPLLHDKVLAAAADATFSHISVHKKNHDGAPKFLSNIIKGFRSSTEQKMDQVQDFSHLGNIFSNPPYLKPSDTGGDDEKIVELNIDDIEIDEPVIILPLTEKDKKEKKDKRTDKEKLFDGASSDAQPKTRTVDEIKSKYRKAGETSAIASQAKDKLHERGEKLERISQRTAELQDNAENFASMAHELAKQMEKRKWWNI

SEQ ID NO: 30063 - protein, 1096 aa, Arabidopsis thaliana
  misc_feature (1)..(1096): Ceres Seq. ID no. 4943893
MAEDLDPHIITHSGIPSTASLLAFDPIQCLLAVGTLDGRIKVIGGDNIEAILASPKQLPFKNLEFMQNQGFLVSISNENEIQVWDLDLRQPASSLKWESNITAFAILHGTGYMYVGDEYGMVSVLNYSADEGKLLQLPYYVPTDALSEAAGLSSPIDYPVVGLLSQPCSKGTRLLIAFSNGLLFLWDASEDHVVLVRGNKDLPVEGKTVADSLEASHDELSNLELDGKEISSLCWASTDGSVLAVGYVDGDILFWDFSDGQKGKPSNHVVKLQLSSAEKRLPVIVMHWCLDVSRKSSGGKLFIYGGDIIGSDEVLTMLGLDWSSGMGGLKCVGRADLTLSGSFADMVLSPIASSRQSGVFLFLLTNPGQLQAYDDTSLASLMSQKENKISVSPLPYPMVVPTMDPHMTVATFSALNVNDKTSLALSEIVLAAKARTPRTPSGESAQWPLTGGVPSHVDDYKLERLYMAGYQDGSMRIWDATYPCLSLIYILEPKASVIDITGVDASVTAFCFCSKTSCLAVGNECGMVRLYKLVGHTSGGTLEVVTNTEKKGLAIVTTLTLWICYALSHAVGSLLVAHHLHQEDGPQWLAAFSFLSSPVCTLQFVQSTRRLAVGFKCGKVAVLDIGVPSVLFVTNSLSDSGSPIKSLYVKSSSAPTGSKSDPTDHNSINSEDDLLLCAMTKDGQTILLDGNTGKILASCLRPLKNPTAICMHIIENCYENYETPSEKPAENPSGKDKHENKSHIIKASESHSPDGEQNAVTETKLIDQIFANSLFLMCSEDALRLYTVKSLSQGSLESIMEVNLPRPCCWMGILKKDGRECAVLLFYRTGHIEIRSFPNLEVVGESSLLSLLRWNFKPNMEKTVCSDDFGHVVLVNGCEVAILSFLAHANGFRLPESLPLLHDKVLAAAADATFSHISVHKKNHDGAPKFLSNIIKGFRSSTEQKMDQVQDFSHLGNIFSNPPYLKPSDTGGDDEKIVELNIDDIEIDEPVIILPLTEKDKKEKKDKRTDKEKLFDGASSDAQPKTRTVDEIKSKYRKAGETSAIASQAKDKLHERGEKLERISQRTAELQDNAENFASMAHELAKQMEKRKWWNI

SEQ ID NO: 30064 - protein, 1031 aa, Arabidopsis thaliana
  misc_feature (1)..(1031): Ceres Seq. ID no. 4943894
MQNQGFLVSISNENEIQVWDLDLRQPASSLKWESNITAFAILHGTGYMYVGDEYGMVSVLNYSADEGKLLQLPYYVPTDALSEAAGLSSPIDYPVVGLLSQPCSKGTRLLIAFSNGLLFLWDASEDHVVLVRGNKDLPVEGKTVADSLEASHDELSNLELDGKEISSLCWASTDGSVLAVGYVDGDILFWDFSDGQKGKPSNHVVKLQLSSAEKRLPVIVMHWCLDVSRKSSGGKLFIYGGDIIGSDEVLTMLGLDWSSGMGGLKCVGRADLTLSGSFADMVLSPIASSRQSGVFLFLLTNPGQLQAYDDTSLASLMSQKENKISVSPLPYPMVVPTMDPHMTVATFSALNVNDKTSLALSEIVLAAKARTPRTPSGESAQWPLTGGVPSHVDDYKLERLYMAGYQDGSMRIWDATYPCLSLIYILEPKASVIDITGVDASVTAFCFCSKTSCLAVGNECGMVRLYKLVGHTSGGTLEVVTNTEKKGLAIVTTLTLWICYALSHAVGSLLVAHHLHQEDGPQWLAAFSFLSSPVCTLQFVQSTRRLAVGFKCGKVAVLDIGVPSVLFVTNSLSDSGSPIKSLYVKSSSAPTGSKSDPTDHNSINSEDDLLLCAMTKDGQTILLDGNTGKILASCLRPLKNPTAICMHIIENCYENYETPSEKPAENPSGKDKHENKSHIIKASESHSPDGEQNAVTETKLIDQIFANSLFLMCSEDALRLYTVKSLSQGSLESIMEVNLPRPCCWMGILKKDGRECAVLLFYRTGHIEIRSFPNLEVVGESSLLSLLRWNFKPNMEKTVCSDDFGHVVLVNGCEVAILSFLAHANGFRLPESLPLLHDKVLAAAADATFSHISVHKKNHDGAPKFLSNIIKGFRSSTEQKMDQVQDFSHLGNIFSNPPYLKPSDTGGDDEKIVELNIDDIEIDEPVIILPLTEKDKKEKKDKRTDKEKLFDGASSDAQPKTRTVDEIKSKYRKAGETSAIASQAKDKLHERGEKLERISQRTAELQDNAENFASMAHELAKQMEKRKWWNI

SEQ ID NO: 30065 - DNA, 1701 bp, Arabidopsis thaliana
  misc_feature (1)..(1701): Ceres Seq. ID no. 4944047
atggcagctcaaggtttgttattgattttcttattcttctctagctcttcctcacttgatgataacagtaatcgaatcgagttcacttgtttgtttttgttggtgacaggaggtgattcatatgaggaagcgttggctgctttgtcgtctttgatcacgaaacgaagtcgtgctgataagagcaataaaggggatcgctttgagttagtctttgattatctcaagctacttgacctggaagaagacattttaaagatgaatgttattcatgtcgctggtaccaaaggcaagggatccacatgtacctttacagagtctattattcgaaactatggctttcgaactggactcttcacttcacctcacctcattgatgtccgggaaagatttcgtttggatggtgtggacataagtgaagagaaatttttgggatatttctggtggtgctataacaggctcaagttttggtacttagagaaattgtattattggaactattttcatcgagggggtggtgatgcggtagagctcatgtatagtgtcttccctgtagatgctgctatattggaggttggattaggtggaaagtttgatgccaccaatgcggttcagaaacctgtggtatgtggtatttcttcactcggatatgaccacatggaaattctaggtgatacacttggaaaaattgctggtgagaaggctggaattttcaagcttggagttccagctttcacagtgccccaacctgatgaagccatgcgtgtccttgaagagaaagcttccgaaacagaagtgaatctcgaagtggtgcagccactaaccgcaaggctgttaagtggtcagaaacttgggcttgatggggaacaccaatatgtcaatgctggtctagcagtttcgcttgcctctatctggcttcagcaaattggtaaactagaagttccgagtcggactcagatgagtattctgcctgagaaattcatcaaagggttagctacagcgagtttgcaaggacgagcacaggtcgtccctgatcaatatactgaatctcggacttcaggagatctagtattttatctggatggagctcacagtccagaaagcatggaagcatgcgccaaatggttttcggttgcggttaagggagacaaccagtcagggagttcaggacatttgatattgttgttcaattgtatgtcagttcgggacccaaatctactgcttccacatctaaagaatatgtgcgcaaaatacggtgtcaatttcaagaaggcattgtttgtaccaaacatgtcggtgtatcataaggttggtacagcagctgatttgccagagaatgatccacaggttgacttgtcatggcagttcacacttcagaaagtgtgggaaagccttgtgcagagtgaaagagatggagaaaaagatggtgaaagtgatggaaacagtgaggtgtttacttcactacccatggcaataaaatgtctaagggacactgtacatgagagtagctcagccacacgtttccagggactgtttgtgtgtgcaggtccttgtaactggttcgttacatcttgtgggcgatgtactgagattaatcagaaaatgaagagaaacaaacacacttcacttttcaaatttcaatacacgagtcgtcatccaccaatcaccgtacccactgtggaagaggatggcatttcttattaa

SEQ ID NO: 30066 - protein, 566 aa, Arabidopsis thaliana
  misc_feature (1)..(566): Ceres Seq. ID no. 4944048
MAAQGLLLIFLFFSSSSSLDDNSNRIEFTCLFLLVTGGDSYEEALAALSSLITKRSRADKSNKGDRFELVFDYLKLLDLEEDILKMNVIHVAGTKGKGSTCTFTESIIRNYGFRTGLFTSPHLIDVRERFRLDGVDISEEKFLGYFWWCYNRLKFWYLEKLYYWNYFHRGGGDAVELMYSVFPVDAAILEVGLGGKFDATNAVQKPVVCGISSLGYDHMEILGDTLGKIAGEKAGIFKLGVPAFTVPQPDEAMRVLEEKASETEVNLEVVQPLTARLLSGQKLGLDGEHQYVNAGLAVSLASIWLQQIGKLEVPSRTQMSILPEKFIKGLATASLQGRAQVVPDQYTESRTSGDLVFYLDGAHSPESMEACAKWFSVAVKGDNQSGSSGHLILLFNCMSVRDPNLLLPHLKNMCAKYGVNFKKALFVPNMSVYHKVGTAADLPENDPQVDLSWQFTLQKVWESLVQSERDGEKDGESDGNSEVFTSLPMAIKCLRDTVHESSSATRFQGLFVCAGPCNWFVTSCGRCTEINQKMKRNKHTSLFKFQYTSRHPPITVPTVEEDGISY

SEQ ID NO: 30067 - protein, 481 aa, Arabidopsis thaliana
  misc_feature (1)..(481): Ceres Seq. ID no. 4944049
MNVIHVAGTKGKGSTCTFTESIIRNYGFRTGLFTSPHLIDVRERFRLDGVDISEEKFLGYFWWCYNRLKFWYLEKLYYWNYFHRGGGDAVELMYSVFPVDAAILEVGLGGKFDATNAVQKPVVCGISSLGYDHMEILGDTLGKIAGEKAGIFKLGVPAFTVPQPDEAMRVLEEKASETEVNLEVVQPLTARLLSGQKLGLDGEHQYVNAGLAVSLASIWLQQIGKLEVPSRTQMSILPEKFIKGLATASLQGRAQVVPDQYTESRTSGDLVFYLDGAHSPESMEACAKWFSVAVKGDNQSGSSGHLILLFNCMSVRDPNLLLPHLKNMCAKYGVNFKKALFVPNMSVYHKVGTAADLPENDPQVDLSWQFTLQKVWESLVQSERDGEKDGESDGNSEVFTSLPMAIKCLRDTVHESSSATRFQGLFVCAGPCNWFVTSCGRCTEINQKMKRNKHTSLFKFQYTSRHPPITVPTVEEDGISY

SEQ ID NO: 30068 - protein, 389 aa, Arabidopsis thaliana
  misc_feature (1)..(389): Ceres Seq. ID no. 4944050
MYSVFPVDAAILEVGLGGKFDATNAVQKPVVCGISSLGYDHMEILGDTLGKIAGEKAGIFKLGVPAFTVPQPDEAMRVLEEKASETEVNLEVVQPLTARLLSGQKLGLDGEHQYVNAGLAVSLASIWLQQIGKLEVPSRTQMSILPEKFIKGLATASLQGRAQVVPDQYTESRTSGDLVFYLDGAHSPESMEACAKWFSVAVKGDNQSGSSGHLILLFNCMSVRDPNLLLPHLKNMCAKYGVNFKKALFVPNMSVYHKVGTAADLPENDPQVDLSWQFTLQKVWESLVQSERDGEKDGESDGNSEVFTSLPMAIKCLRDTVHESSSATRFQGLFVCAGPCNWFVTSCGRCTEINQKMKRNKHTSLFKFQYTSRHPPITVPTVEEDGISY

SEQ ID NO: 30069 - DNA, 1716 bp, Arabidopsis thaliana
  misc_feature (1)..(1716): Ceres Seq. ID no. 4944063
atggagaatttagtgaagagctgcgcagggatcgagaagaaaagaagcaatttgactccatcgatggaagatatacttacagagtcaaaggagagaagcagcactagcggagcgagctacgaaagctcctccaccaccaccgtcgcttcgtcttctccaccaccaccaccgtcgcagattctggatgtggagatgatgaaggagagatttgcaaagttgttacttggtgaagatatgtcaggttctggtaaaggtgtgtgtacggctttagctatctccaacgccataacaaatctctgtgctacgattttcgggcaactatggagattagagccactttcaagcgaaaagaaggagatgtggagaagggaaatggagtggattcttagtgttagtgatcacatcgtcgagttaacaccttcaacacaaacttatccagacggcaacaagtttgaggtcatgacttgtcgaccaagatttgatcttttcatcaacctccctgctctccgtaaactagacaatatgcttctcgatatattggcgagtttcaagaaaactgagttctggtatgttgatcaagggatcgttgcttcggaaaacgatggctcagcttctttccgcagaaagattcagcgccaagaggagaaatggtggttgcctgttcctcgtttagcaccgaatggtcttactgaagaagcaagaacagaattgaatcataagagggaatgtgcgacgcagatacttaaagctgcaatggctattaacagccttgctttaaccgaaatggatgttcctaaatcataccttgaaacccttccaaagaacggtaggtcctgccttggggatgttatctacaggtatgtaacatctgacaaattttctgcggagtctcttctcgattgccttgatctgtcctctgagcatattgctcttgatatcgcaaaccgtgtggaagcttcgatatatgtttggaggagaagagttcaaacaaaacttggagtcaacaataatacttcaagcactactccaaagttaacatgggaaatggtcaaagaactaatggctgctggtgacaaaaggggattgcttgtggagagatcggaaactctcttacgttgcttgaagcagcggtttccttctctaacgcagacttctctagacataagcaagattcaatggaacaaggatattgggaaatcaatcctcgaaagctactcaagggctttggagagcttagcatcaaacatcatagcacgaatcgatgatttactctacgtggacgacttaacaaagcaatcagatgataacaatcttttgtcaagtccagcggtcagcagcattatagctcacaagaaagtagtaccactcccttatctaatatctgcatcaggaactccatatagaacaagcttctcaacaacaccaggcttctctccttcaatgattagccccaagaaaggagagaggagaacaccttactccagcaaggacactaacaaaatcattgagaaaggtcttccttctcgaggatatggagtgagaagagtcttgaacaattatcttggcatggaatcaaaactgaaaatatgcgttaatccgtcagataatgcagatacagcagtgattaaccaaatcagcaaagacgtggaagaagagaagaaaagaaactcaacatcagtccatcaaaagggtcctccaaagtacactgtctcttaa

SEQ ID NO: 30070 - protein, 571 aa, Arabidopsis thaliana
  misc_feature (1)..(571): Ceres Seq. ID no. 4944064
MENLVKSCAGIEKKRSNLTPSMEDILTESKERSSTSGASYESSSTTTVASSSPPPPPSQILDVEMMKERFAKLLLGEDMSGSGKGVCTALAISNAITNLCATIFGQLWRLEPLSSEKKEMWRREMEWILSVSDHIVELTPSTQTYPDGNKFEVMTCRPRFDLFINLPALRKLDNMLLDILASFKKTEFWYVDQGIVASENDGSASFRRKIQRQEEKWWLPVPRLAPNGLTEEARTELNHKRECATQILKAAMAINSLALTEMDVPKSYLETLPKNGRSCLGDVIYRYVTSDKFSAESLLDCLDLSSEHIALDIANRVEASIYVWRRRVQTKLGVNNNTSSTTPKLTWEMVKELMAAGDKRGLLVERSETLLRCLKQRFPSLTQTSLDISKIQWNKDIGKSILESYSRALESLASNIIARIDDLLYVDDLTKQSDDNNLLSSPAVSSIIAHKKVVPLPYLISASGTPYRTSFSTTPGFSPSMISPKKGERRTPYSSKDTNKIIEKGLPSRGYGVRRVLNNYLGMESKLKICVNPSDNADTAVINQISKDVEEEKKRNSTSVHQKGPPKYTVS

SEQ ID NO: 30071 - protein, 550 aa, Arabidopsis thaliana
  misc_feature (1)..(550): Ceres Seq. ID no. 4944065
MEDILTESKERSSTSGASYESSSTTTVASSSPPPPPSQILDVEMMKERFAKLLLGEDMSGSGKGVCTALAISNAITNLCATIFGQLWRLEPLSSEKKEMWRREMEWILSVSDHIVELTPSTQTYPDGNKFEVMTCRPRFDLFINLPALRKLDNMLLDILASFKKTEFWYVDQGIVASENDGSASFRRKIQRQEEKWWLPVPRLAPNGLTEEARTELNHKRECATQILKAAMAINSLALTEMDVPKSYLETLPKNGRSCLGDVIYRYVTSDKFSAESLLDCLDLSSEHIALDIANRVEASIYVWRRRVQTKLGVNNNTSSTTPKLTWEMVKELMAAGDKRGLLVERSETLLRCLKQRFPSLTQTSLDISKIQWNKDIGKSILESYSRALESLASNIIARIDDLLYVDDLTKQSDDNNLLSSPAVSSIIAHKKVVPLPYLISASGTPYRTSFSTTPGFSPSMISPKKGERRTPYSSKDTNKIIEKGLPSRGYGVRRVLNNYLGMESKLKICVNPSDNADTAVINQISKDVEEEKKRNSTSVHQKGPPKYTVS

SEQ ID NO: 30072 - protein, 507 aa, Arabidopsis thaliana
  misc_feature (1)..(507): Ceres Seq. ID no. 4944066
MMKERFAKLLLGEDMSGSGKGVCTALAISNAITNLCATIFGQLWRLEPLSSEKKEMWRREMEWILSVSDHIVELTPSTQTYPDGNKFEVMTCRPRFDLFINLPALRKLDNMLLDILASFKKTEFWYVDQGIVASENDGSASFRRKIQRQEEKWWLPVPRLAPNGLTEEARTELNHKRECATQILKAAMAINSLALTEMDVPKSYLETLPKNGRSCLGDVIYRYVTSDKFSAESLLDCLDLSSEHIALDIANRVEASIYVWRRRVQTKLGVNNNTSSTTPKLTWEMVKELMAAGDKRGLLVERSETLLRCLKQRFPSLTQTSLDISKIQWNKDIGKSILESYSRALESLASNIIARIDDLLYVDDLTKQSDDNNLLSSPAVSSIIAHKKVVPLPYLISASGTPYRTSFSTTPGFSPSMISPKKGERRTPYSSKDTNKIIEKGLPSRGYGVRRVLNNYLGMESKLKICVNPSDNADTAVINQISKDVEEEKKRNSTSVHQKGPPKYTVS

SEQ ID NO: 30073 - DNA, 1023 bp, Arabidopsis thaliana
  misc_feature (1)..(1023): Ceres Seq. ID no. 4944172
atgtgtcacaagcccgagctccttaaggaaggcaaaagcgaaggccaagaagaagaagggctaagctacgagttccaagagatgttggactctcttcctaaggagagaggacggagaaatcgttacctttacttattccaagggtttcggtgccaagctaaggagattcaagctatcacgtctttccaaaaacattttcagtcccttccagacgacgttgtcctcgccaccatacctaaatctggcacaacctggttaaaagctttaactttcaccatccttacccgtcatcggtttgatccggtttcctcatcaagttccgaccaccctcttctcacatccaaccctcacgacctcgtacctttcttcgagtacaagctttacgccaacggaaatgttcccgatctctcgggtctagccagtccaagaacattcgcaacccacgtaccgttcggtgcccttaaggattcggtcgagaatcccagtgtgaaggttgtgtacctgtgccggaacccgtttgacacattcatctccatgtggcattacatcaacaacatcacttccgagtcagtgagcgcagtcttgctagacgaagcttttgatctatattgccggggattactgatcggatttggcccgttttgggaacacatgttgggatactggagagagagcttgaagaggccagagaaagtcttatttttaaagtacgaggatctcaaagaagacatcgagaccaacttgaagaagctagcaagtttcttaggacttcctttcaccgaagaagaggaacaaaagggagttgtgaaagctatcgctgatctgtgtagctttgagaatctgaagaagttggaggtgaacaagtcaagcaaattgatccagaactatgagaaccggttcttgtttaggaaaggagaagtgagtgatttggttaactatttgtcgccatcacaagtggaaagattgtcagccttagtggatgacaagttagctggatctggtctcactttcagattgagttaa

SEQ ID NO: 30074 - protein, 340 aa, Arabidopsis thaliana
  misc_feature (1)..(340): Ceres Seq. ID no. 4944173
MCHKPELLKEGKSEGQEEEGLSYEFQEMLDSLPKERGRRNRYLYLFQGFRCQAKEIQAITSFQKHFQSLPDDVVLATIPKSGTTWLKALTFTILTRHRFDPVSSSSSDHPLLTSNPHDLVPFFEYKLYANGNVPDLSGLASPRTFATHVPFGALKDSVENPSVKVVYLCRNPFDTFISMWHYINNITSESVSAVLLDEAFDLYCRGLLIGFGPFWEHMLGYWRESLKRPEKVLFLKYEDLKEDIETNLKKLASFLGLPFTEEEEQKGVVKAIADLCSFENLKKLEVNKSSKLIQNYENRFLFRKGEVSDLVNYLSPSQVERLSALVDDKLAGSGLTFRLS

SEQ ID NO: 30075 - protein, 313 aa, Arabidopsis thaliana
  misc_feature (1)..(313): Ceres Seq. ID no. 4944174
MLDSLPKERGRRNRYLYLFQGFRCQAKEIQAITSFQKHFQSLPDDVVLATIPKSGTTWLKALTFTILTRHRFDPVSSSSSDHPLLTSNPHDLVPFFEYKLYANGNVPDLSGLASPRTFATHVPFGALKDSVENPSVKVVYLCRNPFDTFISMWHYINNITSESVSAVLLDEAFDLYCRGLLIGFGPFWEHMLGYWRESLKRPEKVLFLKYEDLKEDIETNLKKLASFLGLPFTEEEEQKGVVKAIADLCSFENLKKLEVNKSSKLIQNYENRFLFRKGEVSDLVNYLSPSQVERLSALVDDKLAGSGLTFRLS

SEQ ID NO: 30076 - DNA, 1194 bp, Arabidopsis thaliana
  misc_feature (1)..(1194): Ceres Seq. ID no. 4944298
atgttgcctaacgaagaacttgttccggtgaagaggattacaccccagtcatcgtggagttggatttccatagacgcgacgggaaaaaaaacggtgcttgacgttgacaaatatgtgattatgcaccgtgttcagatccacgctcgcgatctccggatacttgacccaaatctcttttacccttctgctattctgggtcgagaaagagccattgttcttaacttagagcatatcaaggcgatcatcactgccaaagaggattcgtcagatgaaaatcttattccaaccctggaggagtttcagacacgcttatctgttggaaacaaggcacacggtggtcaattagatggtgatgtggttgaagaagatgaatccgcgtttgaatttcgggcactagaggttgctttggaagctatttgtagcttcctagctgcaaggacaatagaattagagaagtctgcttatcctgctttggatgaacttaccttgaagttccatgacccgattgacagctcaggtccaaaaggtgagcaggaatcacttggaacagggtctatgtttagaaaagaaatatatttaggagttatgcataagataaaagagttcaaagactcattgaaagaaccatcaaaactggagtatatgcttttgggattataccgagtgaaagttgggtctaaatcagaatatgatgtggatttgcagataaaggatgagcttgaacagttgttggaagatgacgaagatatggctgaactctacctttcaaggaagctcgcgggtgcatcttcaccagctattgattctggtgaacacattaattggtatcctacgtccccaacaataggtgctaagatttccagagcaaagagccatttggtgaggtcagccacggttcgtggggacgacaaaaatgatgttgaagaagttgaaatgttgcttgagctacgcgagtatgtggatgagacagaagatttccttaatatccagttcgaaattattttaaccgctggaagcatctgtgtatcagtgtactctgtagttgttggcattctaggcatgaacattcctttcccgtggaacatcaaaaaacatatgttcaaatgggtggtgagcggcactgcaacagtttgcgcaatcttgttcgtgattataatgtcgttcgctcggtacaaaaagctctttggtttttga

SEQ ID NO: 30077 - protein, 397 aa, Arabidopsis thaliana
  misc_feature (1)..(397): Ceres Seq. ID no. 4944299
MLPNEELVPVKRITPQSSWSWISIDATGKKTVLDVDKYVIMHRVQIHARDLRILDPNLFYPSAILGRERAIVLNLEHIKAIITAKEDSSDENLIPTLEEFQTRLSVGNKAHGGQLDGDVVEEDESAFEFRALEVALEAICSFLAARTIELEKSAYPALDELTLKFHDPIDSSGPKGEQESLGTGSMFRKEIYLGVMHKIKEFKDSLKEPSKLEYMLLGLYRVKVGSKSEYDVDLQIKDELEQLLEDDEDMAELYLSRKLAGASSPAIDSGEHINWYPTSPTIGAKISRAKSHLVRSATVRGDDKNDVEEVEMLLELREYVDETEDFLNIQFEIILTAGSICVSVYSVVVGILGMNIPFPWNIKKHMFKWVVSGTATVCAILFVIIMSFARYKKLFGF

SEQ ID NO: 30078 - protein, 357 aa, Arabidopsis thaliana
  misc_feature (1)..(357): Ceres Seq. ID no. 4944300
MHRVQIHARDLRILDPNLFYPSAILGRERAIVLNLEHIKAIITAKEDSSDENLIPTLEEFQTRLSVGNKAHGGQLDGDVVEEDESAFEFRALEVALEAICSFLAARTIELEKSAYPALDELTLKFHDPIDSSGPKGEQESLGTGSMFRKEIYLGVMHKIKEFKDSLKEPSKLEYMLLGLYRVKVGSKSEYDVDLQIKDELEQLLEDDEDMAELYLSRKLAGASSPAIDSGEHINWYPTSPTIGAKISRAKSHLVRSATVRGDDKNDVEEVEMLLELREYVDETEDFLNIQFEIILTAGSICVSVYSVVVGILGMNIPFPWNIKKHMFKWVVSGTATVCAILFVIIMSFARYKKLFGF

SEQ ID NO: 30079 - protein, 212 aa, Arabidopsis thaliana
  misc_feature (1)..(212): Ceres Seq. ID no. 4944301
MFRKEIYLGVMHKIKEFKDSLKEPSKLEYMLLGLYRVKVGSKSEYDVDLQIKDELEQLLEDDEDMAELYLSRKLAGASSPAIDSGEHINWYPTSPTIGAKISRAKSHLVRSATVRGDDKNDVEEVEMLLELREYVDETEDFLNIQFEIILTAGSICVSVYSVVVGILGMNIPFPWNIKKHMFKWVVSGTATVCAILFVIIMSFARYKKLFGF

SEQ ID NO: 30080 - DNA, 1206 bp, Arabidopsis thaliana
  misc_feature (1)..(1206): Ceres Seq. ID no. 4944309
atgtcacctgacggagaacttgttccggtggattcatcggcggtagtcacggcgaagaggaagacatctcagttatcaaggagttggatttccatagacgccacggggcaaaaaactgtgcttgacgttgacaaacacgtgattatgcaccgtgttcaaatccacgctcgtgatctccggatccttgacccgaatctattttacccttctgctattttgggtcgagaaagagccattgttcttaacttagagcatatcaaggcgattatcactgccgaagaggtcagaatcatttcttactggcttgtagccaaatattcgtcagatgaaaatgttatccccgtcctggaggagtttcagagaagattacctgtaggaaacgaggcacatggtgttcacggagatggtgatttgggtgaagaagatgaatccccgtttgaattccgggcgctagaggtggccttggaagctatttgtagttttctagctgcaaggacaacagaactagagaagtttgcttatcctgctttggatgaacttaccttgaagataagtagccgtaacttggaaagagttcgtaaattgaagagtgccatgacccgtttgacagctcgggtccaaaaggtaagggatgagcttgaacagttgttggatgatgatggtgatatggctgatctctaccttacaaggaagcttgttggtgcatcttcatctgtcagcgtttcagatgaacccatttggtatcctacttccccaacaataggttctatgatttccagagcaagtagagtgagtttagtcacggttcgtggagacgacgaaactgatgttgaagagcttgaaatgttgcttgaggcatacttcatgcaaatagacagcactttgaacaaattaaccgagctacgcgagtatattgatgacacagaggattacattaacatccaggctataatcactgtttatttgcagttagacaatcatcgaaatcagctgattcagttagagctaatgttaagcgcaggaaccgtctgtgtatcagtgtactctatgatcgccggaatattcggcatgaacattcccaacacatggaaccacgaccatggttacattttcaaatgggtcgtaagtctcacgggaacattttgcatagtcttgttcgtgattatactgtcgtacgctcggtttagaggactcatcggatcttaa

SEQ ID NO: 30081 - protein, 401 aa, Arabidopsis thaliana
  misc_feature (1)..(401): Ceres Seq. ID no. 4944310
MSPDGELVPVDSSAVVTAKRKTSQLSRSWISIDATGQKTVLDVDKHVIMHRVQIHARDLRILDPNLFYPSAILGRERAIVLNLEHIKAIITAEEVRIISYWLVAKYSSDENVIPVLEEFQRRLPVGNEAHGVHGDGDLGEEDESPFEFRALEVALEAICSFLAARTTELEKFAYPALDELTLKISSRNLERVRKLKSAMTRLTARVQKVRDELEQLLDDDGDMADLYLTRKLVGASSSVSVSDEPIWYPTSPTIGSMISRASRVSLVTVRGDDETDVEELEMLLEAYFMQIDSTLNKLTELREYIDDTEDYINIQAIITVYLQLDNHRNQLIQLELMLSAGTVCVSVYSMIAGIFGMNIPNTWNHDHGYIFKWVVSLTGTFCIVLFVIILSYARFRGLIGS

SEQ ID NO: 30082 - protein, 353 aa, Arabidopsis thaliana
  misc_feature (1)..(353): Ceres Seq. ID no. 4944311
MHRVQIHARDLRILDPNLFYPSAILGRERAIVLNLEHIKAIITAEEVRIISYWLVAKYSSDENVIPVLEEFQRRLPVGNEAHGVHGDGDLGEEDESPFEFRALEVALEAICSFLAARTTELEKFAYPALDELTLKISSRNLERVRKLKSAMTRLTARVQKVRDELEQLLDDDGDMADLYLTRKLVGASSSVSVSDEPIWYPTSPTIGSMISRASRVSLVTVRGDDETDVEELEMLLEAYFMQIDSTLNKLTELREYIDDTEDYINIQAIITVYLQLDNHRNQLIQLELMLSAGTVCVSVYSMIAGIFGMNIPNTWNHDHGYIFKWVVSLTGTFCIVLFVIILSYARFRGLIGS

SEQ ID NO: 30083 - protein, 203 aa, Arabidopsis thaliana
  misc_feature (1)..(203): Ceres Seq. ID no. 4944312
MTRLTARVQKVRDELEQLLDDDGDMADLYLTRKLVGASSSVSVSDEPIWYPTSPTIGSMISRASRVSLVTVRGDDETDVEELEMLLEAYFMQIDSTLNKLTELREYIDDTEDYINIQAIITVYLQLDNHRNQLIQLELMLSAGTVCVSVYSMIAGIFGMNIPNTWNHDHGYIFKWVVSLTGTFCIVLFVIILSYARFRGLIGS

SEQ ID NO: 30084 - DNA, 420 bp, Arabidopsis thaliana
  misc_feature (1)..(420): Ceres Seq. ID no. 4944327
atgcctcgaggaagctccggaggaagatctagctaccgtccttctcgccctgcagctgcacgaagcccgcctcctcaatctgtgaaccgtgctcctcctccagcaacagctcagcctagtagcggtggttctttcttaggcaatattggtgcatccataactgaaggtctggcttggggtactggaactgcatttggacacagggttgtggattctgtgatgggtccacgaacctttaagcacgaaaccgttgtttctcaggttccatctgctgcaaataccatgactgcttgtgacattcactccaaggctttccaagattgcgtcaaccattttggaagcgacatcagtaagtgccagttctacatggacatgctgagtgaatgcaagaagaattctggttccgtggtggctgcttaa

SEQ ID NO: 30085 - protein, 139 aa, Arabidopsis thaliana
  misc_feature (1)..(139): Ceres Seq. ID no. 4944328
MPRGSSGGRSSYRPSRPAAARSPPPQSVNRAPPPATAQPSSGGSFLGNIGASITEGLAWGTGTAFGHRVVDSVMGPRTFKHETVVSQVPSAANTMTACDIHSKAFQDCVNHFGSDISKCQFYMDMLSECKKNSGSVVAA

SEQ ID NO: 30086 - DNA, 2988 bp, Arabidopsis thaliana
  misc_feature (1)..(2988): Ceres Seq. ID no. 4944508
atgactaattgtgttcctctttcttttgttcagagctgcgttggacatagaggagctgctagattcttccattcccgattatataagaataggttagataaagatgtctacttgtgcaacaacctcatcaatgcttatcttgaaacgggtgattcggtttctgcacgtaaggtgtttgacgaaatgcctcttaggaactgtgtttcttgggcgtgtattgtttcaggatatagtcgtaatggagaacataaggaagctttagtgtttttgagagatatggttaaagaagggattttttctaatcaatacgcttttgttagtgttcttcgggcttgtcaggagataggttctgttgggattcttttcgggagacaaattcatggcctgatgttcaaactttcttatgcagtggatgcagttgtttctaatgtgctcatatcaatgtactggaaatgtatcgggtctgtcggttatgctctctgtgctttcggtgacatagaagttaagaattctgtttcatggaattcgattatttcggtttattcacaggctggggatcagagatctgcgtttaggattttctctagcatgcaatatgatggttctagaccaactgaatacacttttggtagtcttgtaactactgcttgttctttgactgaaccagatgttcgtttgctcgagcagatcatgtgcaccatacagaaatcagggttgctcacagatctttttgttggcagcggactggtgagtgcatttgcaaagtctggttcattgagttatgctaggaaggtttttaatcagatggaaacaagaaatgcggtcaccttaaatggtctaatggttggtctggtgcgacagaaatggggagaagaagcaactaaactctttatggatatgaatagcatgattgatgttagtcctgagtcatacgtgattctcctgagctcatttcctgagtattctctagcagaggaagttggtctgaaaaaaggcagagaggttcatggacatgtaataacaactggcttagttgacttcatggttggcattggaaatggccttgttaatatgtatgctaagtgcggctcaatagctgacgctagacgtgttttctatttcatgaccgataaagattctgtctcctggaactccatgatcactggtcttgaccaaaacggctgtttcatagaagcagttgaacgctacaaaagtatgagacgacatgacatcttgcctggaagtttcacactgattagttcgctaagctcatgcgcgagcttgaaatgggcaaaattaggacaacagattcatggagagagcctcaagttggggattgatttgaatgtttcagtttcaaatgcgcttatgacactgtatgcagagaccggctatctcaatgaatgccgtaagatattttcctcaatgccagagcatgatcaggtgtcttggaattctataataggagctttagcccgttcagaacggtcattacctgaagccgtggtatgtttcttgaatgcacaacgagcaggacagaaacttaatagaataaccttttcaagcgttctttcagccgtttcatccctttcatttggtgaactgggcaagcagatacacggactagctttaaagaacaatattgcagatgaagcaaccactgaaaatgcgcttatagcttgttatgggaagtgtggggagatggatgggtgtgagaagatattttctagaatggcagagagaagagataatgtaacttggaactcaatgatctcggggtatatacataacgagctccttgccaaggccttggatttggtctggtttatgttgcagacaggtcagagattggatagtttcatgtatgcgactgttcttagcgcgtttgcttctgttgcaacgctagagcgtggtatggaagtgcatgcttgttcggtgagagcttgtttagaatctgacgtggtagttgggagtgcacttgttgacatgtattccaaatgtggaagactagattatgctttgaggttttttaacacaatgcctgtaagaaattcatattcttggaactctatgatttcgggctatgcacgacatgggcaaggagaagaagctttgaagctttttgaaactatgaagctcgatggccaaacaccacctgaccatgttacattcgtgggagtcttgtcagcttgtagccatgcgggtctgcttgaagaagggtttaaacatttcgaatctatgagtgattcatatggcttagctcctaggattgaacacttctcatgtatggctgacgtgctaggccgtgcaggtgaactcgataagttggaagatttcatcgagaaaatgccaatgaagcctaatgttctcatctggaggactgtacttggggcttgttgcagagcaaatggtcgaaaagcagaattaggaaagaaagcagcagaaatgctttttcaattggagccagaaaacgctgtaaactatgtgctacttggtaacatgtatgctgctggaggaagatgggaagatttagtaaaggcgagaaagaaaatgaaagatgcagatgtgaaaaaggaagctggttatagttgggtcaccatgaaggatggagtccatatgtttgttgctggggataagtcacacccagacgctgatgtgatctacaagaagctcaaggagctcaacagaaagatgagagacgcaggttatgtgccacagacaggatttgccttgtatgatctagagcaagagaacaaggaagagattctgagctatcacagcgagaagctcgctgtagcttttgttctcgcagcccagaggagctctacgctgccaatcagaataatgaagaacctcagagtttgcggtgattgccactctgccttcaagtatatatcaaagatcgaagggagacagataattctaagggattcaaacaggtttcatcattttcaagacggtgcatgttcttgtagtgatttctggtga

SEQ ID NO: 30087 - protein, 995 aa, Arabidopsis thaliana
  misc_feature (1)..(995): Ceres Seq. ID no. 4944509
MTNCVPLSFVQSCVGHRGAARFFHSRLYKNRLDKDVYLCNNLINAYLETGDSVSARKVFDEMPLRNCVSWACIVSGYSRNGEHKEALVFLRDMVKEGIFSNQYAFVSVLRACQEIGSVGILFGRQIHGLMFKLSYAVDAVVSNVLISMYWKCIGSVGYALCAFGDIEVKNSVSWNSIISVYSQAGDQRSAFRIFSSMQYDGSRPTEYTFGSLVTTACSLTEPDVRLLEQIMCTIQKSGLLTDLFVGSGLVSAFAKSGSLSYARKVFNQMETRNAVTLNGLMVGLVRQKWGEEATKLFMDMNSMIDVSPESYVILLSSFPEYSLAEEVGLKKGREVHGHVITTGLVDFMVGIGNGLVNMYAKCGSIADARRVFYFMTDKDSVSWNSMITGLDQNGCFIEAVERYKSMRRHDILPGSFTLISSLSSCASLKWAKLGQQIHGESLKLGIDLNVSVSNALMTLYAETGYLNECRKIFSSMPEHDQVSWNSIIGALARSERSLPEAVVCFLNAQRAGQKLNRITFSSVLSAVSSLSFGELGKQIHGLALKNNIADEATTENALIACYGKCGEMDGCEKIFSRMAERRDNVTWNSMISGYIHNELLAKALDLVWFMLQTGQRLDSFMYATVLSAFASVATLERGMEVHACSVRACLESDVVVGSALVDMYSKCGRLDYALRFFNTMPVRNSYSWNSMISGYARHGQGEEALKLFETMKLDGQTPPDHVTFVGVLSACSHAGLLEEGFKHFESMSDSYGLAPRIEHFSCMADVLGRAGELDKLEDFIEKMPMKPNVLIWRTVLGACCRANGRKAELGKKAAEMLFQLEPENAVNYVLLGNMYAAGGRWEDLVKARKKMKDADVKKEAGYSWVTMKDGVHMFVAGDKSHPDADVIYKKLKELNRKMRDAGYVPQTGFALYDLEQENKEEILSYHSEKLAVAFVLAAQRSSTLPIRIMKNLRVCGDCHSAFKYISKIEGRQIILRDSNRFHHFQDGACSCSDFW

SEQ ID NO: 30088 - protein, 934 aa, Arabidopsis thaliana
  misc_feature (1)..(934): Ceres Seq. ID no. 4944510
MPLRNCVSWACIVSGYSRNGEHKEALVFLRDMVKEGIFSNQYAFVSVLRACQEIGSVGILFGRQIHGLMFKLSYAVDAVVSNVLISMYWKCIGSVGYALCAFGDIEVKNSVSWNSIISVYSQAGDQRSAFRIFSSMQYDGSRPTEYTFGSLVTTACSLTEPDVRLLEQIMCTIQKSGLLTDLFVGSGLVSAFAKSGSLSYARKVFNQMETRNAVTLNGLMVGLVRQKWGEEATKLFMDMNSMIDVSPESYVILLSSFPEYSLAEEVGLKKGREVHGHVITTGLVDFMVGIGNGLVNMYAKCGSIADARRVFYFMTDKDSVSWNSMITGLDQNGCFIEAVERYKSMRRHDILPGSFTLISSLSSCASLKWAKLGQQIHGESLKLGIDLNVSVSNALMTLYAETGYLNECRKIFSSMPEHDQVSWNSIIGALARSERSLPEAVVCFLNAQRAGQKLNRITFSSVLSAVSSLSFGELGKQIHGLALKNNIADEATTENALIACYGKCGEMDGCEKIFSRMAERRDNVTWNSMISGYIHNELLAKALDLVWFMLQTGQRLDSFMYATVLSAFASVATLERGMEVHACSVRACLESDVVVGSALVDMYSKCGRLDYALRFFNTMPVRNSYSWNSMISGYARHGQGEEALKLFETMKLDGQTPPDHVTFVGVLSACSHAGLLEEGFKHFESMSDSYGLAPRIEHFSCMADVLGRAGELDKLEDFIEKMPMKPNVLIWRTVLGACCRANGRKAELGKKAAEMLFQLEPENAVNYVLLGNMYAAGGRWEDLVKARKKMKDADVKKEAGYSWVTMKDGVHMFVAGDKSHPDADVIYKKLKELNRKMRDAGYVPQTGFALYDLEQENKEEILSYHSEKLAVAFVLAAQRSSTLPIRIMKNLRVCGDCHSAFKYISKIEGRQIILRDSNRFHHFQDGACSCSDFW

SEQ ID NO: 30089 - protein, 903 aa, Arabidopsis thaliana
  misc_feature (1)..(903): Ceres Seq. ID no. 4944511
MVKEGIFSNQYAFVSVLRACQEIGSVGILFGRQIHGLMFKLSYAVDAVVSNVLISMYWKCIGSVGYALCAFGDIEVKNSVSWNSIISVYSQAGDQRSAFRIFSSMQYDGSRPTEYTFGSLVTTACSLTEPDVRLLEQIMCTIQKSGLLTDLFVGSGLVSAFAKSGSLSYARKVFNQMETRNAVTLNGLMVGLVRQKWGEEATKLFMDMNSMIDVSPESYVILLSSFPEYSLAEEVGLKKGREVHGHVITTGLVDFMVGIGNGLVNMYAKCGSIADARRVFYFMTDKDSVSWNSMITGLDQNGCFIEAVERYKSMRRHDILPGSFTLISSLSSCASLKWAKLGQQIHGESLKLGIDLNVSVSNALMTLYAETGYLNECRKIFSSMPEHDQVSWNSIIGALARSERSLPEAVVCFLNAQRAGQKLNRITFSSVLSAVSSLSFGELGKQIHGLALKNNIADEATTENALIACYGKCGEMDGCEKIFSRMAERRDNVTWNSMISGYIHNELLAKALDLVWFMLQTGQRLDSFMYATVLSAFASVATLERGMEVHACSVRACLESDVVVGSALVDMYSKCGRLDYALRFFNTMPVRNSYSWNSMISGYARHGQGEEALKLFETMKLDGQTPPDHVTFVGVLSACSHAGLLEEGFKHFESMSDSYGLAPRIEHFSCMADVLGRAGELDKLEDFIEKMPMKPNVLIWRTVLGACCRANGRKAELGKKAAEMLFQLEPENAVNYVLLGNMYAAGGRWEDLVKARKKMKDADVKKEAGYSWVTMKDGVHMFVAGDKSHPDADVIYKKLKELNRKMRDAGYVPQTGFALYDLEQENKEEILSYHSEKLAVAFVLAAQRSSTLPIRIMKNLRVCGDCHSAFKYISKIEGRQIILRDSNRFHHFQDGACSCSDFW

SEQ ID NO: 30090 - DNA, 750 bp, Arabidopsis thaliana
  misc_feature (1)..(750): Ceres Seq. ID no. 4944658
atggaaaagttgaaaggccttggctttgatccttctttcttcaccggagctataactagtggtgaactaactcatcaatctttgcagaggagagatgatccttggtttgctgcactgggaaggaggtgcattcacattacttggaatgaccgaggagcaatctctttggagggtctagatctaaatgttgtggagaatgtggaagaagctgactttgttttagcgcacggcactgaagccctaggacttccttcaggcagtgtatctccaaggactattgatgagctagagaagattttggagaaatctgcagctcgaggacttcccatgatcgtagctaatccagattacgtgactgttgaagcaaatgtttttcatatcatgccaggtacactagcttccaagtatgaagaactgggaggagaagtgaagtcgatgggaaaacctcataagatgatctatgagtctgctatagcaattgcgggagtcaatccgtctgagtctatcgcagtaggagattcgctacatcatgatataaggggagcaaatgtttcaggaattgaatcaatattcatcactggagggattcatggtaatgagcttggtctcacttcttttgatgaaactgcaagtctagactcagtcaagacccttactgctaaacacaatgcattcccaacttatgtattatcagcctttaaatgctcatttgctgagaaagtaatttatagctgtgtgaatacaaaatga

SEQ ID NO: 30091 - protein, 249 aa, Arabidopsis thaliana
  misc_feature (1)..(249): Ceres Seq. ID no. 4944659
MEKLKGLGFDPSFFTGAITSGELTHQSLQRRDDPWFAALGRRCIHITWNDRGAISLEGLDLNVVENVEEADFVLAHGTEALGLPSGSVSPRTIDELEKILEKSAARGLPMIVANPDYVTVEANVFHIMPGTLASKYEELGGEVKSMGKPHKMIYESAIAIAGVNPSESIAVGDSLHHDIRGANVSGIESIFITGGIHGNELGLTSFDETASLDSVKTLTAKHNAFPTYVLSAFKCSFAEKVIYSCVNTK

SEQ ID NO: 30092 - protein, 140 aa, Arabidopsis thaliana
  misc_feature (1)..(140): Ceres Seq. ID no. 4944660
MIVANPDYVTVEANVFHIMPGTLASKYEELGGEVKSMGKPHKMIYESAIAIAGVNPSESIAVGDSLHHDIRGANVSGIESIFITGGIHGNELGLTSFDETASLDSVKTLTAKHNAFPTYVLSAFKCSFAEKVIYSCVNTK

SEQ ID NO: 30093 - DNA, 1194 bp, Arabidopsis thaliana
  misc_feature (1)..(1194): Ceres Seq. ID no. 4944798
atggattaccgaccttctgatagtagtggtacagatgatgacctgcctccatctcatcaaggtagatatcaaagaaacgccagacctaccgggaatggaaggccttcagttctcaattctgctcctttatcacgggtgcacaatgaaatggaaactcaaattcatctcattgagcaagaagcttatagctcgatactccgcgcatttaaagcccagtccgatgctattacctgggagaaagaaagtttgatcactgaactcagaaaagaacttcgagtgtctgatgaggaacacagagagctgttatcaagggttaacgctgatgaaatgatcaggcgaataagggaatggagaaaggcaaacagccttcagtctagtgttcctcagctggttcatgatgctccgagtccggctgtatcaggatcacgtaagaagcaaaagacatcacaatcaatcgcctcattagcgatgggcccaccatctccttctttgcacccttcaatgcaaccatcgtcatctgcactaagaaggggaggtcctccaccaggtccaaagaccaagaagccaaagacatcgatgcagtacccatctacaggcattgctggaaggccccaggctggcgctttaacaaatgaaccaggtgaatcgggatcatatgacccgttggttggaaggaaggtatggacgaagtggcctgatgacaaccaatactacgaagctgttataactgactacaaccctgttgaggggcgtcatgctttagtgtatgatattaactctgcgaatgaaacctgggaatgggtaaatcttaaagagatatctccgggagatatcagatgggaaggtgaagatcctgggatttctcgtaaaggaggacatcctgggcaaggccgtggaacaaaaaccatggctcgtggtggtcctgcaagcaatgcgggtggtagaggtaggggaagcatgaggatgcagcaacctaagacacagaatggcatcggaaagaaagctttaggcgaaatcgaaattctccacactgagacattgttaaaagaggtggaaaaagtttttgggtcagttaaccccaacccagcagaggtagagaaggcaaagagagtgctgagagatcatgaactagctcttatggatgccatcgcaaagcttgaagaaatatcagatggagaaagcggtaatatttga

SEQ ID NO: 30094 - protein, 397 aa, Arabidopsis thaliana
  misc_feature (1)..(397): Ceres Seq. ID no. 4944799
MDYRPSDSSGTDDDLPPSHQGRYQRNARPTGNGRPSVLNSAPLSRVHNEMETQIHLIEQEAYSSILRAFKAQSDAITWEKESLITELRKELRVSDEEHRELLSRVNADEMIRRIREWRKANSLQSSVPQLVHDAPSPAVSGSRKKQKTSQSIASLAMGPPSPSLHPSMQPSSSALRRGGPPPGPKTKKPKTSMQYPSTGIAGRPQAGALTNEPGESGSYDPLVGRKVWTKWPDDNQYYEAVITDYNPVEGRHALVYDINSANETWEWVNLKEISPGDIRWEGEDPGISRKGGHPGQGRGTKTMARGGPASNAGGRGRGSMRMQQPKTQNGIGKKALGEIEILHTETLLKEVEKVFGSVNPNPAEVEKAKRVLRDHELALMDAIAKLEEISDGESGNI

SEQ ID NO: 30095 - protein, 348 aa, Arabidopsis thaliana
  misc_feature (1)..(348): Ceres Seq. ID no. 4944800
METQIHLIEQEAYSSILRAFKAQSDAITWEKESLITELRKELRVSDEEHRELLSRVNADEMIRRIREWRKANSLQSSVPQLVHDAPSPAVSGSRKKQKTSQSIASLAMGPPSPSLHPSMQPSSSALRRGGPPPGPKTKKPKTSMQYPSTGIAGRPQAGALTNEPGESGSYDPLVGRKVWTKWPDDNQYYEAVITDYNPVEGRHALVYDINSANETWEWVNLKEISPGDIRWEGEDPGISRKGGHPGQGRGTKTMARGGPASNAGGRGRGSMRMQQPKTQNGIGKKALGEIEILHTETLLKEVEKVFGSVNPNPAEVEKAKRVLRDHELALMDAIAKLEEISDGESGNI

SEQ ID NO: 30096 - protein, 288 aa, Arabidopsis thaliana
  misc_feature (1)..(288): Ceres Seq. ID no. 4944801
MIRRIREWRKANSLQSSVPQLVHDAPSPAVSGSRKKQKTSQSIASLAMGPPSPSLHPSMQPSSSALRRGGPPPGPKTKKPKTSMQYPSTGIAGRPQAGALTNEPGESGSYDPLVGRKVWTKWPDDNQYYEAVITDYNPVEGRHALVYDINSANETWEWVNLKEISPGDIRWEGEDPGISRKGGHPGQGRGTKTMARGGPASNAGGRGRGSMRMQQPKTQNGIGKKALGEIEILHTETLLKEVEKVFGSVNPNPAEVEKAKRVLRDHELALMDAIAKLEEISDGESGNI

SEQ ID NO: 30097 - DNA, 2457 bp, Arabidopsis thaliana
  misc_feature (1)..(2457): Ceres Seq. ID no. 4944886
atgagaataattcatgttgcgcagactcgcagattgatgatccgatgcaatcgcattcgacaatgtgggttttctgtgaaaactgcggcattggatttagaatcgtcggattcgataatcccaggcttagactctcatgcttacggtgcaatgctccgtcgctgcattcagaagaacgacccaatttcagcaaaggctattcattgcgacatcttgaagaaaggaagctgcttagaccttttcgccacaaacattctactcaacgcttatgtgaaagctggctttgacaaagatgcgttaaacctgttcgacgaaatgcctgagagaaataatgtctcttttgttactcttgcgcaagggtatgcgtgtcaagatcccattggtttgtattccaggttgcatcgagagggtcatgagcttaatccacacgtcttcacttctttcttgaagttgtttgttagtttggacaaagctgagatttgtccatggttgcattctcctatcgttaagctcggttatgattctaatgcttttgttggagctgcgcttattaatgcttactctgtctgtggttctgttgatagtgcaagaactgtttttgaagggattttgtgcaaagacattgttgtttgggcaggaattgtatcttgctatgtagaaaatggatatttcgaggattctcttaagctgctatcttgtatgaggatggctggtttcatgcccaacaactacacctttgacacggcgcttaaggctagtattgggctaggcgcatttgatttcgcgaaaggtgttcatggccaaatcttaaaaacatgttatgtgttggatcctcgtgtgggtgttggtttgcttcagttgtatacacaactcggagacatgtctgatgctttcaaagtgtttaatgagatgccaaagaatgatgtggtaccttggagttttatgattgctcgtttttgtcaaaacggtttctgcaacgaggcggttgatctttttattcgaatgagggaagcttttgttgtccctaacgagtttactttaagcagtattttgaatggctgtgccatcggaaagtgttctggcttaggtgagcaactccatggtcttgtagtcaaagttggctttgatttggatatctatgtctcaaatgctcttattgatgtatatgccaaatgtgagaaaatggataccgctgtgaagttatttgctgagttatcaagtaaaaatgaggtaagctggaacacagtcattgtcgggtatgagaatctaggcgaaggaggaaaagcgttcagcatgtttcgtgaagcgctcagaaatcaggtgtcggtaactgaagtaactttctcaagtgctcttggagcttgtgcttcattggcgagcatggacctcggtgtccaagttcatggactggcgataaaaaccaataatgccaaaaaagttgcagtgagtaactcattgatagatatgtatgcaaaatgtggtgatatcaaattcgcacaatcggtgttcaacgagatggaaacgatagatgtcgcttcatggaatgcgttgatctcaggctattccacacatggactgggtagacaggcattgagaatcctcgacattatgaaggatagagattgcaagccaaatggtttaacatttcttggtgttctttctggatgcagcaatgcaggattaatagatcaaggtcaagaatgttttgaatcaatgattcgtgatcatggtattgaaccatgtttggaacattatacgtgtatggtcaggcttttgggaagatcagggcagcttgacaaagcaatgaagctgattgaagggattccatatgagcctagcgttatgatctggagggcaatgcttagtgcctctatgaatcagaacaatgaagagtttgcaaggagatcggcagaggaaatactaaagatcaatccaaaggacgaggcgacatatgttctggtatcaaacatgtacgcaggtgcaaaacaatgggcaaacgtagcttccattaggaaaagcatgaaggaaatgggtgtcaagaaggaacctggtttaagttggatagaacatcaaggtgatgtgcattacttcagtgtggggttatcagatcatccggatatgaagctcataaatggaatgttggaatggcttaacatgaaagcaactcgagctggttacgttcctgatcggaatgcggtcctgctcgatatggatgatgaagaaaaggataagagattgtgggttcatagcgagaggttggctttggcgtatgggcttgttcgaatgccatcatcaagaaatcgcatactgatcatgaagaatctacggatatgttcagattgccacagtgctatgaaagtgatttcaagtatcgtacagcgagatctggttataagagatatgaaccggttccatcattttcatgcaggagtctgctcttgcggcgaccactggtga

SEQ ID NO: 30098 - protein, 818 aa, Arabidopsis thaliana; identical to SEQ ID NO: 28478
  misc_feature (1)..(818): Ceres Seq. ID no. 4944887

SEQ ID NO: 30099 - protein, 806 aa, Arabidopsis thaliana; identical to SEQ ID NO: 28479
  misc_feature (1)..(806): Ceres Seq. ID no. 4944888

SEQ ID NO: 30100 - protein, 768 aa, Arabidopsis thaliana
  misc_feature (1)..(768): Ceres Seq. ID no. 4944889
MLRRCIQKNDPISAKAIHCDILKKGSCLDLFATNILLNAYVKAGFDKDALNLFDEMPERNNVSFVTLAQGYACQDPIGLYSRLHREGHELNPHVFTSFLKLFVSLDKAEICPWLHSPIVKLGYDSNAFVGAALINAYSVCGSVDSARTVFEGILCKDIVVWAGIVSCYVENGYFEDSLKLLSCMRMAGFMPNNYTFDTALKASIGLGAFDFAKGVHGQILKTCYVLDPRVGVGLLQLYTQLGDMSDAFKVFNEMPKNDVVPWSFMIARFCQNGFCNEAVDLFIRMREAFVVPNEFTLSSILNGCAIGKCSGLGEQLHGLVVKVGFDLDIYVSNALIDVYAKCEKMDTAVKLFAELSSKNEVSWNTVIVGYENLGEGGKAFSMFREALRNQVSVTEVTFSSALGACASLASMDLGVQVHGLAIKTNNAKKVAVSNSLIDMYAKCGDIKFAQSVFNEMETIDVASWNALISGYSTHGLGRQALRILDIMKDRDCKPNGLTFLGVLSGCSNAGLIDQGQECFESMIRDHGIEPCLEHYTCMVRLLGRSGQLDKAMKLIEGIPYEPSVMIWRAMLSASMNQNNEEFARRSAEEILKINPKDEATYVLVSNMYAGAKQWANVASIRKSMKEMGVKKEPGLSWIEHQGDVHYFSVGLSDHPDMKLINGMLEWLNMKATRAGYVPDRNAVLLDMDDEEKDKRLWVHSERLALAYGLVRMPSSRNRILIMKNLRICSDCHSAMKVISSIVQRDLVIRDMNRFHHFHAGVCSCGDHW

SEQ ID NO: 30101 - DNA, 1999 bp, Arabidopsis thaliana
  misc_feature (1)..(1999): Ceres Seq. ID no. 4944994
aaaacattagtactatttccttcggagcctggccggcgaatccgacaggtcgtttcagctgtgtccgaaggaaagttccaatttttatctgtttttcttcacggaaatccagttaagttgcaggtttccacattgcacagctgtaccatttgtcgagatcacaacacgcaagtctcttagatttagcaagcttatggcttcattgcagttgtacggagttaaaactccagggcttgctttaagttcaaagaggcttgagtttgcttcaaagggggcatgtttttcagttacgttgccctcaagtagtgctgtctttagagacgtagagcattcttgtaggaatataggtttgagagttagttgtgaagctctaagagtcgatttgcttcaaagaaaagagcctgagacgtgcgattcaagcggaactggcaaagagttgacatgtgtaatgaaatttggcggttcatcagtggaatcagcagagaggatgaaagaagttgccaatcttatactcagctttccagatgagaggcccgtcattgtgctatcagcaatgggaaagacgactaataagcttttgaaggctggagagaaggctgttacttgcggtgtcactaacgtagaaagtattgaagaattgagctttataaaggaactccatttaagaactgctcatgagcttggagtggaaacaacggttattgaaaaacacctagaaggactacaccagcttctcaaaggcatatcaatgatgaaagagctaaccttacgcacaagggactacttggtttcatttggagagtgcatgtccacaaggcttttctctgcgtatctcaataaaattggccacaaagcgcgtcaatatgatgcatttgagatcggatttatcaccacagacgactttactaatgctgatatacttgaagcaacataccctgccgtctcaaaaacacttgttggcgactggagcaaggaaaatgcagtccctgttgttactggctacctcggaaagggatggaggtcttgtgctatcactacgctgggtaggggtggcagtgatttgacagctacaacgattgggaaagcgctaggactgcgggaaattcaggtttggaaagatgtggatggagttttgacttgtgatcctaacatatatcctggagctcaatctgttccgtacttaacgttcgatgaggcagctgagcttgcttactttggtgcccaggtgttgcatccactgtctatgaggccagcaagagatggcgacattcctgtgagggttaagaactcgtacaaccccactgctccaggaactgtcatcaccagatcaagagacatgagtaaggctgtgctaaccagcattgttctgaaacgtaatgtgaccatgttggacatagcaagcacccgtatgcttggccaatatggtttccttgccaaggtgtttaccacatttgaagatttaggtatatcggttgatgttgtggcaacaagtgaagttagtatatcattgacattggatccagcaaagctctggggtagagagttaattcagcgagtaaatgaactggataatttggtggaagagctagagaagattgctgttgtgaaactacttcaacgcagatcaatcatctctctcataggaaatgttcagaaatcctcactcatattagagaaggtgttccaagtatttagaagcaatggagtgaatgtgcagatgatctcgcagggtgcatctaaggtaaacatctcattgatagtgaatgatgaagaggcagagcaatgtgtgagggctctccactccgccttctttgagaccgatccttagtgcaacacagagcacccatctctctccttcaactctgcttctgtgcgtagtttaatgctaagaatgtgtcaagacttggaactatttcaaattcttgtccattgttgttgttgttgttgttgttgttgtgatacaatacatcataatttgagccaaagcctataatctttt

SEQ ID NO: 30102 - protein, 544 aa, Arabidopsis thaliana
  misc_feature (1)..(544): Ceres Seq. ID no. 4944995
MASLQLYGVKTPGLALSSKRLEFASKGACFSVTLPSSSAVFRDVEHSCRNIGLRVSCEALRVDLLQRKEPETCDSSGTGKELTCVMKFGGSSVESAERMKEVANLILSFPDERPVIVLSAMGKTTNKLLKAGEKAVTCGVTNVESIEELSFIKELHLRTAHELGVETTVIEKHLEGLHQLLKGISMMKELTLRTRDYLVSFGECMSTRLFSAYLNKIGHKARQYDAFEIGFITTDDFTNADILEATYPAVSKTLVGDWSKENAVPVVTGYLGKGWRSCAITTLGRGGSDLTATTIGKALGLREIQVWKDVDGVLTCDPNIYPGAQSVPYLTFDEAAELAYFGAQVLHPLSMRPARDGDIPVRVKNSYNPTAPGTVITRSRDMSKAVLTSIVLKRNVTMLDIASTRMLGQYGFLAKVFTTFEDLGISVDVVATSEVSISLTLDPAKLWGRELIQRVNELDNLVEELEKIAVVKLLQRRSIISLIGNVQKSSLILEKVFQVFRSNGVNVQMISQGASKVNISLIVNDEEAEQCVRALHSAFFETDP

SEQ ID NO: 30103 - protein, 459 aa, Arabidopsis thaliana
  misc_feature (1)..(459): Ceres Seq. ID no. 4944996
MKFGGSSVESAERMKEVANLILSFPDERPVIVLSAMGKTTNKLLKAGEKAVTCGVTNVESIEELSFIKELHLRTAHELGVETTVIEKHLEGLHQLLKGISMMKELTLRTRDYLVSFGECMSTRLFSAYLNKIGHKARQYDAFEIGFITTDDFTNADILEATYPAVSKTLVGDWSKENAVPVVTGYLGKGWRSCAITTLGRGGSDLTATTIGKALGLREIQVWKDVDGVLTCDPNIYPGAQSVPYLTFDEAAELAYFGAQVLHPLSMRPARDGDIPVRVKNSYNPTAPGTVITRSRDMSKAVLTSIVLKRNVTMLDIASTRMLGQYGFLAKVFTTFEDLGISVDVVATSEVSISLTLDPAKLWGRELIQRVNELDNLVEELEKIAVVKLLQRRSIISLIGNVQKSSLILEKVFQVFRSNGVNVQMISQGASKVNISLIVNDEEAEQCVRALHSAFFETDP

SEQ ID NO: 30104 - protein, 446 aa, Arabidopsis thaliana
  misc_feature (1)..(446): Ceres Seq. ID no. 4944997
MKEVANLILSFPDERPVIVLSAMGKTTNKLLKAGEKAVTCGVTNVESIEELSFIKELHLRTAHELGVETTVIEKHLEGLHQLLKGISMMKELTLRTRDYLVSFGECMSTRLFSAYLNKIGHKARQYDAFEIGFITTDDFTNADILEATYPAVSKTLVGDWSKENAVPVVTGYLGKGWRSCAITTLGRGGSDLTATTIGKALGLREIQVWKDVDGVLTCDPNIYPGAQSVPYLTFDEAAELAYFGAQVLHPLSMRPARDGDIPVRVKNSYNPTAPGTVITRSRDMSKAVLTSIVLKRNVTMLDIASTRMLGQYGFLAKVFTTFEDLGISVDVVATSEVSISLTLDPAKLWGRELIQRVNELDNLVEELEKIAVVKLLQRRSIISLIGNVQKSSLILEKVFQVFRSNGVNVQMISQGASKVNISLIVNDEEAEQCVRALHSAFFETDP

SEQ ID NO: 30105 - DNA, 1086 bp, Arabidopsis thaliana
  misc_feature (1)..(1086): Ceres Seq. ID no. 4945017
atgcatctttttccaaatctcactggccgttcttacttattcaaagaaataaagaactcttctcttcacatgaccatttcaggcaacagctattccattctttcagctcatccatcccttgatagccaagaggtttacccaacagcatgtgctggctccagatacaatactggattcagaaaacaggtcaacctgttccaggaaagctccttcgcaggacccaagcaatacacagaggaagacttcaaggatgagagaaacagtgatttttttgatggatttcttgccattggaacccttggtggagaaacacttcttgatgaacaaccagcaacgccgacatttggcatgtcatttgaggacccagcaatagatgatgcagatgtgacagagaatgatttgaagctcataagcaatgaattggataagttccttgaggctgaagctaaagaaggacaccaccaaccatcaggaagaaacagtgacactaacactattgcatccaccattgaggccattgagggagtagatgatgaagaagataatcagccaatgaagttcccactccaagagtatttttttggatctctaatcgaactcccagaatcaaagattgcagggaagaaggatagggcatcacttggcgaactgtttcaaataacagaagtgcaagataaacaatcagaaaacatatatgggaagaaaaagaagcaacccaattcagctcacaagtccgcaaagcatcttgtgaagaaggtactgaaaaagatacacccatcctcaaggggctctgtcagtggtaaacctgaagtggattccacaaaaaagaagttccaaaaggttttccataggaaagtacatccagaagaatccataatggaaaccaaaatatacagcagcgtggcaaatccaaaaagcagcaaagcaaattctattgacttaacattcgagaaggtgaaccattgtcacgaggcaagtaaaagatgtatccagtatgagcttagaagttctcgctcagccaaaaacggagaacactggatcaagacagacgaagactgtaagtccaccatcatatgcaattcatag

SEQ ID NO: 30106 - protein, 361 aa, Arabidopsis thaliana
  misc_feature (1)..(361): Ceres Seq. ID no. 4945018
MHLFPNLTGRSYLFKEIKNSSLHMTISGNSYSILSAHPSLDSQEVYPTACAGSRYNTGFRKQVNLFQESSFAGPKQYTEEDFKDERNSDFFDGFLAIGTLGGETLLDEQPATPTFGMSFEDPAIDDADVTENDLKLISNELDKFLEAEAKEGHHQPSGRNSDTNTIASTIEAIEGVDDEEDNQPMKFPLQEYFFGSLIELPESKIAGKKDRASLGELFQITEVQDKQSENIYGKKKKQPNSAHKSAKHLVKKVLKKIHPSSRGSVSGKPEVDSTKKKFQKVFHRKVHPEESIMETKIYSSVANPKSSKANSIDLTFEKVNHCHEASKRCIQYELRSSRSAKNGEHWIKTDEDCKSTIICNS

SEQ ID NO: 30107 - protein, 338 aa, Arabidopsis thaliana
  misc_feature (1)..(338): Ceres Seq. ID no. 4945019
MTISGNSYSILSAHPSLDSQEVYPTACAGSRYNTGFRKQVNLFQESSFAGPKQYTEEDFKDERNSDFFDGFLAIGTLGGETLLDEQPATPTFGMSFEDPAIDDADVTENDLKLISNELDKFLEAEAKEGHHQPSGRNSDTNTIASTIEAIEGVDDEEDNQPMKFPLQEYFFGSLIELPESKIAGKKDRASLGELFQITEVQDKQSENIYGKKKKQPNSAHKSAKHLVKKVLKKIHPSSRGSVSGKPEVDSTKKKFQKVFHRKVHPEESIMETKIYSSVANPKSSKANSIDLTFEKVNHCHEASKRCIQYELRSSRSAKNGEHWIKTDEDCKSTIICNS

SEQ ID NO: 30108 - protein, 245 aa, Arabidopsis thaliana
  misc_feature (1)..(245): Ceres Seq. ID no. 4945020
MSFEDPAIDDADVTENDLKLISNELDKFLEAEAKEGHHQPSGRNSDTNTIASTIEAIEGVDDEEDNQPMKFPLQEYFFGSLIELPESKIAGKKDRASLGELFQITEVQDKQSENIYGKKKKQPNSAHKSAKHLVKKVLKKIHPSSRGSVSGKPEVDSTKKKFQKVFHRKVHPEESIMETKIYSSVANPKSSKANSIDLTFEKVNHCHEASKRCIQYELRSSRSAKNGEHWIKTDEDCKSTIICNS

SEQ ID NO: 30109 - DNA, 1299 bp, Arabidopsis thaliana
  misc_feature (1)..(1299): Ceres Seq. ID no. 4945025
atggggtgtgctcaatctactattgctgttgtgggaaggaagaacaagaagaggatcattcaagaatctgtagtgtttgttctacagttccgtgttcctgttcagtctgatcttcagcgccaactcaaaggtgtttctcccaagacaaccatcaatcggttgacatgtttaagaaatcagattgagttggtagctgaggacacagggggttcagccatctctgagttgcgtacagctttggaggagtacttgtcacttctatccggtcttatcaagaaaagttcgtgtttgcaagttttgattaacttaaacagtttagtatattcaaatggtgatattagaatatttaactctacaggtaaagatggaatggagggctgcgtagagctcaaatggaggacccttggcgatggtcgacgagcagagatatgttgcacaaacctttggatggagatgttgatagtgatccacatgatggctgctttggcattgactgaagctaactctctcatgattccaaaggattgctatgcttctggttctggcaatggcgtccgtgtggtctccactgattgcaggagagatgcggttgacttgctgctcaaggcatctggatacttggagttctgcgtccgagagattctgactcaacttcctcatgatataaagagtaagttgccagatgatatgcaggaaagtgtattacaaactctctctatacaagcactaggccagggaactgagattcaacttggattagcagttgatagtcagaaagcaacattgtctgtgaagaggagaattgcatgtgagcaagtcatctacttcactcaggcatatcactgcttgtctagttgtgaagcagttagccatggatgcgccaagaaacttctccggtttatctactggaagtttctggaagcaaaggtattgtatgtgtatgctgcagcatactactaccatggactggtaacagacaagggaagtgagccggcttgtcacttgagcgctgtgtgttgtttccttgcagctgcagagatcctaggagaaagcaaaaaagcctgtcttagcttctgcttagctcctcctgtcacaagggctcctcctatgtggggtgttatgaagcatttgagccagaagattccagaagttgcttttagaaagtcgcagacatatggatacttgcttgaagaagaagaaaaggcaatgcagtgtttgccagagcttccagactttcagttgtcattgagacccgacgactttgaactgcctgaaatagaggatgtctcttcctcatga

SEQ ID NO: 30110 - protein, 432 aa, Arabidopsis thaliana
  misc_feature (1)..(432): Ceres Seq. ID no. 4945026
MGCAQSTIAVVGRKNKKRIIQESVVFVLQFRVPVQSDLQRQLKGVSPKTTINRLTCLRNQIELVAEDTGGSAISELRTALEEYLSLLSGLIKKSSCLQVLINLNSLVYSNGDIRIFNSTGKDGMEGCVELKWRTLGDGRRAEICCTNLWMEMLIVIHMMAALALTEANSLMIPKDCYASGSGNGVRVVSTDCRRDAVDLLLKASGYLEFCVREILTQLPHDIKSKLPDDMQESVLQTLSIQALGQGTEIQLGLAVDSQKATLSVKRRIACEQVIYFTQAYHCLSSCEAVSHGCAKKLLRFIYWKFLEAKVLYVYAAAYYYHGLVTDKGSEPACHLSAVCCFLAAAEILGESKKACLSFCLAPPVTRAPPMWGVMKHLSQKIPEVAFRKSQTYGYLLEEEEKAMQCLPELPDFQLSLRPDDFELPEIEDVSSS

SEQ ID NO: 30111 - protein, 309 aa, Arabidopsis thaliana
  misc_feature (1)..(309): Ceres Seq. ID no. 4945027
MEGCVELKWRTLGDGRRAEICCTNLWMEMLIVIHMMAALALTEANSLMIPKDCYASGSGNGVRVVSTDCRRDAVDLLLKASGYLEFCVREILTQLPHDIKSKLPDDMQESVLQTLSIQALGQGTEIQLGLAVDSQKATLSVKRRIACEQVIYFTQAYHCLSSCEAVSHGCAKKLLRFIYWKFLEAKVLYVYAAAYYYHGLVTDKGSEPACHLSAVCCFLAAAEILGESKKACLSFCLAPPVTRAPPMWGVMKHLSQKIPEVAFRKSQTYGYLLEEEEKAMQCLPELPDFQLSLRPDDFELPEIEDVSSS

SEQ ID NO: 30112 - protein, 283 aa, Arabidopsis thaliana
  misc_feature (1)..(283): Ceres Seq. ID no. 4945028
MEMLIVIHMMAALALTEANSLMIPKDCYASGSGNGVRVVSTDCRRDAVDLLLKASGYLEFCVREILTQLPHDIKSKLPDDMQESVLQTLSIQALGQGTEIQLGLAVDSQKATLSVKRRIACEQVIYFTQAYHCLSSCEAVSHGCAKKLLRFIYWKFLEAKVLYVYAAAYYYHGLVTDKGSEPACHLSAVCCFLAAAEILGESKKACLSFCLAPPVTRAPPMWGVMKHLSQKIPEVAFRKSQTYGYLLEEEEKAMQCLPELPDFQLSLRPDDFELPEIEDVSSS

SEQ ID NO: 30113 - DNA, 1400 bp, Arabidopsis thaliana
  misc_feature (1)..(1400): Ceres Seq. ID no. 4945205
gggttcgagacgacgacaagagacaagctctgtctgtggtcgggaaatcgaaaccagagccttggactgtgtctctgctctgtggagtatccattttcgatttcttgaaggtgaatccagcgaatccttaatctcaagctccgagactgtgcaataaacaaaacagtagctagcagcagcagcaacacatgaactcgtgcaaatcccttatccgtgcctcaatctcttcctttccatttgttcctcttccaaaccctaatttctctatcaccttcatctccgttcgcgccttttctcctctctctgtccttcatccaaattcatcatgtattgtaacagctcgacgcacatttcatggagctgtggctctttcaccggagagcttaacggaagagtctcccaaggatactgtgaaaggattgttaacaaccaatcgtggtgaggcctcaagcttgatgaagatggagcggaggtgtagcttaagcaatggtgagggtgattgtagaggatcttggtttccttacgaggataggttcaggtgtggtgaggtgcatcttagtagccgtgaggtgttggaggcggtgagtcctcatatgatggaagagaggacagataggttcaggcgtgtggtggagaatcgaagctactcggtgtgtcttgtggttgaaggtctctctgattttggaaacatctctgctgctttccgctcagctgatgcgttggggattcaatctgtacatgttgtttcctgtgacagctccaaaaggtgcccctttgaggtataacggaaatcgccatgtgagtatgggagctgagaaatggctggacattgagttttgggacacacctaaagaatgtttcaaagttttgaagtctcgcggttacagaatagctacaactcatttgggaatggacacggtttccatttacgatatggactggtcatgcccaacagcaatagttgttggaaacgagggcaggggaataagtgacgaagcgttggagttatcagatctgcgttgcagtattccgatgaatggaatggttgattcgtttaatgtctcagtggctgcagggattctgatgcaccacgcagtctctgatagaaccactcgtctgggaagccatggagatctgtcggaagcagagaaagagatattgatggctgagttctcacttcgtcacagtagaagctcaatttgcattgcttacgagttcgctaaacgtaaacaacaacactctacctcctcctaattttgaaaccgttgtcttattctctcgctgttttgcgtgttataggcttcgaatgacgcctataaaaactctttcgaactctttttttggtacgacgcttgcttcatgtacaactcttaaattctataaaagacatccttctgtcg

SEQ ID NO: 30114 - protein, 198 aa, Arabidopsis thaliana
  misc_feature (1)..(198): Ceres Seq. ID no. 4945206
MNSCKSLIRASISSFPFVPLPNPNFSITFISVRAFSPLSVLHPNSSCIVTARRTFHGAVALSPESLTEESPKDTVKGLLTTNRGEASSLMKMERRCSLSNGEGDCRGSWFPYEDRFRCGEVHLSSREVLEAVSPHMMEERTDRFRRVVENRSYSVCLVVEGLSDFGNISAAFRSADALGIQSVHVVSCDSSKRCPFEV

SEQ ID NO: 30115 - protein, 179 aa, Arabidopsis thaliana
  misc_feature (1)..(179): Ceres Seq. ID no. 4945207
MRWGFNLYMLFPVTAPKGAPLRYNGNRHVSMGAEKWLDIEFWDTPKECFKVLKSRGYRIATTHLGMDTVSIYDMDWSCPTAIVVGNEGRGISDEALELSDLRCSIPMNGMVDSFNVSVAAGILMHHAVSDRTTRLGSHGDLSEAEKEILMAEFSLRHSRSSICIAYEFAKRKQQHSTSS

SEQ ID NO: 30116 - protein, 171 aa, Arabidopsis thaliana
  misc_feature (1)..(171): Ceres Seq. ID no. 4945208
MLFPVTAPKGAPLRYNGNRHVSMGAEKWLDIEFWDTPKECFKVLKSRGYRIATTHLGMDTVSIYDMDWSCPTAIVVGNEGRGISDEALELSDLRCSIPMNGMVDSFNVSVAAGILMHHAVSDRTTRLGSHGDLSEAEKEILMAEFSLRHSRSSICIAYEFAKRKQQHSTSS

SEQ ID NO: 30117 - DNA, 1271 bp, Arabidopsis thaliana
  misc_feature (1)..(1271): Ceres Seq. ID no. 4945209
accttatctttacttctatcatctattcttcttcttcctccatctctagaaaattataatacttcttgtttcttaaatcttatttgtattacaataaccaaaacccaagtttacaaaacatttcttcttcttgtttttcgaaaccctaaatgttttgagttgtcatggatgtaatagctactacaactactatagtatccgacttggattcacgacaacccgaaatcgaagctccgatccggatccagcccgcgaagcctatttctttctcaaacggcaaacgctgccaccaccatcatcttgcatctgaagcggttgcggttgcgacttataaagaatgtctaaagaatcacgcagcaggtatcggcggtcacgctttagacggatgcggcgagtttatgccgtcaccgtcgtttaactccaatgaccccgcttcactaacgtgcgctgcttgtggttgccaccgtaacttccaccgccgtgaggaggatccatcttctctctctgccatcgtccctgcgatcgaatttcgacctcacaaccgtcaccagcttcctccaccgcctcctcctcatctggcggggattcgtagtccagacgacgatgattcagcttctccaccgccgatctcgtcttcttacatgcttctcgcactctctggaggaagaggaggagctaacacggcggttccaatgtctaggaaacgttttaggacgaagtttagtcagtatcagaaggagaagatgttcgagttctcggagagagttgggtggaggatgccgaaagctgatgacgtggtggttaaggagttttgtcgggagattggagttgataaaagcgttttcaaagtgtggatgcataacaacaagatttcaggacgcagcggcgctagaagagctaacggcggagtagtagtaggaggagtaggagatagtcgtcagagtgttgttccgacaaatgggtcgttttcttcgacgtgaggaaaagaatggaaagcgttgaaaaagcgtcgtcgttttagaggctaattcttttttggtttttcttctctgtgttttgaagattttttatttttagtcaacgggtcaaaatcttttttctattccactttgttttgttatgtcttgtagtttgtactcttgttagtagtttatctttgttagagaggtgatttgagttgtatctttcgaccaaatgtgagaagaaagataaatgagtaacctcctaaaaccgaataacaaagtcaattaatccaattgttttctaaattc

SEQ ID NO: 30118 - protein, 271 aa, Arabidopsis thaliana
  misc_feature (1)..(271): Ceres Seq. ID no. 4945210
MDVIATTTTIVSDLDSRQPEIEAPIRIQPAKPISFSNGKRCHHHHLASEAVAVATYKECLKNHAAGIGGHALDGCGEFMPSPSFNSNDPASLTCAACGCHRNFHRREEDPSSLSAIVPAIEFRPHNRHQLPPPPPPHLAGIRSPDDDDSASPPPISSSYMLLALSGGRGGANTAVPMSRKRFRTKFSQYQKEKMFEFSERVGWRMPKADDVVVKEFCREIGVDKSVFKVWMHNNKISGRSGARRANGGVVVGGVGDSRQSVVPTNGSFSST

SEQ ID NO: 30119 - protein, 193 aa, Arabidopsis thaliana
  misc_feature (1)..(193): Ceres Seq. ID no. 4945211
MPSPSFNSNDPASLTCAACGCHRNFHRREEDPSSLSAIVPAIEFRPHNRHQLPPPPPPHLAGIRSPDDDDSASPPPISSSYMLLALSGGRGGANTAVPMSRKRFRTKFSQYQKEKMFEFSERVGWRMPKADDVVVKEFCREIGVDKSVFKVWMHNNKISGRSGARRANGGVVVGGVGDSRQSVVPTNGSFSST

SEQ ID NO: 30120 - DNA, 1344 bp, Arabidopsis thaliana
  misc_feature (1)..(1344): Ceres Seq. ID no. 4945326
atggttgatgatccgttgaccaatgaggtcgtttcgtggagcagcgggaacaacagcttcgtcgtctggagtgccccggagttctcgaaggtgctcttgcccaagtatttcaagcacaacaacttctccagcttcgtcagacagttaaatacttatggtttcagaaaagttgatcctgaccgatgggaatttgcaaatgaaggatttcttagaggccgaaaacaactactgaagagtattgtcaggagaaaaccttcgcatgtgcagcagaatcagcaacaaactcaagttcagagctcatctgttggtgcttgtgtcgaggtggggaagtttggaatagaagaagaagtggaaagacttaagcgggataagaatgttcttatgcaagaactcgtcaggttaaggcagcaacagcaagctactgaaaaccaactgcagaatgtgggacagaaagttcaggtgatggagcaaaggcaacaacaaatgatgtcgtttttagcaaaggctgttcaaagtccaggtttcttaaaccagttagtacaacagaataataatgatggcaacagacaaattccaggaagcaacaaaaagaggagacttcctgtagatgagcaggagaatcgtggtgacaatgtggctaatggtcttaaccgccagattgttagatatcagccgtcgataaacgaagcagcacaaaatatgcttcgacagttcttaaatactagtacctcacctcggtatgaatcagtttcaaacaatcctgacagtttcctattgggtgatgttcccagttctacctctgtagacaatgggaacccttcaagtagagtttctggagtaacattggccgagttttcacccaacacagttcagtcagcaacgaatcaagtacccgaagcaagtttggctcatcatcctcaagctggtctggttcagccaaatataggtcaaagtccggctcaaggagcagcacctgcagactcttggagccctgaatttgatttagttggatgcgagacagatagtggagagtgttttgatccaataatggctgttttagatgagtcagaaggcgatgcaatttctcctgaaggtgagggcaagatgaatgagttactggagggagtccctaagctgcccggaatccaagatccattctgggaacagttcttttctgttgaactcccagcgattgcagatacagacgatattctatcaggatcagtggagaataatgacttggtattggaacaagaaccaaacgagtggacccgtaatgaacaacaaatgaagtatcttactgaacaaatgggactgctttcctcagaagcacagaggaaataa

SEQ ID NO: 30121 - protein, 447 aa, Arabidopsis thaliana
  misc_feature (1)..(447): Ceres Seq. ID no. 4945327
MVDDPLTNEVVSWSSGNNSFVVWSAPEFSKVLLPKYFKHNNFSSFVRQLNTYGFRKVDPDRWEFANEGFLRGRKQLLKSIVRRKPSHVQQNQQQTQVQSSSVGACVEVGKFGIEEEVERLKRDKNVLMQELVRLRQQQQATENQLQNVGQKVQVMEQRQQQMMSFLAKAVQSPGFLNQLVQQNNNDGNRQIPGSNKKRRLPVDEQENRGDNVANGLNRQIVRYQPSINEAAQNMLRQFLNTSTSPRYESVSNNPDSFLLGDVPSSTSVDNGNPSSRVSGVTLAEFSPNTVQSATNQVPEASLAHHPQAGLVQPNIGQSPAQGAAPADSWSPEFDLVGCETDSGECFDPIMAVLDESEGDAISPEGEGKMNELLEGVPKLPGIQDPFWEQFFSVELPAIADTDDILSGSVENNDLVLEQEPNEWTRNEQQMKYLTEQMGLLSSEAQRK

SEQ ID NO: 30122 - protein, 320 aa, Arabidopsis thaliana
  misc_feature (1)..(320): Ceres Seq. ID no. 4945328
MQELVRLRQQQQATENQLQNVGQKVQVMEQRQQQMMSFLAKAVQSPGFLNQLVQQNNNDGNRQIPGSNKKRRLPVDEQENRGDNVANGLNRQIVRYQPSINEAAQNMLRQFLNTSTSPRYESVSNNPDSFLLGDVPSSTSVDNGNPSSRVSGVTLAEFSPNTVQSATNQVPEASLAHHPQAGLVQPNIGQSPAQGAAPADSWSPEFDLVGCETDSGECFDPIMAVLDESEGDAISPEGEGKMNELLEGVPKLPGIQDPFWEQFFSVELPAIADTDDILSGSVENNDLVLEQEPNEWTRNEQQMKYLTEQMGLLSSEAQRK

SEQ ID NO: 30123 - protein, 293 aa, Arabidopsis thaliana
  misc_feature (1)..(293): Ceres Seq. ID no. 4945329
MEQRQQQMMSFLAKAVQSPGFLNQLVQQNNNDGNRQIPGSNKKRRLPVDEQENRGDNVANGLNRQIVRYQPSINEAAQNMLRQFLNTSTSPRYESVSNNPDSFLLGDVPSSTSVDNGNPSSRVSGVTLAEFSPNTVQSATNQVPEASLAHHPQAGLVQPNIGQSPAQGAAPADSWSPEFDLVGCETDSGECFDPIMAVLDESEGDAISPEGEGKMNELLEGVPKLPGIQDPFWEQFFSVELPAIADTDDILSGSVENNDLVLEQEPNEWTRNEQQMKYLTEQMGLLSSEAQRK

SEQ ID NO: 30124 - DNA, 502 bp, Arabidopsis thaliana
  misc_feature (1)..(502): Ceres Seq. ID no. 4945555
atcaaccaacaacaagaaatccaataacttgaatcttttcatacatcttcagaagcttcaaaaagaattcaaacattttaaacaaaaaaacaatagatatggctttcgtgagaagtctattgggagcaaagaagattctaagccgctccaccggagcaggatctgcggcaccaaaagggtttcttgcggtgtacgtaggagagagccagaagaagagatatttggtgcctgtctcatatttaaaccagccttcatttcaagctcttctcagtaaatccgaagaagagtttggatttgatcatccgatgggaggcttaacgatcccttgtcccgaagataccttcatcaatgtgacttctcggctccaatgatgatgatccaacattttttccttcagttagaaatagacttattcattgtaaatagatgagccctttttcctctttcttcttgaaagagttgttctaaaagtgtagaaagtgaaatacaaaattgatgttat

SEQ ID NO: 30125 - protein, 90 aa, Arabidopsis thaliana
  misc_feature (1)..(90): Ceres Seq. ID no. 4945556
STNNKKSNNLNLFIHLQKLQKEFKHFKQKNNRYGFREKSIGSKEDSKPLHRSRICGTKRVSCGVRRREPEEEIFGACLIFKPAFISSSSQ

SEQ ID NO: 30126 - protein, 90 aa, Arabidopsis thaliana
  misc_feature (1)..(90): Ceres Seq. ID no. 4945557
MAFVRSLLGAKKILSRSTGAGSAAPKGFLAVYVGESQKKRYLVPVSYLNQPSFQALLSKSEEEFGFDHPMGGLTIPCPEDTFINVTSRLQ

SEQ ID NO: 30127 - DNA, 586 bp, Arabidopsis thaliana
  misc_feature (1)..(586): Ceres Seq. ID no. 4945558
atcaaccaacaccaagcaatccattaacttgaatctttcatacatcttttcagaagctttaaaaataattcaaactttcagacaaaagaaatggctttggtgagaagtctattggttgcaaagaagattcttagccgctccgccgcagcagtctcggcgccaccaaaagggtttcttgcagtgtacgtaggagagagccagaagaagagatatttagtgccactctcatacttgaaccagccttcttttcaagctctgctcagtaaatccgaagaagagtttgggttcgatcatccgatgggtggcttaacgatcccttgtcccgaagatactttcatcaatgtgacttctcggctccattgatgattatccaacatagtgttttttcgagttagagatagagttgtttccttgtaaatagaggaattttttgttccttttttttttttttttttctctttcatcttgaaaaagttcttctaaattttttggaagtggatgtagatgcagtttttgtgctatatacacaatcataattcatgttaacacattttggatcgattatggaaaaagaatggatatcacc

SEQ ID NO: 30128 - protein, 90 aa, Arabidopsis thaliana
  misc_feature (1)..(90): Ceres Seq. ID no. 4945559
MALVRSLLVAKKILSRSAAAVSAPPKGFLAVYVGESQKKRYLVPLSYLNQPSFQALLSKSEEEFGFDHPMGGLTIPCPEDTFINVTSRLH

SEQ ID NO: 30129 - DNA, 1680 bp, Arabidopsis thaliana
  misc_feature (1)..(1680): Ceres Seq. ID no. 4945606
atgggattttcattttcttcaaaccgttttggttacttgacagtcacattccttctcgttatctcttgtcttctgttgggtttcttcacgaatcctgttgattcaagtgctctaagacctaaatcagagcatgattgtagtgccctgaagcactttcatgactacaaatcaaagtgtgcttacctgaaatcgattgatccatgtgctagtcaaggtttcttcgattacctctcttttctctactgtaatttcgaaggtttcccaattttgggtcagtttcttctcttcctctggttgcttctcttgttctatctattgggtcatacggcctctgagtacttttgttcatctcttgaaagtctctcaaagctgcttaatttgtcaccaactgttgctggtgttactcttttgtcgcttggtaatggtgctcctgatttgtttgcaagtttggtctctttcatgggagaatctaaaggtacttatgatgttggtctcaacactgttgtgggaggttctggttttgttacctgtgttgttgttgggatcattagcatttcgttgcataagagacgtgtgaggattgagagagctgcgtttataagagacatttgcttcttctgtgctgctattggttctttggctttgattttggtctatggaaagatcaatttctggggtgctcttgggttttgttcattgtatgctgtttatgttgcctttgtggttctctcttggagatttggtggagatcaaggtgctgaatctgatcttgagtcaatccataagcgtggtagtcttagtgaaccaatcttgcagagagacggtcttgaggaaattgaagatggtgttgttaatggagagcatcagattgttgatgatgatgatgatcaccagagatattattactggaaaagattggtcatttgggctatcactctgcctctcaacttgccaaggatattaacaattcctgtagtgagtgaagacaaatggtctaaaccattagctgttgcctcggtcacatttgccccggttctgttgtcgtttttatggaactggaagcggaaaccgacgagttttgaggcgggggttgtttatctcatcgggtgtttgatcggtatagctcttggtttcattgcaggagccacgacgaagaaattaaccccaccaaagaaatggttgttgccttggttagcaggagggtttgtaatgagcatgacatggagttacatatcagcacaagagctagttgcgcttttgacctcactaggatacattttcggtgtaagcccttcgatcttaggcttaacggtcctcgcttggggtaattcaattggagatctaataaccaacttgacaatggcgctacacgatgggaacgaaggagctcaagtggctgtatcgggatgttacgccggtccgatcttcaatacattgtttgctctcgggatatcgcttgtgggatgtgcatgggaggcttatccgttgagcattgtgattaagacagatcctcgtttgttggagagtcttggatttctggtcgcaggactggtatggtcgttcttggttctgtttagtaaccgtatgaggcttggtggtgtgatgggcatagggcttttggttatttacttggcttcattgtctctaagaattatgcaaaccgttggagatgctcactaa

SEQ ID NO: 30130 - protein, 559 aa, Arabidopsis thaliana
  misc_feature (1)..(559): Ceres Seq. ID no. 4945607
MGFSFSSNRFGYLTVTFLLVISCLLLGFFTNPVDSSALRPKSEHDCSALKHFHDYKSKCAYLKSIDPCASQGFFDYLSFLYCNFEGFPILGQFLLFLWLLLLFYLLGHTASEYFCSSLESLSKLLNLSPTVAGVTLLSLGNGAPDLFASLVSFMGESKGTYDVGLNTVVGGSGFVTCVVVGIISISLHKRRVRIERAAFIRDICFFCAAIGSLALILVYGKINFWGALGFCSLYAVYVAFVVLSWRFGGDQGAESDLESIHKRGSLSEPILQRDGLEEIEDGVVNGEHQIVDDDDDHQRYYYWKRLVIWAITLPLNLPRILTIPVVSEDKWSKPLAVASVTFAPVLLSFLWNWKRKPTSFEAGVVYLIGCLIGIALGFIAGATTKKLTPPKKWLLPWLAGGFVMSMTWSYISAQELVALLTSLGYIFGVSPSILGLTVLAWGNSIGDLITNLTMALHDGNEGAQVAVSGCYAGPIFNTLFALGISLVGCAWEAYPLSIVIKTDPRLLESLGFLVAGLVWSFLVLFSNRMRLGGVMGIGLLVIYLASLSLRIMQTVGDAH

SEQ ID NO: 30131 - protein, 406 aa, Arabidopsis thaliana
  misc_feature (1)..(406): Ceres Seq. ID no. 4945608
MGESKGTYDVGLNTVVGGSGFVTCVVVGIISISLHKRRVRIERAAFIRDICFFCAAIGSLALILVYGKINFWGALGFCSLYAVYVAFVVLSWRFGGDQGAESDLESIHKRGSLSEPILQRDGLEEIEDGVVNGEHQIVDDDDDHQRYYYWKRLVIWAITLPLNLPRILTIPVVSEDKWSKPLAVASVTFAPVLLSFLWNWKRKPTSFEAGVVYLIGCLIGIALGFIAGATTKKLTPPKKWLLPWLAGGFVMSMTWSYISAQELVALLTSLGYIFGVSPSILGLTVLAWGNSIGDLITNLTMALHDGNEGAQVAVSGCYAGPIFNTLFALGISLVGCAWEAYPLSIVIKTDPRLLESLGFLVAGLVWSFLVLFSNRMRLGGVMGIGLLVIYLASLSLRIMQTVGDAH

SEQ ID NO: 30132 - DNA, 1257 bp, Arabidopsis thaliana
  misc_feature (1)..(1257): Ceres Seq. ID no. 4945794
atggaaggctcttcaattcaaccgcccagaaattttgttctcgctaaagattcttctactggttcttcttcttcttcttcttcttctcagtatgaggttttaatcaatgattgttatcaggttaaagaacaatctgttgaagatgtatccagatctcagccaagtggaagccaattggatgtttctatccaaataccaccaaaaccgacgcctagtttaggaattttgagaaatctgagtctgaaaaggaaagcttctctaccaaactatgagagaagattgctactaagtcctagtgtttcagaaaccagtgaaaagcctcttgttgcaagtccgatcacatcgccttactggaaaaggtgtttgtcacttccttctagtaattctgctaaactgtctctggttgtatctacaacgcctgtttccgctgtggtgcatagtgaacagcctaagtctaataaagatggtcttcatgcatctgtttcaagatccttgtccatgaacagagtgattgtacgagctgtctcttttgacgacaacaaaaatcacatttcaaatgaagcaaatggcgatcaaatcactccagttcctgcagaagaaacagaagaagaaattcctgaagaagaagcagtatgcaggatttgtcttgatgtgtgcgaagaaggtaacacactgaaaatggaatgcagttgcaaaggtgacctcagacttgttcacgagcattgtgccattaagtggtttagtacaaaaggaacacgaatctgcgatgtatgcagacaagaagtccggaacttaccagtgatactcctccgtgtcccaacaattaatcaacttaccaatagacgggaactcactcagcagagttcagagccacaaagcatcagtgttgggcaagagtttgtagtgcttgtactcatcagcaccgtctgctacttcttcttccttgaacatttactggcaatatttgttgcagcgccattttcattcacccttgcactcttagcctcaacttttgccgtcatcctcgcgatcagagaatacatatggacatacgcagctcttgagtttgcactagtggcattgcttgttcatctattatatgctacagtaagtaatactaaaccggatactgggtttcgggatggcaatgtgcttaaacttgttgtgcatttgttattcctctcggcctgtgcggtttccgcggaatacaaacttagtataaagatagtctcttctgttcttaaagttcggatttga

SEQ ID NO: 30133 - protein, 418 aa, Arabidopsis thaliana
  misc_feature (1)..(418): Ceres Seq. ID no. 4945795
MEGSSIQPPRNFVLAKDSSTGSSSSSSSSQYEVLINDCYQVKEQSVEDVSRSQPSGSQLDVSIQIPPKPTPSLGILRNLSLKRKASLPNYERRLLLSPSVSETSEKPLVASPITSPYWKRCLSLPSSNSAKLSLVVSTTPVSAVVHSEQPKSNKDGLHASVSRSLSMNRVIVRAVSFDDNKNHISNEANGDQITPVPAEETEEEIPEEEAVCRICLDVCEEGNTLKMECSCKGDLRLVHEHCAIKWFSTKGTRICDVCRQEVRNLPVILLRVPTINQLTNRRELTQQSSEPQSISVGQEFVVLVLISTVCYFFFLEHLLAIFVAAPFSFTLALLASTFAVILAIREYIWTYAALEFALVALLVHLLYATVSNTKPDTGFRDGNVLKLVVHLLFLSACAVSAEYKLSIKIVSSVLKVRI

SEQ ID NO: 30134 - protein, 252 aa, Arabidopsis thaliana
  misc_feature (1)..(252): Ceres Seq. ID no. 4945796
MNRVIVRAVSFDDNKNHISNEANGDQITPVPAEETEEEIPEEEAVCRICLDVCEEGNTLKMECSCKGDLRLVHEHCAIKWFSTKGTRICDVCRQEVRNLPVILLRVPTINQLTNRRELTQQSSEPQSISVGQEFVVLVLISTVCYFFFLEHLLAIFVAAPFSFTLALLASTFAVILAIREYIWTYAALEFALVALLVHLLYATVSNTKPDTGFRDGNVLKLVVHLLFLSACAVSAEYKLSIKIVSSVLKVRI

SEQ ID NO: 30135 - DNA, 705 bp, Arabidopsis thaliana
  misc_feature (1)..(705): Ceres Seq. ID no. 4945938
atgctgagtaggttgtcaaggcgttgctactgcacttcttctgttcatcggccatggctgtttctaggactgggcaatccaggtgacaaatacaaaggaactagacacaacattggattcgaaatgattgatgttttcgctgagtcagtggggattcaaatgaacttggtaaatttcaaggctataatgggacaaggtttcgtggcagatcttcccgtcatccttgcaaaaccgcaaacctacatgaacttgagcggtgaatcaagtggacctctcgcagcttattacaagttacctctcaatcgtgtgcttgtggttcatgatgacatgcaattgccatgtggtgttcttcgtcttcaagaaaaaggaggccatggatgtcacaacgggttaaaaagtgtaatgaaccatttccgaggcaacagggaatttgcaaggctacgaatcggaattggaaagcctccgggacaaatggacccaaaggcgttcttgttgcagaagttcagcatgccagctcgtgaacgggaattgtatttatggctccctgtgtattgtgtgtttctcggaaagatggataaagctttagcagaaggggtggatgctctgaagctcgtcttggctaaagactttggagaaagctggagattgttcaatgtggaacagaagtacaaacacttaaaacaacacacaatactatcagcttga

SEQ ID NO: 30136 - protein, 234 aa, Arabidopsis thaliana
  misc_feature (1)..(234): Ceres Seq. ID no. 4945939
MLSRLSRRCYCTSSVHRPWLFLGLGNPGDKYKGTRHNIGFEMIDVFAESVGIQMNLVNFKAIMGQGFVADLPVILAKPQTYMNLSGESSGPLAAYYKLPLNRVLVVHDDMQLPCGVLRLQEKGGHGCHNGLKSVMNHFRGNREFARLRIGIGKPPGQMDPKAFLLQKFSMPARERELYLWLPVYCVFLGKMDKALAEGVDALKLVLAKDFGESWRLFNVEQKYKHLKQHTILSA

SEQ ID NO: 30137 - protein, 193 aa, Arabidopsis thaliana
  misc_feature (1)..(193): Ceres Seq. ID no. 4945940
MIDVFAESVGIQMNLVNFKAIMGQGFVADLPVILAKPQTYMNLSGESSGPLAAYYKLPLNRVLVVHDDMQLPCGVLRLQEKGGHGCHNGLKSVMNHFRGNREFARLRIGIGKPPGQMDPKAFLLQKFSMPARERELYLWLPVYCVFLGKMDKALAEGVDALKLVLAKDFGESWRLFNVEQKYKHLKQHTILSA

SEQ ID NO: 30138 - protein, 181 aa, Arabidopsis thaliana
  misc_feature (1)..(181): Ceres Seq. ID no. 4945941
MNLVNFKAIMGQGFVADLPVILAKPQTYMNLSGESSGPLAAYYKLPLNRVLVVHDDMQLPCGVLRLQEKGGHGCHNGLKSVMNHFRGNREFARLRIGIGKPPGQMDPKAFLLQKFSMPARERELYLWLPVYCVFLGKMDKALAEGVDALKLVLAKDFGESWRLFNVEQKYKHLKQHTILSA

SEQ ID NO: 30139 - DNA, 2364 bp, Arabidopsis thaliana
  misc_feature (1)..(2364): Ceres Seq. ID no. 4946059
atggcatcatctagaccacttttgggaagtgacccttttttccgtgaccctcatcaagaacaagataaccactgtatggtatctcttttccttccgtctcaagcacctgccgcaccacaaccagtgacactctcggaaccaccatgttcaaccagtagtgatttagaaattctgcctcctctctctcagcaacaagttccacttgaaagcttgtaccagtcaagtattgatcttaacggaaagaaacataatccactagcaaagattggtggccttcaagtgcagttcttacgccttgttcaaaggtttgggcagtcacagaataatattctagtctccaaggttttgtatcgggtacatcttgcgatgctgatacgagctgaggaatcagaacttaagaatgtaaaacttaggcaagatagggccaaagctttagcaagggagcaagaatcatctggcataccggagcttgatttctcacttagaatccttgtcctggggaaaacaggtgtcggcaagagtgcaaccataaactctatttttggtcagcccaaaagtgagactgatgctttccgaccgggcacagatcgcatagaagaggttatgggaactgtcagtggagttaaagttacctttattgatacccctggttttcacccactgtcatcttctagcacaagaaaaaaccgaaagattctcctatctattaagagatatgttaagaagcgtccacctgatgtagttctttacttggaccgccttgatatgatcgacatgcgatacagtgatttctccctcctgcagcttataactgaaatctttggtgcagctatatggttaaacacgatacttgtaatgacgcattccgcagctactacagaaggacgtaatggacaatctgtgaactatgagtcatatgtgggccagcgcatggatgtggttcaacattatatacatcaggctgtgtctgatacaaaactagaaaaccctgttctgttagttgaaaatcatcccagctgtaaaaagaatcttgctggtgagtatgttcttccaaatggggtggtatggaagcctcagtttatgtttctgtgcgtttgtaccaaagttcttggcgatgtccagtctttactgagatttcgtgacagcattggcctgggtcagccaagtagtacccgaacagcttcccttcctcatcttctttcagtttttctgcgccgtcgcttatcatcaggtgcagatgaaacagagaaagagatagataagcttctgaatttggatttagaggaggaagatgagtatgaccagttgcctacaatccgtatccttgggaaatcccggtttgagaagctgtcaaagtctcagaagaaggagtatctcgatgagcttgattacagggaaaccctttatctgaagaaacaattgaaggaagaatgccgaagacgacgggatgaaaagctagttgaagaggaaaatctcgaggacactgaacagcgtgatcaagcagctgttccactgcctgacatggcaggtccagacagttttgattcggattttccggctcacagatatcgatgcgtatcggcaggtgaccagtggctcgtgagacctgtctatgacccacaaggttgggatcgcgatgtgggatttgatggaataaatattgagacggctgcaaaaataaataggaatctattcgcttcagctacaggacaggtgagcagagacaagcaacgcttcactatccaatctgagactaatgcagcttatactagaaactttagagaacagacattctctgtagctgttgaccttcaatcatcaggagaagatctggtgtactcgtttcagggcggcacaaagcttcaaacatttaagcacaacacaactgatgttggagttggtttgacatcttttggtgggaaatactatgtgggcggaaagcttgaggataccttattggttgggaagagggtgaagttaactgcgaatgcaggtcagatgaggggttcagggcaaacagcaaacggcgggagctttgaagcttgtatcagagggagagattacccggtcagaaatgagcaaatcggtttgacaatgacggctctgtctttcaagcgagaactggtcttgaactatggtttacagactcagtttagaccagcccggggcacgaacatagacgtcaacataaacatgaacaataggaaaatggggaagataaatgtgaaacttaacagctctgagcactgggagattgctttgatatcagcgttaacgatgttcaaggctttagtacggcggagtaagactgaaatgactgaggaaaatgaagaagaaaagattgtgaattttctcgtttcctaa

SEQ ID NO: 30140 - protein, 787 aa, Arabidopsis thaliana
  misc_feature (1)..(787): Ceres Seq. ID no. 4946060
MASSRPLLGSDPFFRDPHQEQDNHCMVSLFLPSQAPAAPQPVTLSEPPCSTSSDLEILPPLSQQQVPLESLYQSSIDLNGKKHNPLAKIGGLQVQFLRLVQRFGQSQNNILVSKVLYRVHLAMLIRAEESELKNVKLRQDRAKALAREQESSGIPELDFSLRILVLGKTGVGKSATINSIFGQPKSETDAFRPGTDRIEEVMGTVSGVKVTFIDTPGFHPLSSSSTRKNRKILLSIKRYVKKRPPDVVLYLDRLDMIDMRYSDFSLLQLITEIFGAAIWLNTILVMTHSAATTEGRNGQSVNYESYVGQRMDVVQHYIHQAVSDTKLENPVLLVENHPSCKKNLAGEYVLPNGVVWKPQFMFLCVCTKVLGDVQSLLRFRDSIGLGQPSSTRTASLPHLLSVFLRRRLSSGADETEKEIDKLLNLDLEEEDEYDQLPTIRILGKSRFEKLSKSQKKEYLDELDYRETLYLKKQLKEECRRRRDEKLVEEENLEDTEQRDQAAVPLPDMAGPDSFDSDFPAHRYRCVSAGDQWLVRPVYDPQGWDRDVGFDGINIETAAKINRNLFASATGQVSRDKQRFTIQSETNAAYTRNFREQTFSVAVDLQSSGEDLVYSFQGGTKLQTFKHNTTDVGVGLTSFGGKYYVGGKLEDTLLVGKRVKLTANAGQMRGSGQTANGGSFEACIRGRDYPVRNEQIGLTMTALSFKRELVLNYGLQTQFRPARGTNIDVNINMNNRKMGKINVKLNSSEHWEIALISALTMFKALVRRSKTEMTEENEEEKIVNFLVS

SEQ ID NO: 30141 - protein, 762 aa, Arabidopsis thaliana
  misc_feature (1)..(762): Ceres Seq. ID no. 4946061
MVSLFLPSQAPAAPQPVTLSEPPCSTSSDLEILPPLSQQQVPLESLYQSSIDLNGKKHNPLAKIGGLQVQFLRLVQRFGQSQNNILVSKVLYRVHLAMLIRAEESELKNVKLRQDRAKALAREQESSGIPELDFSLRILVLGKTGVGKSATINSIFGQPKSETDAFRPGTDRIEEVMGTVSGVKVTFIDTPGFHPLSSSSTRKNRKILLSIKRYVKKRPPDVVLYLDRLDMIDMRYSDFSLLQLITEIFGAAIWLNTILVMTHSAATTEGRNGQSVNYESYVGQRMDVVQHYIHQAVSDTKLENPVLLVENHPSCKKNLAGEYVLPNGVVWKPQFMFLCVCTKVLGDVQSLLRFRDSIGLGQPSSTRTASLPHLLSVFLRRRLSSGADETEKEIDKLLNLDLEEEDEYDQLPTIRILGKSRFEKLSKSQKKEYLDELDYRETLYLKKQLKEECRRRRDEKLVEEENLEDTEQRDQAAVPLPDMAGPDSFDSDFPAHRYRCVSAGDQWLVRPVYDPQGWDRDVGFDGINIETAAKINRNLFASATGQVSRDKQRFTIQSETNAAYTRNFREQTFSVAVDLQSSGEDLVYSFQGGTKLQTFKHNTTDVGVGLTSFGGKYYVGGKLEDTLLVGKRVKLTANAGQMRGSGQTANGGSFEACIRGRDYPVRNEQIGLTMTALSFKRELVLNYGLQTQFRPARGTNIDVNINMNNRKMGKINVKLNSSEHWEIALISALTMFKALVRRSKTEMTEENEEEKIVNFLVS

SEQ ID NO: 30142 - protein, 665 aa, Arabidopsis thaliana
  misc_feature (1)..(665): Ceres Seq. ID no. 4946062
MLIRAEESELKNVKLRQDRAKALAREQESSGIPELDFSLRILVLGKTGVGKSATINSIFGQPKSETDAFRPGTDRIEEVMGTVSGVKVTFIDTPGFHPLSSSSTRKNRKILLSIKRYVKKRPPDVVLYLDRLDMIDMRYSDFSLLQLITEIFGAAIWLNTILVMTHSAATTEGRNGQSVNYESYVGQRMDVVQHYIHQAVSDTKLENPVLLVENHPSCKKNLAGEYVLPNGVVWKPQFMFLCVCTKVLGDVQSLLRFRDSIGLGQPSSTRTASLPHLLSVFLRRRLSSGADETEKEIDKLLNLDLEEEDEYDQLPTIRILGKSRFEKLSKSQKKEYLDELDYRETLYLKKQLKEECRRRRDEKLVEEENLEDTEQRDQAAVPLPDMAGPDSFDSDFPAHRYRCVSAGDQWLVRPVYDPQGWDRDVGFDGINIETAAKINRNLFASATGQVSRDKQRFTIQSETNAAYTRNFREQTFSVAVDLQSSGEDLVYSFQGGTKLQTFKHNTTDVGVGLTSFGGKYYVGGKLEDTLLVGKRVKLTANAGQMRGSGQTANGGSFEACIRGRDYPVRNEQIGLTMTALSFKRELVLNYGLQTQFRPARGTNIDVNINMNNRKMGKINVKLNSSEHWEIALISALTMFKALVRRSKTEMTEENEEEKIVNFLVS

SEQ ID NO: 30143 - DNA, 2250 bp, Arabidopsis thaliana
  misc_feature (1)..(2250): Ceres Seq. ID no. 4946067
atgacgattaaaccggcggttcgtatttccgacgggaatctaatcatcaaaaaccggacgattctaaccggtgtaccagataatgtcatcacgacgtcagcatcggaagctggaccggtagaaggagtcttcgtcggagctgtatttaacaaggaagagagtaaacacatcgtaccgatcggtacgcttcgcaattcccggtttatgtcttgtttccggtttaagctctggtggatggcccagagaatgggagaaatgggccgagatattccctacgagacgcagttcttattggtcgagagcaacgatgggtcccaccttgagtctgacggagctaacggcgtcgagtgtaaccagaaagtttacaccgttttcttgccgttaatcgaaggatctttccgttcgtgtctccaaggaaacgttaacgatgaggttgagctctgtttggagagtggtgacgtggacactaaacggtcgtcgtttactcactctctgtatattcacgccggtacagatccgtttcagacaataacggacgctattcgcaccgttaagttgcatctgaatagtttccgtcaacgtcacgaaaagaagcttccagggatcgttgactacttcggatggtgcacttgggacgcgttttatcaagaagtgactcaggaaggcgtcgaagctggtcttaagtctctcgccgccggtggtacgccgccgaagtttgttatcatagacgacggttggcaatcagttgagagagatgccacggtggaggccggagatgagaagaaagagtcaccgatttttcgactgacggggatcaaggagaacgaaaagtttaagaagaaggatgatccaaacgttgggattaagaacattgtcaagattgctaaggagaaacacggtttgaaatatgtttacgtgtggcacgcgataacgggttattggggcggagttagacccggggaagaatacggatctgttatgaaatatcctaatatgtcaaagggtgtggtggagaatgatccgacgtggaagactgatgtaatgacgctgcaagggttgggtttggttagccccaagaaagtgtataagttttacaatgagcttcatagttacttggctgatgctggcgtggacggtgtgaaagtggatgtgcagtgtgtattggagactttgggtggtggtttaggcggtcgggttgagctgactcgtcagtttcatcaagctcttgactcctctgttgctaagaacttcccggataatggctgcattgcttgtatgagccataatacggatgctctttactgctcgaagcaagcagctgtgattagagcatcagatgatttctatccacgggatccggtgtctcataccatccatatagcctccgttgcttataacagtgtgttcttgggagagtttatgcagcctgactgggatatgttccattccgtgcaccctgctgcagagtatcatgcctctgctagggccatcagtggtgggcctctctatgtcagtgattctcctggaaagcacaactttgagcttctaagaaagcttgtattgcctgatggatcgattcttcgtgctcgactccctggtagaccaactcgcgattgtttgttcgctgatcctgcccgtgatggtgtcagcttgctaaagatatggaacatgaacaagtacactggagttcttggcgtgtataactgccaaggagcagcttggagcagcacagagagaaaaaacattttccaccagactaaaactgatagcctcactggctccattcgtggtcgtgatgtgcattcaatatcggaggcctccactgatccaacaacctggaatggagactgtgctgtttactcccagagcagaggcgaacttattgttatgccatacaatgtgtctcttccagtctcactcaaaatccgtgagcacgagatcttcacggtgagccccattagtcatcttgttgatggtgtatcttttgccccaattggtctagtaaacatgtacaattcgggaggagctatcgaaggacttagatatgaagccgagaagatgaaagtggtaatggaagttaaaggatgtggcaaattcggatcttactcttctgtgaagcctaagagatgcgttgttgagtcaaatgagattgcattcgagtacgattcctcctctggattggtcacctttgagttagacaaaatgcctatagagaacaaacgatttcatctgatccaagttgagttatga

SEQ ID NO: 30144 - protein, 749 aa, Arabidopsis thaliana
  misc_feature (1)..(749): Ceres Seq. ID no. 4946068
MTIKPAVRISDGNLIIKNRTILTGVPDNVITTSASEAGPVEGVFVGAVFNKEESKHIVPIGTLRNSRFMSCFRFKLWWMAQRMGEMGRDIPYETQFLLVESNDGSHLESDGANGVECNQKVYTVFLPLIEGSFRSCLQGNVNDEVELCLESGDVDTKRSSFTHSLYIHAGTDPFQTITDAIRTVKLHLNSFRQRHEKKLPGIVDYFGWCTWDAFYQEVTQEGVEAGLKSLAAGGTPPKFVIIDDGWQSVERDATVEAGDEKKESPIFRLTGIKENEKFKKKDDPNVGIKNIVKIAKEKHGLKYVYVWHAITGYWGGVRPGEEYGSVMKYPNMSKGVVENDPTWKTDVMTLQGLGLVSPKKVYKFYNELHSYLADAGVDGVKVDVQCVLETLGGGLGGRVELTRQFHQALDSSVAKNFPDNGCIACMSHNTDALYCSKQAAVIRASDDFYPRDPVSHTIHIASVAYNSVFLGEFMQPDWDMFHSVHPAAEYHASARAISGGPLYVSDSPGKHNFELLRKLVLPDGSILRARLPGRPTRDCLFADPARDGVSLLKIWNMNKYTGVLGVYNCQGAAWSSTERKNIFHQTKTDSLTGSIRGRDVHSISEASTDPTTWNGDCAVYSQSRGELIVMPYNVSLPVSLKIREHEIFTVSPISHLVDGVSFAPIGLVNMYNSGGAIEGLRYEAEKMKVVMEVKGCGKFGSYSSVKPKRCVVESNEIAFEYDSSSGLVTFELDKMPIENKRFHLIQVEL

SEQ ID NO: 30145 - protein, 681 aa, Arabidopsis thaliana
  misc_feature (1)..(681): Ceres Seq. ID no. 4946069
MSCFRFKLWWMAQRMGEMGRDIPYETQFLLVESNDGSHLESDGANGVECNQKVYTVFLPLIEGSFRSCLQGNVNDEVELCLESGDVDTKRSSFTHSLYIHAGTDPFQTITDAIRTVKLHLNSFRQRHEKKLPGIVDYFGWCTWDAFYQEVTQEGVEAGLKSLAAGGTPPKFVIIDDGWQSVERDATVEAGDEKKESPIFRLTGIKENEKFKKKDDPNVGIKNIVKIAKEKHGLKYVYVWHAITGYWGGVRPGEEYGSVMKYPNMSKGVVENDPTWKTDVMTLQGLGLVSPKKVYKFYNELHSYLADAGVDGVKVDVQCVLETLGGGLGGRVELTRQFHQALDSSVAKNFPDNGCIACMSHNTDALYCSKQAAVIRASDDFYPRDPVSHTIHIASVAYNSVFLGEFMQPDWDMFHSVHPAAEYHASARAISGGPLYVSDSPGKHNFELLRKLVLPDGSILRARLPGRPTRDCLFADPARDGVSLLKIWNMNKYTGVLGVYNCQGAAWSSTERKNIFHQTKTDSLTGSIRGRDVHSISEASTDPTTWNGDCAVYSQSRGELIVMPYNVSLPVSLKIREHEIFTVSPISHLVDGVSFAPIGLVNMYNSGGAIEGLRYEAEKMKVVMEVKGCGKFGSYSSVKPKRCVVESNEIAFEYDSSSGLVTFELDKMPIENKRFHLIQVEL

SEQ ID NO: 30146 - protein, 671 aa, Arabidopsis thaliana
  misc_feature (1)..(671): Ceres Seq. ID no. 4946070
MAQRMGEMGRDIPYETQFLLVESNDGSHLESDGANGVECNQKVYTVFLPLIEGSFRSCLQGNVNDEVELCLESGDVDTKRSSFTHSLYIHAGTDPFQTITDAIRTVKLHLNSFRQRHEKKLPGIVDYFGWCTWDAFYQEVTQEGVEAGLKSLAAGGTPPKFVIIDDGWQSVERDATVEAGDEKKESPIFRLTGIKENEKFKKKDDPNVGIKNIVKIAKEKHGLKYVYVWHAITGYWGGVRPGEEYGSVMKYPNMSKGVVENDPTWKTDVMTLQGLGLVSPKKVYKFYNELHSYLADAGVDGVKVDVQCVLETLGGGLGGRVELTRQFHQALDSSVAKNFPDNGCIACMSHNTDALYCSKQAAVIRASDDFYPRDPVSHTIHIASVAYNSVFLGEFMQPDWDMFHSVHPAAEYHASARAISGGPLYVSDSPGKHNFELLRKLVLPDGSILRARLPGRPTRDCLFADPARDGVSLLKIWNMNKYTGVLGVYNCQGAAWSSTERKNIFHQTKTDSLTGSIRGRDVHSISEASTDPTTWNGDCAVYSQSRGELIVMPYNVSLPVSLKIREHEIFTVSPISHLVDGVSFAPIGLVNMYNSGGAIEGLRYEAEKMKVVMEVKGCGKFGSYSSVKPKRCVVESNEIAFEYDSSSGLVTFELDKMPIENKRFHLIQVEL

SEQ ID NO: 30147 - DNA, 660 bp, Arabidopsis thaliana
  misc_feature (1)..(660): Ceres Seq. ID no. 4946463
atgtcatcccacggccgagaagtagaggtgaccatctcatcggcaaaggatatcaagaacgtgaactggcgcaacggcccaaacaagccatacgccgttgtatggatcgatccgaagttcaaatcctccacaagagttgacgaagacggcaacacttgtacaacgtggaacgagacatttgtcatcgctttacctccggccaacgacgatgacgacaaggtatacatcaacatcgtacacgcaggccgtgaagagaacacaaagcccctcatcggctccgcccatctcagcctccgtgatgtcattgatgacgtcggcttcggcgtccccttcatgaaaaccctcaagctcaaacgcccctctggccgacctcagggcaaactcgacgtcactgtcaccgttcgagagactccaggatcaaattacgcgcttccttatggcgatccatacgcgccggaaaaggggagcaagttcggtgggatggggactggactggcggtcggggcggtggccggagttttgggtggggtggcattagcggagggactggaggctgtggaaggcgatgaggatgatgatgatgacgatgatgctgctgctgctgctgctgctgatgatgatgatgatgatgatgatgatgatgatgatgatgacgagtga

SEQ ID NO: 30148 - protein, 219 aa, Arabidopsis thaliana
  misc_feature (1)..(219): Ceres Seq. ID no. 4946464
MSSHGREVEVTISSAKDIKNVNWRNGPNKPYAVVWIDPKFKSSTRVDEDGNTCTTWNETFVIALPPANDDDDKVYINIVHAGREENTKPLIGSAHLSLRDVIDDVGFGVPFMKTLKLKRPSGRPQGKLDVTVTVRETPGSNYALPYGDPYAPEKGSKFGGMGTGLAVGAVAGVLGGVALAEGLEAVEGDEDDDDDDDAAAAAAADDDDDDDDDDDDDDE

SEQ ID NO: 30149 - DNA, 312 bp, Arabidopsis thaliana
  misc_feature (1)..(312): Ceres Seq. ID no. 4946465
atgtcggaagaaatacgagagaaagatctcaccgactctaaaccatctccaccgcaaccaccaccgaaacgtggtctcatcagccgcaaaagacagcttgtgtttctctctttcatgattttattagccgcaaaaggactcgttgggatcggagaaatagcgtttgtaatcttgtgttatatctacttgtatgagtttctctcaagatttgccttccctcgcaagcaaacagaacagaagaagagactctcaaaccctaaaaacaaactctttcaagcttacttcctcgccactgcaattataggttactaa

SEQ ID NO: 30150 - protein, 103 aa, Arabidopsis thaliana
  misc_feature (1)..(103): Ceres Seq. ID no. 4946466
MSEEIREKDLTDSKPSPPQPPPKRGLISRKRQLVFLSFMILLAAKGLVGIGEIAFVILCYIYLYEFLSRFAFPRKQTEQKKRLSNPKNKLFQAYFLATAIIGY

SEQ ID NO: 30151 - protein, 65 aa, Arabidopsis thaliana
  misc_feature (1)..(65): Ceres Seq. ID no. 4946467
MILLAAKGLVGIGEIAFVILCYIYLYEFLSRFAFPRKQTEQKKRLSNPKNKLFQAYFLATAIIGY

SEQ ID NO: 30152 - DNA, 1388 bp, Arabidopsis thaliana
  misc_feature (1)..(1388): Ceres Seq. ID no. 4946563
acaatgaatttttaaaactagctcaaatgtctttctcttcaggttgatcatcaacctgtgtttgtttttggttggtttcgtcagtagctctctcacttcactcacaaagtgaaaccagttacaaaaccagggtgataaaaagaagaagaagagaagacggtgaaagtgtgaattaggaggagctgctgatggcctcacgcagagagatttttagcttttctggtccccctccaattccctcttttgactggaacaatttgtaccaccgagcgtcattggtatcatgtttagtgcaaggagtgtacacaatggaacgagataggcaacaaaaccggtgtggttctgactcaaaagctagaccttggtgggcgttttacaggttcactttataccaacaacttagggacgcattagatggctccatatacggggccgttttccagaacgacatcaattaccagaatactcccaactcgatagtacctccacgttacattattgcgttacgtggaacgatcttaagcccacaaactatggcttgtgatgttcagcttaacattcgtatcgccttcgagaacctctaccgcgggggtagatttgtgcaggccattcaagcaatgcaatattttgtggccacatatggaaacacagctatctggatcgctggacactctctaggagctggccttgcactactcgcggggaagatcatggccatgtatggatgccctgtcgaggcttacatcttcaatccacctatctccttgattcctctagagcagctagtggagagtgaggatcttaaatgtgcggtccgactcgctagggatatcctcaaagccggcatagcaagagtcctagaccttaatgagggtcacgaaagccatctatttatgaatctagcttcctggagacctcatttgtttgtgaaccaatcagatccaatctgctcagaatatattggctatttcaatcatagaggcgatatgaatgagctgcaactgggtaggatcgagaggttggctagatactcaattaggagaatattgttcggaggaggagaaagttcgtcgtcgtattcttcagaagaacatcttcattttcttccgtcggccatcgtgatggtgaacacaatcatatcaccggattttcagacagatcatgggattcatcaatggtggaatcctatgcttggacagttttcataccaaattatagcatgacttgcgcttaatttcatcgcttcagttattttcttttcagttgaatcttctatacaaatattgtaaggtttttttgcttcatgtcacatcaaactttttttcagcattttattttcaattggattacttcccgaatatactttatttgattaacattattcttct

SEQ ID NO: 30153 - protein, 229 aa, Arabidopsis thaliana
  misc_feature (1)..(229): Ceres Seq. ID no. 4946564
MACDVQLNIRIAFENLYRGGRFVQAIQAMQYFVATYGNTAIWIAGHSLGAGLALLAGKIMAMYGCPVEAYIFNPPISLIPLEQLVESEDLKCAVRLARDILKAGIARVLDLNEGHESHLFMNLASWRPHLFVNQSDPICSEYIGYFNHRGDMNELQLGRIERLARYSIRRILFGGGESSSSYSSEEHLHFLPSAIVMVNTIISPDFQTDHGIHQWWNPMLGQFSYQIIA

SEQ ID NO: 30154 - protein, 344 aa, Arabidopsis thaliana
  misc_feature (1)..(344): Ceres Seq. ID no. 4946565
MASRREIFSFSGPPPIPSFDWNNLYHRASLVSCLVQGVYTMERDRQQNRCGSDSKARPWWAFYRFTLYQQLRDALDGSIYGAVFQNDINYQNTPNSIVPPRYIIALRGTILSPQTMACDVQLNIRIAFENLYRGGRFVQAIQAMQYFVATYGNTAIWIAGHSLGAGLALLAGKIMAMYGCPVEAYIFNPPISLIPLEQLVESEDLKCAVRLARDILKAGIARVLDLNEGHESHLFMNLASWRPHLFVNQSDPICSEYIGYFNHRGDMNELQLGRIERLARYSIRRILFGGGESSSSYSSEEHLHFLPSAIVMVNTIISPDFQTDHGIHQWWNPMLGQFSYQIIA

SEQ ID NO: 30155 - protein, 304 aa, Arabidopsis thaliana
  misc_feature (1)..(304): Ceres Seq. ID no. 4946566
MERDRQQNRCGSDSKARPWWAFYRFTLYQQLRDALDGSIYGAVFQNDINYQNTPNSIVPPRYIIALRGTILSPQTMACDVQLNIRIAFENLYRGGRFVQAIQAMQYFVATYGNTAIWIAGHSLGAGLALLAGKIMAMYGCPVEAYIFNPPISLIPLEQLVESEDLKCAVRLARDILKAGIARVLDLNEGHESHLFMNLASWRPHLFVNQSDPICSEYIGYFNHRGDMNELQLGRIERLARYSIRRILFGGGESSSSYSSEEHLHFLPSAIVMVNTIISPDFQTDHGIHQWWNPMLGQFSYQIIA

SEQ ID NO: 30156 - DNA, 1250 bp, Arabidopsis thaliana
  misc_feature (1)..(1250): Ceres Seq. ID no. 4946681
aattacattttacactcatctcgttctctcttccgtcaatatggaaggcgtcaccgtcgtgtctttcttccttcttttcatcgccaccgccatggccgccaagtccaccgtctccttccgtgacggcatgttaccaaacggagacttcgagctaggaccaaaaccatcagacatgaaaggaacagaaatactaaacaaactagcaataccaaactgggaagtcacaggattcgtcgaatacattaaatcaggacataaacaaggagacatgcttctcgttgttcccgccggtaaattcgcttgctgctagaacttgtgcacaagacgagagacttaacatatctgtagcacctgactccggtgtgattccgattcagacggtttatagtagtagtggttgggatttatatgcttgggcgtttcaagctgagagtgatgttgctgaagttgtgattcataatcctggtgttgaggaagatccagcttgtggtccacttattgatggtgttgctatgagatctctttaccctcctagaccaactaataagaacattttgaaaaacggaggatttgaagaaggtccattagtattacccggctcgacaactggagttttgatcccaccgtttatagaagacgaccactctcctttacctggatggatggtggagtctctcaaagctgtcaagtacgtagacgttgaacatttctcagtcccacagggtcgcagagctattgagcttgtagcgggtaaagagagtgccatcgctcaagtggttcggactgtcattgggaagacttacgtgctgtcttttgcggttggagacgccaacaatgcttgcaaaggatcaatggtggttgaggcttttgcaggaaaagatacacttaaggtcccttacgagtcgaaaggcacaggagggtttaaacgagcttctattcgatttgtggcggtttcgacccgatcaagaattatgttctacagcactttctatgccatgaggagcgatgatttctcgtcattgtgtgggcctgtgatcgatgatgtcaagcttataagcgttcgtaaaccatagatgaatcaccaatcctattacaagaaaatgcatcgtgtggtcttcttttattttccttaaactgtctttggtgtgtgttggattttattgaaacgagaaggtgaaaaaaacagagttttatttacgagagttagggttttatataggcagatgggcctttgcttatattgtattttc

SEQ ID NO: 30157 - protein, 186 aa, Arabidopsis thaliana
  misc_feature (1)..(186): Ceres Seq. ID no. 4946682
MRSLYPPRPTNKNILKNGGFEEGPLVLPGSTTGVLIPPFIEDDHSPLPGWMVESLKAVKYVDVEHFSVPQGRRAIELVAGKESAIAQVVRTVIGKTYVLSFAVGDANNACKGSMVVEAFAGKDTLKVPYESKGTGGFKRASIRFVAVSTRSRIMFYSTFYAMRSDDFSSLCGPVIDDVKLISVRKP

SEQ ID NO: 30158 - protein, 136 aa, Arabidopsis thaliana
  misc_feature (1)..(136): Ceres Seq. ID no. 4946683
MVESLKAVKYVDVEHFSVPQGRRAIELVAGKESAIAQVVRTVIGKTYVLSFAVGDANNACKGSMVVEAFAGKDTLKVPYESKGTGGFKRASIRFVAVSTRSRIMFYSTFYAMRSDDFSSLCGPVIDDVKLISVRKP

SEQ ID NO: 30159 - protein, 102 aa, Arabidopsis thaliana
  misc_feature (1)..(102): Ceres Seq. ID no. 4946684
ITFYTHLVLSSVNMEGVTVVSFFLLFIATAMAAKSTVSFRDGMLPNGDFELGPKPSDMKGTEILNKLAIPNWEVTGFVEYIKSGHKQGDMLLVVPAGKFACC

SEQ ID NO: 30160 - DNA, 510 bp, Arabidopsis thaliana
  misc_feature (1)..(510): Ceres Seq. ID no. 4946716
atgcatctccgtgaaatcattccctcttggatctaccagttatttggttgcatgggaggttgttttggatgctgcaataaaccaccgcttatagttgcagtggatgagccgtctaaagggttaaggattcaaggtcgtttagtgaagaagccaagcgtatcagaggacttctggagcacaagcacctgcgagatggataatagtacacttcagtcacagagaagcatgtcttctattagcttcactaacaatacttctacttctgcaagtacaagcaaccccacagaatttgtaaaccacggattgaacctctggaaccaaactaggcaacagtggcttgcaaatggaacttctcaaaaaaaggccaaagttcgagaacctacaataagctggaatgcaacatatgagagcttgttgggtatgaacaagcggttttctcgtccaataccactccctgaaatggtggattttttggtggatgtgtgggagcaagaaggcttgtatgattga

SEQ ID NO: 30161 - protein, 169 aa, Arabidopsis thaliana
  misc_feature (1)..(169): Ceres Seq. ID no. 4946717
MHLREIIPSWIYQLFGCMGGCFGCCNKPPLIVAVDEPSKGLRIQGRLVKKPSVSEDFWSTSTCEMDNSTLQSQRSMSSISFTNNTSTSASTSNPTEFVNHGLNLWNQTRQQWLANGTSQKKAKVREPTISWNATYESLLGMNKRFSRPIPLPEMVDFLVDVWEQEGLYD

SEQ ID NO: 30162 - protein, 152 aa, Arabidopsis thaliana
  misc_feature (1)..(152): Ceres Seq. ID no. 4946718
MGGCFGCCNKPPLIVAVDEPSKGLRIQGRLVKKPSVSEDFWSTSTCEMDNSTLQSQRSMSSISFTNNTSTSASTSNPTEFVNHGLNLWNQTRQQWLANGTSQKKAKVREPTISWNATYESLLGMNKRFSRPIPLPEMVDFLVDVWEQEGLYD

SEQ ID NO: 30163 - protein, 105 aa, Arabidopsis thaliana
  misc_feature (1)..(105): Ceres Seq. ID no. 4946719
MDNSTLQSQRSMSSISFTNNTSTSASTSNPTEFVNHGLNLWNQTRQQWLANGTSQKKAKVREPTISWNATYESLLGMNKRFSRPIPLPEMVDFLVDVWEQEGLYD

SEQ ID NO: 30164 - DNA, 1875 bp, Arabidopsis thaliana
  misc_feature (1)..(1875): Ceres Seq. ID no. 4946804
attcctttttaacaatcttctgcattttcgaacttgctttgctgtgataaagttctctcctttcctttctaaaggaagaagaaaggctttatctctcaaaaccctcatccacaaaatcccctttaatccgctaatcagagggtttttctgtttttgtgttgcttcgttactacggttacattcttctcttccccttttgatttcaaaggtacgaattttatcctcaattgcgtttcgatcgtatctcaaattctcttcgatctctgacagaaagtttccaactttagtgaatcgcgaaattgggttcgtgttcttgctctgatttcggtgtaacccttcaatttcagaaccctcttgataccttaagaagaggcaatttgaagttttcttcacagatccgtcttagctctttctagagaatggcggatttgataccattttatctgaatattgtggcgtttctatgtactgttggagctattgctttggcgatatttcatatctacaggcatcttttgaattacacggaaccaacttatcagagatatattgtacgcattatcttcatggtcccggtttatgccttcatgtcattcttgtctcttgtgttacccaaaagctcgatatattttgattccatacgagaagtatatgaagcatgggttatctacaattttctatcgctgtgtttggcatgggttggaggcccaggatcagtagtgcttagtttgagtggtcgttctttaaagccatcatggtctcttatgacatgttgctttccgcctttaacactggacgggcgatttattcgacgatgcaagcagggttgtctgcaatttgtaattctgaagcctatcctagttgctgtcacacttgtgctttatgctaaagggaagtacaaggatggaaattttaaccctgatcaagcatatctctatcttaccatcatctataccatatcctacacagtggctttgtacgcacttgtgctgttttatatggcatgcagagatctacttcagccattcaatccagtcccaaagtttgtgatcataaagtctgtggtctttctaacctattggcagggtgttctcgttttccttgctgcaaaatctggattcataaagagtgcagaggcagcagctcattttcaaaattttataatatgtgtcgagatgctcattgctgcagcatgtcatttctatgcttttccatacaaggagtatgctggtgccaatgttggtggatctggcagtttctcaggaagcttatcacatgctgtaaaactaaatgacttttaccatgacactgttcaccagtttgctcctacctatcacgattatgtgctctataaccatcaagatggtggtgacgaggggacaaagaagtaccgatcgagaacctttgtgccaactggccaagagatggatgcaatgagaaaaaacaaacctgtgtatgcaaacaagatagatggtgtttcagtctcaagtagtctatcttcagaggcaagctcacctaaaagctccagcgtaacttctgatcctgcacgctctgatgctgtgaaatcttccttgctggtggatgcctcagattctcttgaaacaatgtatgatatgtcgctcattgacattgatctatctagtttccccagcaatgtcccatctgcaagtgaaagtgggcctagataggagcagagaaaatgtagaaatcaccattaacaggtacaaaacatgctcctaatagttgtattcagatgaatcttctgaggtgtgttcttagttggaagatgttgttagttggagacttgaggataaatgaaaaaagcttataaacccatttaccttttgtagctttatacaatgagtcttctactgc

SEQ ID NO: 30165 - protein, 422 aa, Arabidopsis thaliana
  misc_feature (1)..(422): Ceres Seq. ID no. 4946805
MADLIPFYLNIVAFLCTVGAIALAIFHIYRHLLNYTEPTYQRYIVRIIFMVPVYAFMSFLSLVLPKSSIYFDSIREVYEAWVIYNFLSLCLAWVGGPGSVVLSLSGRSLKPSWSLMTCCFPPLTLDGRFIRRCKQGCLQFVILKPILVAVTLVLYAKGKYKDGNFNPDQAYLYLTIIYTISYTVALYALVLFYMACRDLLQPFNPVPKFVIIKSVVFLTYWQGVLVFLAAKSGFIKSAEAAAHFQNFIICVEMLIAAACHFYAFPYKEYAGANVGGSGSFSGSLSHAVKLNDFYHDTVHQFAPTYHDYVLYNHQDGGDEGTKKYRSRTFVPTGQEMDAMRKNKPVYANKIDGVSVSSSLSSEASSPKSSSVTSDPARSDAVKSSLLVDASDSLETMYDMSLIDIDLSSFPSNVPSASESGPR

SEQ ID NO: 30166 - protein, 373 aa, Arabidopsis thaliana
  misc_feature (1)..(373): Ceres Seq. ID no. 4946806
MVPVYAFMSFLSLVLPKSSIYFDSIREVYEAWVIYNFLSLCLAWVGGPGSVVLSLSGRSLKPSWSLMTCCFPPLTLDGRFIRRCKQGCLQFVILKPILVAVTLVLYAKGKYKDGNFNPDQAYLYLTIIYTISYTVALYALVLFYMACRDLLQPFNPVPKFVIIKSVVFLTYWQGVLVFLAAKSGFIKSAEAAAHFQNFIICVEMLIAAACHFYAFPYKEYAGANVGGSGSFSGSLSHAVKLNDFYHDTVHQFAPTYHDYVLYNHQDGGDEGTKKYRSRTFVPTGQEMDAMRKNKPVYANKIDGVSVSSSLSSEASSPKSSSVTSDPARSDAVKSSLLVDASDSLETMYDMSLIDIDLSSFPSNVPSASESGPR

SEQ ID NO: 30167 - protein, 366 aa, Arabidopsis thaliana
  misc_feature (1)..(366): Ceres Seq. ID no. 4946807
MSFLSLVLPKSSIYFDSIREVYEAWVIYNFLSLCLAWVGGPGSVVLSLSGRSLKPSWSLMTCCFPPLTLDGRFIRRCKQGCLQFVILKPILVAVTLVLYAKGKYKDGNFNPDQAYLYLTIIYTISYTVALYALVLFYMACRDLLQPFNPVPKFVIIKSVVFLTYWQGVLVFLAAKSGFIKSAEAAAHFQNFIICVEMLIAAACHFYAFPYKEYAGANVGGSGSFSGSLSHAVKLNDFYHDTVHQFAPTYHDYVLYNHQDGGDEGTKKYRSRTFVPTGQEMDAMRKNKPVYANKIDGVSVSSSLSSEASSPKSSSVTSDPARSDAVKSSLLVDASDSLETMYDMSLIDIDLSSFPSNVPSASESGPR

SEQ ID NO: 30168 - DNA, 1140 bp, Arabidopsis thaliana
  misc_feature (1)..(1140): Ceres Seq. ID no. 4948502
ctttctcagattcgctctttcccgagaaaatttgaagaaacagagattcatcattttctcttcctctcaaaaatcagatctgcaaaactctcagatcactcatgggtttgatttcaaaccctacccgtttgattctcgtcgccaccatcttcttcctcgtttcttcaatctccggtcaggattctgtcgttgagaacaatgagagacaagaatctgaaggatctggtaaagagcttggtcgtcgtggaatggttggtactgaacgaattggagttgatactgttgtagacaatattggtgctcttggtttgaatctagaccttgatgctactgctcctagtgtatttgatgctttgttttcgagtttctcgatgatacttgtcaccgagattggggatgaaacttttataatagcggcattgatggctatgcgacatcctaaagctactgttttatctggtgcactctcagctttgtttgttatgactatactttctactggacttggtaggatagtgccaaacttgatatcgaggaagcacaccaatagtgctgctacagtgctctatgcattttttggtttgcgactactctacattgcttggaggtctactgattcaaagtcaaatcagaagaaagaaatggaggaagttgaagagaagctcgagtcaggtcaagggaagacacccttccgtcgtttattctcaagattttgtaccccaatatttctggagtccttcatcttaacctttctagctgaatggggtgaccgtagccagatcgctacaatagctttggcgactcacaagaacgccataggagtggccattggggcaagtattggacacactgtgtgtacttcactagcagttgttggaggaagcatgctggcttcaaggatctcgcaacgtacggtcgcaactgttggaggcttactcttcctcggcttttcagtctcctcctatttctatcctccattgtagtaaatgtgcttctttcgaaaatgggtgttagagacaatttctaagtaaagtttcaattttttttttgattttaatttaagtttgatattttgtttaatatcaatggccaaaatggccaaaccaaagaatccaacgcctatgcttttacaatttactt

SEQ ID NO: 30169 - protein, 293 aa, Arabidopsis thaliana
  misc_feature (1)..(293): Ceres Seq. ID no. 4948503
MGLISNPTRLILVATIFFLVSSISGQDSVVENNERQESEGSGKELGRRGMVGTERIGVDTVVDNIGALGLNLDLDATAPSVFDALFSSFSMILVTEIGDETFIIAALMAMRHPKATVLSGALSALFVMTILSTGLGRIVPNLISRKHTNSAATVLYAFFGLRLLYIAWRSTDSKSNQKKEMEEVEEKLESGQGKTPFRRLFSRFCTPIFLESFILTFLAEWGDRSQIATIALATHKNAIGVAIGASIGHTVCTSLAVVGGSMLASRISQRTVATVGGLLFLGFSVSSYFYPPL

SEQ ID NO: 30170 - protein, 244 aa, Arabidopsis thaliana
  misc_feature (1)..(244): Ceres Seq. ID no. 4948504
MVGTERIGVDTVVDNIGALGLNLDLDATAPSVFDALFSSFSMILVTEIGDETFIIAALMAMRHPKATVLSGALSALFVMTILSTGLGRIVPNLISRKHTNSAATVLYAFFGLRLLYIAWRSTDSKSNQKKEMEEVEEKLESGQGKTPFRRLFSRFCTPIFLESFILTFLAEWGDRSQIATIALATHKNAIGVAIGASIGHTVCTSLAVVGGSMLASRISQRTVATVGGLLFLGFSVSSYFYPPL

SEQ ID NO: 30171 - protein, 203 aa, Arabidopsis thaliana
  misc_feature (1)..(203): Ceres Seq. ID no. 4948505
MILVTEIGDETFIIAALMAMRHPKATVLSGALSALFVMTILSTGLGRIVPNLISRKHTNSAATVLYAFFGLRLLYIAWRSTDSKSNQKKEMEEVEEKLESGQGKTPFRRLFSRFCTPIFLESFILTFLAEWGDRSQIATIALATHKNAIGVAIGASIGHTVCTSLAVVGGSMLASRISQRTVATVGGLLFLGFSVSSYFYPPL

SEQ ID NO: 30172 - DNA, 1899 bp, Arabidopsis thaliana
  misc_feature (1)..(1899): Ceres Seq. ID no. 4948732
atgggttgtttaagaagcttagtaagaaggaaacaattcgactcttcaaatggcaaagcagagactcatcatcatcaccaacagcttgcaaaagcgttgacctttcctcacttgattgccattggtgttggatcaacaattggagcaggggtttatattcttgtgggaacagtagctagagagcattcaggacctgctcttgctttatccttccttatagctggaatttctgctgccctttctgcgttttgttatgcggaactatctagtcgttttccctctgctgggagtgcctatcattattcttacatttgcattggtgaaggtttactcattgcctttgcagttttgcttatgaattcttggtactgcagtgttgcgtggttgattggctgggcgctgattttggaatacacaattggtggttcaacagttgcccgcggcatatctccaaatctggcaatgattttcggtggtgaagattgtctgcctacaatattagctcgtcatcaaatcccaggccttgatattgttgttgacccgtgtgctgctgtgctagtgttcattgtaacaggactttgttgccttggagtaaaggagagcacatttgctcagggaattgtaacaacagcaaatgtctttgtcatgatatttgtcatagtagctggaagctatttgtgtttcaagacaggttgggttggttatgaacttccaacggggtattttccttacggggttgatggaatgcttactggatctgctactgtcttctttgcctacatcgggtttgatacagttgcaagtatggcagaggaggtgaaaaatccccggcgggatttaccgctcggtattgggatttcgctcctgctttgttgtttgctgtacatgatggtgtctgttgttattgttggtttagtgccgtattatgctatggaccctgacactccaatatcatccgcattttctagtcatggaattcaatgggctgcatatttgataaatttaggtgctgtcatggctctctgttctgcattaatgggctccattctccctcagccgcggattctgatggcaatggctagggatggtctcttgccttcatatttctcatatgtgaatcaacgcacgcaggttccaattaatggcaccataaccactggtgtttgtgcagcaatcttagctttctttatggatgtttcgcaactggcgggaatggtgagtgtcgggacacttgttgcatttacaatggttgcaatatcattgttgatagtcagatatgttgttcctccagatgaggtactgataagattggaactggtacctcttccctcatcacttcaagaaaactcatccagtcacgtcggaacttccatccgtagtaaacaacctttacttggcaaagtggatgattcagttgtcgataaggaaaatgctccaggaagttgggttctcaacaaaaaaaacagacggaaatttgctggttggagcattatgttcacttgtattggaaacttccttttaagctatgcagcgtcaagcttcctcttgccaggactcctccgatattctctatgtggtgttggtggattgttccttcttgtcggtttgattgttctgatttgcatagatcaggatgatgctagacacagttttgggcattctggaggcttcatttgcccgtttgttccgcttttgcctatagtttgcattcttatcaacatgtatctcttggtaaaccttggagctgcgacgtgggttcgtgtatcggtttggctgttcctcggagtggttgtttacattttctatgggagaagaaacagctctcttgtgaatgctgtttatgtctccactgctcatctccaggagattcgtcgcacttctggacattctttggcttaa

SEQ ID NO: 30173 - protein, 632 aa, Arabidopsis thaliana
  misc_feature (1)..(632): Ceres Seq. ID no. 4948733
MGCLRSLVRRKQFDSSNGKAETHHHHQQLAKALTFPHLIAIGVGSTIGAGVYILVGTVAREHSGPALALSFLIAGISAALSAFCYAELSSRFPSAGSAYHYSYICIGEGLLIAFAVLLMNSWYCSVAWLIGWALILEYTIGGSTVARGISPNLAMIFGGEDCLPTILARHQIPGLDIVVDPCAAVLVFIVTGLCCLGVKESTFAQGIVTTANVFVMIFVIVAGSYLCFKTGWVGYELPTGYFPYGVDGMLTGSATVFFAYIGFDTVASMAEEVKNPRRDLPLGIGISLLLCCLLYMMVSVVIVGLVPYYAMDPDTPISSAFSSHGIQWAAYLINLGAVMALCSALMGSILPQPRILMAMARDGLLPSYFSYVNQRTQVPINGTITTGVCAAILAFFMDVSQLAGMVSVGTLVAFTMVAISLLIVRYVVPPDEVLIRLELVPLPSSLQENSSSHVGTSIRSKQPLLGKVDDSVVDKENAPGSWVLNKKNRRKFAGWSIMFTCIGNFLLSYAASSFLLPGLLRYSLCGVGGLFLLVGLIVLICIDQDDARHSFGHSGGFICPFVPLLPIVCILINMYLLVNLGAATWVRVSVWLFLGVVVYIFYGRRNSSLVNAVYVSTAHLQEIRRTSGHSLA

SEQ ID NO: 30174 - protein, 514 aa, Arabidopsis thaliana
  misc_feature (1)..(514): Ceres Seq. ID no. 4948734
MNSWYCSVAWLIGWALILEYTIGGSTVARGISPNLAMIFGGEDCLPTILARHQIPGLDIVVDPCAAVLVFIVTGLCCLGVKESTFAQGIVTTANVFVMIFVIVAGSYLCFKTGWVGYELPTGYFPYGVDGMLTGSATVFFAYIGFDTVASMAEEVKNPRRDLPLGIGISLLLCCLLYMMVSVVIVGLVPYYAMDPDTPISSAFSSHGIQWAAYLINLGAVMALCSALMGSILPQPRILMAMARDGLLPSYFSYVNQRTQVPINGTITTGVCAAILAFFMDVSQLAGMVSVGTLVAFTMVAISLLIVRYVVPPDEVLIRLELVPLPSSLQENSSSHVGTSIRSKQPLLGKVDDSVVDKENAPGSWVLNKKNRRKFAGWSIMFTCIGNFLLSYAASSFLLPGLLRYSLCGVGGLFLLVGLIVLICIDQDDARHSFGHSGGFICPFVPLLPIVCILINMYLLVNLGAATWVRVSVWLFLGVVVYIFYGRRNSSLVNAVYVSTAHLQEIRRTSGHSLA

SEQ ID NO: 30175 - protein, 478 aa, Arabidopsis thaliana
  misc_feature (1)..(478): Ceres Seq. ID no. 4948735
MIFGGEDCLPTILARHQIPGLDIVVDPCAAVLVFIVTGLCCLGVKESTFAQGIVTTANVFVMIFVIVAGSYLCFKTGWVGYELPTGYFPYGVDGMLTGSATVFFAYIGFDTVASMAEEVKNPRRDLPLGIGISLLLCCLLYMMVSVVIVGLVPYYAMDPDTPISSAFSSHGIQWAAYLINLGAVMALCSALMGSILPQPRILMAMARDGLLPSYFSYVNQRTQVPINGTITTGVCAAILAFFMDVSQLAGMVSVGTLVAFTMVAISLLIVRYVVPPDEVLIRLELVPLPSSLQENSSSHVGTSIRSKQPLLGKVDDSVVDKENAPGSWVLNKKNRRKFAGWSIMFTCIGNFLLSYAASSFLLPGLLRYSLCGVGGLFLLVGLIVLICIDQDDARHSFGHSGGFICPFVPLLPIVCILINMYLLVNLGAATWVRVSVWLFLGVVVYIFYGRRNSSLVNAVYVSTAHLQEIRRTSGHSLA

SEQ ID NO: 30176 - DNA, 1089 bp, Arabidopsis thaliana
  misc_feature (1)..(1089): Ceres Seq. ID no. 4948902
atgccaacatttcctcaatcgtttcctatgaacggtggtgatggtccgcacagttacatccacaattcctcttatcaaaaagtagcgatagatggcgctaaagaaaagacaagtgaagccatcctaaaaaacctcgatctcgaactcttgaaccgtaattctgatgaaaatatcttaagaattgcggattttggttgttctattggacccaacacgttcgaagtagtccaaaatattatcgatacggtgaagcaaaaaaacctaaaagaaaacaatgcctatattggtgctcctctcgagttccaagtttgcttcaatgatcaaccaaacaatgattttaacacactttttagaacccaacctatctcttccaaacaagcatatttatcggttggagttccaggatctttccatggtagagtattaccaaaaaatagcctccatatcggtcacattacctatgcgctccactggctttctacagttccccaacatgtttgcgacaagaaatctccggcattgaataaaagctacattcaatgtaataatttagtagaggaagtgactgaagcttaccgggtccagtttaaaaaggacatgggagattttcttggggcaagagctgaagagcttgtttcgggcggattgatgatcctatcaggacaatgcttgcccgatggtgtccctaaggctttgacatggcaaggggttgtgatcgatatgattggagattgtcttatggatatggctaaacagggaattacgaccaaggaaaagatcgaactgttcagtttgcccatatatattccgcatattagtgaattcaaggcagaaatagagcgaaatgaaaactttagtatcgagacaatggagaagataagtcatcctatggattataagccactaaccaacgacttcatcacttccatgtttcgagccattctcaatacgattattgaagaacactttggagatggtgtggtcaatgagctattcgatcgatttgctaagaagctcaacaagtacccaattgatttcaaaaggtgtaaaaagtatgtgaattattttatcgtgcttaaaagaaaataa

SEQ ID NO: 30177 - protein, 362 aa, Arabidopsis thaliana; identical to SEQ ID NO: 28766
  misc_feature (1)..(362): Ceres Seq. ID no. 4948903

SEQ ID NO: 30178 - protein, 353 aa, Arabidopsis thaliana
  misc_feature (1)..(353): Ceres Seq. ID no. 4948904
MNGGDGPHSYIHNSSYQKVAIDGAKEKTSEAILKNLDLELLNRNSDENILRIADFGCSIGPNTFEVVQNIIDTVKQKNLKENNAYIGAPLEFQVCFNDQPNNDFNTLFRTQPISSKQAYLSVGVPGSFHGRVLPKNSLHIGHITYALHWLSTVPQHVCDKKSPALNKSYIQCNNLVEEVTEAYRVQFKKDMGDFLGARAEELVSGGLMILSGQCLPDGVPKALTWQGVVIDMIGDCLMDMAKQGITTKEKIELFSLPIYIPHISEFKAEIERNENFSIETMEKISHPMDYKPLTNDFITSMFRAILNTIIEEHFGDGVVNELFDRFAKKLNKYPIDFKRCKKYVNYFIVLKRK

SEQ ID NO: 30179 - DNA, 1557 bp, Arabidopsis thaliana
  misc_feature (1)..(1557): Ceres Seq. ID no. 4948905
atgttgcttactatattaaaatcactcctcgtgatattcgtgactacgatattgagagttttatacgacaccatatcgtgctactggctaacacctagacgaatcaagaagatcatggaacagcaaggcgtaacgggtcctaaaccgcgtccgttaaccggaaatatccttgaaatctcggccatggtttcgcaatccgcttccaaggattgtgactctattcaccatgacatcgtcggccgccttctcccgcattacgttgcttggtccaaacaatacgggaagaggtttattgtgtggaacgggacggatcctcggctttgcttaacggaaacggaattgataaaggagttgctgatgaaacacaacggtgttagtggaagatcgtggctacaacaacaagggactaagaattttatcggtcgcggtctcctaatggctaatggccaagattggcaccaccaacgccaccttgctgcaccggcatttaccggagaaagactcaagggatacgcaaggcatatggtggagtgcacaagcaagctagttgagaggttgaggaaggaagttggggaaggagcaaatgaggtggagataggagaggagatgcataaactcacggctgatattatatcgaggacaaagttcggaagcagctttgagaaaggcaaagagcttttcaaccacctcactgtcctccagcgccgttgcgctcaagccacccgccacctctgctttcccggcagccggtttcttccaagcaaatacaacagagagatcaagtctctgaaaaaagaagttgagcgtttgttgattgagatcatacaaagcaggcgagactgcgctgaaatgggtaggagtagcactcacggtgacgaccttctcgggcttctcttgaacgaaatggatattgacaagaacaataacaataacaacaacaatcttcagttgataatggatgaatgcaagacattcttctttgctggccatgaaaccacggctttgctcctcacatggacaacaatgctcctcgccgataatcccacatggcaggaaaaagtccgtgaggaggtcagggaggtctttggccgcaatggccttccctcagtcgatcaactatctaagctaacctcgttaagcaaagtgattaacgagtcactaagactttaccctccagctactcttctaccaaggatggcatttgaagatctaaaactaggtgatctaaccattcctaaaggtttatcaatatggataccggttcttgctatccatcacagtgaagaattatggggtaaagacgcgaaccaattcaatcccgaacgttttggaggcagaccattcgcgtctggtcgccatttcatcccatttgcagccggtccacggaactgcatcggacaacagtttgcgttgatggaagctaaaataatattagccacgttaatttcaaagtttaacttcacaatatcaaagaattataggcatgccccaatcgttgtgcttactataaaacctaagtatggagttcaagtgatattgaagccattggtttcatga

SEQ ID NO: 30180 - protein, 518 aa, Arabidopsis thaliana
  misc_feature (1)..(518): Ceres Seq. ID no. 4948906
MLLTILKSLLVIFVTTILRVLYDTISCYWLTPRRIKKIMEQQGVTGPKPRPLTGNILEISAMVSQSASKDCDSIHHDIVGRLLPHYVAWSKQYGKRFIVWNGTDPRLCLTETELIKELLMKHNGVSGRSWLQQQGTKNFIGRGLLMANGQDWHHQRHLAAPAFTGERLKGYARHMVECTSKLVERLRKEVGEGANEVEIGEEMHKLTADIISRTKFGSSFEKGKELFNHLTVLQRRCAQATRHLCFPGSRFLPSKYNREIKSLKKEVERLLIEIIQSRRDCAEMGRSSTHGDDLLGLLLNEMDIDKNNNNNNNNLQLIMDECKTFFFAGHETTALLLTWTTMLLADNPTWQEKVREEVREVFGRNGLPSVDQLSKLTSLSKVINESLRLYPPATLLPRMAFEDLKLGDLTIPKGLSIWIPVLAIHHSEELWGKDANQFNPERFGGRPFASGRHFIPFAAGPRNCIGQQFALMEAKIILATLISKFNFTISKNYRHAPIVVLTIKPKYGVQVILKPLVS

SEQ ID NO: 30181 - protein, 480 aa, Arabidopsis thaliana
  misc_feature (1)..(480): Ceres Seq. ID no. 4948907
MEQQGVTGPKPRPLTGNILEISAMVSQSASKDCDSIHHDIVGRLLPHYVAWSKQYGKRFIVWNGTDPRLCLTETELIKELLMKHNGVSGRSWLQQQGTKNFIGRGLLMANGQDWHHQRHLAAPAFTGERLKGYARHMVECTSKLVERLRKEVGEGANEVEIGEEMHKLTADIISRTKFGSSFEKGKELFNHLTVLQRRCAQATRHLCFPGSRFLPSKYNREIKSLKKEVERLLIEIIQSRRDCAEMGRSSTHGDDLLGLLLNEMDIDKNNNNNNNNLQLIMDECKTFFFAGHETTALLLTWTTMLLADNPTWQEKVREEVREVFGRNGLPSVDQLSKLTSLSKVINESLRLYPPATLLPRMAFEDLKLGDLTIPKGLSIWIPVLAIHHSEELWGKDANQFNPERFGGRPFASGRHFIPFAAGPRNCIGQQFALMEAKIILATLISKFNFTISKNYRHAPIVVLTIKPKYGVQVILKPLVS

SEQ ID NO: 30182 - protein, 457 aa, Arabidopsis thaliana
  misc_feature (1)..(457): Ceres Seq. ID no. 4948908
MVSQSASKDCDSIHHDIVGRLLPHYVAWSKQYGKRFIVWNGTDPRLCLTETELIKELLMKHNGVSGRSWLQQQGTKNFIGRGLLMANGQDWHHQRHLAAPAFTGERLKGYARHMVECTSKLVERLRKEVGEGANEVEIGEEMHKLTADIISRTKFGSSFEKGKELFNHLTVLQRRCAQATRHLCFPGSRFLPSKYNREIKSLKKEVERLLIEIIQSRRDCAEMGRSSTHGDDLLGLLLNEMDIDKNNNNNNNNLQLIMDECKTFFFAGHETTALLLTWTTMLLADNPTWQEKVREEVREVFGRNGLPSVDQLSKLTSLSKVINESLRLYPPATLLPRMAFEDLKLGDLTIPKGLSIWIPVLAIHHSEELWGKDANQFNPERFGGRPFASGRHFIPFAAGPRNCIGQQFALMEAKIILATLISKFNFTISKNYRHAPIVVLTIKPKYGVQVILKPLVS

SEQ ID NO: 30183 - DNA, 1072 bp, Arabidopsis thaliana
  misc_feature (1)..(1072): Ceres Seq. ID no. 4948995
acttaaagatgataagtactgtactgtactgtctaatgtctatcctctcttaaggcttcgtttcaaattcttcaatcgtcctttagaaatcctcaaaatatccacaattttcctctctttacccagaagatttcatcagaacctcttcgccattaatggttacagcgatgttttgtgcatcatcttctccaattacatctcctctctacccaaaagcttataaattttctcaaacaaaatcgaattcgaagagattttcctctctgcgtgcttcgttgcctgtttctgataacaagcttcttaaatttgaatacacaccatggcttattgttggacttggtaaccctggattaaagtattacggaacaaggcataatattggttttgagatgattgatcatatagctcgagcaacggatatttctatgaacacaattcagtccaaggctttagttgggataggttctgttggagaagttccgattttgttggttaaacctcaaggatacatgaatttcagtggtgaatcggttgggccgttagctgcttactaccaaatacccttacgtcacattcttatgatatatgatgacatgggtttgtctaatggtgtcttgagacttcaaccaaaaggtgggcatagccaacacaatggattgaagaatgtgacagaacatttaaatggttgtcgcggctatccccgcttatcaatcggaattggaaatccaccaggtaacatggacatgaaagcgtttcttctccagaaattcagccccttggagcgcaaacagatggatgagggactggaacaaggtgttgaaggtgtgaagacacttgttgaagaggggtttagtgactcaatatctcgattcaatttgggacagaaatacaagtttcataaagtttgattccttgacatttgcctcatcgtgatacctgtcacagtaacagtagcaacacccatagtccaacattgttcatttgttcttatccttgtggtctttgtttagctgataggtaatattgtaacatttgtattctctaagatcaattttattgatttatattttgt

SEQ ID NO: 30184 - protein, 250 aa, Arabidopsis thaliana
  misc_feature (1)..(250): Ceres Seq. ID no. 4948996
MVTAMFCASSSPITSPLYPKAYKFSQTKSNSKRFSSLRASLPVSDNKLLKFEYTPWLIVGLGNPGLKYYGTRHNIGFEMIDHIARATDISMNTIQSKALVGIGSVGEVPILLVKPQGYMNFSGESVGPLAAYYQIPLRHILMIYDDMGLSNGVLRLQPKGGHSQHNGLKNVTEHLNGCRGYPRLSIGIGNPPGNMDMKAFLLQKFSPLERKQMDEGLEQGVEGVKTLVEEGFSDSISRFNLGQKYKFHKV

SEQ ID NO: 30185 - protein, 246 aa, Arabidopsis thaliana
  misc_feature (1)..(246): Ceres Seq. ID no. 4948997
MFCASSSPITSPLYPKAYKFSQTKSNSKRFSSLRASLPVSDNKLLKFEYTPWLIVGLGNPGLKYYGTRHNIGFEMIDHIARATDISMNTIQSKALVGIGSVGEVPILLVKPQGYMNFSGESVGPLAAYYQIPLRHILMIYDDMGLSNGVLRLQPKGGHSQHNGLKNVTEHLNGCRGYPRLSIGIGNPPGNMDMKAFLLQKFSPLERKQMDEGLEQGVEGVKTLVEEGFSDSISRFNLGQKYKFHKV

SEQ ID NO: 30186 - protein, 172 aa, Arabidopsis thaliana
  misc_feature (1)..(172): Ceres Seq. ID no. 4948998
MIDHIARATDISMNTIQSKALVGIGSVGEVPILLVKPQGYMNFSGESVGPLAAYYQIPLRHILMIYDDMGLSNGVLRLQPKGGHSQHNGLKNVTEHLNGCRGYPRLSIGIGNPPGNMDMKAFLLQKFSPLERKQMDEGLEQGVEGVKTLVEEGFSDSISRFNLGQKYKFHKV

SEQ ID NO: 30187 - DNA, 2034 bp, Arabidopsis thaliana
  misc_feature (1)..(2034): Ceres Seq. ID no. 4949128
atgagtgaagttttgcgcagagccaacaacgcacttagtagcgtcaagcaataccaatctctcttgaatcactttgcagctactcaatcaatttcaaaaaccaaagctttacactgccacgtcatcaccggcggtcgagtttccggccacattctctcgactctctccgtaacttatgcgttatgtggtcacatcacttatgcacggaagctgttcgaggaaatgcctcaaagctctttgctttcttataacattgttattagaatgtacgtgcgtgaaggattgtatcacgatgcgattagcgtgtttattaggatggttagtgagggggttaagtgtgttccggatggttatacatacccttttgttgctaaagctgctggagaattgaaatcgatgaaattggggttggttgttcatgggaggatcttgaggagttggtttggtagggataagtatgtgcagaacgcgttgttagcgatgtatatgaactttgggaaggttgaaatggcgagggatgtgtttgatgtgatgaagaaccgtgatgtgatttcgtggaacacgatgattagtgggtattataggaatggttatatgaatgatgcgttaatgatgtttgattggatggttaatgaaagtgttgatcttgaccatgctacgattgtttctatgttgcctgtttgtggtcacttgaaggatttggagatggggaggaatgttcataagttggtggaagagaagcggttaggggataaaattgaggtgaagaatgcgttggtgaatatgtacttgaaatgtggtcgtatggatgaagcgagatttgtttttgacaggatggaacgaagggatgtgatcacgtggacttgtatgattaacggatatactgaagatggagatgtggaaaacgctttagagttgtgtagattgatgcagtttgaaggcgtaagacctaatgctgtgactatagcttctcttgtttcggtgtgtggtgatgctttgaaggtgaatgatggtaaatgtttacacggttgggcggtgaggcaacaggtttattccgatatcattatagaaacatctttgatcagcatgtatgctaaatgcaaacgtgtagacctctgctttagagtattttcgggggcttcgaaataccataccggtccttggagtgcaattatcgctggttgtgtacagaatgaacttgtgagtgatgcgttaggtctattcaaacggatgcgacgggaagatgtggagcccaatattgctacattaaacagtctccttccagcatatgcagctttggcagatttgcgtcaagcaatgaatatccattgctacctaaccaaaaccgggtttatgtcaagccttgatgctgctacagggttggttcatgtttactcaaagtgtggaacattagaatctgctcacaagatattcaatggaatccaggaaaaacacaagagcaaagatgtagttctatggggtgcgttaatatccggctacgggatgcacggagatggtcataatgcgttgcaagttttcatggaaatggttcgatctggtgtaacgccaaacgaaatcacatttacatctgccttgaatgcttgcagtcattcgggtttggttgaagaaggcttgacattattcaggttcatgcttgaacattacaaaacgttagccagatcaaaccattacacttgcattgttgatctccttggtcgagcaggtcggttagacgaagcttacaatctcatcacaacaattccatttgaaccaacgtcaaccgtttggggtgcgttgcttgctgcttgtgtcacacatgagaatgtccagcttggagaaatggcagcaaacaagttgttcgagctggaaccagagaacacgggcaactatgtgttgttggcaaacatctatgcggctttaggacgatggaaagatatggagaaggtgagaagcatgatggagaatgttggattgagaaagaaaccaggtcatagcacaatcgagatcagaagtaattcagttgatacaagatga

SEQ ID NO: 30188 - protein, 677 aa, Arabidopsis thaliana
  misc_feature (1)..(677): Ceres Seq. ID no. 4949129
MSEVLRRANNALSSVKQYQSLLNHFAATQSISKTKALHCHVITGGRVSGHILSTLSVTYALCGHITYARKLFEEMPQSSLLSYNIVIRMYVREGLYHDAISVFIRMVSEGVKCVPDGYTYPFVAKAAGELKSMKLGLVVHGRILRSWFGRDKYVQNALLAMYMNFGKVEMARDVFDVMKNRDVISWNTMISGYYRNGYMNDALMMFDWMVNESVDLDHATIVSMLPVCGHLKDLEMGRNVHKLVEEKRLGDKIEVKNALVNMYLKCGRMDEARFVFDRMERRDVITWTCMINGYTEDGDVENALELCRLMQFEGVRPNAVTIASLVSVCGDALKVNDGKCLHGWAVRQQVYSDIIIETSLISMYAKCKRVDLCFRVFSGASKYHTGPWSAIIAGCVQNELVSDALGLFKRMRREDVEPNIATLNSLLPAYAALADLRQAMNIHCYLTKTGFMSSLDAATGLVHVYSKCGTLESAHKIFNGIQEKHKSKDVVLWGALISGYGMHGDGHNALQVFMEMVRSGVTPNEITFTSALNACSHSGLVEEGLTLFRFMLEHYKTLARSNHYTCIVDLLGRAGRLDEAYNLITTIPFEPTSTVWGALLAACVTHENVQLGEMAANKLFELEPENTGNYVLLANIYAALGRWKDMEKVRSMMENVGLRKKPGHSTIEIRSNSVDTR

SEQ ID NO: 30189 - protein, 603 aa, Arabidopsis thaliana
  misc_feature (1)..(603): Ceres Seq. ID no. 4949130
MPQSSLLSYNIVIRMYVREGLYHDAISVFIRMVSEGVKCVPDGYTYPFVAKAAGELKSMKLGLVVHGRILRSWFGRDKYVQNALLAMYMNFGKVEMARDVFDVMKNRDVISWNTMISGYYRNGYMNDALMMFDWMVNESVDLDHATIVSMLPVCGHLKDLEMGRNVHKLVEEKRLGDKIEVKNALVNMYLKCGRMDEARFVFDRMERRDVITWTCMINGYTEDGDVENALELCRLMQFEGVRPNAVTIASLVSVCGDALKVNDGKCLHGWAVRQQVYSDIIIETSLISMYAKCKRVDLCFRVFSGASKYHTGPWSAIIAGCVQNELVSDALGLFKRMRREDVEPNIATLNSLLPAYAALADLRQAMNIHCYLTKTGFMSSLDAATGLVHVYSKCGTLESAHKIFNGIQEKHKSKDVVLWGALISGYGMHGDGHNALQVFMEMVRSGVTPNEITFTSALNACSHSGLVEEGLTLFRFMLEHYKTLARSNHYTCIVDLLGRAGRLDEAYNLITTIPFEPTSTVWGALLAACVTHENVQLGEMAANKLFELEPENTGNYVLLANIYAALGRWKDMEKVRSMMENVGLRKKPGHSTIEIRSNSVDTR

SEQ ID NO: 30190 - protein, 589 aa, Arabidopsis thaliana
  misc_feature (1)..(589): Ceres Seq. ID no. 4949131
MYVREGLYHDAISVFIRMVSEGVKCVPDGYTYPFVAKAAGELKSMKLGLVVHGRILRSWFGRDKYVQNALLAMYMNFGKVEMARDVFDVMKNRDVISWNTMISGYYRNGYMNDALMMFDWMVNESVDLDHATIVSMLPVCGHLKDLEMGRNVHKLVEEKRLGDKIEVKNALVNMYLKCGRMDEARFVFDRMERRDVITWTCMINGYTEDGDVENALELCRLMQFEGVRPNAVTIASLVSVCGDALKVNDGKCLHGWAVRQQVYSDIIIETSLISMYAKCKRVDLCFRVFSGASKYHTGPWSAIIAGCVQNELVSDALGLFKRMRREDVEPNIATLNSLLPAYAALADLRQAMNIHCYLTKTGFMSSLDAATGLVHVYSKCGTLESAHKIFNGIQEKHKSKDVVLWGALISGYGMHGDGHNALQVFMEMVRSGVTPNEITFTSALNACSHSGLVEEGLTLFRFMLEHYKTLARSNHYTCIVDLLGRAGRLDEAYNLITTIPFEPTSTVWGALLAACVTHENVQLGEMAANKLFELEPENTGNYVLLANIYAALGRWKDMEKVRSMMENVGLRKKPGHSTIEIRSNSVDTR

SEQ ID NO: 30191 - DNA, 786 bp, Arabidopsis thaliana
  misc_feature (1)..(786): Ceres Seq. ID no. 4949143
atggtgatatgggtcgtgcccatgagttacggtcatggagcgatgattggtaatgcagtcgaagcacctgatgtagcggaagcaccagggattaatgacccaagcaaggcactcgacactaattggtatgacgcacgagccacgttctacggtgacatccatggtggcgacactcaaccttgtggatacggtaatctattcagacaaggctatggtctagccaccgcagcgttaagtacggcactcttcaacgacgggtacacatgtggggcttgttatgaaatcatgtgcacgcgtgatccacaatggtgtttacccggatccgtcaagatcacagcaacaaacttctgtcccgcaaattacagcaaaaccacagacctttggtgcaacccaccacagaaacactttgatctctccttagcaatgtttctcaagattgccaagtacaaagccggggttgtcccagttagatacagacgtattccttgtagcaaaactggtggtgtcaagtttgaaaccaaaggaaacccttatttcttaatggtcttgatatacaacgtaggaggagctggagatattaagtacgtgcaagttaaaggaaacaagaccgggtggataacaatgaaaaagaactgggggcagaattggaccactattacagtattgaccggccaaggtttatcgttcagggttacaacgagtgatgggattacaaaagatttttggaatgtgatgccaaaaaattgggggtttggacagacttttgatggtaggattaacttttag

SEQ ID NO: 30192 - protein, 261 aa, Arabidopsis thaliana
  misc_feature (1)..(261): Ceres Seq. ID no. 4949144
MVIWVVPMSYGHGAMIGNAVEAPDVAEAPGINDPSKALDTNWYDARATFYGDIHGGDTQPCGYGNLFRQGYGLATAALSTALFNDGYTCGACYEIMCTRDPQWCLPGSVKITATNFCPANYSKTTDLWCNPPQKHFDLSLAMFLKIAKYKAGVVPVRYRRIPCSKTGGVKFETKGNPYFLMVLIYNVGGAGDIKYVQVKGNKTGWITMKKNWGQNWTTITVLTGQGLSFRVTTSDGITKDFWNVMPKNWGFGQTFDGRINF

SEQ ID NO: 30193 - protein, 254 aa, Arabidopsis thaliana
  misc_feature (1)..(254): Ceres Seq. ID no. 4949145
MSYGHGAMIGNAVEAPDVAEAPGINDPSKALDTNWYDARATFYGDIHGGDTQPCGYGNLFRQGYGLATAALSTALFNDGYTCGACYEIMCTRDPQWCLPGSVKITATNFCPANYSKTTDLWCNPPQKHFDLSLAMFLKIAKYKAGVVPVRYRRIPCSKTGGVKFETKGNPYFLMVLIYNVGGAGDIKYVQVKGNKTGWITMKKNWGQNWTTITVLTGQGLSFRVTTSDGITKDFWNVMPKNWGFGQTFDGRINF

SEQ ID NO: 30194 - protein, 247 aa, Arabidopsis thaliana
  misc_feature (1)..(247): Ceres Seq. ID no. 4949146
MIGNAVEAPDVAEAPGINDPSKALDTNWYDARATFYGDIHGGDTQPCGYGNLFRQGYGLATAALSTALFNDGYTCGACYEIMCTRDPQWCLPGSVKITATNFCPANYSKTTDLWCNPPQKHFDLSLAMFLKIAKYKAGVVPVRYRRIPCSKTGGVKFETKGNPYFLMVLIYNVGGAGDIKYVQVKGNKTGWITMKKNWGQNWTTITVLTGQGLSFRVTTSDGITKDFWNVMPKNWGFGQTFDGRINF

SEQ ID NO: 30195 - DNA, 680 bp, Arabidopsis thaliana
  misc_feature (1)..(680): Ceres Seq. ID no. 4949237
acaaacaacgaacatggctaaacgttttctgcttcttcttcctcttttgtcatctattcttcttcttgccgtgtccgtcacagcttactccacaacaacgccgtatcaaggctacaagccggagaaattcacccacctccacttctacttccatgacgtcatctccggtgacaaacctaccgccgtcaaagttgccgaagcccgcccaacaaccaccctcaacgtcaagtttggcgtgattatgatcgctgatgatccgttgaccgaaggaccagacccgagctcaaaggaagtgggaagagctcaggggatgtacgcatcaacagccatgaaggacatagtcttcacaatggtctttaactatgttttcacggcaggagagtttaatggaagcaccatcgcggtgtatggacggaatgatatattttcgaaggtgagagagttgccgattattggaggaactggtgctttcaggtttgctagaggctatgcactgcccaagacttataagattgttggtctagatgccgtggtcgagtataatgtcttcatttggcattaatcatttgcatattgtctaatgtctttccgaaacaaattgtttcactttggttttcttatattgtttttggttcttttatatatatatatatatatatatatataacaattgttctgtt

SEQ ID NO: 30196 - protein, 186 aa, Arabidopsis thaliana
  misc_feature (1)..(186): Ceres Seq. ID no. 4949238
QTTNMAKRFLLLLPLLSSILLLAVSVTAYSTTTPYQGYKPEKFTHLHFYFHDVISGDKPTAVKVAEARPTTTLNVKFGVIMIADDPLTEGPDPSSKEVGRAQGMYASTAMKDIVFTMVFNYVFTAGEFNGSTIAVYGRNDIFSKVRELPIIGGTGAFRFARGYALPKTYKIVGLDAVVEYNVFIWH

SEQ ID NO: 30197 - protein, 182 aa, Arabidopsis thaliana
  misc_feature (1)..(182): Ceres Seq. ID no. 4949239
MAKRFLLLLPLLSSILLLAVSVTAYSTTTPYQGYKPEKFTHLHFYFHDVISGDKPTAVKVAEARPTTTLNVKFGVIMIADDPLTEGPDPSSKEVGRAQGMYASTAMKDIVFTMVFNYVFTAGEFNGSTIAVYGRNDIFSKVRELPIIGGTGAFRFARGYALPKTYKIVGLDAVVEYNVFIWH

SEQ ID NO: 30198 - protein, 106 aa, Arabidopsis thaliana
  misc_feature (1)..(106): Ceres Seq. ID no. 4949240
MIADDPLTEGPDPSSKEVGRAQGMYASTAMKDIVFTMVFNYVFTAGEFNGSTIAVYGRNDIFSKVRELPIIGGTGAFRFARGYALPKTYKIVGLDAVVEYNVFIWH

SEQ ID NO: 30199 - DNA, 2811 bp, Arabidopsis thaliana
  misc_feature (1)..(2811): Ceres Seq. ID no. 4949313
atgaatgccgtcggtaggatcggaagctatatctaccgtggtgtaggtacggtttcaggtccgtttcatccatttggtggtgcgatagacattatcgttgttgaacaacctgatggaacgtttaaatcgtctccttggtatgttagatttgggaaatttcaaggggttttgaagaatggtaggaatttgatcagaattgatgttaatggtgttgattctggtttcaatatgtatttagctcatactggacaagcttattttcttagagaagttgaagatgttgttggtgaatctgagagtggtgaagtttatactttgtcttctggtgatgaagctgagactactagtagggatgatgttgttgataaggttaagattcctttgaagtctaggagttgtaactatgattctcctagtcctcgtactggtaatgggaagattgttggtaagcctgggattttagggtatgtgtttggtgggaggtctgttagagagagtcaagattgtggtgtggagagagctgagattgctgctgatttattggaggttaagtggtctactaatatcgatacgcgtaagcgtggaaaaggtatgtcttctgagtctttggatggtaaagactatggtgagagtactagtactagtggaaaatcttgtgttgagggtagctctgagatgctagttgatagcgattcgatattggagactcctcttgttgcatctcctacattgcggtttcttgatgagaaagagcaggattttcgtgaaagcactaatgtggaagattattgtgaagaggatggatcgagtggagttgttgttgaaaatggtttatgtgaagcatcgagtatggtgttctctgttactagtgaagggagtggaaacgtagagatctttgtcgaaccaagaaccgaggcactagcagaggatgctgtaagtggaagcgatctggattccaagcaagaactgttaagggctcctgaatctgtggaaattgcaacattgggttcagctgaccaagcggatatggggagcattggcacttctcaagaaggaagcagcactggctctccagttcaagatgaaaataaaatcaccataaaagatatgcatatctcggcaggagattttgagaagtcccagtcagcaagtggagaaagcatcctgcaaccagagatagaagaagaacaattttcctttagcgatcttgatgaatgtaaacctggtggtaatagttctgtagggtcaagttcttctgacactgtaaaagttgatgggaaagagagttatgatgaaactaaaactagtcctgaaaaaggcgtggagaacacaatggccttgtcagagccgattaacatagagagaaaaaaggatatcttcacagatgagatggagcggttggtaggatcattaccgattatgcggcttcaaaacaacgatgatatggatgccagtccttctcagcccttgagccagtcatttgacccatgtttcaatacttcaaagttggatttgagagaagatgagtcgagctcggggggtttagatgcagaaagcgttgctgagagtagcccaaaattaaaggcatttaaacatgttatagctaatcctgaagtggtcgagctctctctctgcaagcacttattaagtgaaggaatgggagcagaagcggcttctcaggctttcaattccgaaaaactggatatggaaaagtttgcttctttgggcccatcgatcctggagaacgataagcttgtcgtgaagattggtggctgctattttccatgggatgcagcagctcctattatcttaggagtggtttcatttgggactgcccaagtatttgaacccaagggcatgatagctgttgaccggaatgagaaacctggtgatgtattagctcaaggcagtggaagctggaaactttggcctttctctctgcgaagatcaacaaaagaagctgaagcttctccttctggggacacagctgaacctgaagagaaacaagagaagtcgtccccaagaccaatgaaaaagactgtcagggcactaactccaacttctgaacaattggcttcgctagatctgaaagatggaatgaattccgtgacttttacgttctccaccaatattgtgggtacacaacaggtagacgcaaggatttacttatggaaatggaattcgcgcatagttgtgtcagatgtagatggtaccatcacaagatcggatgtattaggccagtttatgcctttggttggtatagattggtcacaaacaggtgttacacatttgttttcggctgtaaaggaaaatggatatcagttgatatttttaagtgcacgcgcgatttctcaagcctcagtcacaagacaatttctagttaatctcaagcaggacggaaaagcattgccggatgggcctgttgttatctctcctgatggtctctttccttcgttgtttcgggaagtaattagaagagcacctcatgaattcaagattgcttgcttagaggagatacggggcttgtttcctcccgaacacaacccattctatgctggttttggaaacagagacacagatgagataagctaccttaaagtcggaatcccccgaggaaagatcttcattattaacccaaaggaacctatgagttatataggagaagtagctgtgaatcgtagaattgatacaagatcatacacaaatcttcatactcttgttaacagaatgttcccagctacatcctcttcagaaccggaggactttaacacatggaatttctggaaactgcctcctccatcgcttatgtga

SEQ ID NO: 30200 - protein, 936 aa, Arabidopsis thaliana
  misc_feature (1)..(936): Ceres Seq. ID no. 4949314
MNAVGRIGSYIYRGVGTVSGPFHPFGGAIDIIVVEQPDGTFKSSPWYVRFGKFQGVLKNGRNLIRIDVNGVDSGFNMYLAHTGQAYFLREVEDVVGESESGEVYTLSSGDEAETTSRDDVVDKVKIPLKSRSCNYDSPSPRTGNGKIVGKPGILGYVFGGRSVRESQDCGVERAEIAADLLEVKWSTNIDTRKRGKGMSSESLDGKDYGESTSTSGKSCVEGSSEMLVDSDSILETPLVASPTLRFLDEKEQDFRESTNVEDYCEEDGSSGVVVENGLCEASSMVFSVTSEGSGNVEIFVEPRTEALAEDAVSGSDLDSKQELLRAPESVEIATLGSADQADMGSIGTSQEGSSTGSPVQDENKITIKDMHISAGDFEKSQSASGESILQPEIEEEQFSFSDLDECKPGGNSSVGSSSSDTVKVDGKESYDETKTSPEKGVENTMALSEPINIERKKDIFTDEMERLVGSLPIMRLQNNDDMDASPSQPLSQSFDPCFNTSKLDLREDESSSGGLDAESVAESSPKLKAFKHVIANPEVVELSLCKHLLSEGMGAEAASQAFNSEKLDMEKFASLGPSILENDKLVVKIGGCYFPWDAAAPIILGVVSFGTAQVFEPKGMIAVDRNEKPGDVLAQGSGSWKLWPFSLRRSTKEAEASPSGDTAEPEEKQEKSSPRPMKKTVRALTPTSEQLASLDLKDGMNSVTFTFSTNIVGTQQVDARIYLWKWNSRIVVSDVDGTITRSDVLGQFMPLVGIDWSQTGVTHLFSAVKENGYQLIFLSARAISQASVTRQFLVNLKQDGKALPDGPVVISPDGLFPSLFREVIRRAPHEFKIACLEEIRGLFPPEHNPFYAGFGNRDTDEISYLKVGIPRGKIFIINPKEPMSYIGEVAVNRRIDTRSYTNLHTLVNRMFPATSSSEPEDFNTWNFWKLPPPSLM

SEQ ID NO: 30201 - protein, 860 aa, Arabidopsis thaliana
  misc_feature (1)..(860): Ceres Seq. ID no. 4949315
MYLAHTGQAYFLREVEDVVGESESGEVYTLSSGDEAETTSRDDVVDKVKIPLKSRSCNYDSPSPRTGNGKIVGKPGILGYVFGGRSVRESQDCGVERAEIAADLLEVKWSTNIDTRKRGKGMSSESLDGKDYGESTSTSGKSCVEGSSEMLVDSDSILETPLVASPTLRFLDEKEQDFRESTNVEDYCEEDGSSGVVVENGLCEASSMVFSVTSEGSGNVEIFVEPRTEALAEDAVSGSDLDSKQELLRAPESVEIATLGSADQADMGSIGTSQEGSSTGSPVQDENKITIKDMHISAGDFEKSQSASGESILQPEIEEEQFSFSDLDECKPGGNSSVGSSSSDTVKVDGKESYDETKTSPEKGVENTMALSEPINIERKKDIFTDEMERLVGSLPIMRLQNNDDMDASPSQPLSQSFDPCFNTSKLDLREDESSSGGLDAESVAESSPKLKAFKHVIANPEVVELSLCKHLLSEGMGAEAASQAFNSEKLDMEKFASLGPSILENDKLVVKIGGCYFPWDAAAPIILGVVSFGTAQVFEPKGMIAVDRNEKPGDVLAQGSGSWKLWPFSLRRSTKEAEASPSGDTAEPEEKQEKSSPRPMKKTVRALTPTSEQLASLDLKDGMNSVTFTFSTNIVGTQQVDARIYLWKWNSRIVVSDVDGTITRSDVLGQFMPLVGIDWSQTGVTHLFSAVKENGYQLIFLSARAISQASVTRQFLVNLKQDGKALPDGPVVISPDGLFPSLFREVIRRAPHEFKIACLEEIRGLFPPEHNPFYAGFGNRDTDEISYLKVGIPRGKIFIINPKEPMSYIGEVAVNRRIDTRSYTNLHTLVNRMFPATSSSEPEDFNTWNFWKLPPPSLM

SEQ ID NO: 30202 - protein, 739 aa, Arabidopsis thaliana
  misc_feature (1)..(739): Ceres Seq. ID no. 4949316
MSSESLDGKDYGESTSTSGKSCVEGSSEMLVDSDSILETPLVASPTLRFLDEKEQDFRESTNVEDYCEEDGSSGVVVENGLCEASSMVFSVTSEGSGNVEIFVEPRTEALAEDAVSGSDLDSKQELLRAPESVEIATLGSADQADMGSIGTSQEGSSTGSPVQDENKITIKDMHISAGDFEKSQSASGESILQPEIEEEQFSFSDLDECKPGGNSSVGSSSSDTVKVDGKESYDETKTSPEKGVENTMALSEPINIERKKDIFTDEMERLVGSLPIMRLQNNDDMDASPSQPLSQSFDPCFNTSKLDLREDESSSGGLDAESVAESSPKLKAFKHVIANPEVVELSLCKHLLSEGMGAEAASQAFNSEKLDMEKFASLGPSILENDKLVVKIGGCYFPWDAAAPIILGVVSFGTAQVFEPKGMIAVDRNEKPGDVLAQGSGSWKLWPFSLRRSTKEAEASPSGDTAEPEEKQEKSSPRPMKKTVRALTPTSEQLASLDLKDGMNSVTFTFSTNIVGTQQVDARIYLWKWNSRIVVSDVDGTITRSDVLGQFMPLVGIDWSQTGVTHLFSAVKENGYQLIFLSARAISQASVTRQFLVNLKQDGKALPDGPVVISPDGLFPSLFREVIRRAPHEFKIACLEEIRGLFPPEHNPFYAGFGNRDTDEISYLKVGIPRGKIFIINPKEPMSYIGEVAVNRRIDTRSYTNLHTLVNRMFPATSSSEPEDFNTWNFWKLPPPSLM

SEQ ID NO: 30203 - DNA, 2793 bp, Arabidopsis thaliana
  misc_feature (1)..(2793): Ceres Seq. ID no. 4949381
atgaatgccgtcggtaggatcggaagctatatctaccgtggtgtaggtacggtttcaggtccgtttcatccatttggtggtgcgatagacattatcgttgttgaacaacctgatggaacgtttaaatcgtctccttggtatgttagatttgggaaatttcaaggggttttgaagaatggtaggaatttgatcagaattgatgttaatggtgttgattctggtttcaatatgtatttagctcatactggacaagcttattttcttagagaagttgaagatgttgttggtgaatctgagagtggtgaagtttatactttgtcttctggtgatgaagctgagactactagtagggatgatgttgttgataaggttaagattcctttgaagtctaggagttgtaactatgattctcctagtcctcgtactggtaatgggaagattgttggtaagcctgggattttagggtatgtgtttggtgggaggtctgttagagagagtcaagattgtggtgtggagagagctgagattgctgctgatttattggaggttaagtggtctactaatatcgatacgcgtaagcgtggaaaaggtatgtcttctgagtctttggatggtaaagactatggtgagagtactagtactagtggaaaatcttgtgttgagggtagctctgagatgctagttgatagcgattcgatattggagactcctcttgttgcatctcctacattgcggtttcttgatgagaaagagcaggattttcgtgaaagcactaatgtggaagattattgtgaagaggatggatcgagtggagttgttgttgaaaatggtttatgtgaagcatcgagtatggtgttctctgttactagtgaagggagtggaaacgtagagatctttgtcgaaccaagaaccgaggcactagcagaggatgctgtaagtggaagcgatctggattccaagcaagaactgttaagggctcctgaatctgtggaaattgcaacattgggttcagctgaccaagcggatatggggagcattggcacttctcaagaaggaagcagcactggctctccagttcaagatgaaaataaaatcaccataaaagatatgcatatctcggcaggagattttgagaagtcccagtcagcaagtggagaaagcatcctgcaaccagagatagaagaagaacaattttcctttagcgatcttgatgaatgtaaacctggtggtaatagttctgtagggtcaagttcttctgacactgtaaaagttgatgggaaagagagttatgatgaaactaaaactagtcctgaaaaaggcgtggagaacacaatggccttgtcagagccgattaacatagagagaaaaaaggatatcttcacagatgagatggagcggttggtaggatcattaccgattatgcggcttcaaaacaacgatgatatggatgccagtccttctcagcccttgagccagtcatttgacccatgtttcaatacttcaaagttggatttgagagaagatgagtcgagctcggggggtttagatgcagaaagcgttgctgagagtagcccaaaattaaaggcatttaaacatgttatagctaatcctgaagtggtcgagctctctctctgcaagcacttattaagtgaaggaatgggagcagaagcggcttctcaggctttcaattccgaaaaactggatatggaaaagtttgcttctttgggcccatcgatcctggagaacgataagcttgtcgtgaagattggtggctgctattttccatgggatgcagcagctcctattatcttaggagtggtttcatttgggactgcccaagtatttgaacccaagggcatgatagctgttgaccggaatgagaaacctggtgatgtattagctcaaggcagtggaagctggaaactttggcctttctctctgcgaagatcaacaaaagaagctgaagcttctccttctggggacacagctgaacctgaagagaaacaagagaagtcgtccccaagaccaatgaaaaagactgtcagggcactaactccaacttctgaacaattggcttcgctagatctgaaagatggaatgaattccgtgacttttacgttctccaccaatattgtgggtacacaacaggtagacgcaaggatttacttatggaaatggaattcgcgcatagttgtgtcagatgtagatggtaccatcacaagatcggatgtattaggccagtttatgcctttggttggtatagattggtcacaaacaggtgttacacatttgttttcggctgtaaaggaaaatggatatcagttgatatttttaagtgcacgcgcgatttctcaagcctcagtcacaagacaatttctagttaatctcaagcaggacggaaaagcattgccggatgggcctgttgttatctctcctgatggtctctttccttcgttgtttcgggaagtaattagaagagcacctcatgaattcaagattgcttgcttagaggagatacggggcttgtttcctcccgaacacaacccattctatgctggttttggaaacagagacacagatgagataagctaccttaaagtcggaatcccccgaggaaagatcttcattattaacccaaagggagaagtagctgtgaatcgtagaattgatacaagatcatacacaaatcttcatactcttgttaacagaatgttcccagctacatcctcttcagaaccggaggactttaacacatggaatttctggaaactgcctcctccatcgcttatgtga

SEQ ID NO: 30204 - protein, 930 aa, Arabidopsis thaliana
  misc_feature (1)..(930): Ceres Seq. ID no. 4949382
MNAVGRIGSYIYRGVGTVSGPFHPFGGAIDIIVVEQPDGTFKSSPWYVRFGKFQGVLKNGRNLIRIDVNGVDSGFNMYLAHTGQAYFLREVEDVVGESESGEVYTLSSGDEAETTSRDDVVDKVKIPLKSRSCNYDSPSPRTGNGKIVGKPGILGYVFGGRSVRESQDCGVERAEIAADLLEVKWSTNIDTRKRGKGMSSESLDGKDYGESTSTSGKSCVEGSSEMLVDSDSILETPLVASPTLRFLDEKEQDFRESTNVEDYCEEDGSSGVVVENGLCEASSMVFSVTSEGSGNVEIFVEPRTEALAEDAVSGSDLDSKQELLRAPESVEIATLGSADQADMGSIGTSQEGSSTGSPVQDENKITIKDMHISAGDFEKSQSASGESILQPEIEEEQFSFSDLDECKPGGNSSVGSSSSDTVKVDGKESYDETKTSPEKGVENTMALSEPINIERKKDIFTDEMERLVGSLPIMRLQNNDDMDASPSQPLSQSFDPCFNTSKLDLREDESSSGGLDAESVAESSPKLKAFKHVIANPEVVELSLCKHLLSEGMGAEAASQAFNSEKLDMEKFASLGPSILENDKLVVKIGGCYFPWDAAAPIILGVVSFGTAQVFEPKGMIAVDRNEKPGDVLAQGSGSWKLWPFSLRRSTKEAEASPSGDTAEPEEKQEKSSPRPMKKTVRALTPTSEQLASLDLKDGMNSVTFTFSTNIVGTQQVDARIYLWKWNSRIVVSDVDGTITRSDVLGQFMPLVGIDWSQTGVTHLFSAVKENGYQLIFLSARAISQASVTRQFLVNLKQDGKALPDGPVVISPDGLFPSLFREVIRRAPHEFKIACLEEIRGLFPPEHNPFYAGFGNRDTDEISYLKVGIPRGKIFIINPKGEVAVNRRIDTRSYTNLHTLVNRMFPATSSSEPEDFNTWNFWKLPPPSLM

SEQ ID NO: 30205 - protein, 854 aa, Arabidopsis thaliana
  misc_feature (1)..(854): Ceres Seq. ID no. 4949383
MYLAHTGQAYFLREVEDVVGESESGEVYTLSSGDEAETTSRDDVVDKVKIPLKSRSCNYDSPSPRTGNGKIVGKPGILGYVFGGRSVRESQDCGVERAEIAADLLEVKWSTNIDTRKRGKGMSSESLDGKDYGESTSTSGKSCVEGSSEMLVDSDSILETPLVASPTLRFLDEKEQDFRESTNVEDYCEEDGSSGVVVENGLCEASSMVFSVTSEGSGNVEIFVEPRTEALAEDAVSGSDLDSKQELLRAPESVEIATLGSADQADMGSIGTSQEGSSTGSPVQDENKITIKDMHISAGDFEKSQSASGESILQPEIEEEQFSFSDLDECKPGGNSSVGSSSSDTVKVDGKESYDETKTSPEKGVENTMALSEPINIERKKDIFTDEMERLVGSLPIMRLQNNDDMDASPSQPLSQSFDPCFNTSKLDLREDESSSGGLDAESVAESSPKLKAFKHVIANPEVVELSLCKHLLSEGMGAEAASQAFNSEKLDMEKFASLGPSILENDKLVVKIGGCYFPWDAAAPIILGVVSFGTAQVFEPKGMIAVDRNEKPGDVLAQGSGSWKLWPFSLRRSTKEAEASPSGDTAEPEEKQEKSSPRPMKKTVRALTPTSEQLASLDLKDGMNSVTFTFSTNIVGTQQVDARIYLWKWNSRIVVSDVDGTITRSDVLGQFMPLVGIDWSQTGVTHLFSAVKENGYQLIFLSARAISQASVTRQFLVNLKQDGKALPDGPVVISPDGLFPSLFREVIRRAPHEFKIACLEEIRGLFPPEHNPFYAGFGNRDTDEISYLKVGIPRGKIFIINPKGEVAVNRRIDTRSYTNLHTLVNRMFPATSSSEPEDFNTWNFWKLPPPSLM

SEQ ID NO: 30206 - protein, 733 aa, Arabidopsis thaliana
  misc_feature (1)..(733): Ceres Seq. ID no. 4949384
MSSESLDGKDYGESTSTSGKSCVEGSSEMLVDSDSILETPLVASPTLRFLDEKEQDFRESTNVEDYCEEDGSSGVVVENGLCEASSMVFSVTSEGSGNVEIFVEPRTEALAEDAVSGSDLDSKQELLRAPESVEIATLGSADQADMGSIGTSQEGSSTGSPVQDENKITIKDMHISAGDFEKSQSASGESILQPEIEEEQFSFSDLDECKPGGNSSVGSSSSDTVKVDGKESYDETKTSPEKGVENTMALSEPINIERKKDIFTDEMERLVGSLPIMRLQNNDDMDASPSQPLSQSFDPCFNTSKLDLREDESSSGGLDAESVAESSPKLKAFKHVIANPEVVELSLCKHLLSEGMGAEAASQAFNSEKLDMEKFASLGPSILENDKLVVKIGGCYFPWDAAAPIILGVVSFGTAQVFEPKGMIAVDRNEKPGDVLAQGSGSWKLWPFSLRRSTKEAEASPSGDTAEPEEKQEKSSPRPMKKTVRALTPTSEQLASLDLKDGMNSVTFTFSTNIVGTQQVDARIYLWKWNSRIVVSDVDGTITRSDVLGQFMPLVGIDWSQTGVTHLFSAVKENGYQLIFLSARAISQASVTRQFLVNLKQDGKALPDGPVVISPDGLFPSLFREVIRRAPHEFKIACLEEIRGLFPPEHNPFYAGFGNRDTDEISYLKVGIPRGKIFIINPKGEVAVNRRIDTRSYTNLHTLVNRMFPATSSSEPEDFNTWNFWKLPPPSLM

SEQ ID NO: 30207 - DNA, 1539 bp, Arabidopsis thaliana
  misc_feature (1)..(1539): Ceres Seq. ID no. 4949411
atgatgcaggggaagaaactgaaaggttgtgaaaatggtgttgtaaatcgaaaggcgttaaatcgagagaagataattactctgcaagaagatgttgaaaagttgagaaagaagctgagacttgaagaaaacattcaccgagcaatggaaagagcatttagtaggcctcttggagcacttccccgtcttcctccgtttctacctccatcggttttggagttacttgcggaagtggctgttttggaagaggaattggttcggttagaagaacatattgtgcattgtagacaagaattgtatcaagaagcagtttttacatcttcatcgatagagaatttaaaatgctctcctgcatttcctaagcattggcagaccaaatccaagtcagcttccactagtgctagagaatcagaatcacctctttcacgggcaccttgttctgtttcagtgtgtaggaagggtaaagaaaacaagttgagtgctacttctatcaaaacaccgatgaagaaaacgactattgctcatacacaactgaataagagtttagaagctcaaaaactaaaggatagtcatagatgtcgcaaaacaaatgcagagcggagctctcatggtggcggtgatgaaccaaataaaatttccgaggatttggttaaatgtctgtctaacattttcatgagaatgagctcaataaagagatccatggttacaaaatctcaagaaaacgataaagatacggcattcagggatccttatggaatttgctctagttttagaagaagggatattggtcgatataagaatttcagtgatgttgaagaagcctcacttaaccaaaacagaacgtcaagttcctctttgtttctcatccgccaactgaaacgattgcttggaagactttctttagtcaacatgcagaaacttaatcaacaagagaagttagctttctggataaacatttataacagctgcatgatgaatggtttccttgaacatggaataccggagagccctgatatggtgacattaatgcaaaaggcgactataaatgtaggaggccactttctcaatgcaatcacgatcgaacacttcatcctccgcttaccgcatcactcaaaatatatttctccaaagggttcaaagaaaaatgaaatggcagtgagaagtaaatttggattggaattgtcagagccacttgtaacatttgctctctcatgtggtagctggtcctcacccgcggtacgggtgtacactgcgagtaaagtagaggaggagttggaggtggcgaaaagagagtacctagaagcatcggtggggatatcggtggtgaaaatagggataccaaagctgatggattggtatagtcatgactttgcaaaggacattgaatcattgcttgattggattttccttcagttgcctactgagttgggtaaagatgctctcaactgtgttgaacaagggatgtctcagtccccttcttctactcttgtccatattatcccttatgacttcacttttagatatcttttttccatctga

SEQ ID NO: 30208 - protein, 512 aa, Arabidopsis thaliana
  misc_feature (1)..(512): Ceres Seq. ID no. 4949412
MMQGKKLKGCENGVVNRKALNREKIITLQEDVEKLRKKLRLEENIHRAMERAFSRPLGALPRLPPFLPPSVLELLAEVAVLEEELVRLEEHIVHCRQELYQEAVFTSSSIENLKCSPAFPKHWQTKSKSASTSARESESPLSRAPCSVSVCRKGKENKLSATSIKTPMKKTTIAHTQLNKSLEAQKLKDSHRCRKTNAERSSHGGGDEPNKISEDLVKCLSNIFMRMSSIKRSMVTKSQENDKDTAFRDPYGICSSFRRRDIGRYKNFSDVEEASLNQNRTSSSSLFLIRQLKRLLGRLSLVNMQKLNQQEKLAFWINIYNSCMMNGFLEHGIPESPDMVTLMQKATINVGGHFLNAITIEHFILRLPHHSKYISPKGSKKNEMAVRSKFGLELSEPLVTFALSCGSWSSPAVRVYTASKVEEELEVAKREYLEASVGISVVKIGIPKLMDWYSHDFAKDIESLLDWIFLQLPTELGKDALNCVEQGMSQSPSSTLVHIIPYDFTFRYLFSI

SEQ ID NO: 30209 - protein, 511 aa, Arabidopsis thaliana
  misc_feature (1)..(511): Ceres Seq. ID no. 4949413
MQGKKLKGCENGVVNRKALNREKIITLQEDVEKLRKKLRLEENIHRAMERAFSRPLGALPRLPPFLPPSVLELLAEVAVLEEELVRLEEHIVHCRQELYQEAVFTSSSIENLKCSPAFPKHWQTKSKSASTSARESESPLSRAPCSVSVCRKGKENKLSATSIKTPMKKTTIAHTQLNKSLEAQKLKDSHRCRKTNAERSSHGGGDEPNKISEDLVKCLSNIFMRMSSIKRSMVTKSQENDKDTAFRDPYGICSSFRRRDIGRYKNFSDVEEASLNQNRTSSSSLFLIRQLKRLLGRLSLVNMQKLNQQEKLAFWINIYNSCMMNGFLEHGIPESPDMVTLMQKATINVGGHFLNAITIEHFILRLPHHSKYISPKGSKKNEMAVRSKFGLELSEPLVTFALSCGSWSSPAVRVYTASKVEEELEVAKREYLEASVGISVVKIGIPKLMDWYSHDFAKDIESLLDWIFLQLPTELGKDALNCVEQGMSQSPSSTLVHIIPYDFTFRYLFSI

SEQ ID NO: 30210 - protein, 464 aa, Arabidopsis thaliana
  misc_feature (1)..(464): Ceres Seq. ID no. 4949414
MERAFSRPLGALPRLPPFLPPSVLELLAEVAVLEEELVRLEEHIVHCRQELYQEAVFTSSSIENLKCSPAFPKHWQTKSKSASTSARESESPLSRAPCSVSVCRKGKENKLSATSIKTPMKKTTIAHTQLNKSLEAQKLKDSHRCRKTNAERSSHGGGDEPNKISEDLVKCLSNIFMRMSSIKRSMVTKSQENDKDTAFRDPYGICSSFRRRDIGRYKNFSDVEEASLNQNRTSSSSLFLIRQLKRLLGRLSLVNMQKLNQQEKLAFWINIYNSCMMNGFLEHGIPESPDMVTLMQKATINVGGHFLNAITIEHFILRLPHHSKYISPKGSKKNEMAVRSKFGLELSEPLVTFALSCGSWSSPAVRVYTASKVEEELEVAKREYLEASVGISVVKIGIPKLMDWYSHDFAKDIESLLDWIFLQLPTELGKDALNCVEQGMSQSPSSTLVHIIPYDFTFRYLFSI

SEQ ID NO: 30211 - DNA, 927 bp, Arabidopsis thaliana
  misc_feature (1)..(927): Ceres Seq. ID no. 4950117
atggaaagagtgaatctcggaggtttaggttacgataatggcggagttatgatgactagagatcccaaacctaggctcagatggacagccgatcttcatgatcgcttcgtcgacgccgtcgctaagctcggtggcgctgacaaagcaactcctaaatcggttctgaagctgatgggattaaaaggtttaacactgtaccatctcaagagccatttacagaagtatagacttggtcaacaacaaggcaaaaaacaaaatagaacagaacaaaacaaagaaaatgctggaagttcatatgtgcatttcgacaattgttctcaaggaggaatctccaatgattcaagatttgataaccatcaaaggtatattatatatgaatttgccttctctcgacataatggatttgtaaagcttgagtttgacataatgttaatgaacacacgtagacaaagcgggaatgtaccttttgctgaggcaatgagacatcaggtcgatgcgcaacaacggtttcaagaacaactcgaggtgcagaaaaaactgcagatgagaatggaggcacaaggaaaatatttgttgacattactagagaaagcacagaagagcttaccttgtggtaatgcaggggaaacagacaagggtcaattctcggatttcaatctcgcactttcgggacttgtaggaagtgatcgtaagaacgagaaggcgggtttggttactgatatctcacaccttaatggtggtgattcctctcaagagtttcggttatgtggagaacaagagaaaatagaaaccggagatgcatgtgttaaaccagaatccgggtttgtgcattttgatttgaactccaaaagtgggtatgatctcttgaattgtgggaaatatgggattgaagtgaagccaaatgtgattggagatagacttcaatag

SEQ ID NO: 30212 - protein, 308 aa, Arabidopsis thaliana
  misc_feature (1)..(308): Ceres Seq. ID no. 4950118
MERVNLGGLGYDNGGVMMTRDPKPRLRWTADLHDRFVDAVAKLGGADKATPKSVLKLMGLKGLTLYHLKSHLQKYRLGQQQGKKQNRTEQNKENAGSSYVHFDNCSQGGISNDSRFDNHQRYIIYEFAFSRHNGFVKLEFDIMLMNTRRQSGNVPFAEAMRHQVDAQQRFQEQLEVQKKLQMRMEAQGKYLLTLLEKAQKSLPCGNAGETDKGQFSDFNLALSGLVGSDRKNEKAGLVTDISHLNGGDSSQEFRLCGEQEKIETGDACVKPESGFVHFDLNSKSGYDLLNCGKYGIEVKPNVIGDRLQ

SEQ ID NO: 30213 - protein, 292 aa, Arabidopsis thaliana
  misc_feature (1)..(292): Ceres Seq. ID no. 4950119
MMTRDPKPRLRWTADLHDRFVDAVAKLGGADKATPKSVLKLMGLKGLTLYHLKSHLQKYRLGQQQGKKQNRTEQNKENAGSSYVHFDNCSQGGISNDSRFDNHQRYIIYEFAFSRHNGFVKLEFDIMLMNTRRQSGNVPFAEAMRHQVDAQQRFQEQLEVQKKLQMRMEAQGKYLLTLLEKAQKSLPCGNAGETDKGQFSDFNLALSGLVGSDRKNEKAGLVTDISHLNGGDSSQEFRLCGEQEKIETGDACVKPESGFVHFDLNSKSGYDLLNCGKYGIEVKPNVIGDRLQ

SEQ ID NO: 30214 - protein, 291 aa, Arabidopsis thaliana
  misc_feature (1)..(291): Ceres Seq. ID no. 4950120
MTRDPKPRLRWTADLHDRFVDAVAKLGGADKATPKSVLKLMGLKGLTLYHLKSHLQKYRLGQQQGKKQNRTEQNKENAGSSYVHFDNCSQGGISNDSRFDNHQRYIIYEFAFSRHNGFVKLEFDIMLMNTRRQSGNVPFAEAMRHQVDAQQRFQEQLEVQKKLQMRMEAQGKYLLTLLEKAQKSLPCGNAGETDKGQFSDFNLALSGLVGSDRKNEKAGLVTDISHLNGGDSSQEFRLCGEQEKIETGDACVKPESGFVHFDLNSKSGYDLLNCGKYGIEVKPNVIGDRLQ

SEQ ID NO: 30215 - DNA, 1059 bp, Arabidopsis thaliana
  misc_feature (1)..(1059): Ceres Seq. ID no. 4950335
atgccaaccgccagatatccaatggaaaggcctcaagaacctgagtacgaatgcgttgatatctacaaacaaccttcgctacaacaccctaaactccaaaatcaccaaatccaaatgagaccgagcgacgaagttctagccatgctatcaggagatacatcagcaaacgatgaaatggttgctgagtttgatataccagaagaaggatgtcctcaaggacaagtaccaatccataaaccaagaaatctcaaccacaccgagaaacctttaagcctattaatggatatggaactgttggctgcagtaatgaagaaaatcgatgccaccccatggcgtggagcatctgcatggtttagtatttaccaacctaaattgacaaataaagaccaatttagcatgagttttatgtggctcaatactgagtataatggcgaacgcaccaatgcccagtttggttgggctgtgattcctgcattatatggcgatgaccgtacaagacttacggcatactggagtccggataaaatcgaaaacggatgttacaatatacaatgtaaaggcttcgttcaaactgaccatagagtcgctcttggtaccggtttttcgaacacctctgtggtgggaggcaaccaatataaagctttctttgcaatcagtcaggatccaaaaacaaagaatttgtggctgacagtccagaagattaacatagggtattggccagaggaacttctaccttttttcaatgatggagcggagtcagttatatatggtggattcacgaatgctccatctgataacattcaactctttgaaatagttagcccacctatgggtaacgggaacaaaccgctggatgaggaagtggatctaaaacatacttgttatatgcactctcttaagtatgtgacaccagattacaagagtgtcgatgttgattccaacaaggtcgccgaagttgcggacgcaggtatatgttacgacgcgatttattttgataaacttgggcggtatggacaaacgtttaccttcggtggaccaggtggttattgtgatgtttga

SEQ ID NO: 30216 - protein, 352 aa, Arabidopsis thaliana
  misc_feature (1)..(352): Ceres Seq. ID no. 4950336
MPTARYPMERPQEPEYECVDIYKQPSLQHPKLQNHQIQMRPSDEVLAMLSGDTSANDEMVAEFDIPEEGCPQGQVPIHKPRNLNHTEKPLSLLMDMELLAAVMKKIDATPWRGASAWFSIYQPKLTNKDQFSMSFMWLNTEYNGERTNAQFGWAVIPALYGDDRTRLTAYWSPDKIENGCYNIQCKGFVQTDHRVALGTGFSNTSVVGGNQYKAFFAISQDPKTKNLWLTVQKINIGYWPEELLPFFNDGAESVIYGGFTNAPSDNIQLFEIVSPPMGNGNKPLDEEVDLKHTCYMHSLKYVTPDYKSVDVDSNKVAEVADAGICYDAIYFDKLGRYGQTFTFGGPGGYCDV

SEQ ID NO: 30217 - protein, 345 aa, Arabidopsis thaliana
  misc_feature (1)..(345): Ceres Seq. ID no. 4950337
MERPQEPEYECVDIYKQPSLQHPKLQNHQIQMRPSDEVLAMLSGDTSANDEMVAEFDIPEEGCPQGQVPIHKPRNLNHTEKPLSLLMDMELLAAVMKKIDATPWRGASAWFSIYQPKLTNKDQFSMSFMWLNTEYNGERTNAQFGWAVIPALYGDDRTRLTAYWSPDKIENGCYNIQCKGFVQTDHRVALGTGFSNTSVVGGNQYKAFFAISQDPKTKNLWLTVQKINIGYWPEELLPFFNDGAESVIYGGFTNAPSDNIQLFEIVSPPMGNGNKPLDEEVDLKHTCYMHSLKYVTPDYKSVDVDSNKVAEVADAGICYDAIYFDKLGRYGQTFTFGGPGGYCDV

SEQ ID NO: 30218 - protein, 314 aa, Arabidopsis thaliana
  misc_feature (1)..(314): Ceres Seq. ID no. 4950338
MRPSDEVLAMLSGDTSANDEMVAEFDIPEEGCPQGQVPIHKPRNLNHTEKPLSLLMDMELLAAVMKKIDATPWRGASAWFSIYQPKLTNKDQFSMSFMWLNTEYNGERTNAQFGWAVIPALYGDDRTRLTAYWSPDKIENGCYNIQCKGFVQTDHRVALGTGFSNTSVVGGNQYKAFFAISQDPKTKNLWLTVQKINIGYWPEELLPFFNDGAESVIYGGFTNAPSDNIQLFEIVSPPMGNGNKPLDEEVDLKHTCYMHSLKYVTPDYKSVDVDSNKVAEVADAGICYDAIYFDKLGRYGQTFTFGGPGGYCDV

SEQ ID NO: 30219 - DNA, 1065 bp, Arabidopsis thaliana
  misc_feature (1)..(1065): Ceres Seq. ID no. 4950339
atggggtcaaagcctcaagaacctgaatacgaatgcgttgatatctacaaacaaccttcgctacaacaccctaaactccaaaatcaccgaatccaaatgagaccgagcgatgaagccttagccatgctctcaggagatacatcatcagaaaacttatcaaacgatgaaatggttgctgagtttgatataccagaagaaggatgtcctcaaggacaagtaccaatccataaaccaagaaataatttcaaccacaccgagaaacattttcagcctattaatggatttggaactgttggtcaacatgctgcggtaatgaagaaaatcgatgccaccccgtggcgtggagcatcagcatggataagtatttaccaacctaaattgacaaataaagagcaattcagcatggctttcatttggctcaatactgagtatgaaggcgaacgcaccagtgcccactttggttgggctgtgattcctgcactatatggcgatagccgtacacgacttactgcatactggagtcaagatacattcgaaagcggatgttacaatataaaatgtaagggtttcgttcaaattgataggagactctttcttggagccggttttgcgaacacctctgtggtgggaggccaaaattttaaagctttttttgcaatcaatcaggatccaaaaacaaacaatttgctgctgacagtggggaagatttacttagggtattggccagaggaacttctaccttttttcactgaaggagcggagtcagttatatatggtggattgacgaatgctccatctgatggcattcaaccctttaatatagttagcccaccgatgggtaacgggaacaaaccgctggatgaggaagttgatctaaagcatacttgttatatgcactctcttaaatatgtgacacaagattacaagagtgtcgatgttgataccaacaaggtcgccgaagttgcggacgcaggtatatgttacgacgcgatttattttgataaacttggggggtatggacaaacgtttaccttcggtggaccaggtggtcattgtgatgtgtga

SEQ ID NO: 30220 - protein, 354 aa, Arabidopsis thaliana
  misc_feature (1)..(354): Ceres Seq. ID no. 4950340
MGSKPQEPEYECVDIYKQPSLQHPKLQNHRIQMRPSDEALAMLSGDTSSENLSNDEMVAEFDIPEEGCPQGQVPIHKPRNNFNHTEKHFQPINGFGTVGQHAAVMKKIDATPWRGASAWISIYQPKLTNKEQFSMAFIWLNTEYEGERTSAHFGWAVIPALYGDSRTRLTAYWSQDTFESGCYNIKCKGFVQIDRRLFLGAGFANTSVVGGQNFKAFFAINQDPKTNNLLLTVGKIYLGYWPEELLPFFTEGAESVIYGGLTNAPSDGIQPFNIVSPPMGNGNKPLDEEVDLKHTCYMHSLKYVTQDYKSVDVDTNKVAEVADAGICYDAIYFDKLGGYGQTFTFGGPGGHCDV

SEQ ID NO: 30221 - protein, 322 aa, Arabidopsis thaliana
  misc_feature (1)..(322): Ceres Seq. ID no. 4950341
MRPSDEALAMLSGDTSSENLSNDEMVAEFDIPEEGCPQGQVPIHKPRNNFNHTEKHFQPINGFGTVGQHAAVMKKIDATPWRGASAWISIYQPKLTNKEQFSMAFIWLNTEYEGERTSAHFGWAVIPALYGDSRTRLTAYWSQDTFESGCYNIKCKGFVQIDRRLFLGAGFANTSVVGGQNFKAFFAINQDPKTNNLLLTVGKIYLGYWPEELLPFFTEGAESVIYGGLTNAPSDGIQPFNIVSPPMGNGNKPLDEEVDLKHTCYMHSLKYVTQDYKSVDVDTNKVAEVADAGICYDAIYFDKLGGYGQTFTFGGPGGHCDV

SEQ ID NO: 30222 - protein, 313 aa, Arabidopsis thaliana
  misc_feature (1)..(313): Ceres Seq. ID no. 4950342
MLSGDTSSENLSNDEMVAEFDIPEEGCPQGQVPIHKPRNNFNHTEKHFQPINGFGTVGQHAAVMKKIDATPWRGASAWISIYQPKLTNKEQFSMAFIWLNTEYEGERTSAHFGWAVIPALYGDSRTRLTAYWSQDTFESGCYNIKCKGFVQIDRRLFLGAGFANTSVVGGQNFKAFFAINQDPKTNNLLLTVGKIYLGYWPEELLPFFTEGAESVIYGGLTNAPSDGIQPFNIVSPPMGNGNKPLDEEVDLKHTCYMHSLKYVTQDYKSVDVDTNKVAEVADAGICYDAIYFDKLGGYGQTFTFGGPGGHCDV

SEQ ID NO: 30223 - DNA, 853 bp, Arabidopsis thaliana
  misc_feature (1)..(853): Ceres Seq. ID no. 4950486
aaatttctcagtgaaacactgaaacttccttttcagttcgtaccgttcttcgctactttactcattctttagggtttcaaggttttctattggtcttgttgtagactcgagtagcttctgggttcaacccacaaagtttgagccttttttgatttgcagagtcctctgtgtttcttggtttgtctcttgatcaagaatctgagatgggcgagccactaggactgctccaggtgactgttattcaaggaaagaaactggtgatccgagatttcaagtcaagtgatccttatgtgattgtcaaattaggaaatgagtcagcgaagaccaaagtgatcaacaattgcctgaatccagtgtggaatgaggaactgaactttactctgaaagatcctgcagcagttctcgcattggaagtgtttgataaagataggttcaaggcagatgacaagatgggccatgcctctctcagccttcaaccgcttatctcagttgccagactaagacacgtagtccgcgtgtcctctggtgagacaacgcttaggaaagtattaccggatccagagaactgcgtatctcgagagagcacaatcagttgcatagacggagaggtggtgcagagtgtgtggctgaggctgtgtgctgttgaatcgggtgagattgagttgaagataaagttgattgatcctcctggaacaaacaagtagcaatagggtattttatgttagtttgtaacacgagacccgtttgtgactagtataattgcaacatcagtatggtcttgtcttgtttccaagtgtgcctttgtgactactcaccaatttattaggaatctttgagatacattgttctgctc

SEQ ID NO: 30224 - protein, 166 aa, Arabidopsis thaliana
  misc_feature (1)..(166): Ceres Seq. ID no. 4950487
MGEPLGLLQVTVIQGKKLVIRDFKSSDPYVIVKLGNESAKTKVINNCLNPVWNEELNFTLKDPAAVLALEVFDKDRFKADDKMGHASLSLQPLISVARLRHVVRVSSGETTLRKVLPDPENCVSRESTISCIDGEVVQSVWLRLCAVESGEIELKIKLIDPPGTNK

SEQ ID NO: 30225 - protein, 84 aa, Arabidopsis thaliana
  misc_feature (1)..(84): Ceres Seq. ID no. 4950488
MGHASLSLQPLISVARLRHVVRVSSGETTLRKVLPDPENCVSRESTISCIDGEVVQSVWLRLCAVESGEIELKIKLIDPPGTNK

SEQ ID NO: 30226 - DNA, 618 bp, Arabidopsis thaliana
  misc_feature (1)..(618): Ceres Seq. ID no. 4950535
atggcagagggcagtatgcgtcctccagaattcaaccagcctaacaaaaccagtaatggtggtgaggaggagtgcacggtgagggagcaagacaggttcatgcctattgccaacgtgatacggatcatgcggaggatcttacctgctcacgccaagatctcagatgactccaaggagacgatccaagagtgtgtttcggagtacatcagcttcataacaggggaggctaatgagcggtgccagcgggaacagcgcaagaccatcactgctgaggacgtcttgtgggcaatgagcaagctcggttttgatgactacatcgaacccctcacgttgtacctccaccgctacagagagttggaaggtgaaagaggggttagctgcagtgctgggtccgttagtatgaccaacggcttggtggtcaagaggcctaatgggaccatgaccgagtatggagcctacgggcctgtgccagggattcacatggcgcagtaccattatcgtcatcagaacgggtttgttttcagtggtaacgaacctaattctaagatgagtggttcatcttcaggagcaagtggcgccagagttgaagtatttccgactcaacaacataagtactga

SEQ ID NO: 30227 - protein, 205 aa, Arabidopsis thaliana
  misc_feature (1)..(205): Ceres Seq. ID no. 4950536
MAEGSMRPPEFNQPNKTSNGGEEECTVREQDRFMPIANVIRIMRRILPAHAKISDDSKETIQECVSEYISFITGEANERCQREQRKTITAEDVLWAMSKLGFDDYIEPLTLYLHRYRELEGERGVSCSAGSVSMTNGLVVKRPNGTMTEYGAYGPVPGIHMAQYHYRHQNGFVFSGNEPNSKMSGSSSGASGARVEVFPTQQHKY

SEQ ID NO: 30228 - protein, 200 aa, Arabidopsis thaliana
  misc_feature (1)..(200): Ceres Seq. ID no. 4950537
MRPPEFNQPNKTSNGGEEECTVREQDRFMPIANVIRIMRRILPAHAKISDDSKETIQECVSEYISFITGEANERCQREQRKTITAEDVLWAMSKLGFDDYIEPLTLYLHRYRELEGERGVSCSAGSVSMTNGLVVKRPNGTMTEYGAYGPVPGIHMAQYHYRHQNGFVFSGNEPNSKMSGSSSGASGARVEVFPTQQHKY

SEQ ID NO: 30229 - protein, 172 aa, Arabidopsis thaliana
  misc_feature (1)..(172): Ceres Seq. ID no. 4950538
MPIANVIRIMRRILPAHAKISDDSKETIQECVSEYISFITGEANERCQREQRKTITAEDVLWAMSKLGFDDYIEPLTLYLHRYRELEGERGVSCSAGSVSMTNGLVVKRPNGTMTEYGAYGPVPGIHMAQYHYRHQNGFVFSGNEPNSKMSGSSSGASGARVEVFPTQQHKY

SEQ ID NO: 30230 - DNA, 969 bp, Arabidopsis thaliana
  misc_feature (1)..(969): Ceres Seq. ID no. 4950643
atgttgtcatttcgaatgccgtctatcggaagccaacctacggcatttgctgcaaaaataacggacaatccaaagaccgtggcacaactcaagtcggctgcatcgccttcacctcatagtaccgtgacgtgcggttaccaagctcatgtggcagggttctttcgaaacgtcaccgttttatggtccaagaatctcatgaatcattccctcaccgtaatggtgtcgagtttagacaatgacatgaattattgttgtaagattgatctcgtgaagccatggcagttttggagcaaaagagggtcaaagtcattcgacgtagagggaaactttgtggaggtcttttgggatcttcgatcagcaaaattggctggaaacggtagccccgaacccgtgtcagactattacgtggcagtagtttctgatgaagaggttgttttattgttgggagatttaaagcaaaaggcttataagcggaccaagtcaagaccggcattggtggaagggttcatatactttaaaaaagaaagcatatttgggaagaaaacgttttcgactcgggcaaggtttgacgaacaaagaaaggaacatgaagtggtggtggagagctctaatggagcagcggagccagagatgtggataagcgttgatgggatcgtggttgtgaacgtgaagaatctacaatggaaatttaggggaaaccaaatggtgatggtggatagaacaccggtaatggtctactatgatgttcatgattggttgtttgcaagttcggagactgcagcgagttcagggttgtttttgtttaagcctgttccggttggagcgatggtagatgagagctttagcgatgcggaggaaggagatagcggaggagggagtagtcctttgagtcgttataattcagcatcaagtggttttggaccattgcatgacttttgtttgtttctttatgcttggaaacttgaatga

SEQ ID NO: 30231 - protein, 322 aa, Arabidopsis thaliana; identical to SEQ ID NO: 27971
  misc_feature (1)..(322): Ceres Seq. ID no. 4950644

SEQ ID NO: 30232 - protein, 317 aa, Arabidopsis thaliana
  misc_feature (1)..(317): Ceres Seq. ID no. 4950645
MPSIGSQPTAFAAKITDNPKTVAQLKSAASPSPHSTVTCGYQAHVAGFFRNVTVLWSKNLMNHSLTVMVSSLDNDMNYCCKIDLVKPWQFWSKRGSKSFDVEGNFVEVFWDLRSAKLAGNGSPEPVSDYYVAVVSDEEVVLLLGDLKQKAYKRTKSRPALVEGFIYFKKESIFGKKTFSTRARFDEQRKEHEVVVESSNGAAEPEMWISVDGIVVVNVKNLQWKFRGNQMVMVDRTPVMVYYDVHDWLFASSETAASSGLFLFKPVPVGAMVDESFSDAEEGDSGGGSSPLSRYNSASSGFGPLHDFCLFLYAWKLE

SEQ ID NO: 30233 - protein, 257 aa, Arabidopsis thaliana
  misc_feature (1)..(257): Ceres Seq. ID no. 4950646
MNHSLTVMVSSLDNDMNYCCKIDLVKPWQFWSKRGSKSFDVEGNFVEVFWDLRSAKLAGNGSPEPVSDYYVAVVSDEEVVLLLGDLKQKAYKRTKSRPALVEGFIYFKKESIFGKKTFSTRARFDEQRKEHEVVVESSNGAAEPEMWISVDGIVVVNVKNLQWKFRGNQMVMVDRTPVMVYYDVHDWLFASSETAASSGLFLFKPVPVGAMVDESFSDAEEGDSGGGSSPLSRYNSASSGFGPLHDFCLFLYAWKLE

SEQ ID NO: 30234 - DNA, 1380 bp, Arabidopsis thaliana
  misc_feature (1)..(1380): Ceres Seq. ID no. 4950824
atggtttccattttccttcaatcacccacctttttaacaccactgagctacccattttcatctcggagctccaccaagagaacccaacatggagcttctctgtcactacgtgtcacagcttctcgtagctccttcgatgttgttgttgtaggtggtgggatcattgggttaaccatagcccgccaattccttaccgggtcggatctatctgttgctgttgtcgataaagccgtaccttgctccggcgccaccggtgccgggcagggatatatatggatgacacacaagaaaccaggcagtgatgtgtgggacttgaccttgaggagccatgaactctggcacaagcttgcagagagcttgactgatgatggtcttgatcctgaagagttgcttggctggaaaaagacaggaagcttgctcattggtaggaccactgaggaatgtgttgctctgaagcaaaaggttcatgagctatctgaagctgggttaagaactgaatatttgtctagtgctgagttgttgttaaaggagcctgcgatacttgtaaatgataatactggtgctgcatttcttcctgatgattcacagttggacgcccatcgtgcggttgcttatatcgagaagggtaatagagcgtttgcaacagcaggcagatatgccgagttctataatgaaccagttacaggtttaataaggtctgatggggatagcaaggtggttgctggcgttaagactttgaaacgcaacttgtatggtaagaaggctactatagtagctgctggttgctggagtggatctctgatgcatgaattgcttaaagactgcaacattccgctggacgttccggtgaagccaagaaaggggcatctgcttgtggtagagaactttgattcattccacttaaatcatgggataatggaggctggttactcgaatcatcaaagtgcttcagtttcaggattggatgtcgatgaacggatgctatctatttccatgacagccacaatggacacatcaggaaaccttgttcttgggagcagccgtgagtttgtcgggttcgacactgaagctgatgagtttatcatccgttgcatatgggagcgtgctgcagaattctttcctaagttacgtgatatttccctcgaagatttcatccgtaacaggaaagtgagagtcgggttgcgcccttacatgcctgacgggaagccagtgataggatccgtgcccggattacaaaacatgtacttagcagctgggcatgaaggaggtggactttccatggctctagcaacagcggaaatggtaacggacatggtactaggaaaaccatcacaagtggatacttcaacgtttggggttaaagggcgtcgttgttgctga

SEQ ID NO: 30235 - protein, 459 aa, Arabidopsis thaliana
  misc_feature (1)..(459): Ceres Seq. ID no. 4950825
MVSIFLQSPTFLTPLSYPFSSRSSTKRTQHGASLSLRVTASRSSFDVVVVGGGIIGLTIARQFLTGSDLSVAVVDKAVPCSGATGAGQGYIWMTHKKPGSDVWDLTLRSHELWHKLAESLTDDGLDPEELLGWKKTGSLLIGRTTEECVALKQKVHELSEAGLRTEYLSSAELLLKEPAILVNDNTGAAFLPDDSQLDAHRAVAYIEKGNRAFATAGRYAEFYNEPVTGLIRSDGDSKVVAGVKTLKRNLYGKKATIVAAGCWSGSLMHELLKDCNIPLDVPVKPRKGHLLVVENFDSFHLNHGIMEAGYSNHQSASVSGLDVDERMLSISMTATMDTSGNLVLGSSREFVGFDTEADEFIIRCIWERAAEFFPKLRDISLEDFIRNRKVRVGLRPYMPDGKPVIGSVPGLQNMYLAAGHEGGGLSMALATAEMVTDMVLGKPSQVDTSTFGVKGRRCC

SEQ ID NO: 30236 - protein, 367 aa, Arabidopsis thaliana
  misc_feature (1)..(367): Ceres Seq. ID no. 4950826
MTHKKPGSDVWDLTLRSHELWHKLAESLTDDGLDPEELLGWKKTGSLLIGRTTEECVALKQKVHELSEAGLRTEYLSSAELLLKEPAILVNDNTGAAFLPDDSQLDAHRAVAYIEKGNRAFATAGRYAEFYNEPVTGLIRSDGDSKVVAGVKTLKRNLYGKKATIVAAGCWSGSLMHELLKDCNIPLDVPVKPRKGHLLVVENFDSFHLNHGIMEAGYSNHQSASVSGLDVDERMLSISMTATMDTSGNLVLGSSREFVGFDTEADEFIIRCIWERAAEFFPKLRDISLEDFIRNRKVRVGLRPYMPDGKPVIGSVPGLQNMYLAAGHEGGGLSMALATAEMVTDMVLGKPSQVDTSTFGVKGRRCC

SEQ ID NO: 30237 - DNA, 1219 bp, Arabidopsis thaliana
  misc_feature (1)..(1219): Ceres Seq. ID no. 4951360
aaaatccgggacgataattctcgcacacgttctccatcactttccctcgatccaaaaccagagtgggaactacacgcgaatcgaatcataaatggaatgtgaattttgaaatcgaggaagaagacgaaatcggagcattattggattgagttttgaagtttttaggagaaggaaatgatggcgtcggatccaaaactgaaggctgagatcggagccgatggtcttgcaagagaagctcctgttattgcttacacagagaagataatcgaggaagagcaagttcagctgaggaaatacattgaggagaactatacaaaaattagggatgttgaaagggaatttggaaacctttcaatggaattgaaactcactgctggacctaagaaagcagcaatggaacacttgagaaagaaaatcgaagtctcaactgaaaggatccatgctgctaagttgaaagaagaagaagcgcgaaaggcatttgaagcagcatcaaaagttgtgaaggatgaagaagcaacaaaacagagtctttgcgaagatttaaacagtctggtacaacaaagcagcaatacgcagtacgccagacttgaggaattgaaaagaagactagaagcgttgaatccaaatcgatcatctacttctattcagcaagtgcaagaaccggagactaaatctgtagtagacagcgcaccagcagccaatgcgaaccaaactcacccgggaaaacctgaaaataaccacgggaacgaggaaggtggtaaagaacatggacagagaccagcaacagctgaaggagaatcaaaagcgaaaaagaaaccacagaatcaagggaggggaagaggaattggaataatgaacaaaggcagaggaggttggacaggtgctggattcgatgtcgatggtagaaattgagatacatatatctagataatccatataccgaaagcgtcatttcgaatcagaagtatgtcaaatatattgttaccaggtatgttctatcatcttttaacatcgatggaccagtacgtagccacaaagacttctcattttctcatacacttgtgttactgaaaagaaatccatccaatcatatttggactgttcattgatcatctcttgtgtatgtctccaattttgtgcaattgggtttgatgtaataatctgagaacagttaagtttgattgtctaagaggttagagtgaggcatgattcgttatgg

SEQ ID NO: 30238 - protein, 245 aa, Arabidopsis thaliana
  misc_feature (1)..(245): Ceres Seq. ID no. 4951361
MMASDPKLKAEIGADGLAREAPVIAYTEKIIEEEQVQLRKYIEENYTKIRDVEREFGNLSMELKLTAGPKKAAMEHLRKKIEVSTERIHAAKLKEEEARKAFEAASKVVKDEEATKQSLCEDLNSLVQQSSNTQYARLEELKRRLEALNPNRSSTSIQQVQEPETKSVVDSAPAANANQTHPGKPENNHGNEEGGKEHGQRPATAEGESKAKKKPQNQGRGRGIGIMNKGRGGWTGAGFDVDGRN

SEQ ID NO: 30239 - protein, 244 aa, Arabidopsis thaliana
  misc_feature (1)..(244): Ceres Seq. ID no. 4951362
MASDPKLKAEIGADGLAREAPVIAYTEKIIEEEQVQLRKYIEENYTKIRDVEREFGNLSMELKLTAGPKKAAMEHLRKKIEVSTERIHAAKLKEEEARKAFEAASKVVKDEEATKQSLCEDLNSLVQQSSNTQYARLEELKRRLEALNPNRSSTSIQQVQEPETKSVVDSAPAANANQTHPGKPENNHGNEEGGKEHGQRPATAEGESKAKKKPQNQGRGRGIGIMNKGRGGWTGAGFDVDGRN

SEQ ID NO: 30240 - protein, 185 aa, Arabidopsis thaliana
  misc_feature (1)..(185): Ceres Seq. ID no. 4951363
MELKLTAGPKKAAMEHLRKKIEVSTERIHAAKLKEEEARKAFEAASKVVKDEEATKQSLCEDLNSLVQQSSNTQYARLEELKRRLEALNPNRSSTSIQQVQEPETKSVVDSAPAANANQTHPGKPENNHGNEEGGKEHGQRPATAEGESKAKKKPQNQGRGRGIGIMNKGRGGWTGAGFDVDGRN

SEQ ID NO: 30241 - DNA, 786 bp, Arabidopsis thaliana
  misc_feature (1)..(786): Ceres Seq. ID no. 4951576
atgggtgataaacttcgattatccatcggaattttgggaaacggagcttctctgttgctatatacagctccaatagtaacattttcaagggtgtttaagaagaaaagcacagaggaattctcatgttttccttacgttatgacactctttaactgtttgatatatacttggtacggtttaccgattgtgagtcatctttgggagaatcttcctctcgtcaccattaatggagtcggcatccttctcgaatctatcttcattttcatatatttctactacgcatcaccaaaagaaaaggttggtgttacatttgttccggtgatcgttgggttcggcttaacgacagcaatctcagccttggtatttgacgaccatcgtcaccgaaaatcattcgtcggaagtgttggcctcgtggcttccatctctatgtatggttctcctctcgtcgttatgaagaaagtgatagagacaagaagtgtggaatacatgccgttttacttgtccttcttctcatttctggctagttccctttggttggcatatggcttactcagccatgatctctttcttgcgtcacctaatatggttgcgactccattgggaattctccaacttatcctctacttcaagtacaagaataagaaggatttagcaccaacaacaatggtgatcaccaaacgaaatgatcatgatgacaagaacaaagccacacttgagtttgttgttgacgttgatcgtaatagtgataccaatgagaagaattctaacaatgcctcatcgatctaa

SEQ ID NO: 30242 - protein, 261 aa, Arabidopsis thaliana
  misc_feature (1)..(261): Ceres Seq. ID no. 4951577
MGDKLRLSIGILGNGASLLLYTAPIVTFSRVFKKKSTEEFSCFPYVMTLFNCLIYTWYGLPIVSHLWENLPLVTINGVGILLESIFIFIYFYYASPKEKVGVTFVPVIVGFGLTTAISALVFDDHRHRKSFVGSVGLVASISMYGSPLVVMKKVIETRSVEYMPFYLSFFSFLASSLWLAYGLLSHDLFLASPNMVATPLGILQLILYFKYKNKKDLAPTTMVITKRNDHDDKNKATLEFVVDVDRNSDTNEKNSNNASSI

SEQ ID NO: 30243 - protein, 215 aa, Arabidopsis thaliana
  misc_feature (1)..(215): Ceres Seq. ID no. 4951578
MTLFNCLIYTWYGLPIVSHLWENLPLVTINGVGILLESIFIFIYFYYASPKEKVGVTFVPVIVGFGLTTAISALVFDDHRHRKSFVGSVGLVASISMYGSPLVVMKKVIETRSVEYMPFYLSFFSFLASSLWLAYGLLSHDLFLASPNMVATPLGILQLILYFKYKNKKDLAPTTMVITKRNDHDDKNKATLEFVVDVDRNSDTNEKNSNNASSI

SEQ ID NO: 30244 - DNA, 1115 bp, Arabidopsis thaliana
  misc_feature (1)..(1115): Ceres Seq. ID no. 4951602
aaagtttgttggaggattcgtctctctctctctctctttctctttctctcatcttcttcttatctccctccaaagacggcgactgtataatctatcatttcttcacagtaacgctttcatcggaagatctcgccggaaaaaaacttctctctgagatcagatctcttacgattctcagctcaatcttatcttttcctttgttgtgctgcttttcactctcttctgcgcgacgaatttggccttgttttttgtttgtttgtcgtatccgacgcggaggtattgagaaaccgtggcttaagacggaggaagaagatggaagctaacgggattgagaacttgacgaatccgaatcaggaaagagagtttataaggagacatcataagcatgagcttgtggataatcagtgtagctctacgcttgttaaacatatcaacgctcctgttcatattgtgtggtcacttgtgagaagatttgatcagccacagaagtataagccgtttatcagtagatgtgtggtgaaaggaaacatggagattggtacagtaagagaagttgatgtgaaatctggactaccagcaactagaagcactgagagattggagttacttgatgacaatgagcatattctcagtatcagaatcgttggtggtgatcatagacttaagaactattcttcaatcatctctcttcaccccgagactatagaaggaagaataggaacacttgtgattgagtcatttgtggttgatgtaccagaaggaaacacaaaggatgagacttgttactttgttgaagctttaatcaaatgcaatcttaaatctttagctgatatctctgaacgtcttgcggttcaagacacgacagaatcgagagtctaaagatcaaaggagtaagaaactattgaatcagagagattttggttgccatggatgaagctctcaaagggaaaaagagagagtgggtgagtttctttgaggatggacaaggcaaaaaaagtatcatcatttatccagttacataataagtttctcatttgctatttttggggtcatttcactttcaaaccctctttttaatttcatgtgtctaatttaatgaatgtgtttttggtttc

SEQ ID NO: 30245 - protein, 188 aa, Arabidopsis thaliana
  misc_feature (1)..(188): Ceres Seq. ID no. 4951603
MEANGIENLTNPNQEREFIRRHHKHELVDNQCSSTLVKHINAPVHIVWSLVRRFDQPQKYKPFISRCVVKGNMEIGTVREVDVKSGLPATRSTERLELLDDNEHILSIRIVGGDHRLKNYSSIISLHPETIEGRIGTLVIESFVVDVPEGNTKDETCYFVEALIKCNLKSLADISERLAVQDTTESRV

SEQ ID NO: 30246 - protein, 116 aa, Arabidopsis thaliana
  misc_feature (1)..(116): Ceres Seq. ID no. 4951604
MEIGTVREVDVKSGLPATRSTERLELLDDNEHILSIRIVGGDHRLKNYSSIISLHPETIEGRIGTLVIESFVVDVPEGNTKDETCYFVEALIKCNLKSLADISERLAVQDTTESRV

SEQ ID NO: 30247 - protein, 106 aa, Arabidopsis thaliana
  misc_feature (1)..(106): Ceres Seq. ID no. 4951605
SLLEDSSLSLSLSLSLIFFLSPSKDGDCIIYHFFTVTLSSEDLAGKKLLSEIRSLTILSSILSFPLLCCFSLSSARRIWPCFLFVCRIRRGGIEKPWLKTEEEDGS

SEQ ID NO: 30248 - DNA, 1458 bp, Arabidopsis thaliana
  misc_feature (1)..(1458): Ceres Seq. ID no. 4951622
atgggtgaagacaagaagacggcaagggagacggtggaggaggaaccacttagcccatgttcacggctgttcaattcgccggattttaactgtgcaataatcgttacaatgggatctaaagttaaaggagacacaccagccatcatccacggccttgaacacaccctcgtaaaccaccctcgcttctctagcattttaatgaacaatgggaagaagccgcgttgggttcggacaaaagttaaagtagaagagcatgtgattgttcctgatgtggatcccgacattgaaaatccggatcagtatcttgaagactatatctctaagttaacgaccattcctatggatttgtctaaaccattatgggaaatgcacttactaggcgtcaaaacatcgaacgctgaatcctatgctattctcaagatccatcattctttgggtgatggaatgtctctcatgtctcttttactggcttgtacccgcaaaacatcagaccccgaggctttgcctaccgttgcggttcataaaaaacgctttggaccgagctgcaacagcgggtttttcaacaagatttggtggttatttgtagggctctggttcatcctaagattgctattcaacacttttgttgatatcttaatgtttgctcttacaatatttgtcttgagggatacggagactcctctcttggccaaacccggtagtgaacttatccctaagaggttcgtccaccggattatcagttttgacgatgttaagctggtgaaaaacgcaatgaaaatgacggtgaacgatgttcttcttggagtaacgcaagccggactttcgcgttaccttagtcgaaaatatgatcaagaagcaacaccgaaatcgaaagagtccatgaggagaatccgacttcgttcagccattatgattaacttgagaccaaacgcaggaattgaggctctagcggatatgatggccaagaaatcaaaatgcagatggggaaatctcttcggctacattctcctaccgttctccgttgggctagagaccgatcctctagaatacgtgcgccaagctaaagccacgattgaccgcaagaaacactctctagaagccgtattctccatggcattctttaaattgatactaaaagttcttgggctcaaggcaagtgtagttcttgtaaggaaagtgatccatagcacaacgttatcattttcaaatgtggtcggtccaaaggaagaaattacattccatggtcacccactgaattatatctccccatgtgtttttggccacccacatgctcttactctacatttccagacctacgcgaacaaggtcataatatcggtaacggctgatccaacggtcattcctgaccctcacaagatgtgtgatgatttggtggagtctctcaagatgattaaagccgctgttcttgaaagagggttatatgagattgaggtctaa

SEQ ID NO: 30249 - protein, 485 aa, Arabidopsis thaliana
  misc_feature (1)..(485): Ceres Seq. ID no. 4951623
MGEDKKTARETVEEEPLSPCSRLFNSPDFNCAIIVTMGSKVKGDTPAIIHGLEHTLVNHPRFSSILMNNGKKPRWVRTKVKVEEHVIVPDVDPDIENPDQYLEDYISKLTTIPMDLSKPLWEMHLLGVKTSNAESYAILKIHHSLGDGMSLMSLLLACTRKTSDPEALPTVAVHKKRFGPSCNSGFFNKIWWLFVGLWFILRLLFNTFVDILMFALTIFVLRDTETPLLAKPGSELIPKRFVHRIISFDDVKLVKNAMKMTVNDVLLGVTQAGLSRYLSRKYDQEATPKSKESMRRIRLRSAIMINLRPNAGIEALADMMAKKSKCRWGNLFGYILLPFSVGLETDPLEYVRQAKATIDRKKHSLEAVFSMAFFKLILKVLGLKASVVLVRKVIHSTTLSFSNVVGPKEEITFHGHPLNYISPCVFGHPHALTLHFQTYANKVIISVTADPTVIPDPHKMCDDLVESLKMIKAAVLERGLYEIEV

SEQ ID NO: 30250 - protein, 449 aa, Arabidopsis thaliana
  misc_feature (1)..(449): Ceres Seq. ID no. 4951624
MGSKVKGDTPAIIHGLEHTLVNHPRFSSILMNNGKKPRWVRTKVKVEEHVIVPDVDPDIENPDQYLEDYISKLTTIPMDLSKPLWEMHLLGVKTSNAESYAILKIHHSLGDGMSLMSLLLACTRKTSDPEALPTVAVHKKRFGPSCNSGFFNKIWWLFVGLWFILRLLFNTFVDILMFALTIFVLRDTETPLLAKPGSELIPKRFVHRIISFDDVKLVKNAMKMTVNDVLLGVTQAGLSRYLSRKYDQEATPKSKESMRRIRLRSAIMINLRPNAGIEALADMMAKKSKCRWGNLFGYILLPFSVGLETDPLEYVRQAKATIDRKKHSLEAVFSMAFFKLILKVLGLKASVVLVRKVIHSTTLSFSNVVGPKEEITFHGHPLNYISPCVFGHPHALTLHFQTYANKVIISVTADPTVIPDPHKMCDDLVESLKMIKAAVLERGLYEIEV

SEQ ID NO: 30251 - protein, 419 aa, Arabidopsis thaliana
  misc_feature (1)..(419): Ceres Seq. ID no. 4951625
MNNGKKPRWVRTKVKVEEHVIVPDVDPDIENPDQYLEDYISKLTTIPMDLSKPLWEMHLLGVKTSNAESYAILKIHHSLGDGMSLMSLLLACTRKTSDPEALPTVAVHKKRFGPSCNSGFFNKIWWLFVGLWFILRLLFNTFVDILMFALTIFVLRDTETPLLAKPGSELIPKRFVHRIISFDDVKLVKNAMKMTVNDVLLGVTQAGLSRYLSRKYDQEATPKSKESMRRIRLRSAIMINLRPNAGIEALADMMAKKSKCRWGNLFGYILLPFSVGLETDPLEYVRQAKATIDRKKHSLEAVFSMAFFKLILKVLGLKASVVLVRKVIHSTTLSFSNVVGPKEEITFHGHPLNYISPCVFGHPHALTLHFQTYANKVIISVTADPTVIPDPHKMCDDLVESLKMIKAAVLERGLYEIEV

SEQ ID NO: 30252 - DNA, 1326 bp, Arabidopsis thaliana
  misc_feature (1)..(1326): Ceres Seq. ID no. 4951649
atggaggtgaattcgatgggactaaattgtcggtgtcttgagttagaagaaagggttttaaaaggtgaagaaaggtacactcacttagaaacagagttgcagaaacgaaacaatgagtttgaatcacttgaattgaagtttaaagaattggaatcagagaagttagtagttgaagaagagtcaaggaatcttaaagaatctgaggaaggctcaccttgtatgaccacaccggttaaagactatatattagggagagacagagatagagacagagacaccatgtcttctcggagacgagtgaataagatgttgtcgtttgaagatgatggtcacaaattgactgatgtagttgatttatgtgatagtgaaacagagcagagaagtgaggaggaggaatttgctgatgttatggatactatagaggaggcaaatattggtgagaattatgaagatgaagatgtggaagcttgtgatgctaacacaagtagtcctctttctaggcgtaagaggaagcgggttattgccagcgatgatgatgatgatgctgatgatgatgatgaagataatataccgatttcaatactcaagaatttgaaaccaactaaccaagagatgtcagatttgtttgatacacctaacaaaggagagagtgagtctagaagattgagtggacaacgtcgagtgtcgtcaagactgaataaaaagagagtttctgaagaggtatctgcttcaacagagagacttgtgggaatcccaacaaccgataatgccgaggatgatgagacagaagaagaaggttcagagagtgagggtgagagtttagatgggtttattatcgatgatgatgatagtcaggagtctgtcagtgaaaagtctgatgaaatcggggtagaggaatccgatggagaagttggttatgctgatgttatgtcaaggttaaggagggagaagaaacccgagaagcgtaaatgggagtatgaggcagatatgttggcagatttcggtaaagatcctgagctttgtatgagagcggtttgtgttctgtttaggtttcaaacagaagatgaaaaagtggaaagatcaagtcatgtctctaatggtcgcggtttcagcaaggttgacgctgtaaggggcactagcattgcactgtttctgacggatggagattccgcaggcgatatgaagaaatccgttgaggaattgaaagtttttgactttaaaggcgtagagaaatgcgaagaattagcacgcaaatactctaaacaactcttccagatctataacaacagagaagatccattctttactcttcctccatctccatga

SEQ ID NO: 30253 - protein, 441 aa, Arabidopsis thaliana
  misc_feature (1)..(441): Ceres Seq. ID no. 4951650
MEVNSMGLNCRCLELEERVLKGEERYTHLETELQKRNNEFESLELKFKELESEKLVVEEESRNLKESEEGSPCMTTPVKDYILGRDRDRDRDTMSSRRRVNKMLSFEDDGHKLTDVVDLCDSETEQRSEEEEFADVMDTIEEANIGENYEDEDVEACDANTSSPLSRRKRKRVIASDDDDDADDDDEDNIPISILKNLKPTNQEMSDLFDTPNKGESESRRLSGQRRVSSRLNKKRVSEEVSASTERLVGIPTTDNAEDDETEEEGSESEGESLDGFIIDDDDSQESVSEKSDEIGVEESDGEVGYADVMSRLRREKKPEKRKWEYEADMLADFGKDPELCMRAVCVLFRFQTEDEKVERSSHVSNGRGFSKVDAVRGTSIALFLTDGDSAGDMKKSVEELKVFDFKGVEKCEELARKYSKQLFQIYNNREDPFFTLPPSP

SEQ ID NO: 30254 - protein, 436 aa, Arabidopsis thaliana
  misc_feature (1)..(436): Ceres Seq. ID no. 4951651
MGLNCRCLELEERVLKGEERYTHLETELQKRNNEFESLELKFKELESEKLVVEEESRNLKESEEGSPCMTTPVKDYILGRDRDRDRDTMSSRRRVNKMLSFEDDGHKLTDVVDLCDSETEQRSEEEEFADVMDTIEEANIGENYEDEDVEACDANTSSPLSRRKRKRVIASDDDDDADDDDEDNIPISILKNLKPTNQEMSDLFDTPNKGESESRRLSGQRRVSSRLNKKRVSEEVSASTERLVGIPTTDNAEDDETEEEGSESEGESLDGFIIDDDDSQESVSEKSDEIGVEESDGEVGYADVMSRLRREKKPEKRKWEYEADMLADFGKDPELCMRAVCVLFRFQTEDEKVERSSHVSNGRGFSKVDAVRGTSIALFLTDGDSAGDMKKSVEELKVFDFKGVEKCEELARKYSKQLFQIYNNREDPFFTLPPSP

SEQ ID NO: 30255 - protein, 368 aa, Arabidopsis thaliana
  misc_feature (1)..(368): Ceres Seq. ID no. 4951652
MTTPVKDYILGRDRDRDRDTMSSRRRVNKMLSFEDDGHKLTDVVDLCDSETEQRSEEEEFADVMDTIEEANIGENYEDEDVEACDANTSSPLSRRKRKRVIASDDDDDADDDDEDNIPISILKNLKPTNQEMSDLFDTPNKGESESRRLSGQRRVSSRLNKKRVSEEVSASTERLVGIPTTDNAEDDETEEEGSESEGESLDGFIIDDDDSQESVSEKSDEIGVEESDGEVGYADVMSRLRREKKPEKRKWEYEADMLADFGKDPELCMRAVCVLFRFQTEDEKVERSSHVSNGRGFSKVDAVRGTSIALFLTDGDSAGDMKKSVEELKVFDFKGVEKCEELARKYSKQLFQIYNNREDPFFTLPPSP

SEQ ID NO: 30256 - DNA, 885 bp, Arabidopsis thaliana
  misc_feature (1)..(885): Ceres Seq. ID no. 4951653
atgcaggagataataccggattttcttgaagagtgtgaatttgtcgacacttcactagccggagatgatctatttgccatcttagagagtcttgaaggtgccggagagatatctccgacagctgcatctacacctaaagatggaaccacaagttccaaggagttagttaaggatcaagattatgaaaactcatctcctaagaggaaaaagcaaagactagaaaccaggaaagaagaggacgaagaagaagaagacggagacggagaagcagaagaagataataagcaagatgggcaacaaaagatgtctcatgtaaccgtggaacgtaaccggagaaagcaaatgaacgagcacttaaccgttttgcgttctcttatgccttgtttctacgtcaaacggggggaccaagcatcgatcataggaggagttgtggagtacataagcgagttacaacaagttctccaatctttggaagccaagaaacaacgtaaaacctacgccgaagtcctaagcccgagagttgtcccgagccctcgtccttcaccgcctgttctaagcccaagaaaaccgcctcttagcccgcttagtagtaaccatgagagtagtgtgatcaatgagcttgttgctaactcaaaatcggctttggctgatgtggaagtgaagttttcaggagctaacgtgctgctcaaaacggtgtcgcataagatcccgggacaagttatgaagataattgctgctcttgaagatttggctcttgagattcttcaggttaatattaacaccgtcgacgaaaccatgcttaattctttcaccatcaagattggaattgagtgccaactaagtgcagaagaactggctcaacaaattcagcaaacattctgctag

SEQ ID NO: 30257 - protein, 294 aa, Arabidopsis thaliana
  misc_feature (1)..(294): Ceres Seq. ID no. 4951654
MQEIIPDFLEECEFVDTSLAGDDLFAILESLEGAGEISPTAASTPKDGTTSSKELVKDQDYENSSPKRKKQRLETRKEEDEEEEDGDGEAEEDNKQDGQQKMSHVTVERNRRKQMNEHLTVLRSLMPCFYVKRGDQASIIGGVVEYISELQQVLQSLEAKKQRKTYAEVLSPRVVPSPRPSPPVLSPRKPPLSPLSSNHESSVINELVANSKSALADVEVKFSGANVLLKTVSHKIPGQVMKIIAALEDLALEILQVNINTVDETMLNSFTIKIGIECQLSAEELAQQIQQTFC

SEQ ID NO: 30258 - protein, 193 aa, Arabidopsis thaliana
  misc_feature (1)..(193): Ceres Seq. ID no. 4951655
MSHVTVERNRRKQMNEHLTVLRSLMPCFYVKRGDQASIIGGVVEYISELQQVLQSLEAKKQRKTYAEVLSPRVVPSPRPSPPVLSPRKPPLSPLSSNHESSVINELVANSKSALADVEVKFSGANVLLKTVSHKIPGQVMKIIAALEDLALEILQVNINTVDETMLNSFTIKIGIECQLSAEELAQQIQQTFC

SEQ ID NO: 30259 - protein, 180 aa, Arabidopsis thaliana
  misc_feature (1)..(180): Ceres Seq. ID no. 4951656
MNEHLTVLRSLMPCFYVKRGDQASIIGGVVEYISELQQVLQSLEAKKQRKTYAEVLSPRVVPSPRPSPPVLSPRKPPLSPLSSNHESSVINELVANSKSALADVEVKFSGANVLLKTVSHKIPGQVMKIIAALEDLALEILQVNINTVDETMLNSFTIKIGIECQLSAEELAQQIQQTFC

SEQ ID NO: 30260 - DNA, 1608 bp, Arabidopsis thaliana
  misc_feature (1)..(1608): Ceres Seq. ID no. 4951733
atgcagttacatatatctccgagcttgagacatgtgactgtggtcacagggaaaggattgagagagttcataaaagttaaggttggttctagaagattctcttatcaaatggtgttttactctctactcttcttcacttttcttctccgattcgtctttgttctctccaccgttgatactatcgacggcgatccctctccttgctcctctcttgcttgcttggggaaaagactaaagccaaagcttttaggaagaagggttgattctggtaatgttccagaagctatgtaccaagttttagaacagcctttaagcgaacaagaactcaaaggaagatcagatatacctcaaacacttcaagatttcatgtctgaagtcaaaagaagcaaatcagacgcaagagaatttgctcaaaagctaaaagaaatggtgacattgatggaacagagaacaagaacggctaagattcaagagtatttatatcgacatgtcgcatcaagcagcataccgaaacaacttcactgtttagctcttaaactagccaacgaacactcgataaacgcagcggcgcgtctccagcttccagaagctgagcttgtccctatgttggtagacaacaactactttcactttgtcttggcttcagacaatattcttgcagcttcggttgtggctaagtcgttggttcaaaatgctttaagacctcataagatcgttcttcacatcataacggataggaaaacttatttcccaatgcaagcttggttctcattgcatcctctgtctccagcaataattgaggtcaaggctttgcatcatttcgattggttatcgaaaggtaaagtacccgttttggaagctatggagaaagatcagagagtgaggtctcaattcagaggtggatcatcggttattgtggctaataacaaagagaacccggttgttgttgctgctaagttacaagctctcagccctaaatacaactccttgatgaatcacatccgtattcatctaccagagttgtttccaagcttaaacaaggttgtgtttctagacgatgacattgtgatccaaactgatctttcacctctttgggacattgacatgaatggaaaagtaaatggagcagtggaaacatgtagaggagaagacaagtttgtgatgtcaaagaagttcaagagttacctcaacttctcgaatccgacaattgccaaaaacttcaatccagaggaatgtgcatgggcttatggaatgaatgttttcgacctagcggcttggaggaggactaacataagctccacttactatcattggcttgacgagaacttaaaatcagacctgagtttgtggcagctgggaactttgcctcctgggctgattgctttccacggtcatgtccaaaccatagatccgttctggcatatgcttggtctcggataccaagagaccacgagctatgccgatgctgaaagtgccgctgttgttcatttcaatggaagagctaagccttggctggatatagcatttcctcatctacgtcctctctgggctaagtatcttgattcttctgacagatttatcaagagctgtcacattagagcatcatga

SEQ ID NO: 30261 - protein, 535 aa, Arabidopsis thaliana
  misc_feature (1)..(535): Ceres Seq. ID no. 4951734
MQLHISPSLRHVTVVTGKGLREFIKVKVGSRRFSYQMVFYSLLFFTFLLRFVFVLSTVDTIDGDPSPCSSLACLGKRLKPKLLGRRVDSGNVPEAMYQVLEQPLSEQELKGRSDIPQTLQDFMSEVKRSKSDAREFAQKLKEMVTLMEQRTRTAKIQEYLYRHVASSSIPKQLHCLALKLANEHSINAAARLQLPEAELVPMLVDNNYFHFVLASDNILAASVVAKSLVQNALRPHKIVLHIITDRKTYFPMQAWFSLHPLSPAIIEVKALHHFDWLSKGKVPVLEAMEKDQRVRSQFRGGSSVIVANNKENPVVVAAKLQALSPKYNSLMNHIRIHLPELFPSLNKVVFLDDDIVIQTDLSPLWDIDMNGKVNGAVETCRGEDKFVMSKKFKSYLNFSNPTIAKNFNPEECAWAYGMNVFDLAAWRRTNISSTYYHWLDENLKSDLSLWQLGTLPPGLIAFHGHVQTIDPFWHMLGLGYQETTSYADAESAAVVHFNGRAKPWLDIAFPHLRPLWAKYLDSSDRFIKSCHIRAS

SEQ ID NO: 30262 - protein, 499 aa, Arabidopsis thaliana; identical to SEQ ID NO: 27965
  misc_feature (1)..(499): Ceres Seq. ID no. 4951735

SEQ ID NO: 30263 - protein, 440 aa, Arabidopsis thaliana; identical to SEQ ID NO: 27966
  misc_feature (1)..(440): Ceres Seq. ID no. 4951736

SEQ ID NO: 30264 - DNA, 2493 bp, Arabidopsis thaliana
  misc_feature (1)..(2493): Ceres Seq. ID no. 4951811
atggcttctcttcctttcaacactatcccgaataaagttccattttcagtatcatcgaaaccttcttctaaacaccacgatgaacaagctcattctccttcttccacatcttactttcatcgcgtttcgtctctttgtaagaacggtgagatcaaagaagctctgagtttagttacagagatggatttcagaaacttacgcattggtcctgagatatacggtgaaatcctccaaggatgcgtttacgagagagatttaagtacagggaagcaaattcatgctcggattttaaagaacggtgatttctacgcgaggaatgagtacatcgagactaaattggtgatattctacgccaagtgcgatgctttggagattgctgaagttcttttctcgaaattgagggttcgtaatgttttctcttgggcagctattattggtgtgaaatgtaggattgggttatgtgaaggagctttaatgggttttgttgagatgcttgaaaatgagatttttcctgataattttgtggttccgaatgtttgtaaagcgtgtggtgcgttgaaatggagtagatttgggagaggggttcatgggtatgtggtaaaatctggtcttgaggattgtgtgtttgtggctagtagtttagctgatatgtatgggaaatgtggtgttttggatgatgcgagtaaggtgtttgatgaaattcctgacagaaatgctgttgcttggaatgcgttgatggttggttatgtacaaaatggtaagaatgaggaagcgattcggcttttttctgatatgaggaagcaaggtgttgagcctactcgtgtcactgtctcgacttgcttatctgcttctgctaatatgggtggggttgaagaggggaaacagtcgcatgccattgctattgtaaatggaatggagctggataatatcttggggacatctttattgaatttctattgcaaagtgggtttgatagagtatgctgagatggtttttgatcggatgtttgaaaaggatgtggttacatggaatctgattatttctgggtatgttcaacaagggctagttgaagatgctatctacatgtgtcaattaatgagactagagaagctgaaatatgattgtgtcactttagcgacattaatgtctgctgctgcacgtactgagaatctaaagctcgggaaagaggtgcagtgttattgcattagacatagttttgaatctgatatcgttttagccagcactgtgatggatatgtatgccaagtgtggcagcattgttgatgctaagaaagtgtttgattctacagtagagaaagacttgatactgtggaatacgttacttgcagcctatgcagaatctggtcttagtggagaggctttgagattgttctatgggatgcagctagaaggtgtacctccaaatgtgataacatggaatttgatcattctaagtcttctaaggaatggtcaggtagatgaggccaaggatatgttcttgcagatgcaatcctcagggataattccaaatcttatctcatggacgactatgatgaatggtatggttcaaaatggttgcagtgaggaggcaattctgtttcttagaaagatgcaagaatcgggcctgagaccaaatgcatttagcatcactgtcgctctctctgcttgcgcacatctagcatcattgcatatcggaagaacaatccacggatacatcataagaaatctacagcattcctctttggtttctattgaaacttctttggttgacatgtatgctaaatgtggagatataaacaaagcagagaaggttttcggaagtaagctatacagcgagttgcctctctccaatgccatgatctcggcgtatgcattatatggtaacttaaaagaagcaatcgctctatacagaagcttagaaggtgtaggtcttaaaccagacaacatcacaatcacaaatgtcttatcagcatgtaaccacgcaggggatattaaccaggctatcgagattttcactgatatcgtttcaaagcgtagtatgaaaccatgcttggaacattatggacttatggtagatcttcttgcatcagctggagaaacagaaaaagctttaaggttaatcgaggaaatgccattcaagccagatgcacgaatgatccaatctttggttgcttcttgcaacaaacagcgtaagactgagcttgtggactacttatcaaggaaattgcttgaatccgagcctgaaaactccggtaactatgtgacgatatcgaatgcttatgcggttgaaggaagttgggatgaagttgtgaagatgagagagatgatgaaagctaagggtttgaagaaaaaacctggatgtagttggatacagattacaggagaagaaggagtccatgtgtttgttgccaatgataagacacatactaggatcaatgagatacaaatgatgttagcattgttattatatgatatgggtacaggttccaaatga

SEQ ID NO: 30265 - protein, 830 aa, Arabidopsis thaliana
  misc_feature (1)..(830): Ceres Seq. ID no. 4951812
MASLPFNTIPNKVPFSVSSKPSSKHHDEQAHSPSSTSYFHRVSSLCKNGEIKEALSLVTEMDFRNLRIGPEIYGEILQGCVYERDLSTGKQIHARILKNGDFYARNEYIETKLVIFYAKCDALEIAEVLFSKLRVRNVFSWAAIIGVKCRIGLCEGALMGFVEMLENEIFPDNFVVPNVCKACGALKWSRFGRGVHGYVVKSGLEDCVFVASSLADMYGKCGVLDDASKVFDEIPDRNAVAWNALMVGYVQNGKNEEAIRLFSDMRKQGVEPTRVTVSTCLSASANMGGVEEGKQSHAIAIVNGMELDNILGTSLLNFYCKVGLIEYAEMVFDRMFEKDVVTWNLIISGYVQQGLVEDAIYMCQLMRLEKLKYDCVTLATLMSAAARTENLKLGKEVQCYCIRHSFESDIVLASTVMDMYAKCGSIVDAKKVFDSTVEKDLILWNTLLAAYAESGLSGEALRLFYGMQLEGVPPNVITWNLIILSLLRNGQVDEAKDMFLQMQSSGIIPNLISWTTMMNGMVQNGCSEEAILFLRKMQESGLRPNAFSITVALSACAHLASLHIGRTIHGYIIRNLQHSSLVSIETSLVDMYAKCGDINKAEKVFGSKLYSELPLSNAMISAYALYGNLKEAIALYRSLEGVGLKPDNITITNVLSACNHAGDINQAIEIFTDIVSKRSMKPCLEHYGLMVDLLASAGETEKALRLIEEMPFKPDARMIQSLVASCNKQRKTELVDYLSRKLLESEPENSGNYVTISNAYAVEGSWDEVVKMREMMKAKGLKKKPGCSWIQITGEEGVHVFVANDKTHTRINEIQMMLALLLYDMGTGSK

SEQ ID NO: 30266 - protein, 770 aa, Arabidopsis thaliana
  misc_feature (1)..(770): Ceres Seq. ID no. 4951813
MDFRNLRIGPEIYGEILQGCVYERDLSTGKQIHARILKNGDFYARNEYIETKLVIFYAKCDALEIAEVLFSKLRVRNVFSWAAIIGVKCRIGLCEGALMGFVEMLENEIFPDNFVVPNVCKACGALKWSRFGRGVHGYVVKSGLEDCVFVASSLADMYGKCGVLDDASKVFDEIPDRNAVAWNALMVGYVQNGKNEEAIRLFSDMRKQGVEPTRVTVSTCLSASANMGGVEEGKQSHAIAIVNGMELDNILGTSLLNFYCKVGLIEYAEMVFDRMFEKDVVTWNLIISGYVQQGLVEDAIYMCQLMRLEKLKYDCVTLATLMSAAARTENLKLGKEVQCYCIRHSFESDIVLASTVMDMYAKCGSIVDAKKVFDSTVEKDLILWNTLLAAYAESGLSGEALRLFYGMQLEGVPPNVITWNLIILSLLRNGQVDEAKDMFLQMQSSGIIPNLISWTTMMNGMVQNGCSEEAILFLRKMQESGLRPNAFSITVALSACAHLASLHIGRTIHGYIIRNLQHSSLVSIETSLVDMYAKCGDINKAEKVFGSKLYSELPLSNAMISAYALYGNLKEAIALYRSLEGVGLKPDNITITNVLSACNHAGDINQAIEIFTDIVSKRSMKPCLEHYGLMVDLLASAGETEKALRLIEEMPFKPDARMIQSLVASCNKQRKTELVDYLSRKLLESEPENSGNYVTISNAYAVEGSWDEVVKMREMMKAKGLKKKPGCSWIQITGEEGVHVFVANDKTHTRINEIQMMLALLLYDMGTGSK

SEQ ID NO: 30267 - protein, 672 aa, Arabidopsis thaliana
  misc_feature (1)..(672): Ceres Seq. ID no. 4951814
MGFVEMLENEIFPDNFVVPNVCKACGALKWSRFGRGVHGYVVKSGLEDCVFVASSLADMYGKCGVLDDASKVFDEIPDRNAVAWNALMVGYVQNGKNEEAIRLFSDMRKQGVEPTRVTVSTCLSASANMGGVEEGKQSHAIAIVNGMELDNILGTSLLNFYCKVGLIEYAEMVFDRMFEKDVVTWNLIISGYVQQGLVEDAIYMCQLMRLEKLKYDCVTLATLMSAAARTENLKLGKEVQCYCIRHSFESDIVLASTVMDMYAKCGSIVDAKKVFDSTVEKDLILWNTLLAAYAESGLSGEALRLFYGMQLEGVPPNVITWNLIILSLLRNGQVDEAKDMFLQMQSSGIIPNLISWTTMMNGMVQNGCSEEAILFLRKMQESGLRPNAFSITVALSACAHLASLHIGRTIHGYIIRNLQHSSLVSIETSLVDMYAKCGDINKAEKVFGSKLYSELPLSNAMISAYALYGNLKEAIALYRSLEGVGLKPDNITITNVLSACNHAGDINQAIEIFTDIVSKRSMKPCLEHYGLMVDLLASAGETEKALRLIEEMPFKPDARMIQSLVASCNKQRKTELVDYLSRKLLESEPENSGNYVTISNAYAVEGSWDEVVKMREMMKAKGLKKKPGCSWIQITGEEGVHVFVANDKTHTRINEIQMMLALLLYDMGTGSK

SEQ ID NO: 30268 - DNA, 1289 bp, Arabidopsis thaliana
  misc_feature (1)..(1289): Ceres Seq. ID no. 4952061
tttgtatcatgagtaatgttgatatgtttagtgatgaaaagttctcagatgtcagaaacagaatttaaagtgttgcttgagacattcacatttcctgctgattctgctcccttcaagagttgtcatgcctctaccatagttgaggttgttaaagatcatttcttggctgcgtatttcggaggcaccagggaaggagcacctgatgtcaaaatctggttgcagcatttcaaggatggtcaatgggattcaccggttattgttgatgaagagccaggagttccaatgtataaccctgtcttgttcaaacttccatctcatgagctcttattgttctacaaaatcggccaggaggttcaaaaatggagtggttgcatgaaacgatcatatgataaaggtataacttggactgaaagagaacagcttcctcctgggattctcggtcctatcaaaaacaagcccattttgcttgaagacggtactctcctttgcggatcatctgttgagagttggaattcttggggagcatggatggaggtcacttcagatgcgggtagaacatggagaaagaaagggccaatatacattcaaggcaagagtcttagcgtgatccaaccagttccataccaaaccgcagctgggaacttacggattttactcagatcctttactggcattgacagaatctgtatctcagagtctttggatggcggtgagaactggagttttgcagtaccaacggttctcccaaacccaaattcaggtattgatggagtcaagcttaaggatggtaggctagtgcttgcttacaacacagactcaagaggtgtgctcaaattaggagtttctttagacgacggtgattcatggaccgatattttaacgttggaggaatctccgggaatggagtattcgtacccggctgttatacaagccggagacggcaatgtccacgtcacctatacatataacaggacacaaattaagcatgtggtgctcaagactgcgacagatatcgattcgaagccataccgacatggtgaagcaggaggaggacacgtgaacttggatttgtacgaaccaaacattaattaattagctatttgtctcttgaaccatcgatgtggagtgtgacttccttcttacggaagaacaaagaatgttctctttcttgtcttgtaagttattgattgatcgattcttgagtttgtaaaagttgccactagttgatgaatattattgagattgtttataatatatttattgtaatcatataagttagagatttactt

SEQ ID NO: 30269 - protein, 358 aa, Arabidopsis thaliana
  misc_feature (1)..(358): Ceres Seq. ID no. 4952062
MLICLVMKSSQMSETEFKVLLETFTFPADSAPFKSCHASTIVEVVKDHFLAAYFGGTREGAPDVKIWLQHFKDGQWDSPVIVDEEPGVPMYNPVLFKLPSHELLLFYKIGQEVQKWSGCMKRSYDKGITWTEREQLPPGILGPIKNKPILLEDGTLLCGSSVESWNSWGAWMEVTSDAGRTWRKKGPIYIQGKSLSVIQPVPYQTAAGNLRILLRSFTGIDRICISESLDGGENWSFAVPTVLPNPNSGIDGVKLKDGRLVLAYNTDSRGVLKLGVSLDDGDSWTDILTLEESPGMEYSYPAVIQAGDGNVHVTYTYNRTQIKHVVLKTATDIDSKPYRHGEAGGGHVNLDLYEPNIN

SEQ ID NO: 30270 - protein, 352 aa, Arabidopsis thaliana
  misc_feature (1)..(352): Ceres Seq. ID no. 4952063
MKSSQMSETEFKVLLETFTFPADSAPFKSCHASTIVEVVKDHFLAAYFGGTREGAPDVKIWLQHFKDGQWDSPVIVDEEPGVPMYNPVLFKLPSHELLLFYKIGQEVQKWSGCMKRSYDKGITWTEREQLPPGILGPIKNKPILLEDGTLLCGSSVESWNSWGAWMEVTSDAGRTWRKKGPIYIQGKSLSVIQPVPYQTAAGNLRILLRSFTGIDRICISESLDGGENWSFAVPTVLPNPNSGIDGVKLKDGRLVLAYNTDSRGVLKLGVSLDDGDSWTDILTLEESPGMEYSYPAVIQAGDGNVHVTYTYNRTQIKHVVLKTATDIDSKPYRHGEAGGGHVNLDLYEPNIN

SEQ ID NO: 30271 - protein, 347 aa, Arabidopsis thaliana
  misc_feature (1)..(347): Ceres Seq. ID no. 4952064
MSETEFKVLLETFTFPADSAPFKSCHASTIVEVVKDHFLAAYFGGTREGAPDVKIWLQHFKDGQWDSPVIVDEEPGVPMYNPVLFKLPSHELLLFYKIGQEVQKWSGCMKRSYDKGITWTEREQLPPGILGPIKNKPILLEDGTLLCGSSVESWNSWGAWMEVTSDAGRTWRKKGPIYIQGKSLSVIQPVPYQTAAGNLRILLRSFTGIDRICISESLDGGENWSFAVPTVLPNPNSGIDGVKLKDGRLVLAYNTDSRGVLKLGVSLDDGDSWTDILTLEESPGMEYSYPAVIQAGDGNVHVTYTYNRTQIKHVVLKTATDIDSKPYRHGEAGGGHVNLDLYEPNIN

SEQ ID NO: 30272 - DNA, 1770 bp, Arabidopsis thaliana
  misc_feature (1)..(1770): Ceres Seq. ID no. 4952322
atggattatgatctggtacataccaaaaccatcaaaagtttgtctttcttcataccaaaaacaaccgaattctcattcttgattcttgtttttttttttttttgccagcttcgttccaagaagagtatcaaacgcgtagaatccaccaaatcaaatccatggtggtgggatagtcatatcggtctcaaaaattctaagtggcttgagaataatctcgatgagatggaccggagcgtgaaacggatggtgaagttgatagaggaggatgcagattcttttgctaagaaggcagagatgtattaccagtcaagacctgagcttattgctcttgtggatgagtttcaccgtatgtaccgtgctttggcagagcggtacgagaacatcaccggagagttgagaaaaggctctcctttagagcttcagtcacagggctctggtctttctgacatctctgcttctgacctctctgctttatggacctctaatgaggttaataggttaggtcgtcctccttctggtcgacgtgctcctggttttgaatacttccttggcaatggaggacttccttctgatctttatcacaaagatggagatgattctgcttccattactgattctgaacttgaatctgatgattcttctgtgactaattaccctggttatgtgagtataggctctgactttcagtccctaagcaagaggatcatggatcttgagattgagctacgtgaagccaaagaaagacttaggatgcaacttgaagggaacactgagagcttgttgccgagggtgaaaagtgagactaaatttgttgatttcccggcaaaacttgctgcttgtgagcaagaactgaaagatgtaaatgagaagttacagaattcagaagaccaaatctatattttaaagagtcagcttgctagatacttgccatctgggttggatgatgaacagagcgaaggggcagcttcaactcaagaactggacattgagactttgtctgaagagctgagaattacaagcctgaggcttcgggaggcagaaaaacaaaacggtatcatgagaaaagaagtcgagaaaagcaagtctgatgatgcaaaactcaagagtctgcaagacatgcttgagtcggcacagaaagaagctgcagcatggaaaagcaaggctagtgcagataaaagagaggtggtgaagctgcttgatagaatctcaatgttgaagtcgagtttagcaggtagagatcatgagatcagggatttaaagacagcattgtctgacgcagaagagaagattttcccggagaaagcacaggtcaaagccgatatagcaaagctgttggaagaaaaaatacaccgggatgaccaattcaaagagctggaagccaatgtgcgttatcttgaagatgagagaagaaaggtgaacaatgagaaaatagaagaggaggaaaagctgaagagcgaaatcgaggtgctgacactggaaaaggtagagaaagggagatgcatagagacgttaagcagaaaggtgagtgagctagagtcggagataagtcgacttggaagtgaaataaaagcgagagacgataggactatggagatggagaaggaggtggagaagcagaggagggaactagaagaagtagcagaagagaagagggaagtgataagacagctctgtttttcactagactactccagagacgaatacaagagactacgcatagccttttcagggcatccaccaacaagaccatcatccattcttgcttcttaa

SEQ ID NO: 30273 - protein, 589 aa, Arabidopsis thaliana
  misc_feature (1)..(589): Ceres Seq. ID no. 4952323
MDYDLVHTKTIKSLSFFIPKTTEFSFLILVFFFFCQLRSKKSIKRVESTKSNPWWWDSHIGLKNSKWLENNLDEMDRSVKRMVKLIEEDADSFAKKAEMYYQSRPELIALVDEFHRMYRALAERYENITGELRKGSPLELQSQGSGLSDISASDLSALWTSNEVNRLGRPPSGRRAPGFEYFLGNGGLPSDLYHKDGDDSASITDSELESDDSSVTNYPGYVSIGSDFQSLSKRIMDLEIELREAKERLRMQLEGNTESLLPRVKSETKFVDFPAKLAACEQELKDVNEKLQNSEDQIYILKSQLARYLPSGLDDEQSEGAASTQELDIETLSEELRITSLRLREAEKQNGIMRKEVEKSKSDDAKLKSLQDMLESAQKEAAAWKSKASADKREVVKLLDRISMLKSSLAGRDHEIRDLKTALSDAEEKIFPEKAQVKADIAKLLEEKIHRDDQFKELEANVRYLEDERRKVNNEKIEEEEKLKSEIEVLTLEKVEKGRCIETLSRKVSELESEISRLGSEIKARDDRTMEMEKEVEKQRRELEEVAEEKREVIRQLCFSLDYSRDEYKRLRIAFSGHPPTRPSSILAS

SEQ ID NO: 30274 - protein, 515 aa, Arabidopsis thaliana
  misc_feature (1)..(515): Ceres Seq. ID no. 4952324
MDRSVKRMVKLIEEDADSFAKKAEMYYQSRPELIALVDEFHRMYRALAERYENITGELRKGSPLELQSQGSGLSDISASDLSALWTSNEVNRLGRPPSGRRAPGFEYFLGNGGLPSDLYHKDGDDSASITDSELESDDSSVTNYPGYVSIGSDFQSLSKRIMDLEIELREAKERLRMQLEGNTESLLPRVKSETKFVDFPAKLAACEQELKDVNEKLQNSEDQIYILKSQLARYLPSGLDDEQSEGAASTQELDIETLSEELRITSLRLREAEKQNGIMRKEVEKSKSDDAKLKSLQDMLESAQKEAAAWKSKASADKREVVKLLDRISMLKSSLAGRDHEIRDLKTALSDAEEKIFPEKAQVKADIAKLLEEKIHRDDQFKELEANVRYLEDERRKVNNEKIEEEEKLKSEIEVLTLEKVEKGRCIETLSRKVSELESEISRLGSEIKARDDRTMEMEKEVEKQRRELEEVAEEKREVIRQLCFSLDYSRDEYKRLRIAFSGHPPTRPSSILAS

SEQ ID NO: 30275 - protein, 508 aa, Arabidopsis thaliana
  misc_feature (1)..(508): Ceres Seq. ID no. 4952325
MVKLIEEDADSFAKKAEMYYQSRPELIALVDEFHRMYRALAERYENITGELRKGSPLELQSQGSGLSDISASDLSALWTSNEVNRLGRPPSGRRAPGFEYFLGNGGLPSDLYHKDGDDSASITDSELESDDSSVTNYPGYVSIGSDFQSLSKRIMDLEIELREAKERLRMQLEGNTESLLPRVKSETKFVDFPAKLAACEQELKDVNEKLQNSEDQIYILKSQLARYLPSGLDDEQSEGAASTQELDIETLSEELRITSLRLREAEKQNGIMRKEVEKSKSDDAKLKSLQDMLESAQKEAAAWKSKASADKREVVKLLDRISMLKSSLAGRDHEIRDLKTALSDAEEKIFPEKAQVKADIAKLLEEKIHRDDQFKELEANVRYLEDERRKVNNEKIEEEEKLKSEIEVLTLEKVEKGRCIETLSRKVSELESEISRLGSEIKARDDRTMEMEKEVEKQRRELEEVAEEKREVIRQLCFSLDYSRDEYKRLRIAFSGHPPTRPSSILAS

SEQ ID NO: 30276 - DNA, 822 bp, Arabidopsis thaliana
  misc_feature (1)..(822): Ceres Seq. ID no. 4952329
atggccatggcctatgaggaagctcgcaagctccgtcttcaagagaatcacaagcgatttcaatccaattttgtagctttaccacaatttcagcttcttcagcagcgtaatcacaaacccatcgataaagccctcttagctactgctgaaccaagacgctcttcccgtgttcgtaccgtaatttcttcctatcgcgatgatgtcgtcgtagacactggtcgtacttcgaatctgaggagatcgcgacatagctctacatgggcgacctacatttctcgacctctccatgagtgcaagtttgcatcttatgaagaaaaggttggagcattcaaggctgcagagaagttccagaggagccttaaatctccacatccttactttgtgaaatctatggttcgctcccatgtttacagttgcttttggctggggcttccttcaagattctgtgcagacaattttcctgaggaaactatggaaatagaactagaggatgaagaaggcgaagtgtatgaagcagtgtacattggtagaagagctggactcagtggtggttggaaaaggtttgctcttgatcataaattggatgatggtgatgctctactctttgaattggttgaaccaaagaagttcaagatctatgtgtttaaaggaaatgagaacgctaatcttacaagcgccagaaagagaggcagagcaacgacgccaagtgaagaagaagaagaagaagaagataaggatgttgaagaatcaggtgatgaggaacacagctcaagagccactaagagatcatccgtaaggttactaaggaagaggaaagcataa

SEQ ID NO: 30277 - protein, 273 aa, Arabidopsis thaliana
  misc_feature (1)..(273): Ceres Seq. ID no. 4952330
MAMAYEEARKLRLQENHKRFQSNFVALPQFQLLQQRNHKPIDKALLATAEPRRSSRVRTVISSYRDDVVVDTGRTSNLRRSRHSSTWATYISRPLHECKFASYEEKVGAFKAAEKFQRSLKSPHPYFVKSMVRSHVYSCFWLGLPSRFCADNFPEETMEIELEDEEGEVYEAVYIGRRAGLSGGWKRFALDHKLDDGDALLFELVEPKKFKIYVFKGNENANLTSARKRGRATTPSEEEEEEEDKDVEESGDEEHSSRATKRSSVRLLRKRKA

SEQ ID NO: 30278 - protein, 271 aa, Arabidopsis thaliana
  misc_feature (1)..(271): Ceres Seq. ID no. 4952331
MAYEEARKLRLQENHKRFQSNFVALPQFQLLQQRNHKPIDKALLATAEPRRSSRVRTVISSYRDDVVVDTGRTSNLRRSRHSSTWATYISRPLHECKFASYEEKVGAFKAAEKFQRSLKSPHPYFVKSMVRSHVYSCFWLGLPSRFCADNFPEETMEIELEDEEGEVYEAVYIGRRAGLSGGWKRFALDHKLDDGDALLFELVEPKKFKIYVFKGNENANLTSARKRGRATTPSEEEEEEEDKDVEESGDEEHSSRATKRSSVRLLRKRKA

SEQ ID NO: 30279 - protein, 143 aa, Arabidopsis thaliana
  misc_feature (1)..(143): Ceres Seq. ID no. 4952332
MVRSHVYSCFWLGLPSRFCADNFPEETMEIELEDEEGEVYEAVYIGRRAGLSGGWKRFALDHKLDDGDALLFELVEPKKFKIYVFKGNENANLTSARKRGRATTPSEEEEEEEDKDVEESGDEEHSSRATKRSSVRLLRKRKA

SEQ ID NO: 30280 - DNA, 1275 bp, Arabidopsis thaliana
  misc_feature (1)..(1275): Ceres Seq. ID no. 4952333
atggggaaagacgaagaggaaatgcgaggtgagatcgaggagcgactaatcaatgaagagtacaagatctggaagaagaacactcctttcctctacgatctcgttattactcacgctctcgagtggccttcacttactgttgaatggcttcctgaccgtgaagaaccttccggtaaagactactccgttcagaagatgattctcggtacccatacctccgagagcgagcccaattacttgatgctagcccaagttcagcttcctcttgacgataccgagagtgaagctcgtcagtacgatgatgaccgctctgaatttggtggctttggctgtgcaactggaaaggtacaaattatccagcagataaatcatgatggtgaggttaatcgagctcgctatatgcctcaaaaccctttcataattgctaccaagacagttaatgcggaggtctatgttttcgattacagtaagcatccatctaagcctcctcttgatggggcttgtaatcctgatttaaagcttagaggtcacagctctgagggatatggtctctcttggagtaagttcaagcagggtcatttgcttagtggctctgatgatgctcagatctgcttgtgggatattaacgctactcctaaaaacaaatctctggacgctcagcagatttttaaggctcatgaaggggttgtggaagatgttgcatggcatctgagacatgagtacctgtttggatcagttggagatgaccaataccttctcatatgggatctgcgttctccatctgccagtaaaccagtacagtctgtggttgctcattcgatggaggttaactgcttagccttcaatccatttaatgagtgggttgtggcaacaggatcaactgacaagactgttaaattattcgatctacggaagctaagcaccgctcttcacacatttgatagccacaaagaggaggtttttcaagttggttggaacccaaagaacgagactattttagcttcatgttgccttggtagaagacttatggtttgggaccttagcaggatcgatgaggaacagacagtggaggacgcagaagacggcccacctgagctgctgtttattcacggtggtcacactagcaaaatttcagatttctcgtggaacccttgtgaagattgggttatttccagtgttgctgaggacaacatactccaaatatggcaaatggctgaaaacatctatcatgatgaggatgacgctccaggggaagaaccatcaaaagcttcttag

SEQ ID NO: 30281 - protein, 424 aa, Arabidopsis thaliana
  misc_feature (1)..(424): Ceres Seq. ID no. 4952334
MGKDEEEMRGEIEERLINEEYKIWKKNTPFLYDLVITHALEWPSLTVEWLPDREEPSGKDYSVQKMILGTHTSESEPNYLMLAQVQLPLDDTESEARQYDDDRSEFGGFGCATGKVQIIQQINHDGEVNRARYMPQNPFIIATKTVNAEVYVFDYSKHPSKPPLDGACNPDLKLRGHSSEGYGLSWSKFKQGHLLSGSDDAQICLWDINATPKNKSLDAQQIFKAHEGVVEDVAWHLRHEYLFGSVGDDQYLLIWDLRSPSASKPVQSVVAHSMEVNCLAFNPFNEWVVATGSTDKTVKLFDLRKLSTALHTFDSHKEEVFQVGWNPKNETILASCCLGRRLMVWDLSRIDEEQTVEDAEDGPPELLFIHGGHTSKISDFSWNPCEDWVISSVAEDNILQIWQMAENIYHDEDDAPGEEPSKAS

SEQ ID NO: 30282 - protein, 417 aa, Arabidopsis thaliana
  misc_feature (1)..(417): Ceres Seq. ID no. 4952335
MRGEIEERLINEEYKIWKKNTPFLYDLVITHALEWPSLTVEWLPDREEPSGKDYSVQKMILGTHTSESEPNYLMLAQVQLPLDDTESEARQYDDDRSEFGGFGCATGKVQIIQQINHDGEVNRARYMPQNPFIIATKTVNAEVYVFDYSKHPSKPPLDGACNPDLKLRGHSSEGYGLSWSKFKQGHLLSGSDDAQICLWDINATPKNKSLDAQQIFKAHEGVVEDVAWHLRHEYLFGSVGDDQYLLIWDLRSPSASKPVQSVVAHSMEVNCLAFNPFNEWVVATGSTDKTVKLFDLRKLSTALHTFDSHKEEVFQVGWNPKNETILASCCLGRRLMVWDLSRIDEEQTVEDAEDGPPELLFIHGGHTSKISDFSWNPCEDWVISSVAEDNILQIWQMAENIYHDEDDAPGEEPSKAS

SEQ ID NO: 30283 - protein, 359 aa, Arabidopsis thaliana
  misc_feature (1)..(359): Ceres Seq. ID no. 4952336
MILGTHTSESEPNYLMLAQVQLPLDDTESEARQYDDDRSEFGGFGCATGKVQIIQQINHDGEVNRARYMPQNPFIIATKTVNAEVYVFDYSKHPSKPPLDGACNPDLKLRGHSSEGYGLSWSKFKQGHLLSGSDDAQICLWDINATPKNKSLDAQQIFKAHEGVVEDVAWHLRHEYLFGSVGDDQYLLIWDLRSPSASKPVQSVVAHSMEVNCLAFNPFNEWVVATGSTDKTVKLFDLRKLSTALHTFDSHKEEVFQVGWNPKNETILASCCLGRRLMVWDLSRIDEEQTVEDAEDGPPELLFIHGGHTSKISDFSWNPCEDWVISSVAEDNILQIWQMAENIYHDEDDAPGEEPSKAS

SEQ ID NO: 30284 - DNA, 3924 bp, Arabidopsis thaliana
  misc_feature (1)..(3924): Ceres Seq. ID no. 4952351
atgaaatttcattttatcatgattggcaaaaaacacattgaactgaaaaaagtttcttctgtgtgtgttgcagtgttcgattgctgcttctctaccgattcatgggaagaagaaaactacaaagtttatatggcaggagtagtcaatcaactacaagagcatttccctgaagcatcttctcttgtgtttaatttccgtgaagtgggtactcgaagtgtgatggctgatgtcttatctgaacatggcttgactataatggattatcctcggcactacgaaggctgctcattgttacctgtggaagtgatgcatcattttctccggtcaagtgaaagttggctctcgcttgggccaaataacttgttactaatgcattgtgaaagtggggcttggcctgttttagcttttatgctagctgccctccttatatacaggaagcagtatagtggtgagtctaagactttggacatgatctacaagcaggctccgcgtgagcttctgcgtttgttctcgcccttgaacccaattccttctcagcttcgttatctacagtacgtgtcaagaaggaatttggtctctgaatggcctccattggatagggctctcaccatggattgtgttattttgagatttattcctgatgttagtggacaaggaggctttcgccctatgtttcgaatatatggtcaggatcccttttttgttgatgataaaaagcctaagcttttgtacactactcccaagaaagggaaacacctgagggtctacaagcaggcagaatgtgaactagtcaagattgacattaattgtcatgtgcaaggtgatatcgtgatcgagtgccttagtttgaacgatgacatggaaagagaggtcatgatgtttcgagtggtttttaacactgcttttattagatcaaacattttgatgcttaaccgtgatgaagtcgacacattatggcatataaaagaattcccaaaggggttcagagttgagcttctcttctcagatatggatgctgcctcttctgttgacttgatgaatttttcttccttggaagagaaagatggtcttccaatagaagttttttccaaagttcatgagttcttcaatcaagttgattgggttgatcagacagatgccacacgcaatatgtttcagcagttagccattgcaaatgctgtccaagaaggactagatggtaattcaagcccaagactacaagggttaagccctaaaagtatccatgatattatgaagcatgcagcaattgaaaatagtgcaaagttcaaattgtcttcaatgtccgaggttgaaacaatcgacacaccagaaaagcctcctactgattcagtcaagaagtttatagcagaagatgtacattctgtccttcagataaataatcaggaacaaaacgccagcgaggatgcaacaaagttgttacatcaagagtccccttctctcaagcttgtgcatcattctgcaacagttaaacctcttgtggacgattctaaatctccagaaaatgccgaggagaattttccgaagagtccttcagcacatgatgggaaagcaatctcgttttcgccacccacaccgtcaccacctcatcctgtaagaccgcagttggctcaagcgggagcacctcccccacctcctccacttccagctgctgcttctaaaccttcagagcaattgcagcattctgttgttcaagcaacagagcctctgtcacaaggaaattcctggatgtcattagcaggctctacgtttcaaacagttccaaacgaaaaaaatctcattacactgcctccaacacctccccttgcttctacatcccatgcctctcctgagccatcttctaaaacaacaaattcattgttactgtcacctcaagcatcaccagctactcccaccaacccatcaaaaactgtttcagtagatttttttggtgctgctacttcacctcatttaggagcttccgataatgtggcttcaaatcttggacaaccggcgaggtcacctcctccaatatctaattcagacaaaaagcctgctttgcctcgaccgcctcctccccctcctccccctccaatgcagcattccacagtaactaaagtcccccctccaccaccaccagcaccaccagcacccccaacaccaattgttcatacctcttctccccctcctcctcctcctcctcctcctccgcccgctcctccaacaccacaatctaatggaatctctgctatgaaaagttcacctcctgcaccacctgcacctccccggcttcccacccattctgcctctcctccccctccaaccgcgccacctccaccaccattaggtcaaactagggcaccatcagcaccaccccctcctcctccaaagttaggaaccaagttatccccatctggtcctaatgttcctccaacgcctgctttaccaactgggcctctttcatcgggaaaggggcgaatgttacgtgttaatttaaagaatagtccagccaaaaagttaaagccataccactggttgaaactgacaagagctgtcaatgggagcttatgggctgaaacacaaatgtctagtgaagcttctaagtatgcattgttcatcttgttgtcacttatttctctgatgcccccagattcttgcatgatttccaattcattgatactttacctccttgttagggctcctgacattgacatgacagagcttgaaagtcttttctccgcatcagctccagaacaagcaggaaaatcgagactagatagctctcgtggacctaaacccgagaaagtccaactgattgaacaccggcgagcctacaattgtgaaatcatgctttcaaaagtgaaagtacctttacaggatttgacgaactcagtgcttaacctggaggagtcggctcttgatgctgatcaggttgagaacctaattaagttttgcccaacaagagaagagatggagttactaaagggttatactggtgacaaggacaagcttggaaaatgcgaactgttcttcttagagatgatgaaagtcccacgagtagaaacaaagctcagggtattctcattcaaaatgcagtttacctctcaggtaaaaaattctgaaaaattcaaaagaataatgcagacgattttgtcacttgggaacgccctaaaccaagggactgctaggggtgctgcggttgggtttaaattggacagtttgccgaaactcagtgaaacacgggcacgtaataaccgaatgactctgatgcattatctatgcaaggtaagcttttatagtctgcgcttctgtagctttgtggatgtactagaggaagaaagatatagtctgatggattctttacagattcttgctgaaaaaatcccagaagttttggattttacaaaagaattatcctcgttggagccggcaacaaagattcaactgaagtttctggccgaggagatgcaagctataaacaagggacttgagaaagtcgtacaggaactttccttgtccgaaaatgatggcccgatttcccataactttaacaagatattgaaggagttccttcattatgcggaagcagaagtaaggtcattggcttcactttattcgggagtgggaagaaacgtggatggtttaattctctattttggtgaagaccctgccaagtgcccttttgaacaagtagtgtcgactcttctaaactttgtaagactgttcaatcgtgcacatgaagaaaacggaaaacaactcgaggcagaagctaagaagaatgctgctgaaaaggagaaaccaaaaacaggtggattagatacagaaatcaagaagcccttaaatgaagaagttaaggaggagaaaacaaaaacaagtggattaggtaaagaaatgagtgaccgactaaaggaaagaaccgctccttga

SEQ ID NO: 30285 - protein, 1307 aa, Arabidopsis thaliana
  misc_feature (1)..(1307): Ceres Seq. ID no. 4952352
MKFHFIMIGKKHIELKKVSSVCVAVFDCCFSTDSWEEENYKVYMAGVVNQLQEHFPEASSLVFNFREVGTRSVMADVLSEHGLTIMDYPRHYEGCSLLPVEVMHHFLRSSESWLSLGPNNLLLMHCESGAWPVLAFMLAALLIYRKQYSGESKTLDMIYKQAPRELLRLFSPLNPIPSQLRYLQYVSRRNLVSEWPPLDRALTMDCVILRFIPDVSGQGGFRPMFRIYGQDPFFVDDKKPKLLYTTPKKGKHLRVYKQAECELVKIDINCHVQGDIVIECLSLNDDMEREVMMFRVVFNTAFIRSNILMLNRDEVDTLWHIKEFPKGFRVELLFSDMDAASSVDLMNFSSLEEKDGLPIEVFSKVHEFFNQVDWVDQTDATRNMFQQLAIANAVQEGLDGNSSPRLQGLSPKSIHDIMKHAAIENSAKFKLSSMSEVETIDTPEKPPTDSVKKFIAEDVHSVLQINNQEQNASEDATKLLHQESPSLKLVHHSATVKPLVDDSKSPENAEENFPKSPSAHDGKAISFSPPTPSPPHPVRPQLAQAGAPPPPPPLPAAASKPSEQLQHSVVQATEPLSQGNSWMSLAGSTFQTVPNEKNLITLPPTPPLASTSHASPEPSSKTTNSLLLSPQASPATPTNPSKTVSVDFFGAATSPHLGASDNVASNLGQPARSPPPISNSDKKPALPRPPPPPPPPPMQHSTVTKVPPPPPPAPPAPPTPIVHTSSPPPPPPPPPPPAPPTPQSNGISAMKSSPPAPPAPPRLPTHSASPPPPTAPPPPPLGQTRAPSAPPPPPPKLGTKLSPSGPNVPPTPALPTGPLSSGKGRMLRVNLKNSPAKKLKPYHWLKLTRAVNGSLWAETQMSSEASKYALFILLSLISLMPPDSCMISNSLILYLLVRAPDIDMTELESLFSASAPEQAGKSRLDSSRGPKPEKVQLIEHRRAYNCEIMLSKVKVPLQDLTNSVLNLEESALDADQVENLIKFCPTREEMELLKGYTGDKDKLGKCELFFLEMMKVPRVETKLRVFSFKMQFTSQVKNSEKFKRIMQTILSLGNALNQGTARGAAVGFKLDSLPKLSETRARNNRMTLMHYLCKVSFYSLRFCSFVDVLEEERYSLMDSLQILAEKIPEVLDFTKELSSLEPATKIQLKFLAEEMQAINKGLEKVVQELSLSENDGPISHNFNKILKEFLHYAEAEVRSLASLYSGVGRNVDGLILYFGEDPAKCPFEQVVSTLLNFVRLFNRAHEENGKQLEAEAKKNAAEKEKPKTGGLDTEIKKPLNEEVKEEKTKTSGLGKEMSDRLKERTAP

SEQ ID NO: 30286 - protein, 1301 aa, Arabidopsis thaliana
  misc_feature (1)..(1301): Ceres Seq. ID no. 4952353
MIGKKHIELKKVSSVCVAVFDCCFSTDSWEEENYKVYMAGVVNQLQEHFPEASSLVFNFREVGTRSVMADVLSEHGLTIMDYPRHYEGCSLLPVEVMHHFLRSSESWLSLGPNNLLLMHCESGAWPVLAFMLAALLIYRKQYSGESKTLDMIYKQAPRELLRLFSPLNPIPSQLRYLQYVSRRNLVSEWPPLDRALTMDCVILRFIPDVSGQGGFRPMFRIYGQDPFFVDDKKPKLLYTTPKKGKHLRVYKQAECELVKIDINCHVQGDIVIECLSLNDDMEREVMMFRVVFNTAFIRSNILMLNRDEVDTLWHIKEFPKGFRVELLFSDMDAASSVDLMNFSSLEEKDGLPIEVFSKVHEFFNQVDWVDQTDATRNMFQQLAIANAVQEGLDGNSSPRLQGLSPKSIHDIMKHAAIENSAKFKLSSMSEVETIDTPEKPPTDSVKKFIAEDVHSVLQINNQEQNASEDATKLLHQESPSLKLVHHSATVKPLVDDSKSPENAEENFPKSPSAHDGKAISFSPPTPSPPHPVRPQLAQAGAPPPPPPLPAAASKPSEQLQHSVVQATEPLSQGNSWMSLAGSTFQTVPNEKNLITLPPTPPLASTSHASPEPSSKTTNSLLLSPQASPATPTNPSKTVSVDFFGAATSPHLGASDNVASNLGQPARSPPPISNSDKKPALPRPPPPPPPPPMQHSTVTKVPPPPPPAPPAPPTPIVHTSSPPPPPPPPPPPAPPTPQSNGISAMKSSPPAPPAPPRLPTHSASPPPPTAPPPPPLGQTRAPSAPPPPPPKLGTKLSPSGPNVPPTPALPTGPLSSGKGRMLRVNLKNSPAKKLKPYHWLKLTRAVNGSLWAETQMSSEASKYALFILLSLISLMPPDSCMISNSLILYLLVRAPDIDMTELESLFSASAPEQAGKSRLDSSRGPKPEKVQLIEHRRAYNCEIMLSKVKVPLQDLTNSVLNLEESALDADQVENLIKFCPTREEMELLKGYTGDKDKLGKCELFFLEMMKVPRVETKLRVFSFKMQFTSQVKNSEKFKRIMQTILSLGNALNQGTARGAAVGFKLDSLPKLSETRARNNRMTLMHYLCKVSFYSLRFCSFVDVLEEERYSLMDSLQILAEKIPEVLDFTKELSSLEPATKIQLKFLAEEMQAINKGLEKVVQELSLSENDGPISHNFNKILKEFLHYAEAEVRSLASLYSGVGRNVDGLILYFGEDPAKCPFEQVVSTLLNFVRLFNRAHEENGKQLEAEAKKNAAEKEKPKTGGLDTEIKKPLNEEVKEEKTKTSGLGKEMSDRLKERTAP

SEQ ID NO: 30287 - protein, 1264 aa, Arabidopsis thaliana
  misc_feature (1)..(1264): Ceres Seq. ID no. 4952354
MAGVVNQLQEHFPEASSLVFNFREVGTRSVMADVLSEHGLTIMDYPRHYEGCSLLPVEVMHHFLRSSESWLSLGPNNLLLMHCESGAWPVLAFMLAALLIYRKQYSGESKTLDMIYKQAPRELLRLFSPLNPIPSQLRYLQYVSRRNLVSEWPPLDRALTMDCVILRFIPDVSGQGGFRPMFRIYGQDPFFVDDKKPKLLYTTPKKGKHLRVYKQAECELVKIDINCHVQGDIVIECLSLNDDMEREVMMFRVVFNTAFIRSNILMLNRDEVDTLWHIKEFPKGFRVELLFSDMDAASSVDLMNFSSLEEKDGLPIEVFSKVHEFFNQVDWVDQTDATRNMFQQLAIANAVQEGLDGNSSPRLQGLSPKSIHDIMKHAAIENSAKFKLSSMSEVETIDTPEKPPTDSVKKFIAEDVHSVLQINNQEQNASEDATKLLHQESPSLKLVHHSATVKPLVDDSKSPENAEENFPKSPSAHDGKAISFSPPTPSPPHPVRPQLAQAGAPPPPPPLPAAASKPSEQLQHSVVQATEPLSQGNSWMSLAGSTFQTVPNEKNLITLPPTPPLASTSHASPEPSSKTTNSLLLSPQASPATPTNPSKTVSVDFFGAATSPHLGASDNVASNLGQPARSPPPISNSDKKPALPRPPPPPPPPPMQHSTVTKVPPPPPPAPPAPPTPIVHTSSPPPPPPPPPPPAPPTPQSNGISAMKSSPPAPPAPPRLPTHSASPPPPTAPPPPPLGQTRAPSAPPPPPPKLGTKLSPSGPNVPPTPALPTGPLSSGKGRMLRVNLKNSPAKKLKPYHWLKLTRAVNGSLWAETQMSSEASKYALFILLSLISLMPPDSCMISNSLILYLLVRAPDIDMTELESLFSASAPEQAGKSRLDSSRGPKPEKVQLIEHRRAYNCEIMLSKVKVPLQDLTNSVLNLEESALDADQVENLIKFCPTREEMELLKGYTGDKDKLGKCELFFLEMMKVPRVETKLRVFSFKMQFTSQVKNSEKFKRIMQTILSLGNALNQGTARGAAVGFKLDSLPKLSETRARNNRMTLMHYLCKVSFYSLRFCSFVDVLEEERYSLMDSLQILAEKIPEVLDFTKELSSLEPATKIQLKFLAEEMQAINKGLEKVVQELSLSENDGPISHNFNKILKEFLHYAEAEVRSLASLYSGVGRNVDGLILYFGEDPAKCPFEQVVSTLLNFVRLFNRAHEENGKQLEAEAKKNAAEKEKPKTGGLDTEIKKPLNEEVKEEKTKTSGLGKEMSDRLKERTAP

SEQ ID NO: 30288 - DNA, 1082 bp, Arabidopsis thaliana
  misc_feature (1)..(1082): Ceres Seq. ID no. 4952511
tctctctctctctctctctctctctctctctctctctctcttgtattatttctatctcccccgccgtcgaaagagaaacgtcgatcggagaacctttgaaatgtcgactggattagatatgtctctcgacgacatgatcgccaagaaccgtaagtctcgtggtggagccggccccgctcgtggaaccggatccggatccggaccgggtccgactcgccgcaacaaccctaatcggaaatcaacccgatctgctccataccaatcagccaaggcgccggagtccacctggggtcacgacatgttctccgatagatctgaagatcaccgatcgggacgttcctccgccggaatcgaaactggaaccaagctctacatttccaatttggattacggtgtcatgaacgaagacatcaaggaactgtttgctgaagttggagaacttaaacgctacacagttcattttgatagaagtggaagatcaaagggaactgctgaagtagtgtattctcggcgtggcgatgcactcgcagctgtgaagaagtataatgatgttcagctggatggaaaacccatgaagatagagattgtgggcactaatcttcaaactgctgcagccccgtctggtagacctgcgaatggaaactccaatggtgctccatggagaggaggacaagggagaggaggtcaacaacgaggtggtggacgaggaggcggtggccgaggtggtggtggtcgtggtaggcgtcctggtaagggccctgcagagaagatttctgcggaagatcttgatgcggatcttgataagtaccattctggagatatggagacaaactaaggaacgtgactgatcttctcaaaccggtaggggttttaggaggaagagaatcgagaaaatgtttgccagaggctttaccacttagcgcctttttggctgtgttgttcatttgtttcattagaatgactttacagaattgagaatatgtgttatttaaagttgttgtctatcttaataccctcaagtgaaaggcagaggaaggaataccaatttcgtttacagatcatatgcaggcaaaagagttttc

SEQ ID NO: 30289 - protein, 277 aa, Arabidopsis thaliana
  misc_feature (1)..(277): Ceres Seq. ID no. 4952512
LSLSLSLSLSLSLLYYFYLPRRRKRNVDRRTFEMSTGLDMSLDDMIAKNRKSRGGAGPARGTGSGSGPGPTRRNNPNRKSTRSAPYQSAKAPESTWGHDMFSDRSEDHRSGRSSAGIETGTKLYISNLDYGVMNEDIKELFAEVGELKRYTVHFDRSGRSKGTAEVVYSRRGDALAAVKKYNDVQLDGKPMKIEIVGTNLQTAAAPSGRPANGNSNGAPWRGGQGRGGQQRGGGRGGGGRGGGGRGRRPGKGPAEKISAEDLDADLDKYHSGDMETN

SEQ ID NO: 30290 - protein, 244 aa, Arabidopsis thaliana
  misc_feature (1)..(244): Ceres Seq. ID no. 4952513
MSTGLDMSLDDMIAKNRKSRGGAGPARGTGSGSGPGPTRRNNPNRKSTRSAPYQSAKAPESTWGHDMFSDRSEDHRSGRSSAGIETGTKLYISNLDYGVMNEDIKELFAEVGELKRYTVHFDRSGRSKGTAEVVYSRRGDALAAVKKYNDVQLDGKPMKIEIVGTNLQTAAAPSGRPANGNSNGAPWRGGQGRGGQQRGGGRGGGGRGGGGRGRRPGKGPAEKISAEDLDADLDKYHSGDMETN

SEQ ID NO: 30291 - protein, 238 aa, Arabidopsis thaliana
  misc_feature (1)..(238): Ceres Seq. ID no. 4952514
MSLDDMIAKNRKSRGGAGPARGTGSGSGPGPTRRNNPNRKSTRSAPYQSAKAPESTWGHDMFSDRSEDHRSGRSSAGIETGTKLYISNLDYGVMNEDIKELFAEVGELKRYTVHFDRSGRSKGTAEVVYSRRGDALAAVKKYNDVQLDGKPMKIEIVGTNLQTAAAPSGRPANGNSNGAPWRGGQGRGGQQRGGGRGGGGRGGGGRGRRPGKGPAEKISAEDLDADLDKYHSGDMETN

SEQ ID NO: 30292 - DNA, 600 bp, Arabidopsis thaliana
  misc_feature (1)..(600): Ceres Seq. ID no. 4952626
atggccacacaaagttgttacgtcactcgaaatcttaaatccgccgtcaaaaatgctattcagacgaagcagccaccaaccactactcgagccgccgtagatccagattccttaacagtagatgtcgccgtttgtgaagttttatctcttcagttacaattttctccaagcttctgcatggttcatcagatttgtgttgttgttctccgcagggcgatttcgcttctgattattcttaacagctttttatcgaacaagacgatcatttctgcttacgcttctgctggattcctgattagtctgtttcaaactgctgctattcttgaagttcttcatggagctattggaattgtcccgagtggattcttgtctccactgatgcaatggagtggaagaactcacttcatattggctattgttggacagatcaaggaggattcgccgtggctgtctataacacttgtggcttggtgtatcggtgaggccgtcctcttggtctacccattcctttggttgaagctttatctccagcttttcaaacaaagaaagtctaagcttggaaaatcgaagaagcttcacggcaagagaaagagaatgtga

SEQ ID NO: 30293 - protein, 199 aa, Arabidopsis thaliana
  misc_feature (1)..(199): Ceres Seq. ID no. 4952627
MATQSCYVTRNLKSAVKNAIQTKQPPTTTRAAVDPDSLTVDVAVCEVLSLQLQFSPSFCMVHQICVVVLRRAISLLIILNSFLSNKTIISAYASAGFLISLFQTAAILEVLHGAIGIVPSGFLSPLMQWSGRTHFILAIVGQIKEDSPWLSITLVAWCIGEAVLLVYPFLWLKLYLQLFKQRKSKLGKSKKLHGKRKRM

SEQ ID NO: 30294 - protein, 140 aa, Arabidopsis thaliana
  misc_feature (1)..(140): Ceres Seq. ID no. 4952628
MVHQICVVVLRRAISLLIILNSFLSNKTIISAYASAGFLISLFQTAAILEVLHGAIGIVPSGFLSPLMQWSGRTHFILAIVGQIKEDSPWLSITLVAWCIGEAVLLVYPFLWLKLYLQLFKQRKSKLGKSKKLHGKRKRM

SEQ ID NO: 30295 - DNA, 921 bp, Arabidopsis thaliana
  misc_feature (1)..(921): Ceres Seq. ID no. 4952838
atgaagttaatttcaccagaggaagtaaaaaaacttgcatgtggaggcagtaccagtaaaccaacttttagagtaccaagacctgtttcagctcgtcctccaatgggtttaacaaaaccaactgctggctttccaagagctaggagtctaaattctacagtggtggctcgcaaaaccaaatcaatttaccttccacctaaaaaggttgagcctcttagtcctcgtactcaacagattcgtccaggggtcatgagacaagcttctaaagcacaagcagtaggagaagggtcaaaatcaaaagttggcgatggagctaaatatcatgattccaacgagatatgccgatcaattttatcagagaaattgttgcaattacttccatatcgaccagctttgcaccccatttggaagggacgcatagtggattctgctacaccatctgagtttaatggcgagttcttagctcaaccggcatctaaagtccgagggaaggcttatatactttcaaaagctattcctgtcttactcaaggtcaaattggttcctataggcaatcttctgagtggtttgtttatgaacagaaaaccagggctttcagatgtcgagatgtacattttcccagatgacaagaacacaaaaaggtttacagcggaacgtgatcatatctttgaggccatgaggattcgcaatgccatgatgaaatttaacatcaatggcacaccattgttgatattctcttcaaaactactggacaagtcctcccagattatcatcaagatgcagaagaaaacaaataacttcctttgggggatttttctcctgacgaaaaagtctttagcacttcttccaggaacatcgaatcaaactccccaacattttgatgatggatatgtagttgacaatgacactgaagtaggctaa

SEQ ID NO: 30296 - protein, 306 aa, Arabidopsis thaliana
  misc_feature (1)..(306): Ceres Seq. ID no. 4952839
MKLISPEEVKKLACGGSTSKPTFRVPRPVSARPPMGLTKPTAGFPRARSLNSTVVARKTKSIYLPPKKVEPLSPRTQQIRPGVMRQASKAQAVGEGSKSKVGDGAKYHDSNEICRSILSEKLLQLLPYRPALHPIWKGRIVDSATPSEFNGEFLAQPASKVRGKAYILSKAIPVLLKVKLVPIGNLLSGLFMNRKPGLSDVEMYIFPDDKNTKRFTAERDHIFEAMRIRNAMMKFNINGTPLLIFSSKLLDKSSQIIIKMQKKTNNFLWGIFLLTKKSLALLPGTSNQTPQHFDDGYVVDNDTEVG

SEQ ID NO: 30297 - protein, 272 aa, Arabidopsis thaliana
  misc_feature (1)..(272): Ceres Seq. ID no. 4952840
MGLTKPTAGFPRARSLNSTVVARKTKSIYLPPKKVEPLSPRTQQIRPGVMRQASKAQAVGEGSKSKVGDGAKYHDSNEICRSILSEKLLQLLPYRPALHPIWKGRIVDSATPSEFNGEFLAQPASKVRGKAYILSKAIPVLLKVKLVPIGNLLSGLFMNRKPGLSDVEMYIFPDDKNTKRFTAERDHIFEAMRIRNAMMKFNINGTPLLIFSSKLLDKSSQIIIKMQKKTNNFLWGIFLLTKKSLALLPGTSNQTPQHFDDGYVVDNDTEVG

SEQ ID NO: 30298 - protein, 223 aa, Arabidopsis thaliana
  misc_feature (1)..(223): Ceres Seq. ID no. 4952841
MRQASKAQAVGEGSKSKVGDGAKYHDSNEICRSILSEKLLQLLPYRPALHPIWKGRIVDSATPSEFNGEFLAQPASKVRGKAYILSKAIPVLLKVKLVPIGNLLSGLFMNRKPGLSDVEMYIFPDDKNTKRFTAERDHIFEAMRIRNAMMKFNINGTPLLIFSSKLLDKSSQIIIKMQKKTNNFLWGIFLLTKKSLALLPGTSNQTPQHFDDGYVVDNDTEVG

SEQ ID NO: 30299 - DNA, 1326 bp, Arabidopsis thaliana
  misc_feature (1)..(1326): Ceres Seq. ID no. 4952954
atggaggagaaaggtgaaataagtccaagtggggtcgtcacagttaagggagatgaagctttggttccaagaacagagtttcaacaaaaccctagttttctccaattcgtgagtcccacaacggtagtgactcctctccctcctccaccagctccgtcttcggctccggtaccaaccaccgtgactcctggctcagccacagcatcaaccggatcagatccgacgaaaaagaagagaggaagaccgaggaagtacgcaccagacggaagcctgaaccctaggtttttgcgaccaactctgtctccaactccaatctcatcttcgattccattgtctggagattatcaatggaaacgaggcaaagctcagcagcagcatcagcctcttgagttcgtcaagaaatctcacaaattcgagtatggaagcccagatgttgggaagtgggaccaacataactggattttgctgggtacacttttgtctgaagaagctattacactcagaccaactaatgcaaactctgttttactatctcttgcagctcctactcctcctcttcctgggctctcatgctatgtgggtgcaaattttacgacccatcaatttactgtcaatggcggtgaggatgtgacaatgaaggttatgccgtattcgcaacaaggatctcgagctatctgcattctttctgcaactggttcgatctctaatgtcactcttggtcaacctaccaatgcaggtggcactcttacatatgagggtcggtttgagatactatcgctatctggttcctttatgcctactgaaaatggaggaacaaaaggtcgggctggtgggatgagcatttctttagccggaccaaatggcaatatatttggtggtggccttgccggtatgcttatagcagctggtcctgttcaggtggtaatgggaagtttcattgtgatgcatcaagcagaacaaaatcagaagaagaaacctagagttatggaggcttttgctccaccacaaccacaagcaccaccacaactgcaacaacaacaacctcctacttttaccataacaaccgtgaattcaacttctccttcggtgaacaccgtagaggagcagaaaccacaagcttatggtggtggtatagtgagaccgatggctcaaatgccttcttctttccaaaacgacaattcaactatgaacaatttcacaccggcctatcatggatacgggaatatgaacactggtactactcacaaagaagaacatgaagacgaagatggtggtgatgatgatgatgattcaggcgatactaggagccaatctcatagtggttga

SEQ ID NO: 30300 - protein, 441 aa, Arabidopsis thaliana
  misc_feature (1)..(441): Ceres Seq. ID no. 4952955
MEEKGEISPSGVVTVKGDEALVPRTEFQQNPSFLQFVSPTTVVTPLPPPPAPSSAPVPTTVTPGSATASTGSDPTKKKRGRPRKYAPDGSLNPRFLRPTLSPTPISSSIPLSGDYQWKRGKAQQQHQPLEFVKKSHKFEYGSPDVGKWDQHNWILLGTLLSEEAITLRPTNANSVLLSLAAPTPPLPGLSCYVGANFTTHQFTVNGGEDVTMKVMPYSQQGSRAICILSATGSISNVTLGQPTNAGGTLTYEGRFEILSLSGSFMPTENGGTKGRAGGMSISLAGPNGNIFGGGLAGMLIAAGPVQVVMGSFIVMHQAEQNQKKKPRVMEAFAPPQPQAPPQLQQQQPPTFTITTVNSTSPSVNTVEEQKPQAYGGGIVRPMAQMPSSFQNDNSTMNNFTPAYHGYGNMNTGTTHKEEHEDEDGGDDDDDSGDTRSQSHSG

SEQ ID NO: 30301 - protein, 230 aa, Arabidopsis thaliana
  misc_feature (1)..(230): Ceres Seq. ID no. 4952956
MKVMPYSQQGSRAICILSATGSISNVTLGQPTNAGGTLTYEGRFEILSLSGSFMPTENGGTKGRAGGMSISLAGPNGNIFGGGLAGMLIAAGPVQVVMGSFIVMHQAEQNQKKKPRVMEAFAPPQPQAPPQLQQQQPPTFTITTVNSTSPSVNTVEEQKPQAYGGGIVRPMAQMPSSFQNDNSTMNNFTPAYHGYGNMNTGTTHKEEHEDEDGGDDDDDSGDTRSQSHSG

SEQ ID NO: 30302 - protein, 227 aa, Arabidopsis thaliana
  misc_feature (1)..(227): Ceres Seq. ID no. 4952957
MPYSQQGSRAICILSATGSISNVTLGQPTNAGGTLTYEGRFEILSLSGSFMPTENGGTKGRAGGMSISLAGPNGNIFGGGLAGMLIAAGPVQVVMGSFIVMHQAEQNQKKKPRVMEAFAPPQPQAPPQLQQQQPPTFTITTVNSTSPSVNTVEEQKPQAYGGGIVRPMAQMPSSFQNDNSTMNNFTPAYHGYGNMNTGTTHKEEHEDEDGGDDDDDSGDTRSQSHSG

SEQ ID NO: 30303 - DNA, 1770 bp, Arabidopsis thaliana
  misc_feature (1)..(1770): Ceres Seq. ID no. 4953063
atgtccacaaactatactgccattaatcatatacttcactttcattctccaaacagctgtttcttgatgatcatgtctctggagtttgaacaaatggatgaagcaaacaggttaagcgcgtggaatggttacgtagactggcgaagtagacctgcgttgcgtggccgccatggcggtatgcttgctgcctcgttcgtcttggttgtggaagtgttggagaaccttgcgtttttagcaaacgcgagcaacctagtgctgtatttgtcaacaaagatgggattttcgccgtccggagccgcaaatgccgtaaccgcttttatgggaacggcatttttcttggcccttctcggagggtttttggcagacgccttcttcactactttccatatctatttagtcagcgccgccatagaattcttgggcttgatggtactgacggtccaagcccacgagcactctaccgagccatggtctcgtgtatttctatttgtgggtctatatttagtagctcttggtgtcggaggaataaaaggctcgttgccaccgcacggagcggaacagttcgacgaagaaacatcgagtgggaggagacaaagatctttcttctttaactacttcatatttagcctctcgtgcggtgccttgatagccgtcacggtcgtggtctggctcgaagacaacaaaggctggtcttatggcttcggtgtctccacagccgcgatcctgatctcggtcccggttttcttggccggttctcgcgtttatcgcctcaaggttcctagtggaagtccaatcacgactctgttcaaagtgttaaccgctgctttatacgctaaatataagaaaagaagaacttcaagaattgttgtaacgtgtcacacaagaaatgattgtgatgacagcgtaaccaaacaaaactgtgacggagatgatggatttctcggatctttcctaggtgaagttgtgagagagcgtgaatcactaccacgtccactccgttgtacggaagagcaagtcaaagatgtgaagatagtcatcaagatcctacctattttcatgtctaccattatgcttaactgttgtctagctcagctctcgacgttttccgttcaacaagcttccacaatgaacacaaagctcgggtcctttactgtcccacccgcggcattaccagtttttccagtggtcttcatgatgatcttagctccgacctataaccacctcctcctccctctagcgagaaaatcaacaaaaaccgaaaccggcataacccaccttcaacgcatcggaacagggctagtcctttccatagtcgcaatggcggtggcagccttagtggaaacaaaacgcaagcacgtcgttgttagttgctgctcaaacaacaactcatcttcttattcttcttcgccgcttcctataacgtttctttgggtggctattcaatatgtgtttctcggatcagccgatctattcactctagccggtatgatggagtttttcttcaccgaagctccttctaccatgcgttcccttgcaacctcgctctcatgggcgtctcttgcgatgggatattactttagctctgttctcgtctcggctgttaatttcgtaacaggcttaaaccatcacaatccatggcttttgggggagaatctaaatcagtaccatctcgagagattctactggctcatgtgtgtgcttagtgggattaatttcttgcattatctcttttgggctagtcgttatgtgtaccggtcgaaccaagggtaa

SEQ ID NO: 30304 - protein, 589 aa, Arabidopsis thaliana
  misc_feature (1)..(589): Ceres Seq. ID no. 4953064
MSTNYTAINHILHFHSPNSCFLMIMSLEFEQMDEANRLSAWNGYVDWRSRPALRGRHGGMLAASFVLVVEVLENLAFLANASNLVLYLSTKMGFSPSGAANAVTAFMGTAFFLALLGGFLADAFFTTFHIYLVSAAIEFLGLMVLTVQAHEHSTEPWSRVFLFVGLYLVALGVGGIKGSLPPHGAEQFDEETSSGRRQRSFFFNYFIFSLSCGALIAVTVVVWLEDNKGWSYGFGVSTAAILISVPVFLAGSRVYRLKVPSGSPITTLFKVLTAALYAKYKKRRTSRIVVTCHTRNDCDDSVTKQNCDGDDGFLGSFLGEVVRERESLPRPLRCTEEQVKDVKIVIKILPIFMSTIMLNCCLAQLSTFSVQQASTMNTKLGSFTVPPAALPVFPVVFMMILAPTYNHLLLPLARKSTKTETGITHLQRIGTGLVLSIVAMAVAALVETKRKHVVVSCCSNNNSSSYSSSPLPITFLWVAIQYVFLGSADLFTLAGMMEFFFTEAPSTMRSLATSLSWASLAMGYYFSSVLVSAVNFVTGLNHHNPWLLGENLNQYHLERFYWLMCVLSGINFLHYLFWASRYVYRSNQG

SEQ ID NO: 30305 - protein, 567 aa, Arabidopsis thaliana
  misc_feature (1)..(567): Ceres Seq. ID no. 4953065
MIMSLEFEQMDEANRLSAWNGYVDWRSRPALRGRHGGMLAASFVLVVEVLENLAFLANASNLVLYLSTKMGFSPSGAANAVTAFMGTAFFLALLGGFLADAFFTTFHIYLVSAAIEFLGLMVLTVQAHEHSTEPWSRVFLFVGLYLVALGVGGIKGSLPPHGAEQFDEETSSGRRQRSFFFNYFIFSLSCGALIAVTVVVWLEDNKGWSYGFGVSTAAILISVPVFLAGSRVYRLKVPSGSPITTLFKVLTAALYAKYKKRRTSRIVVTCHTRNDCDDSVTKQNCDGDDGFLGSFLGEVVRERESLPRPLRCTEEQVKDVKIVIKILPIFMSTIMLNCCLAQLSTFSVQQASTMNTKLGSFTVPPAALPVFPVVFMMILAPTYNHLLLPLARKSTKTETGITHLQRIGTGLVLSIVAMAVAALVETKRKHVVVSCCSNNNSSSYSSSPLPITFLWVAIQYVFLGSADLFTLAGMMEFFFTEAPSTMRSLATSLSWASLAMGYYFSSVLVSAVNFVTGLNHHNPWLLGENLNQYHLERFYWLMCVLSGINFLHYLFWASRYVYRSNQG

SEQ ID NO: 30306 - protein, 565 aa, Arabidopsis thaliana
  misc_feature (1)..(565): Ceres Seq. ID no. 4953066
MSLEFEQMDEANRLSAWNGYVDWRSRPALRGRHGGMLAASFVLVVEVLENLAFLANASNLVLYLSTKMGFSPSGAANAVTAFMGTAFFLALLGGFLADAFFTTFHIYLVSAAIEFLGLMVLTVQAHEHSTEPWSRVFLFVGLYLVALGVGGIKGSLPPHGAEQFDEETSSGRRQRSFFFNYFIFSLSCGALIAVTVVVWLEDNKGWSYGFGVSTAAILISVPVFLAGSRVYRLKVPSGSPITTLFKVLTAALYAKYKKRRTSRIVVTCHTRNDCDDSVTKQNCDGDDGFLGSFLGEVVRERESLPRPLRCTEEQVKDVKIVIKILPIFMSTIMLNCCLAQLSTFSVQQASTMNTKLGSFTVPPAALPVFPVVFMMILAPTYNHLLLPLARKSTKTETGITHLQRIGTGLVLSIVAMAVAALVETKRKHVVVSCCSNNNSSSYSSSPLPITFLWVAIQYVFLGSADLFTLAGMMEFFFTEAPSTMRSLATSLSWASLAMGYYFSSVLVSAVNFVTGLNHHNPWLLGENLNQYHLERFYWLMCVLSGINFLHYLFWASRYVYRSNQG

SEQ ID NO: 30307 - DNA, 1032 bp, Arabidopsis thaliana
  misc_feature (1)..(1032): Ceres Seq. ID no. 4953346
atgagagataatgtaaacgatgaattgaagcaagttcgatctgatgatcaaacgaaaaggaagatgctcgaaattttgaaaaggtttcacgaagaagaagaggaagatgatgggggaattgatagcatcacggatgatgaaggtttgagcttaccggaggagattattcagaagataatgaacggagatgaagtgagtcttgatgatttgagcttagaagagagaaaaggattccaaagagccttagcttctggagaattaagcaaaatgatccaaccatgggatccttggtggttacttgcttcagctcgaacgatcaatcttggactcggaggtacacaacttgttcaatgcgttgaagacgaagaagagaccacagttgtgagtgaaatcccacgagggcctgatacacctttgatctcactaagcaagcttacctccacgaatccatctcctctcttaccaatccatttgattgacattgcatatagttattgctttacgctccgtatctataatggagagtggcaatctgattcgcttggtgcagcaacaatggtgttgactgtttcatcagttttgggtcacaatggacaaccagagaccataaaggaagtgttgtccttttgcttggaacagacatgctcttcagcttataaaaaccttggtggtggtctgaagttcggattgaatctggtggatgatgtgatttgttttctttctcttggctctggagctatggtatgtctgctcggtgatctccaaaggttgattcttggtgcaataaaggaagtaaaatcatcatcagggcgtgatctgaagaagaaactaaagcttgcagagaggaaagtgttctacatgatgtgttgggtcaatgagcagaattctgaagtatgggaagctctggaaccatctgtaagggcagagaagaactcggtggttgagctcaacgattacagagggtttccagaaatgaagaagaaagatcaatttcgaaaaggtggtggcgtggtgattgaggagatagaatga

SEQ ID NO: 30308 - protein, 343 aa, Arabidopsis thaliana
  misc_feature (1)..(343): Ceres Seq. ID no. 4953347
MRDNVNDELKQVRSDDQTKRKMLEILKRFHEEEEEDDGGIDSITDDEGLSLPEEIIQKIMNGDEVSLDDLSLEERKGFQRALASGELSKMIQPWDPWWLLASARTINLGLGGTQLVQCVEDEEETTVVSEIPRGPDTPLISLSKLTSTNPSPLLPIHLIDIAYSYCFTLRIYNGEWQSDSLGAATMVLTVSSVLGHNGQPETIKEVLSFCLEQTCSSAYKNLGGGLKFGLNLVDDVICFLSLGSGAMVCLLGDLQRLILGAIKEVKSSSGRDLKKKLKLAERKVFYMMCWVNEQNSEVWEALEPSVRAEKNSVVELNDYRGFPEMKKKDQFRKGGGVVIEEIE

SEQ ID NO: 30309 - protein, 322 aa, Arabidopsis thaliana
  misc_feature (1)..(322): Ceres Seq. ID no. 4953348
MLEILKRFHEEEEEDDGGIDSITDDEGLSLPEEIIQKIMNGDEVSLDDLSLEERKGFQRALASGELSKMIQPWDPWWLLASARTINLGLGGTQLVQCVEDEEETTVVSEIPRGPDTPLISLSKLTSTNPSPLLPIHLIDIAYSYCFTLRIYNGEWQSDSLGAATMVLTVSSVLGHNGQPETIKEVLSFCLEQTCSSAYKNLGGGLKFGLNLVDDVICFLSLGSGAMVCLLGDLQRLILGAIKEVKSSSGRDLKKKLKLAERKVFYMMCWVNEQNSEVWEALEPSVRAEKNSVVELNDYRGFPEMKKKDQFRKGGGVVIEEIE

SEQ ID NO: 30310 - protein, 284 aa, Arabidopsis thaliana
  misc_feature (1)..(284): Ceres Seq. ID no. 4953349
MNGDEVSLDDLSLEERKGFQRALASGELSKMIQPWDPWWLLASARTINLGLGGTQLVQCVEDEEETTVVSEIPRGPDTPLISLSKLTSTNPSPLLPIHLIDIAYSYCFTLRIYNGEWQSDSLGAATMVLTVSSVLGHNGQPETIKEVLSFCLEQTCSSAYKNLGGGLKFGLNLVDDVICFLSLGSGAMVCLLGDLQRLILGAIKEVKSSSGRDLKKKLKLAERKVFYMMCWVNEQNSEVWEALEPSVRAEKNSVVELNDYRGFPEMKKKDQFRKGGGVVIEEIE

SEQ ID NO: 30311 - DNA, 1221 bp, Arabidopsis thaliana
  misc_feature (1)..(1221): Ceres Seq. ID no. 4953444
atgatgccggagaagacgattatttcgtcggagagttcaaattcgtctccgttaaacccttcttctacgcggattatctgccatgtatgtaataagcagttctcgcagtacacttgtcctcgctgcaacttccggtactgttcccttccttgttacaaatctcacagtgtccaatgtactgaatcattcatgagagataatgtaaacgatgaattgaagcaagttcgatctgatgatcaaacgaaaaggaagatgctcgaaattttgaaaaggtttcacgaagaagaagaggaagatgatgggggaattgatagcatcacggatgatgaaggtttgagcttaccggaggagattattcagaagataatgaacggagatgaagtgagtcttgatgatttgagcttagaagagagaaaaggattccaaagagccttagcttctggagaattaagcaaaatgatccaaccatgggatccttggtggttacttgcttcagctcgaacgatcaatcttggactcggaggtacacaacttgttcaatgcgttgaagacgaagaagagaccacagttgtgagtgaaatcccacgagggcctgatacacctttgatctcactaagcaagcttacctccacgaatccatctcctctcttaccaatccatttgattgacattgcatatagttattgctttacgctccgtatctataatggagagtggcaatctgattcgcttggtgcagcaacaatggtgttgactgtttcatcagttttgggtcacaatggacaaccagagaccataaaggaagtgttgtccttttgcttggaacagacatgctcttcagcttataaaaaccttggtggtggtctgaagttcggattgaatctggtggatgatgtgatttgttttctttctcttggctctggagctatggtatgtctgctcggtgatctccaaaggttgattcttggtgcaataaaggaagtaaaatcatcatcagggcgtgatctgaagaagaaactaaagcttgcagagaggaaagtgttctacatgatgtgttgggtcaatgagcagaattctgaagtatgggaagctctggaaccatctgtaagggcagagaagaactcggtggttgagctcaacgattacagagggtttccagaaatgaagaagaaagatcaatttcgaaaaggtggtggcgtggtgattgaggagatagaatga

SEQ ID NO: 30312 - protein, 406 aa, Arabidopsis thaliana
  misc_feature (1)..(406): Ceres Seq. ID no. 4953445
MMPEKTIISSESSNSSPLNPSSTRIICHVCNKQFSQYTCPRCNFRYCSLPCYKSHSVQCTESFMRDNVNDELKQVRSDDQTKRKMLEILKRFHEEEEEDDGGIDSITDDEGLSLPEEIIQKIMNGDEVSLDDLSLEERKGFQRALASGELSKMIQPWDPWWLLASARTINLGLGGTQLVQCVEDEEETTVVSEIPRGPDTPLISLSKLTSTNPSPLLPIHLIDIAYSYCFTLRIYNGEWQSDSLGAATMVLTVSSVLGHNGQPETIKEVLSFCLEQTCSSAYKNLGGGLKFGLNLVDDVICFLSLGSGAMVCLLGDLQRLILGAIKEVKSSSGRDLKKKLKLAERKVFYMMCWVNEQNSEVWEALEPSVRAEKNSVVELNDYRGFPEMKKKDQFRKGGGVVIEEIE

SEQ ID NO: 30313 - protein, 405 aa, Arabidopsis thaliana
  misc_feature (1)..(405): Ceres Seq. ID no. 4953446
MPEKTIISSESSNSSPLNPSSTRIICHVCNKQFSQYTCPRCNFRYCSLPCYKSHSVQCTESFMRDNVNDELKQVRSDDQTKRKMLEILKRFHEEEEEDDGGIDSITDDEGLSLPEEIIQKIMNGDEVSLDDLSLEERKGFQRALASGELSKMIQPWDPWWLLASARTINLGLGGTQLVQCVEDEEETTVVSEIPRGPDTPLISLSKLTSTNPSPLLPIHLIDIAYSYCFTLRIYNGEWQSDSLGAATMVLTVSSVLGHNGQPETIKEVLSFCLEQTCSSAYKNLGGGLKFGLNLVDDVICFLSLGSGAMVCLLGDLQRLILGAIKEVKSSSGRDLKKKLKLAERKVFYMMCWVNEQNSEVWEALEPSVRAEKNSVVELNDYRGFPEMKKKDQFRKGGGVVIEEIE

SEQ ID NO: 30314 - protein, 343 aa, Arabidopsis thaliana; identical to SEQ ID NO: 30308
  misc_feature (1)..(343): Ceres Seq. ID no. 4953447

SEQ ID NO: 30315 - DNA, 868 bp, Arabidopsis thaliana
  misc_feature (1)..(868): Ceres Seq. ID no. 4953740
atctccgatttagatagaaacaacaatcctccggtggtcactcgctaatctccgtttgatctcgccgacactcgagccttttaccgatgaaggatggagattccttaccaataagcacttcttccgtcgcggcgacgacggtgaccggaaagaaggaaaccggttattccgctctcttctcgaaaggccggtacaagttttgggccttagctgcgattctgttactcgctttctggtcaatgctcactggcacggtcaatctccgttggtctgccggtaacattaaccatttcaccgacgatctcgtctttcccatccacgaggatctcgatgttcttgaaatggaggagagggagaaagtggtgaagcacatgtgggatgtgtataacaatggccgtcgtatcagattacctaggttttggcaagaggccttcgaggctgcttacgaggagcttaccagtgatgtacctgatgtggttgaggctgccatttccgagatcgctaggatgtctattcgctccattgttatagatccgcctccgcttcattccacgaatgtacgagaattgacaaagactctaaaacttgcggacaaaggaagagcaactcaaatatcaaaaccaagcagccgtcgattgaaatagctatggaggctttacgaaaaaggtagtgtagcagtcagccgtcgtggcgtgaccatacatatacttgatgtcagaaagatcaatcaacctcatccctagaatatatgtccatcattagtgttattttttcttccactaggggcattaatcctttcactatcatcatcatctcttctataaacaaaattttgaggaagctttttatccacaccttattagctctg

SEQ ID NO: 30316 - protein, 185 aa, Arabidopsis thaliana
  misc_feature (1)..(185): Ceres Seq. ID no. 4953741
MKDGDSLPISTSSVAATTVTGKKETGYSALFSKGRYKFWALAAILLLAFWSMLTGTVNLRWSAGNINHFTDDLVFPIHEDLDVLEMEEREKVVKHMWDVYNNGRRIRLPRFWQEAFEAAYEELTSDVPDVVEAAISEIARMSIRSIVIDPPPLHSTNVRELTKTLKLADKGRATQISKPSSRRLK

SEQ ID NO: 30317 - protein, 134 aa, Arabidopsis thaliana
  misc_feature (1)..(134): Ceres Seq. ID no. 4953742
MLTGTVNLRWSAGNINHFTDDLVFPIHEDLDVLEMEEREKVVKHMWDVYNNGRRIRLPRFWQEAFEAAYEELTSDVPDVVEAAISEIARMSIRSIVIDPPPLHSTNVRELTKTLKLADKGRATQISKPSSRRLK

SEQ ID NO: 30318 - protein, 100 aa, Arabidopsis thaliana; identical to SEQ ID NO: 29509
  misc_feature (1)..(100): Ceres Seq. ID no. 4953743

SEQ ID NO: 30319 - DNA, 1314 bp, Arabidopsis thaliana
  misc_feature (1)..(1314): Ceres Seq. ID no. 4953786
atggcggattcaacaaccttatctacttttttcgatcattctcagactcagattccaaagctggaagatttcctcggtgattcctttgtccgttactctgataaccaaacagagacccaagactcttcttctctcactccattctacgatccacgtcaccgcaccgttgccgaaggagttacagggttcttctctgatcatcatcagccagatttcaagacgataaactcgggaccagaaatcttcgatgactcaacaacttccaacatcggtggtactcatctctccagtcacgtggtggagtcatcaacgacggcgaagttagggtttaacggtgattgcaccaccaccggaggagttttgtctctaggggttaacaacacatcagatcaacctttgagctgtaacaatggcgagagaggtggaaacagtaacaagaagaaaacagtttctaagaaggaaacatcagatgattcaaagaagaagattgtcgaaacattgggacaaagaacttcaatttatcgtggagtcacccgacatagatggactggaagatacgaagcgcatctatgggataacagctgtaggagggaaggtcaagccagaaaaggacgtcaaggtggatatgacaaggaagatagagcagctagagcctatgacttggcagctttaaaatactggggttctactgctactacaaattttccggtctcgagttattcaaaagaacttgaggaaatgaatcacatgaccaagcaagagtttattgcatctcttaggaggaaaagtagcggtttttcgagaggagcttcaatatatagaggtgtcacaaggcatcatcaacaaggtcgctggcaagcaagaatcggccgtgtcgcaggaaacaaagatctttacctcggaacctttgcaaccgaagaggaagcagcagaggcttatgacattgcagccataaagttcagaggaatcaacgcagtaactaactttgagatgaacaggtatgacattgaagctgtcatgaatagttctttacctgtaggaggagcagctgcgaaacgccacaaactcaaactcgctcttgaatctccttcttcatcatcctctgaccataacctccaacaacaacagttgcttccgtcctcttctccctcggatcaaaaccctaactcaatcccatgtggcattccatttgagccttcagttctctattaccaccagaacttctttcagcattatcctttggtctctgactctacaattcaagctcctatgaaccaagctgagtttttcttgtggcctaaccagtcttactaa

SEQ ID NO: 30320 - protein, 437 aa, Arabidopsis thaliana
  misc_feature (1)..(437): Ceres Seq. ID no. 4953787
MADSTTLSTFFDHSQTQIPKLEDFLGDSFVRYSDNQTETQDSSSLTPFYDPRHRTVAEGVTGFFSDHHQPDFKTINSGPEIFDDSTTSNIGGTHLSSHVVESSTTAKLGFNGDCTTTGGVLSLGVNNTSDQPLSCNNGERGGNSNKKKTVSKKETSDDSKKKIVETLGQRTSIYRGVTRHRWTGRYEAHLWDNSCRREGQARKGRQGGYDKEDRAARAYDLAALKYWGSTATTNFPVSSYSKELEEMNHMTKQEFIASLRRKSSGFSRGASIYRGVTRHHQQGRWQARIGRVAGNKDLYLGTFATEEEAAEAYDIAAIKFRGINAVTNFEMNRYDIEAVMNSSLPVGGAAAKRHKLKLALESPSSSSSDHNLQQQQLLPSSSPSDQNPNSIPCGIPFEPSVLYYHQNFFQHYPLVSDSTIQAPMNQAEFFLWPNQSY

SEQ ID NO: 30321 - DNA, 3192 bp, Arabidopsis thaliana
  misc_feature (1)..(3192): Ceres Seq. ID no. 4953852
atgactacagaagatgatgatcagatgctaggaccaagcggcacccaggaaaagatctatgtttctgttcgtatgcgacctttaaacgacaaggaaaagtttaggaatgatgtccctgactgggagtgcatcaacaatactaccatcatttacaggagtcatctttctatctccgagcgttccatgtatccttctgcttacacatttgacagagtgtttagccctgagtgttgtacaaggcaggtgtatgaacaaggggcaaaggaagtcgctttctctgttgtcagtggcgttaatgctagtgtattcgcatatgggcaaacaagcagtggaaagacgtacactatgagcggaattactgactgcgccttggttgatatatatggctacattgacaagcacaaggaaagagaattcattcttaagttctctgctatggagatctacaatgagtctgtaagagatctcttaagtacagatactagtccactcagacttttagatgaccctgagaaagggacagttgttgagaaactcacagaggaaactctgcgagactggaatcatttcaaggagctcctatctgtctgcaaagcacaaaggcaaattggtgagacagctctaaatgaagttagctcccggtctcatcagattttgagattgacagtagaaagcatagctcgtgaattttctaccaatgataagtttagtactctaacagcgacagtgaacttcattgatcttgctggaagtgaacgtgcgtctcaatcattatcagccggcacaaggttaaaagaaggttgtcatataaaccgaagtttgttaacactgggaactgtgatccgtaagctaagtaaagaaaaaactgggcacattccattcagagattcaaaactgacacgcatacttcagtcttctttgggaggaaatgcaagaactgccataatttgcactatgagtcctgcgagaatccatgttgaacaatcaagaaacacactgttatttgcaagctgcgcaaaggaggtgacaacaaatgcacaagtcaatgttgtcatgtctgataaagctttagtaaagcacttgcagagggagttggctaaactggaaagtgagttgagaagccctagtcaggcttcaattgtttctgacacaactgcattactgacggagaaagaccttgaggttgaaaagcttaagaaagaggtattccaactagcacaacaactagagcaagctcgttccgagattaaggatcttcgacgaatggttgaagaagaaaaaaaccaagaaaaagagacgctatcaacagaaacagaagggttaaatgttctgatggaacatcaataccccaagctgcgggtgcgcaggacatgggactctgagaatacaacaccactgagccctatatcagctcaccgttccagtatatctccacgatcaactgaatatagttatgaagagaatgtctttcagctatcagatttcaggatagattctgcatcaagtagtccgcaacagcttgcgtttgtaactcctttccttaaggttccacttgatgatattcacgtgacagatactgtagaccaatctcatgttcacaaagaggaagctatagaagaacctcatgttcaggaggaacggttttatgaaatggctgaacacactgacggaaattctgaggataactgcagggaagttcggtgcatagaaacagagaagtcagatattagtataggtccagtggaaaatatgccggagagcagtccagacaaatacgaggctgtaactgcagaagaaccagtatctgtgacagagccaaagaacttacaacatccgacagaagaagcagtatgtgtgacagagacaaagaacttacaacatcccacagaagctgaaaacgaagaagaagaagaagaagaaagagtaaaggaagtcagtggtgcttctcctgaaccaaaacaagaaagcaacctcacaaaaaatcctgcattgtgtgatttggaatgttcacctgatgagtttgatacaagcatgtctaacctgagtagaatctcaacacctccagcccttatcactccctctcctgaaaagcctttctcttggattatggagagagattcacaacttttcagaggaatgaagctgactagaagtcgaagctgccgaccaagcttattatcgagcccttcctcctcttggttagagaaagatgctgatacaccgccaagctggtacgacaaagaatttatcaaaacagctgagagaaacttgacaatgtgcgacatcaagaaccagagattgttgcaggatgagtttagtgggaggagcatgccaacaacttggttcgagagaagcttgagtgacactcaaacggtggatgctgcttcacatggtgtcagcaacgaaatgtcgccaaatgaatcaccatttcggccatctgatgcttctgtgtttgagctccagacaagtggtagagcttcaataagccaggacagaacagaggagactgctgctcaaaaagacaagcaaatcattcatcgatcgatggaggaaagggaacagaagttcttggcctcgaattcaacgaagagtttcaaggacgcagcaatggacccaatacaagactacttagacacggccttgaattggccagtggagttcaagaggctacagagggagataatagagctatggcacgtgtgtaaagtctcaatggcacacagaagctacttcttccttctgttcagaggagatcagaaagattgcttgtacttggaggtagagctccgtagacttaagtacatcagagaatctttcgcccaaaatagcaacgatggcaacaatatgaccctaatctcctgcacgagggcattgacgagggagaggtataagctgagcaagctgatgcagaggaaactgtcgaaagaagagagagagaacttgttcttgagatggggcattgggctcaacacgaatcacagacgggtccagctggcgcgtcgtctctggtcggattacaaagacatgggtcatgtccgagagagcgcctccctcgttggtaagctcaatgggttcgtggacatgaagttgacttccacagagatgtttggcgtcaactatgctttcagaccaccacgtcccaagaaatctagtctttggaaacgcagcgttttgtccctctcctttttgtaa

SEQ ID NO: 30322 - protein, 1063 aa, Arabidopsis thaliana
  misc_feature (1)..(1063): Ceres Seq. ID no. 4953853
MTTEDDDQMLGPSGTQEKIYVSVRMRPLNDKEKFRNDVPDWECINNTTIIYRSHLSISERSMYPSAYTFDRVFSPECCTRQVYEQGAKEVAFSVVSGVNASVFAYGQTSSGKTYTMSGITDCALVDIYGYIDKHKEREFILKFSAMEIYNESVRDLLSTDTSPLRLLDDPEKGTVVEKLTEETLRDWNHFKELLSVCKAQRQIGETALNEVSSRSHQILRLTVESIAREFSTNDKFSTLTATVNFIDLAGSERASQSLSAGTRLKEGCHINRSLLTLGTVIRKLSKEKTGHIPFRDSKLTRILQSSLGGNARTAIICTMSPARIHVEQSRNTLLFASCAKEVTTNAQVNVVMSDKALVKHLQRELAKLESELRSPSQASIVSDTTALLTEKDLEVEKLKKEVFQLAQQLEQARSEIKDLRRMVEEEKNQEKETLSTETEGLNVLMEHQYPKLRVRRTWDSENTTPLSPISAHRSSISPRSTEYSYEENVFQLSDFRIDSASSSPQQLAFVTPFLKVPLDDIHVTDTVDQSHVHKEEAIEEPHVQEERFYEMAEHTDGNSEDNCREVRCIETEKSDISIGPVENMPESSPDKYEAVTAEEPVSVTEPKNLQHPTEEAVCVTETKNLQHPTEAENEEEEEEERVKEVSGASPEPKQESNLTKNPALCDLECSPDEFDTSMSNLSRISTPPALITPSPEKPFSWIMERDSQLFRGMKLTRSRSCRPSLLSSPSSSWLEKDADTPPSWYDKEFIKTAERNLTMCDIKNQRLLQDEFSGRSMPTTWFERSLSDTQTVDAASHGVSNEMSPNESPFRPSDASVFELQTSGRASISQDRTEETAAQKDKQIIHRSMEEREQKFLASNSTKSFKDAAMDPIQDYLDTALNWPVEFKRLQREIIELWHVCKVSMAHRSYFFLLFRGDQKDCLYLEVELRRLKYIRESFAQNSNDGNNMTLISCTRALTRERYKLSKLMQRKLSKEERENLFLRWGIGLNTNHRRVQLARRLWSDYKDMGHVRESASLVGKLNGFVDMKLTSTEMFGVNYAFRPPRPKKSSLWKRSVLSLSFL

SEQ ID NO: 30323 - protein, 1055 aa, Arabidopsis thaliana
  misc_feature (1)..(1055): Ceres Seq. ID no. 4953854
MLGPSGTQEKIYVSVRMRPLNDKEKFRNDVPDWECINNTTIIYRSHLSISERSMYPSAYTFDRVFSPECCTRQVYEQGAKEVAFSVVSGVNASVFAYGQTSSGKTYTMSGITDCALVDIYGYIDKHKEREFILKFSAMEIYNESVRDLLSTDTSPLRLLDDPEKGTVVEKLTEETLRDWNHFKELLSVCKAQRQIGETALNEVSSRSHQILRLTVESIAREFSTNDKFSTLTATVNFIDLAGSERASQSLSAGTRLKEGCHINRSLLTLGTVIRKLSKEKTGHIPFRDSKLTRILQSSLGGNARTAIICTMSPARIHVEQSRNTLLFASCAKEVTTNAQVNVVMSDKALVKHLQRELAKLESELRSPSQASIVSDTTALLTEKDLEVEKLKKEVFQLAQQLEQARSEIKDLRRMVEEEKNQEKETLSTETEGLNVLMEHQYPKLRVRRTWDSENTTPLSPISAHRSSISPRSTEYSYEENVFQLSDFRIDSASSSPQQLAFVTPFLKVPLDDIHVTDTVDQSHVHKEEAIEEPHVQEERFYEMAEHTDGNSEDNCREVRCIETEKSDISIGPVENMPESSPDKYEAVTAEEPVSVTEPKNLQHPTEEAVCVTETKNLQHPTEAENEEEEEEERVKEVSGASPEPKQESNLTKNPALCDLECSPDEFDTSMSNLSRISTPPALITPSPEKPFSWIMERDSQLFRGMKLTRSRSCRPSLLSSPSSSWLEKDADTPPSWYDKEFIKTAERNLTMCDIKNQRLLQDEFSGRSMPTTWFERSLSDTQTVDAASHGVSNEMSPNESPFRPSDASVFELQTSGRASISQDRTEETAAQKDKQIIHRSMEEREQKFLASNSTKSFKDAAMDPIQDYLDTALNWPVEFKRLQREIIELWHVCKVSMAHRSYFFLLFRGDQKDCLYLEVELRRLKYIRESFAQNSNDGNNMTLISCTRALTRERYKLSKLMQRKLSKEERENLFLRWGIGLNTNHRRVQLARRLWSDYKDMGHVRESASLVGKLNGFVDMKLTSTEMFGVNYAFRPPRPKKSSLWKRSVLSLSFL

SEQ ID NO: 30324 - protein, 1039 aa, Arabidopsis thaliana
  misc_feature (1)..(1039): Ceres Seq. ID no. 4953855
MRPLNDKEKFRNDVPDWECINNTTIIYRSHLSISERSMYPSAYTFDRVFSPECCTRQVYEQGAKEVAFSVVSGVNASVFAYGQTSSGKTYTMSGITDCALVDIYGYIDKHKEREFILKFSAMEIYNESVRDLLSTDTSPLRLLDDPEKGTVVEKLTEETLRDWNHFKELLSVCKAQRQIGETALNEVSSRSHQILRLTVESIAREFSTNDKFSTLTATVNFIDLAGSERASQSLSAGTRLKEGCHINRSLLTLGTVIRKLSKEKTGHIPFRDSKLTRILQSSLGGNARTAIICTMSPARIHVEQSRNTLLFASCAKEVTTNAQVNVVMSDKALVKHLQRELAKLESELRSPSQASIVSDTTALLTEKDLEVEKLKKEVFQLAQQLEQARSEIKDLRRMVEEEKNQEKETLSTETEGLNVLMEHQYPKLRVRRTWDSENTTPLSPISAHRSSISPRSTEYSYEENVFQLSDFRIDSASSSPQQLAFVTPFLKVPLDDIHVTDTVDQSHVHKEEAIEEPHVQEERFYEMAEHTDGNSEDNCREVRCIETEKSDISIGPVENMPESSPDKYEAVTAEEPVSVTEPKNLQHPTEEAVCVTETKNLQHPTEAENEEEEEEERVKEVSGASPEPKQESNLTKNPALCDLECSPDEFDTSMSNLSRISTPPALITPSPEKPFSWIMERDSQLFRGMKLTRSRSCRPSLLSSPSSSWLEKDADTPPSWYDKEFIKTAERNLTMCDIKNQRLLQDEFSGRSMPTTWFERSLSDTQTVDAASHGVSNEMSPNESPFRPSDASVFELQTSGRASISQDRTEETAAQKDKQIIHRSMEEREQKFLASNSTKSFKDAAMDPIQDYLDTALNWPVEFKRLQREIIELWHVCKVSMAHRSYFFLLFRGDQKDCLYLEVELRRLKYIRESFAQNSNDGNNMTLISCTRALTRERYKLSKLMQRKLSKEERENLFLRWGIGLNTNHRRVQLARRLWSDYKDMGHVRESASLVGKLNGFVDMKLTSTEMFGVNYAFRPPRPKKSSLWKRSVLSLSFL

SEQ ID NO: 30325 - DNA, 879 bp, Arabidopsis thaliana
  misc_feature (1)..(879): Ceres Seq. ID no. 4953856
atgatgaaggttgatcaagattattcgtgtagtataccgcctggatttaggtttcatccgacagatgaagaacttgtcggatattatctcaagaagaaaatcgcctcccagaggattgatctcgacgttatcagagaaattgatctttacaagatcgaaccatgggatctacaagagagatgtaggatagggtacgaggagcaaacggagtggtatttcttcagccatagagacaagaagtatccgactgggactaggacaaaccgagccaccgtggccggtttctggaaagcaacgggccgggacaaggcggtttacctcaactccaaacttatcggtatgagaaaaacgcttgtcttttaccgaggtcgagcgcctaatggccaaaagtccgattggatcattcacgaatactacagcctcgagtcacaccagaactctcctccacaggaagaaggatgggtagtgtgtagagcatttaagaaacgaacgaccatcccaacaaaaaggaggcaactttgggatccgaactgcttattctacgacgacgccactctcttggaacctctcgacaagcgagccagacataatcctgattttaccgccacaccgttcaagcaagaactactctccgaggccagtcacgtccaggatggagatttcggatctatgtaccttcaatgcatcgatgatgatcaattctcccagcttcctcagctcgagagcccctctcttccgtcggaaataactccccatagtactactttttctgagaacagtagccggaaagatgacatgagctccgagaagaggatcactgactggagatatctagataagttcgtggcgtctcaatttttgatgagtggagaagactaa

SEQ ID NO: 30326 - protein, 292 aa, Arabidopsis thaliana
  misc_feature (1)..(292): Ceres Seq. ID no. 4953857
MMKVDQDYSCSIPPGFRFHPTDEELVGYYLKKKIASQRIDLDVIREIDLYKIEPWDLQERCRIGYEEQTEWYFFSHRDKKYPTGTRTNRATVAGFWKATGRDKAVYLNSKLIGMRKTLVFYRGRAPNGQKSDWIIHEYYSLESHQNSPPQEEGWVVCRAFKKRTTIPTKRRQLWDPNCLFYDDATLLEPLDKRARHNPDFTATPFKQELLSEASHVQDGDFGSMYLQCIDDDQFSQLPQLESPSLPSEITPHSTTFSENSSRKDDMSSEKRITDWRYLDKFVASQFLMSGED

SEQ ID NO: 30327 - protein, 291 aa, Arabidopsis thaliana
  misc_feature (1)..(291): Ceres Seq. ID no. 4953858
MKVDQDYSCSIPPGFRFHPTDEELVGYYLKKKIASQRIDLDVIREIDLYKIEPWDLQERCRIGYEEQTEWYFFSHRDKKYPTGTRTNRATVAGFWKATGRDKAVYLNSKLIGMRKTLVFYRGRAPNGQKSDWIIHEYYSLESHQNSPPQEEGWVVCRAFKKRTTIPTKRRQLWDPNCLFYDDATLLEPLDKRARHNPDFTATPFKQELLSEASHVQDGDFGSMYLQCIDDDQFSQLPQLESPSLPSEITPHSTTFSENSSRKDDMSSEKRITDWRYLDKFVASQFLMSGED

SEQ ID NO: 30328 - protein, 179 aa, Arabidopsis thaliana
  misc_feature (1)..(179): Ceres Seq. ID no. 4953859
MRKTLVFYRGRAPNGQKSDWIIHEYYSLESHQNSPPQEEGWVVCRAFKKRTTIPTKRRQLWDPNCLFYDDATLLEPLDKRARHNPDFTATPFKQELLSEASHVQDGDFGSMYLQCIDDDQFSQLPQLESPSLPSEITPHSTTFSENSSRKDDMSSEKRITDWRYLDKFVASQFLMSGED

SEQ ID NO: 30329 - DNA, 1216 bp, Arabidopsis thaliana
  misc_feature (1)..(1216): Ceres Seq. ID no. 4953911
atcaccggcgatattggtttacgcgtcggagagatggttgagagagaggaccgagtttctttggaactcagcgaagaaattatacagagcatggaacctggcgccgttttcagagactataattgcaggatcagctcaattgactttcacaaaacttcgacttgtatggtgacagctagcgacgatgactcaattcgtctctatgatgttgccagcgccacatgtctgaagacaattaatagcaaaaagtatggtgttgatcttgtttgcttcacttctcatcctactactgtcatctactcttccagaaacggatgggacgactctctgaggcttctctctttgcacgataataagtacttgcgctacttcaaaggacatcatgacagagttgtttcgcttagcttgtgttctggtggggaatgcttcatctccggttcccttgatcgtactgttttgctttgggatcaaagggtcgagaaatgccagggtctcttacgagtccaaggaaggcctgctgcagcatatgatgatcaagggttaatttttgcaattgcctttggtggctacataagaatgtttgatgcccgtatgtacgaaaagggtccttttgaaatattttccgttggtggtgatctttctgaggcaaacgttgtgaaatttagtaatgatggaaggctcatgctgcttacaaccatggatggttttattcatgtgcttgactcgtttcgtggaactcttctgtccacatttagtgtgaaaccagtagctggagaatctacattggatgcagcctttagtcctgaagggatgtttgttgtttcaggttcaggtgatggtagtacccatgcatggggtgtaaggagcggaaaacaggtacatagttggatgggtttagggagtgagcccccagtcattaaatggggtccaggaagtcccatgtttgtgacaggctcttccgaacttgcttttgttatacccgacttatcgaaattgccagcttatgccattcggaaataggacgactatcacgtctgtgccatgtaaatgaggcctcatttggccttttggtttcagactttgttgtgggttatgccggtaacttatcccttgcactctgattaatatatatttgggtcttgtaacatgaagataaaccccaagtctttctaatgttgtaattcgtgtaatttacaagtttgactgtttctgactg

SEQ ID NO: 30330 - protein, 339 aa, Arabidopsis thaliana
  misc_feature (1)..(339): Ceres Seq. ID no. 4953912
ITGDIGLRVGEMVEREDRVSLELSEEIIQSMEPGAVFRDYNCRISSIDFHKTSTCMVTASDDDSIRLYDVASATCLKTINSKKYGVDLVCFTSHPTTVIYSSRNGWDDSLRLLSLHDNKYLRYFKGHHDRVVSLSLCSGGECFISGSLDRTVLLWDQRVEKCQGLLRVQGRPAAAYDDQGLIFAIAFGGYIRMFDARMYEKGPFEIFSVGGDLSEANVVKFSNDGRLMLLTTMDGFIHVLDSFRGTLLSTFSVKPVAGESTLDAAFSPEGMFVVSGSGDGSTHAWGVRSGKQVHSWMGLGSEPPVIKWGPGSPMFVTGSSELAFVIPDLSKLPAYAIRK

SEQ ID NO: 30331 - protein, 328 aa, Arabidopsis thaliana
  misc_feature (1)..(328): Ceres Seq. ID no. 4953913
MVEREDRVSLELSEEIIQSMEPGAVFRDYNCRISSIDFHKTSTCMVTASDDDSIRLYDVASATCLKTINSKKYGVDLVCFTSHPTTVIYSSRNGWDDSLRLLSLHDNKYLRYFKGHHDRVVSLSLCSGGECFISGSLDRTVLLWDQRVEKCQGLLRVQGRPAAAYDDQGLIFAIAFGGYIRMFDARMYEKGPFEIFSVGGDLSEANVVKFSNDGRLMLLTTMDGFIHVLDSFRGTLLSTFSVKPVAGESTLDAAFSPEGMFVVSGSGDGSTHAWGVRSGKQVHSWMGLGSEPPVIKWGPGSPMFVTGSSELAFVIPDLSKLPAYAIRK

SEQ ID NO: 30332 - protein, 309 aa, Arabidopsis thaliana
  misc_feature (1)..(309): Ceres Seq. ID no. 4953914
MEPGAVFRDYNCRISSIDFHKTSTCMVTASDDDSIRLYDVASATCLKTINSKKYGVDLVCFTSHPTTVIYSSRNGWDDSLRLLSLHDNKYLRYFKGHHDRVVSLSLCSGGECFISGSLDRTVLLWDQRVEKCQGLLRVQGRPAAAYDDQGLIFAIAFGGYIRMFDARMYEKGPFEIFSVGGDLSEANVVKFSNDGRLMLLTTMDGFIHVLDSFRGTLLSTFSVKPVAGESTLDAAFSPEGMFVVSGSGDGSTHAWGVRSGKQVHSWMGLGSEPPVIKWGPGSPMFVTGSSELAFVIPDLSKLPAYAIRK

SEQ ID NO: 30333 - DNA, 987 bp, Arabidopsis thaliana
  misc_feature (1)..(987): Ceres Seq. ID no. 4953985
atggttgagagagaggaccgagtttctttggaactcagcgaagaaattatacagagcatggaacctggcgccgttttcagagactataattgcaggatcagctcaattgactttcacaaaacttcgacttgtatggtgacagctagcgacgatgactcaattcgtctctatgatgttgccagcgccacatgtctgaagacaattaatagcaaaaagtatggtgttgatcttgtttgcttcacttctcatcctactactgtcatctactcttccagaaacggatgggacgactctctgaggcttctctctttgcacgataataagtacttgcgctacttcaaaggacatcatgacagagttgtttcgcttagcttgtgttctggtggggaatgcttcatctccggttcccttgatcgtactgttttgctttgggatcaaagggtcgagaaatgccagggtctcttacgagtccaaggaaggcctgctgcagcatatgatgatcaagggttaatttttgcaattgcctttggtggctacataagaatgtttgatgcccgtatgtacgaaaagggtccttttgaaatattttccgttggtggtgatctttctgaggcaaacgttgtgaaatttagtaatgatggaaggctcatgctgcttacaaccatggatggttttattcatgtgcttgactcgtttcgtggaactcttctgtccacatttagtgtgaaaccagtagctggagaatctacattggatgcagcctttagtcctgaagggatgtttgttgtttcaggttcaggtgatggtagtacccatgcatggggtgtaaggagcggaaaacaggtacatagttggatgggtttagggagtgagcccccagtcattaaatggggtccaggaagtcccatgtttgtgacaggctcttccgaacttgcttttgttatacccgacttatcgaaattgccagcttatgccattcggaaatag

SEQ ID NO: 30334 - protein, 328 aa, Arabidopsis thaliana; identical to SEQ ID NO: 30331
  misc_feature (1)..(328): Ceres Seq. ID no. 4953986

SEQ ID NO: 30335 - protein, 309 aa, Arabidopsis thaliana; identical to SEQ ID NO: 30332
  misc_feature (1)..(309): Ceres Seq. ID no. 4953987

SEQ ID NO: 30336 - protein, 284 aa, Arabidopsis thaliana
  misc_feature (1)..(284): Ceres Seq. ID no. 4953988
MVTASDDDSIRLYDVASATCLKTINSKKYGVDLVCFTSHPTTVIYSSRNGWDDSLRLLSLHDNKYLRYFKGHHDRVVSLSLCSGGECFISGSLDRTVLLWDQRVEKCQGLLRVQGRPAAAYDDQGLIFAIAFGGYIRMFDARMYEKGPFEIFSVGGDLSEANVVKFSNDGRLMLLTTMDGFIHVLDSFRGTLLSTFSVKPVAGESTLDAAFSPEGMFVVSGSGDGSTHAWGVRSGKQVHSWMGLGSEPPVIKWGPGSPMFVTGSSELAFVIPDLSKLPAYAIRK

SEQ ID NO: 30337 - DNA, 456 bp, Arabidopsis thaliana
  misc_feature (1)..(456): Ceres Seq. ID no. 4954302
atggcgtcaatttctctctcttcttctacggttccgtcgctgaattcgaaagaatcgtcaggtgtttctgctttcgcttctcgttctatctcggccgtcaaatttcagtttccggttcgtcggattgaagccaagaagcagacatttgactcatttgaggatctgcttgtgaactctgataaaccagttctagttgactattatgcaacctggtgtggtccttgccagttcatggttccaatactcaatgaagtgagtgaaaccctgaaagacaagatacaggtggtgaagattgataccgaaaaataccccagtattgctaataaatacaagattgaggcacttcctactttcatcctattcaaagatggggaaccttgtgatcgctttgagggtgctttgacggccaaacaactcattcaacgaattgaggattctctaaaagtgaagccatag

SEQ ID NO: 30338 - protein, 151 aa, Arabidopsis thaliana
  misc_feature (1)..(151): Ceres Seq. ID no. 4954303
MASISLSSSTVPSLNSKESSGVSAFASRSISAVKFQFPVRRIEAKKQTFDSFEDLLVNSDKPVLVDYYATWCGPCQFMVPILNEVSETLKDKIQVVKIDTEKYPSIANKYKIEALPTFILFKDGEPCDRFEGALTAKQLIQRIEDSLKVKP

SEQ ID NO: 30339 - DNA, 1404 bp, Arabidopsis thaliana
  misc_feature (1)..(1404): Ceres Seq. ID no. 4954572
atgttcttctctggtcttatctccaagcttcatgttcatggtactaagagaacaaatcacttcacgatctttcaccgtttgaatcatttcgtcactacatcatcttcctcggttacgcctctttcgcctcaagatcgaaacaaactcttagctactctgttatcaaactgcactagcctagctcgtgttcgtcggatccatggtgacatcttccgttcacgaatcctcgatcaatatccgatcgctttcttatggaacaacatcatgcgatcttacattcgccatgagtctcctctcgatgcaattcaagtatatctcggtatggtgagatcgactgttttacccgatcgatattctcttccgattgtaatcaaagcagccgttcaaattcatgattttacgttgggaaaggagcttcattccgtcgccgttaggttagggttcgtcggagatgagttctgcgagagtgggttcattacattgtattgtaaagcaggggaatttgagaacgcacgtaaggtgttcgatgaaaatcctgagagaaagctggggtcttggaacgccattatcggagggttgaatcacgctggtcgagctaacgaggcggtggaaatgtttgtggatatgaaaaggagtggacttgagcctgatgatttcactatggttagtgtgactgcttcttgtggaggattaggtgacttgagcttggcttttcagttgcataaatgcgttctacaagctaagaccgaagagaagtctgatatcatgatgctgaattcgctcattgatatgtatggaaaatgtgggcgtatggatttagcgagtcacatattcgaggaaatgcgacagagaaacgttgtctcttggagttctatgatcgtgggttacgcagctaacgggaatacattagaggctttagaatgctttcgtcagatgagagaattcggtgtcagaccaaacaagatcacgttcgttggagttctcagtgcttgcgtccatggaggtcttgtggaggaaggaaaaacatattttgcgatgatgaagtcagagttcgagctagaaccgggattatcgcattacggatgcatagttgatctattgagccgtgacgggcagcttaaggaggcaaagaaagttgttgaggagatgccgatgaagcctaacgtgatggtttggggttgtttgatgggagggtgtgagaagtttggggatgttgagatggctgagtgggtggctccatacatggttgagcttgagccgtggaacgatggtgtttatgttgtcttggctaatgtgtatgcactcagagggatgtggaaagatgttgagagagttaggaagttgatgaagacgaagaaggttgctaagattcctgcctatagctatgcttcaacgacattttga

SEQ ID NO: 30340 - protein, 467 aa, Arabidopsis thaliana
  misc_feature (1)..(467): Ceres Seq. ID no. 4954573
MFFSGLISKLHVHGTKRTNHFTIFHRLNHFVTTSSSSVTPLSPQDRNKLLATLLSNCTSLARVRRIHGDIFRSRILDQYPIAFLWNNIMRSYIRHESPLDAIQVYLGMVRSTVLPDRYSLPIVIKAAVQIHDFTLGKELHSVAVRLGFVGDEFCESGFITLYCKAGEFENARKVFDENPERKLGSWNAIIGGLNHAGRANEAVEMFVDMKRSGLEPDDFTMVSVTASCGGLGDLSLAFQLHKCVLQAKTEEKSDIMMLNSLIDMYGKCGRMDLASHIFEEMRQRNVVSWSSMIVGYAANGNTLEALECFRQMREFGVRPNKITFVGVLSACVHGGLVEEGKTYFAMMKSEFELEPGLSHYGCIVDLLSRDGQLKEAKKVVEEMPMKPNVMVWGCLMGGCEKFGDVEMAEWVAPYMVELEPWNDGVYVVLANVYALRGMWKDVERVRKLMKTKKVAKIPAYSYASTTF

SEQ ID NO: 30341 - protein, 379 aa, Arabidopsis thaliana
  misc_feature (1)..(379): Ceres Seq. ID no. 4954574
MRSYIRHESPLDAIQVYLGMVRSTVLPDRYSLPIVIKAAVQIHDFTLGKELHSVAVRLGFVGDEFCESGFITLYCKAGEFENARKVFDENPERKLGSWNAIIGGLNHAGRANEAVEMFVDMKRSGLEPDDFTMVSVTASCGGLGDLSLAFQLHKCVLQAKTEEKSDIMMLNSLIDMYGKCGRMDLASHIFEEMRQRNVVSWSSMIVGYAANGNTLEALECFRQMREFGVRPNKITFVGVLSACVHGGLVEEGKTYFAMMKSEFELEPGLSHYGCIVDLLSRDGQLKEAKKVVEEMPMKPNVMVWGCLMGGCEKFGDVEMAEWVAPYMVELEPWNDGVYVVLANVYALRGMWKDVERVRKLMKTKKVAKIPAYSYASTTF

SEQ ID NO: 30342 - protein, 360 aa, Arabidopsis thaliana
  misc_feature (1)..(360): Ceres Seq. ID no. 4954575
MVRSTVLPDRYSLPIVIKAAVQIHDFTLGKELHSVAVRLGFVGDEFCESGFITLYCKAGEFENARKVFDENPERKLGSWNAIIGGLNHAGRANEAVEMFVDMKRSGLEPDDFTMVSVTASCGGLGDLSLAFQLHKCVLQAKTEEKSDIMMLNSLIDMYGKCGRMDLASHIFEEMRQRNVVSWSSMIVGYAANGNTLEALECFRQMREFGVRPNKITFVGVLSACVHGGLVEEGKTYFAMMKSEFELEPGLSHYGCIVDLLSRDGQLKEAKKVVEEMPMKPNVMVWGCLMGGCEKFGDVEMAEWVAPYMVELEPWNDGVYVVLANVYALRGMWKDVERVRKLMKTKKVAKIPAYSYASTTF

SEQ ID NO: 30343 - DNA, 3168 bp, Arabidopsis thaliana
  misc_feature (1)..(3168): Ceres Seq. ID no. 4954598
atgaagagtgcgtcgtcggaacaatcagttgaaagaatcgaaaacggtcacaagaagaagaggaacaggcctcagaaacaaaatcgtcgatctaagcaaagctcagtaccgatagaagatgcacatgtggaggagtcgttagatggtagagatagtagtaggagtaaagctaaagattctacttcttcatcgaagcagcagagacctaataccgacgaacttgaagctatgagagcgtctaatgttgctttcaattctatgccgcctatgcgagcagaaagtggttatcccaggagatctgcaagtccgttactttcttcacctgaagttagtaagcaattgttatcgaagtcttgccctgatcctagggcttgtgagcagtctcctggaatgaatggtgaattgtttcagcaaattgaaggttcctcacaacgaaagattttctcttcacactggtctcttgatgctgtgaccgaagctttagagaaaggtgaagcttttaaagcgctatttcgggtgaatgctcataatcgcaatgaggcttactgtaagatcgatggagtccctacagacattctaatcaatggaaatgtttgccaaagtagagcagtggaaggtgatactgttgttattaaattggatccgctctcactgtggcccaagatgaaaggatttgttactgaaagcgctgctaagcctgaaggaacgaacagtcccccagagaaagatgacaaaaaagctcgtcaaaaaaatggtattgatgtggtagaaggttttgaagatgggttctcgaaaaacaaatcatcagttataggaaaaggagctaagaacggtgttactcccagttctccaccatcactggattcatgtttgggttctttttgtgagcagaaaggaaattgcagtgcggttgataagctatgcggcatccttagttccttcccccacaaacgaccaactggacaagtagttgctgttgttgaaaagtcacttgtaagggattctatcgttggcttgcttgatgtcaagggatggattcattacaaggaaagtgatccaaaaaggtgcaagtctcctctgtctctttcggatgatgaatatgtccagctgatgcctgcagaccctaggtttcctaaattgattgtccccttccatgtcttacctggaagcattagagcaagacttgagaatttggatccaaatctcgaggcagagctggtagctgcccaaattgtagactggggcgaagggagtccatttcctgtagcccaaattacacatctatttggccgaggcagtgaattggagcctcagatcaatgcgatattatatcagaactcggtttgcgattctgacttttctccaggatcgcttactagtcttccacgtgtgccttgggaagtaccagaagaagaggttcaacgtagaaaagatctgagagacctgtgtgtattaaccatcgacccttcgacagctacagatctcgatgatgctctatcagtgcaaagtttacccggcggtttttttagagtcggtgttcacattgctgatgtctcctactttgttttaccagagactgctctcgacacagaagctcggtttaggtcaaccagtgtttacttgatgcagagaaaaatatcaatgttgcctccattactgtcagagaacgtaggttcacttagtccaggagctgatagacttgctttttctatcttgtgggatttaaatagagaaggggatgtgatagatcgctggattggccgtactatcatacggtcgtgctgcaagctttcatatgaccatgctcaagacattatagatggcaaaagtgatgttgcagaaaatggctggcctgcgttgcatggatctttcaaatggtgtgatgtaactcgatctgtcaaacagcttagtgagatttccaccactttaaggcaaaaaagatttagaaatggggctttgcagctggagaattcgaagcctgtttttctatttgatgaacatggagttccatatgattttgtgacgtgttctagaaagggttcgaattttcttgttgaggagtttatgctcttagcaaatatgacagcagctgaggttatttctcaagcttaccgtgctagctcattgctccggaggcatccagaaccaaatactcgcaagctcaaagaatttgaagggttttgttctaagcatggtatggatttggacatttcttcttctggccaacttcaggattcattggagaaaatcactggaaacctcaaggatgactcagtttttgtggatattctcaacaattatgctataaaacctatgcaactagcatcttacttctgcactgggaatttgaaggacagtgttgctgagtggggacactatgcactagctgttcctctctatactcacttcacatctcctcttcgacggtacccagacatagtcgttcaccgtgcgttagctgctgctcttgaggctgaggagttatactcaaagcagaagcaaacagcaattgatgaagggagaagctgtttcaccggcatccatttcaataaagacgctgctgaatctatcgagggcaaggaagcattatcggttgctgctttgaaacatggtgttccctccactgaaatactctctgatgtcgctgcttattgcaatgagaggaagctggctgctcgaaaagtcagagatgcatgtgataagctttacacttggtttgtgctgaagcaaaaggagatttttccgtgtgaagctagagtaatgaacttgggatcaagatttatgactgtttacattagcaagcttggcattgaacggagaatatactacgaccaaatcgaaggcttgtgtgcagactggctagaggcaacatcaacgttaatcgtcgataaactctattccaagagaggtggaagaggctttttcaagcccatgaaggaagctgtctatttggtgagtccttgtgaagtgtgcgttgcaaaatgcagtgcattgtctgtccatgacactgagtcaccagaggccgtgtcaatagatgaggttgcccctgcggtttttcctttgaccatccaacttttctcgaccattcctgtggttcttcatgctgttggtggagatgatggtccgctcgatataggagcaaggctctacatgagttcatactattag

SEQ ID NO: 30344 - protein, 1055 aa, Arabidopsis thaliana
  misc_feature (1)..(1055): Ceres Seq. ID no. 4954599
MKSASSEQSVERIENGHKKKRNRPQKQNRRSKQSSVPIEDAHVEESLDGRDSSRSKAKDSTSSSKQQRPNTDELEAMRASNVAFNSMPPMRAESGYPRRSASPLLSSPEVSKQLLSKSCPDPRACEQSPGMNGELFQQIEGSSQRKIFSSHWSLDAVTEALEKGEAFKALFRVNAHNRNEAYCKIDGVPTDILINGNVCQSRAVEGDTVVIKLDPLSLWPKMKGFVTESAAKPEGTNSPPEKDDKKARQKNGIDVVEGFEDGFSKNKSSVIGKGAKNGVTPSSPPSLDSCLGSFCEQKGNCSAVDKLCGILSSFPHKRPTGQVVAVVEKSLVRDSIVGLLDVKGWIHYKESDPKRCKSPLSLSDDEYVQLMPADPRFPKLIVPFHVLPGSIRARLENLDPNLEAELVAAQIVDWGEGSPFPVAQITHLFGRGSELEPQINAILYQNSVCDSDFSPGSLTSLPRVPWEVPEEEVQRRKDLRDLCVLTIDPSTATDLDDALSVQSLPGGFFRVGVHIADVSYFVLPETALDTEARFRSTSVYLMQRKISMLPPLLSENVGSLSPGADRLAFSILWDLNREGDVIDRWIGRTIIRSCCKLSYDHAQDIIDGKSDVAENGWPALHGSFKWCDVTRSVKQLSEISTTLRQKRFRNGALQLENSKPVFLFDEHGVPYDFVTCSRKGSNFLVEEFMLLANMTAAEVISQAYRASSLLRRHPEPNTRKLKEFEGFCSKHGMDLDISSSGQLQDSLEKITGNLKDDSVFVDILNNYAIKPMQLASYFCTGNLKDSVAEWGHYALAVPLYTHFTSPLRRYPDIVVHRALAAALEAEELYSKQKQTAIDEGRSCFTGIHFNKDAAESIEGKEALSVAALKHGVPSTEILSDVAAYCNERKLAARKVRDACDKLYTWFVLKQKEIFPCEARVMNLGSRFMTVYISKLGIERRIYYDQIEGLCADWLEATSTLIVDKLYSKRGGRGFFKPMKEAVYLVSPCEVCVAKCSALSVHDTESPEAVSIDEVAPAVFPLTIQLFSTIPVVLHAVGGDDGPLDIGARLYMSSYY

SEQ ID NO: 30345 - protein, 979 aa, Arabidopsis thaliana
  misc_feature (1)..(979): Ceres Seq. ID no. 4954600
MRASNVAFNSMPPMRAESGYPRRSASPLLSSPEVSKQLLSKSCPDPRACEQSPGMNGELFQQIEGSSQRKIFSSHWSLDAVTEALEKGEAFKALFRVNAHNRNEAYCKIDGVPTDILINGNVCQSRAVEGDTVVIKLDPLSLWPKMKGFVTESAAKPEGTNSPPEKDDKKARQKNGIDVVEGFEDGFSKNKSSVIGKGAKNGVTPSSPPSLDSCLGSFCEQKGNCSAVDKLCGILSSFPHKRPTGQVVAVVEKSLVRDSIVGLLDVKGWIHYKESDPKRCKSPLSLSDDEYVQLMPADPRFPKLIVPFHVLPGSIRARLENLDPNLEAELVAAQIVDWGEGSPFPVAQITHLFGRGSELEPQINAILYQNSVCDSDFSPGSLTSLPRVPWEVPEEEVQRRKDLRDLCVLTIDPSTATDLDDALSVQSLPGGFFRVGVHIADVSYFVLPETALDTEARFRSTSVYLMQRKISMLPPLLSENVGSLSPGADRLAFSILWDLNREGDVIDRWIGRTIIRSCCKLSYDHAQDIIDGKSDVAENGWPALHGSFKWCDVTRSVKQLSEISTTLRQKRFRNGALQLENSKPVFLFDEHGVPYDFVTCSRKGSNFLVEEFMLLANMTAAEVISQAYRASSLLRRHPEPNTRKLKEFEGFCSKHGMDLDISSSGQLQDSLEKITGNLKDDSVFVDILNNYAIKPMQLASYFCTGNLKDSVAEWGHYALAVPLYTHFTSPLRRYPDIVVHRALAAALEAEELYSKQKQTAIDEGRSCFTGIHFNKDAAESIEGKEALSVAALKHGVPSTEILSDVAAYCNERKLAARKVRDACDKLYTWFVLKQKEIFPCEARVMNLGSRFMTVYISKLGIERRIYYDQIEGLCADWLEATSTLIVDKLYSKRGGRGFFKPMKEAVYLVSPCEVCVAKCSALSVHDTESPEAVSIDEVAPAVFPLTIQLFSTIPVVLHAVGGDDGPLDIGARLYMSSYY

SEQ ID NO: 30346 - protein, 969 aa, Arabidopsis thaliana
  misc_feature (1)..(969): Ceres Seq. ID no. 4954601
MPPMRAESGYPRRSASPLLSSPEVSKQLLSKSCPDPRACEQSPGMNGELFQQIEGSSQRKIFSSHWSLDAVTEALEKGEAFKALFRVNAHNRNEAYCKIDGVPTDILINGNVCQSRAVEGDTVVIKLDPLSLWPKMKGFVTESAAKPEGTNSPPEKDDKKARQKNGIDVVEGFEDGFSKNKSSVIGKGAKNGVTPSSPPSLDSCLGSFCEQKGNCSAVDKLCGILSSFPHKRPTGQVVAVVEKSLVRDSIVGLLDVKGWIHYKESDPKRCKSPLSLSDDEYVQLMPADPRFPKLIVPFHVLPGSIRARLENLDPNLEAELVAAQIVDWGEGSPFPVAQITHLFGRGSELEPQINAILYQNSVCDSDFSPGSLTSLPRVPWEVPEEEVQRRKDLRDLCVLTIDPSTATDLDDALSVQSLPGGFFRVGVHIADVSYFVLPETALDTEARFRSTSVYLMQRKISMLPPLLSENVGSLSPGADRLAFSILWDLNREGDVIDRWIGRTIIRSCCKLSYDHAQDIIDGKSDVAENGWPALHGSFKWCDVTRSVKQLSEISTTLRQKRFRNGALQLENSKPVFLFDEHGVPYDFVTCSRKGSNFLVEEFMLLANMTAAEVISQAYRASSLLRRHPEPNTRKLKEFEGFCSKHGMDLDISSSGQLQDSLEKITGNLKDDSVFVDILNNYAIKPMQLASYFCTGNLKDSVAEWGHYALAVPLYTHFTSPLRRYPDIVVHRALAAALEAEELYSKQKQTAIDEGRSCFTGIHFNKDAAESIEGKEALSVAALKHGVPSTEILSDVAAYCNERKLAARKVRDACDKLYTWFVLKQKEIFPCEARVMNLGSRFMTVYISKLGIERRIYYDQIEGLCADWLEATSTLIVDKLYSKRGGRGFFKPMKEAVYLVSPCEVCVAKCSALSVHDTESPEAVSIDEVAPAVFPLTIQLFSTIPVVLHAVGGDDGPLDIGARLYMSSYY

SEQ ID NO: 30347 - DNA, 1385 bp, Arabidopsis thaliana
  misc_feature (1)..(1385): Ceres Seq. ID no. 4954706
taggatctgttcttcccaaaacgactcatgccgtccattcgattcggaatatagttgtagaggagatttcatttctaatcaatttcttcggtgatgagttccaccgcggcatcttccaccgtcggaggaggcggatcgtctgagatttccggtgtcaaaaaaacctccaagcgaccaaaatattctaggtttactcagcaagagcttccagcgtgcaagccaattcttactccaagatgggtgatcttgacatttcttgtcgctggggttgtcttcattccccttggagtgatctgcttatttgcttctcagggagtagtcgagattgttgatcgatatgacacagactgtattccaacatcttctagaaacaacatggtcgcttacatacagggtgaaggagataagatctgtaagagaacaataacggtgacaaaagctatgaagcatcctgtctatgtatactaccaacttgagaatttctaccaaaaccatagacggtatgtgaaaagtcgaaacgatgcacaactaagaagtccaaaagaagagcatgatgtgaagacctgtgcacctgaggataatgtgggtggagaaccaattgtgccatgtggtcttgttgcttggagtttgttcaacgatacttatagcttttcaagaaatagccaacaacttcttgtgaataagaaaggtatctcatggaagagtgacagagaaaacaagtttgggaaaaatgtcttccctaaaaattttcagaaaggagcaccaataggcggtggaactcttaatatttctaaaccgttgagtgagcaagaagacctcatagtctggatgcgaaccgcggctttgccaacgtttaggaagctgtatgggaagattgagacagacctacacgcgggtgataccataacggtcttgttgcagaacaactacaacacttacagcttcaatgggcagaagaagctagtgctgtcaacaactagctggctcggcggaaggaatgatttcctcgggattgcttatctgactgtaggcagtatttgcttgttcttggctgttacatttgccgtattgtatctagttaagccaaggcaactcggagacccctcgtacctttcgtggaacagaagtgctggaggtttacagtaatagagcccttcgagcatcaggcgttgatccctccatcgtcaaacggcgtagttttggcttagctaacaaaagagaaaaaacgaaaataagtatatagttcgtttataattttgatattgttgaaaacaaacgtttgtgttttgtcctgttgttgttaagatactagccagtaaatggtgtttagaaaataatgtaaatgaattacagttggaaattgcaaaataagcagagaattttgt

SEQ ID NO: 30348 - protein, 350 aa, Arabidopsis thaliana
  misc_feature (1)..(350): Ceres Seq. ID no. 4954707
MSSTAASSTVGGGGSSEISGVKKTSKRPKYSRFTQQELPACKPILTPRWVILTFLVAGVVFIPLGVICLFASQGVVEIVDRYDTDCIPTSSRNNMVAYIQGEGDKICKRTITVTKAMKHPVYVYYQLENFYQNHRRYVKSRNDAQLRSPKEEHDVKTCAPEDNVGGEPIVPCGLVAWSLFNDTYSFSRNSQQLLVNKKGISWKSDRENKFGKNVFPKNFQKGAPIGGGTLNISKPLSEQEDLIVWMRTAALPTFRKLYGKIETDLHAGDTITVLLQNNYNTYSFNGQKKLVLSTTSWLGGRNDFLGIAYLTVGSICLFLAVTFAVLYLVKPRQLGDPSYLSWNRSAGGLQ

SEQ ID NO: 30349 - protein, 256 aa, Arabidopsis thaliana
  misc_feature (1)..(256): Ceres Seq. ID no. 4954708
MVAYIQGEGDKICKRTITVTKAMKHPVYVYYQLENFYQNHRRYVKSRNDAQLRSPKEEHDVKTCAPEDNVGGEPIVPCGLVAWSLFNDTYSFSRNSQQLLVNKKGISWKSDRENKFGKNVFPKNFQKGAPIGGGTLNISKPLSEQEDLIVWMRTAALPTFRKLYGKIETDLHAGDTITVLLQNNYNTYSFNGQKKLVLSTTSWLGGRNDFLGIAYLTVGSICLFLAVTFAVLYLVKPRQLGDPSYLSWNRSAGGLQ

SEQ ID NO: 30350 - protein, 234 aa, Arabidopsis thaliana
  misc_feature (1)..(234): Ceres Seq. ID no. 4954709
MKHPVYVYYQLENFYQNHRRYVKSRNDAQLRSPKEEHDVKTCAPEDNVGGEPIVPCGLVAWSLFNDTYSFSRNSQQLLVNKKGISWKSDRENKFGKNVFPKNFQKGAPIGGGTLNISKPLSEQEDLIVWMRTAALPTFRKLYGKIETDLHAGDTITVLLQNNYNTYSFNGQKKLVLSTTSWLGGRNDFLGIAYLTVGSICLFLAVTFAVLYLVKPRQLGDPSYLSWNRSAGGLQ

SEQ ID NO: 30351 - DNA, 849 bp, Arabidopsis thaliana
  misc_feature (1)..(849): Ceres Seq. ID no. 4955096
atggcttattctaaagcttgttataaactcatcaccaccattacaatcctccttctatacttcacatttgcctctcttgccaaaaacgtagatgtaagtgaatgcagagctgaatctggagatccatcatgtcacaacaacaaagaagctaaaaagcttaaaatgattgcaatcccatctatcttagtggcgagcatgatcggtgtttctttacagttcctttctcgttacattcctgctttaggacccgaccgagttatatttgggatcataaagactttaacttcgggtgtaattttggcaaccgcttttatgcatgtgttaccggactctttcgatgatctcacatccaaatgtttgcctgaagacccgtggaggaagtttcctttcaccactttcatcgcgatgaactcggcttttctcgttttaatgattgctttggtgcacttacaagaaaaggtcaacgatgataagacaaataaccaatgtaccatacgatcacttatcgcagcgttttgtttccatgaactcgctgaaggaatgagactcggtggtcccattttacatcaaaatgaattggaaaatggtgttgtcacaatgcaatttgggattgctttagggatgcaaatacaaaagatatatggtgagacaagtccgacagcgttgatcttgatggggatgttgaatgcgtgttctgcaggattattgattgatctggcccttgttaatctcttggctcatgaattatacggaccaaagatacaagggaatatgaaacttcatgtcctcggttatgttgctaccttcataggtgccgcgggaatgtctttgatggctaagtgggcatag

SEQ ID NO: 30352 - protein, 282 aa, Arabidopsis thaliana
  misc_feature (1)..(282): Ceres Seq. ID no. 4955097
MAYSKACYKLITTITILLLYFTFASLAKNVDVSECRAESGDPSCHNNKEAKKLKMIAIPSILVASMIGVSLQFLSRYIPALGPDRVIFGIIKTLTSGVILATAFMHVLPDSFDDLTSKCLPEDPWRKFPFTTFIAMNSAFLVLMIALVHLQEKVNDDKTNNQCTIRSLIAAFCFHELAEGMRLGGPILHQNELENGVVTMQFGIALGMQIQKIYGETSPTALILMGMLNACSAGLLIDLALVNLLAHELYGPKIQGNMKLHVLGYVATFIGAAGMSLMAKWA

SEQ ID NO: 30353 - protein, 228 aa, Arabidopsis thaliana
  misc_feature (1)..(228): Ceres Seq. ID no. 4955098
MIAIPSILVASMIGVSLQFLSRYIPALGPDRVIFGIIKTLTSGVILATAFMHVLPDSFDDLTSKCLPEDPWRKFPFTTFIAMNSAFLVLMIALVHLQEKVNDDKTNNQCTIRSLIAAFCFHELAEGMRLGGPILHQNELENGVVTMQFGIALGMQIQKIYGETSPTALILMGMLNACSAGLLIDLALVNLLAHELYGPKIQGNMKLHVLGYVATFIGAAGMSLMAKWA

SEQ ID NO: 30354 - protein, 217 aa, Arabidopsis thaliana
  misc_feature (1)..(217): Ceres Seq. ID no. 4955099
MIGVSLQFLSRYIPALGPDRVIFGIIKTLTSGVILATAFMHVLPDSFDDLTSKCLPEDPWRKFPFTTFIAMNSAFLVLMIALVHLQEKVNDDKTNNQCTIRSLIAAFCFHELAEGMRLGGPILHQNELENGVVTMQFGIALGMQIQKIYGETSPTALILMGMLNACSAGLLIDLALVNLLAHELYGPKIQGNMKLHVLGYVATFIGAAGMSLMAKWA

SEQ ID NO: 30355 - DNA, 1267 bp, Arabidopsis thaliana
  misc_feature (1)..(1267): Ceres Seq. ID no. 4955187
aatttgcagggttcttcttcttcttcttcttttttctctaaactggaaaataaagaagaaaagaacatggatttgcattcttgtctaaactcatactttcttttgctcctcctctgtcttcttaatattaccaccattaactcaacgaagccattagaacaagaaacagtgctttttggcggcaactttccggctttttatgttattggagattcattggttgattcaggaaacaataatcatcttacaacgatggtcaaatcgaattttccaccttatggttcggactttgaaggtggcaaagccaccggccgtttcagcaatggcaaaacaattgctgattacattgctatctactatggtcttcctttggttcctgcttatttgggattatctcaagaagaaaagaatagtatctcaactggtattaactatgcttctgctggctgtgggattcttcctcagacaggaaggcaaataggaacatgtctctcgttaagtgtccaagtcgatatgttccaggagaccatcacaaacaatctgaagaagaacttcaagaagtccgagctccgtgaacacttggctgaatcgttgtttatgatcgccattggggttaacgactacacattcttatttaatgaaacaaccgatgcgaatgagtttgcaaacaagcttcttcatgattacttgcttcaaatagaaagattgcacaagttaggagcaaggaagttcttcatcaacaacattaaaccattaggatgttacccaaatgttgtagctaagaccgtgccacgtggaagctgcaacgatgctttgaactttgcggtcagcattttcaacactaagcttagaaaaagtctgtctcgtatgacgcaaaaattcatcaaaacgtcctttttatactcggattactacaactacatgttgggactaagaggaccttcaagcaatcaagttggttcgagtctattgaacgtgacaagcccatgttgtcctaacgtttatgatggaggtcaattgacaagttgcaagcctggttcgatcgcgtgtaaggcacccgatactcatattttctttgatccgtttcatccgactcaattggcgaattacatgtatgcgattgcgtgtttccacgagagaagtatttgccatgtgatattggaagattaacttttgtcggcaacaatcttttttgtttgttttaaacaccaatttggttgttgtttgttgctttcaacttttcaatatcatcagaacttttaagatt

SEQ ID NO: 30356 - protein, 389 aa, Arabidopsis thaliana
  misc_feature (1)..(389): Ceres Seq. ID no. 4955188
NLQGSSSSSSFFSKLENKEEKNMDLHSCLNSYFLLLLLCLLNITTINSTKPLEQETVLFGGNFPAFYVIGDSLVDSGNNNHLTTMVKSNFPPYGSDFEGGKATGRFSNGKTIADYIAIYYGLPLVPAYLGLSQEEKNSISTGINYASAGCGILPQTGRQIGTCLSLSVQVDMFQETITNNLKKNFKKSELREHLAESLFMIAIGVNDYTFLFNETTDANEFANKLLHDYLLQIERLHKLGARKFFINNIKPLGCYPNVVAKTVPRGSCNDALNFAVSIFNTKLRKSLSRMTQKFIKTSFLYSDYYNYMLGLRGPSSNQVGSSLLNVTSPCCPNVYDGGQLTSCKPGSIACKAPDTHIFFDPFHPTQLANYMYAIACFHERSICHVILED

SEQ ID NO: 30357 - protein, 367 aa, Arabidopsis thaliana
  misc_feature (1)..(367): Ceres Seq. ID no. 4955189
MDLHSCLNSYFLLLLLCLLNITTINSTKPLEQETVLFGGNFPAFYVIGDSLVDSGNNNHLTTMVKSNFPPYGSDFEGGKATGRFSNGKTIADYIAIYYGLPLVPAYLGLSQEEKNSISTGINYASAGCGILPQTGRQIGTCLSLSVQVDMFQETITNNLKKNFKKSELREHLAESLFMIAIGVNDYTFLFNETTDANEFANKLLHDYLLQIERLHKLGARKFFINNIKPLGCYPNVVAKTVPRGSCNDALNFAVSIFNTKLRKSLSRMTQKFIKTSFLYSDYYNYMLGLRGPSSNQVGSSLLNVTSPCCPNVYDGGQLTSCKPGSIACKAPDTHIFFDPFHPTQLANYMYAIACFHERSICHVILED

SEQ ID NO: 30358 - protein, 305 aa, Arabidopsis thaliana
  misc_feature (1)..(305): Ceres Seq. ID no. 4955190
MVKSNFPPYGSDFEGGKATGRFSNGKTIADYIAIYYGLPLVPAYLGLSQEEKNSISTGINYASAGCGILPQTGRQIGTCLSLSVQVDMFQETITNNLKKNFKKSELREHLAESLFMIAIGVNDYTFLFNETTDANEFANKLLHDYLLQIERLHKLGARKFFINNIKPLGCYPNVVAKTVPRGSCNDALNFAVSIFNTKLRKSLSRMTQKFIKTSFLYSDYYNYMLGLRGPSSNQVGSSLLNVTSPCCPNVYDGGQLTSCKPGSIACKAPDTHIFFDPFHPTQLANYMYAIACFHERSICHVILED

SEQ ID NO: 30359 - DNA, 1749 bp, Arabidopsis thaliana
  misc_feature (1)..(1749): Ceres Seq. ID no. 4955327
atgcctgagagagatacagttgtttggaatgcattgatttgtgggtattcacgaaatggttatgagtgtgatgcgtggaagctttttatcgtaatgcttcagcaagggttttctccatctgctactacacttgtgaatttgttacctttttgtggacaatgtggttttgtatctcaagggagatctgttcatggtgttgctgcaaagtctggccttgagttggattctcaggtgaagaatgcgttgatttcgttttactcaaagtgtgcagagttgggttcagcagaagtcttgtttagagaaatgaaagataaaagcacagtttcttggaatacaatgattggtgcctatagccagagtggtttacaggaagaagccatcactgttttcaagaatatgtttgagaagaatgtggaaattagtccagtcactatcatcaatcttctttctgctcatgttagtcacgagccactacattgtcttgttgttaaatgtggaatggtgaatgatatatctgtggttacttctttggtctgtgcatattcaaggtgtgggtgtttggtttcagcagagcgtctttatgcgtctgctaaacaagatagtattgtcggcttaacttcgattgtttcatgctatgcggagaaaggagatatggatatagcagttgtgtatttttctaaaacgcgtcagttgtgtatgaaaattgatgctgtagctttagttggaattctccatggatgtaaaaagtcttcccatattgacataggaatgtcgttacatggttatgcgatcaaaagcggattgtgcacaaaaacactggttgtgaatggactgataactatgtactctaagtttgatgatgtagagactgtcctgtttttgtttgagcaactgcaggagactcctttaattagctggaactcagtgatatccgggtgtgtacagtctggaagggcaagtacagcttttgaggtgttccatcagatgatgttaactggtggacttttgccggatgccattacgatagccagtttgcttgctggctgttcccagctttgttgcttgaatttggggaaggagcttcatggctatactcttaggaacaattttgaaaatgagaactttgtttgcactgctctgatagatatgtatgccaaatgtggaaacgaagtacaagcggaaagtgtgttcaagagtataaaagctccgtgtacagcaacatggaactcaatgatatcaggatacagcttatcggggttacaacatcgagctctttcttgttacttggaaatgcgagagaaggggttgaaacctgacgagatcacctttttgggggttctgtctgcatgtaaccatggaggctttgtcgatgaaggaaaaatatgtttcagagcaatgatcaaagagtttggaatatctccaactttacagcattatgcacttatggttggcttgttgggaagagcatgtttatttactgaggcattgtatttaatttggaagatggatataaagccggattctgcagtatggggtgctctacttagcgcgtgcattattcacagagagttggaggttggggaatatgtagctaggaaaatgtttatgctggattacaagaatggagggctgtatgtattgatgtcaaacctatatgcaacagaagcaatgtgggacgacgtagttagagtcaggaatatgatgaaagataatggatacgatggttatttgggagttagccaaatataa

SEQ ID NO: 30360 - protein, 582 aa, Arabidopsis thaliana; identical to SEQ ID NO: 28656
  misc_feature (1)..(582): Ceres Seq. ID no. 4955328

SEQ ID NO: 30361 - protein, 551 aa, Arabidopsis thaliana
  misc_feature (1)..(551): Ceres Seq. ID no. 4955329
MLQQGFSPSATTLVNLLPFCGQCGFVSQGRSVHGVAAKSGLELDSQVKNALISFYSKCAELGSAEVLFREMKDKSTVSWNTMIGAYSQSGLQEEAITVFKNMFEKNVEISPVTIINLLSAHVSHEPLHCLVVKCGMVNDISVVTSLVCAYSRCGCLVSAERLYASAKQDSIVGLTSIVSCYAEKGDMDIAVVYFSKTRQLCMKIDAVALVGILHGCKKSSHIDIGMSLHGYAIKSGLCTKTLVVNGLITMYSKFDDVETVLFLFEQLQETPLISWNSVISGCVQSGRASTAFEVFHQMMLTGGLLPDAITIASLLAGCSQLCCLNLGKELHGYTLRNNFENENFVCTALIDMYAKCGNEVQAESVFKSIKAPCTATWNSMISGYSLSGLQHRALSCYLEMREKGLKPDEITFLGVLSACNHGGFVDEGKICFRAMIKEFGISPTLQHYALMVGLLGRACLFTEALYLIWKMDIKPDSAVWGALLSACIIHRELEVGEYVARKMFMLDYKNGGLYVLMSNLYATEAMWDDVVRVRNMMKDNGYDGYLGVSQI

SEQ ID NO: 30362 - protein, 481 aa, Arabidopsis thaliana
  misc_feature (1)..(481): Ceres Seq. ID no. 4955330
MKDKSTVSWNTMIGAYSQSGLQEEAITVFKNMFEKNVEISPVTIINLLSAHVSHEPLHCLVVKCGMVNDISVVTSLVCAYSRCGCLVSAERLYASAKQDSIVGLTSIVSCYAEKGDMDIAVVYFSKTRQLCMKIDAVALVGILHGCKKSSHIDIGMSLHGYAIKSGLCTKTLVVNGLITMYSKFDDVETVLFLFEQLQETPLISWNSVISGCVQSGRASTAFEVFHQMMLTGGLLPDAITIASLLAGCSQLCCLNLGKELHGYTLRNNFENENFVCTALIDMYAKCGNEVQAESVFKSIKAPCTATWNSMISGYSLSGLQHRALSCYLEMREKGLKPDEITFLGVLSACNHGGFVDEGKICFRAMIKEFGISPTLQHYALMVGLLGRACLFTEALYLIWKMDIKPDSAVWGALLSACIIHRELEVGEYVARKMFMLDYKNGGLYVLMSNLYATEAMWDDVVRVRNMMKDNGYDGYLGVSQI

SEQ ID NO: 30363 - DNA, 1175 bp, Arabidopsis thaliana
  misc_feature (1)..(1175): Ceres Seq. ID no. 4956558
aaacatagttaaaccaaattttctaagtgtctcataaaaaatgacgagattcggattagctcttttgatgattcttgtgattcaagggcttgtgaccttttcagaagcacaattgaagatgggattctacgaccaaacgtgcccttacgcagagaagatcgtacaagatgttgtcaaccaacatataaacaatgcaccctctttggctgctggcctaattaggatgcattttcatgactgcttcgttcggggttgtgatggttccatcttgatcaacgcgacatcgagcaaccaacaagtggagaagcttgctcctccgaatctaactgtgagaggtttcgattttatcgataaagtaaagtctgctctagaatcaaagtgccctggaatcgtctcttgcgctgatatcatcacacttgctactagagactctattgttgctattgcttagggtggaccgacatggaacgttccaacggggcgcagagacggacgtatctctaactttgccgaggctatgaacaatattcctcctcctttcggaaacttcacgactctgataaccctctttggaaaccaaggacttgatgttaaagacctcgtcttgttatccggtgcccacacgattggagtgtctcattgctcctccttctcaaaccgtctcttcaatttcaccggcgttggagaccaagatccatcgctcgacagcgaatatgccgacaatctcaaatcacggagatgtttatctatcgctgacaataccacaaaagtcgaaatggatcccggtagtcgaaacaccttcgatcttagctactaccgtcttgtcctaaaacgtcgtggactttttgagtctgacgctgcattgactatgaatcctgcggcattggctcaggtcaaacgcttcgccggaggatcggagcaagagttctttgctgagttctccaactccatggagaaaatgggaaggattggggtcaaaacagggtcggatggggagattcgaagaacatgtgcatttgttaactaaaagtgtttcttactttttctttcgcaacttttttgttttgttttaaatatcttttatattggtttttatgttccttttgtcaacttttttgggtgtttggaagaatttcgagatatgtattattgtatgtggtgaatatgtgattttc

SEQ ID NO: 30364 - protein, 169 aa, Arabidopsis thaliana
  misc_feature (1)..(169): Ceres Seq. ID no. 4956559
MNNIPPPFGNFTTLITLFGNQGLDVKDLVLLSGAHTIGVSHCSSFSNRLFNFTGVGDQDPSLDSEYADNLKSRRCLSIADNTTKVEMDPGSRNTFDLSYYRLVLKRRGLFESDAALTMNPAALAQVKRFAGGSEQEFFAEFSNSMEKMGRIGVKTGSDGEIRRTCAFVN

SEQ ID NO: 30365 - protein, 136 aa, Arabidopsis thaliana
  misc_feature (1)..(136): Ceres Seq. ID no. 4956560
MTRFGLALLMILVIQGLVTFSEAQLKMGFYDQTCPYAEKIVQDVVNQHINNAPSLAAGLIRMHFHDCFVRGCDGSILINATSSNQQVEKLAPPNLTVRGFDFIDKVKSALESKCPGIVSCADIITLATRDSIVAIA

SEQ ID NO: 30366 - protein, 127 aa, Arabidopsis thaliana
  misc_feature (1)..(127): Ceres Seq. ID no. 4956561
MILVIQGLVTFSEAQLKMGFYDQTCPYAEKIVQDVVNQHINNAPSLAAGLIRMHFHDCFVRGCDGSILINATSSNQQVEKLAPPNLTVRGFDFIDKVKSALESKCPGIVSCADIITLATRDSIVAIA

SEQ ID NO: 30367 - DNA, 3327 bp, Arabidopsis thaliana
  misc_feature (1)..(3327): Ceres Seq. ID no. 4956793
atggaggacttggggaagtctttagggttaacattgaaggaagtacgtggatggttcaagagaagaaggagtagagggaaaggtgtaaaatccatggcgaatgatgggttgggagcaaagaatcctcagttatacgatagatccctcatgaggagttccacatcttccagatgcgttggagtagctgttgaggaaagatgtattgtgggaacaaggaaggccagttgtcaaaacttgttgccttcatcacacattttggctaaagtttttcgaaaggatggtccatcgcttggttctgaatttgatcatctcccgtctggagctcgcaaagcttcttggctgggcacttcttctgtcggtcaacagaaacagaaagtggcaagaaaaagaaagatttctgagctgatggatcataccagtcaggattgcattcaagagaatgctactgtgatgaaacatggtattggaaagggtttgatgactgtatggcgtgtaatgaatccaaacaggagggatgtatctccttgcgttgatttattggatgaaagagctacattacctcaaagctcagcacgtaatcccccacatcaaaagaaaaagcaaagacaattagcatcaatactgaagcagaaactgttgcagaagaggtcgacagaaaagaagaggcgttctatacatagagaggcggaattaaacaaagatgaaactcagagagaatttaaagaaaactgtgagcttgccgcggacggggaggtatttaaagaaacctgccagacaatttcgacactagtggatgacgaggaattagagatgcgtgagcgacatgagcgaggaaatccgttgacatgttcatgccatcatcctagtagtggatctcatggttgttttctttgcaaaggtattgccatgcggtcctctgacagttctttattgtttccagatttattgcccaagtttcccccaaactctgttcagatgaggatgccttttggtttgcatccatggaattcttctccagagtctgttaagaaactgtttaaggattccttgctccttggtaaaattcatctttccctgctgaagctgcttttgcttgatgttgaaaccgagctggaaaggggatctttttcaaacttgagtatatcatgcaagtttctagccctgcttcagtcggttgagagccaaattcttattcttgatatgtggagaaattcattaaattctcttacatggacggaactattgcggcagatattggttgccgctggttatggttcattgaagtgtgctgttcaatcagaagaactaagtaagcaactagcatctacttgttttgttcttggagatagatcagttatatgtggggaattgaaggctcttgctcgattatattttgttattgatgatatccacatgaaactcatgaaaaagtatggccttcgtcttggaacgttaaagggtgaattatttagaatgcttaatgggcaaggcaataatggcttgaaaatatccgagttagccgatgctccagaggttgctgtgctaaatcttgcaactgtaccagaagaacgagagaattcaatatgttcaactctagcaagtgatattacattattcgaaaagatatcagaatcaacgtatcgtgtacgtgttaattgtttctctgaggaccctgacaagagccagtctgattcggacgactccgggagtgttgatgatgaatctgatgattgctcaattagttctggtgatgaaattgaacatgtttcagaaaatcctgcacttcgaaaagttaagtgtaggaaaaggcggaagcataaaagtaaaatgcgggaagtatgtagtgagattgatgaaagccatcccggagaaccatggctgttggggctaatggaaggcgaatattcagacctaagcgttgaagagaagttagatgtttttgtggctttgattgatcttcttagttctggttccactatcagaatggaggatctaccgagagctgtggctgactgtgcccctagtatctatagtcatggttctggtggaaaaattaagcgatcctcctctaatcagtacagctatccacgtggatcatgggtccatggaggagagctttatggaataaaagcactatctaaatcgtctgattctcatccagttgattcttcatcaattgtgggggcatttgcaaagctggctggaaatagagcgaataatgttcaccctatgcaatctgtgtaccttggttctgatcgaaggttcaacaggtactggcttttcttaggcacatgcaatgcaaatgaccctggtcataggtgtgtgttctttgaatcttctgaagatggtcattgggaagttatcaacaacaaggaggctttgcgggcgctgttgtcagttttggacgataggggcagacgggaagctcgtcttattgagtcgttggagaaacgagaaagttttctttgtcaagccatgctgagtagacaggtgacccagtcggagacagcccatttcacagatatagttagagaggacagttcttcacctgtttctgatatagacaacaacctatgtctgaatgaaattgccaatgatcaattctcctcgcaacatgcggctatagtatttgagattggaagtaagcgggagaaaagcttattgtggagccttattcaggaatttgatgattggatatgggcaaattttaattttaatctcaattctgttaaacaccgccgaagatcctaccttgattcacttactaggtgtaagagttgccatgatttgtattggagagatgagaagcactgtaagatttgccatgccacgtttgaggttgatatagatcttgaagaaagatatgcgattcatgcggccacatgtatgaggaaagaagagtgtgatacatttccggatcataaagttctatcttcccagttgcaatcactaaaagctgcagtatatgccattgagtctgctatgcctgaagatgccttgattggtgcatggagaaagtcagctcataggttatgggcgaaaagacttcggcgaagctcatctgtgtctgaaattacgcaggtgattggcgactttgttggggcaatcaatgaagaatggctatggcactgtagtgatcaagggcagactttaatgggagaaatcataaattgcttcccttcgatgcctcaaacaacttctgcgattgctctctggttggtaaaattggataccttgattgctccctatgtcgaaaaagctccacctgaaagggatcaaccgttgtgcaggaccagaaatacaagtagacgagcgtctaagcggtag

SEQ ID NO: 30368 - protein, 1108 aa, Arabidopsis thaliana; identical to SEQ ID NO: 28813
  misc_feature (1)..(1108): Ceres Seq. ID no. 4956794

SEQ ID NO: 30369 - protein, 1077 aa, Arabidopsis thaliana
  misc_feature (1)..(1077): Ceres Seq. ID no. 4956795
MANDGLGAKNPQLYDRSLMRSSTSSRCVGVAVEERCIVGTRKASCQNLLPSSHILAKVFRKDGPSLGSEFDHLPSGARKASWLGTSSVGQQKQKVARKRKISELMDHTSQDCIQENATVMKHGIGKGLMTVWRVMNPNRRDVSPCVDLLDERATLPQSSARNPPHQKKKQRQLASILKQKLLQKRSTEKKRRSIHREAELNKDETQREFKENCELAADGEVFKETCQTISTLVDDEELEMRERHERGNPLTCSCHHPSSGSHGCFLCKGIAMRSSDSSLLFPDLLPKFPPNSVQMRMPFGLHPWNSSPESVKKLFKDSLLLGKIHLSLLKLLLLDVETELERGSFSNLSISCKFLALLQSVESQILILDMWRNSLNSLTWTELLRQILVAAGYGSLKCAVQSEELSKQLASTCFVLGDRSVICGELKALARLYFVIDDIHMKLMKKYGLRLGTLKGELFRMLNGQGNNGLKISELADAPEVAVLNLATVPEERENSICSTLASDITLFEKISESTYRVRVNCFSEDPDKSQSDSDDSGSVDDESDDCSISSGDEIEHVSENPALRKVKCRKRRKHKSKMREVCSEIDESHPGEPWLLGLMEGEYSDLSVEEKLDVFVALIDLLSSGSTIRMEDLPRAVADCAPSIYSHGSGGKIKRSSSNQYSYPRGSWVHGGELYGIKALSKSSDSHPVDSSSIVGAFAKLAGNRANNVHPMQSVYLGSDRRFNRYWLFLGTCNANDPGHRCVFFESSEDGHWEVINNKEALRALLSVLDDRGRREARLIESLEKRESFLCQAMLSRQVTQSETAHFTDIVREDSSSPVSDIDNNLCLNEIANDQFSSQHAAIVFEIGSKREKSLLWSLIQEFDDWIWANFNFNLNSVKHRRRSYLDSLTRCKSCHDLYWRDEKHCKICHATFEVDIDLEERYAIHAATCMRKEECDTFPDHKVLSSQLQSLKAAVYAIESAMPEDALIGAWRKSAHRLWAKRLRRSSSVSEITQVIGDFVGAINEEWLWHCSDQGQTLMGEIINCFPSMPQTTSAIALWLVKLDTLIAPYVEKAPPERDQPLCRTRNTSRRASKR

SEQ ID NO: 30370 - protein, 1059 aa, Arabidopsis thaliana
  misc_feature (1)..(1059): Ceres Seq. ID no. 4956796
MRSSTSSRCVGVAVEERCIVGTRKASCQNLLPSSHILAKVFRKDGPSLGSEFDHLPSGARKASWLGTSSVGQQKQKVARKRKISELMDHTSQDCIQENATVMKHGIGKGLMTVWRVMNPNRRDVSPCVDLLDERATLPQSSARNPPHQKKKQRQLASILKQKLLQKRSTEKKRRSIHREAELNKDETQREFKENCELAADGEVFKETCQTISTLVDDEELEMRERHERGNPLTCSCHHPSSGSHGCFLCKGIAMRSSDSSLLFPDLLPKFPPNSVQMRMPFGLHPWNSSPESVKKLFKDSLLLGKIHLSLLKLLLLDVETELERGSFSNLSISCKFLALLQSVESQILILDMWRNSLNSLTWTELLRQILVAAGYGSLKCAVQSEELSKQLASTCFVLGDRSVICGELKALARLYFVIDDIHMKLMKKYGLRLGTLKGELFRMLNGQGNNGLKISELADAPEVAVLNLATVPEERENSICSTLASDITLFEKISESTYRVRVNCFSEDPDKSQSDSDDSGSVDDESDDCSISSGDEIEHVSENPALRKVKCRKRRKHKSKMREVCSEIDESHPGEPWLLGLMEGEYSDLSVEEKLDVFVALIDLLSSGSTIRMEDLPRAVADCAPSIYSHGSGGKIKRSSSNQYSYPRGSWVHGGELYGIKALSKSSDSHPVDSSSIVGAFAKLAGNRANNVHPMQSVYLGSDRRFNRYWLFLGTCNANDPGHRCVFFESSEDGHWEVINNKEALRALLSVLDDRGRREARLIESLEKRESFLCQAMLSRQVTQSETAHFTDIVREDSSSPVSDIDNNLCLNEIANDQFSSQHAAIVFEIGSKREKSLLWSLIQEFDDWIWANFNFNLNSVKHRRRSYLDSLTRCKSCHDLYWRDEKHCKICHATFEVDIDLEERYAIHAATCMRKEECDTFPDHKVLSSQLQSLKAAVYAIESAMPEDALIGAWRKSAHRLWAKRLRRSSSVSEITQVIGDFVGAINEEWLWHCSDQGQTLMGEIINCFPSMPQTTSAIALWLVKLDTLIAPYVEKAPPERDQPLCRTRNTSRRASKR

SEQ ID NO: 30371 - DNA, 1902 bp, Arabidopsis thaliana
  misc_feature (1)..(1902): Ceres Seq. ID no. 4957173
atgttccaactgctccgacgagctcatggactttgcatgccgtcctctctctacttctcgcgtctcgtaaaccgctctttactctcaaagtctccaactttagccaaaatcgtccatgcccagctcctggaagctggattcgtacgcactacttattggggaaatcgctgccttcagctctacttcaaatccggatccgtcatcaatgccctccaactgttcgacgatattcctgataagaacaccataacctggaacgtttgcttaaagggtttgtttaaaaatggttatctcaataacgcacttgacctgttcgacgaaatgcctgaacgagatgttgttagctggaatacaatgatttcagggttggtttcttgtgggtttcatgaatatgggattagggttttcttcgatatgcagagatgggagattagaccaacggagtttactttttcgattctagcttctcttgttacttgtgttcgacatggggaacagattcatggtaatgctatttgtagtggtgtgagtaggtataatttggttgtgtggaactctgttatggatatgtatagaagattaggagtttttgattacgcgttatcggtgtttttaactatggaggatagagatgttgtctcgtggaactgtttgattttgtcttgttccgattctggtaataaggaagtggctttggatcagttttggttgatgagagaaatggagattcaacctgatgaatatacagtttcgatggttgtgtctatttgctctgatttacgagaactgagtaagggtaagcaggctcttgctctttgtatcaagatggggtttttatctaacagtattgttttaggagctgggattgatatgttttccaaatgtaacagattggatgattcggttaaactttttagagagttggagaaatgggattcagtgttgtgcaattccatgatcggtagctattcgtggcattgttgtggagaagatgctcttcggctctttatccttgccatgacgcagagtgttaggcctgataagttcacgttcagtagcgttctgagctcaatgaatgctgtgatgctagatcacggagcagacgttcattctttggttattaagttagggtttgatttggatacggcagtagctacctcactcatggagatgtacttcaaaaccggttcagttgatttagcaatgggagtgtttgccaaaacagatggaaaagatttgatcttttggaacacagtgataatgggcttggcgagaaacagtagagcagttgagtcccttgccattttcaatcaattgctgatgaaccaaagtctgaaacccgatagagtgacgttaatgggtatcttagtagcttgttgttatgctggctttgttaatgaaggaattcagatattctcttcaatggaaaaggctcatggagttaatcccgggaacgagcattacgcctgtataatcgaattgctttgcagagtcggtatgatcaatgaagcaaaggacattgctgacaagataccttttgaaccaagctctcatatctgggaaccgattctctgtgcatctcttgatcttggagacacaagactcgctgagactgtagcgaaaactatgttagaatctgaaccaaagtcatcttttccttacctggttctgattaagatatacgagatgacatggcgctgggaaaattcagtgaagttaagatacgccatgaatgaacataagttgaaatcggctcaaggatcgagcaagatcagtatagagagcagtgtgttcagcttcgaggctgaccagttgcaaattcatggaggtcatgatacttgcgcactcttggacttattgtcttgggattcttttgatcagaaaattcattggtctgcataa

SEQ ID NO: 30372 - protein, 633 aa, Arabidopsis thaliana
  misc_feature (1)..(633): Ceres Seq. ID no. 4957174
MFQLLRRAHGLCMPSSLYFSRLVNRSLLSKSPTLAKIVHAQLLEAGFVRTTYWGNRCLQLYFKSGSVINALQLFDDIPDKNTITWNVCLKGLFKNGYLNNALDLFDEMPERDVVSWNTMISGLVSCGFHEYGIRVFFDMQRWEIRPTEFTFSILASLVTCVRHGEQIHGNAICSGVSRYNLVVWNSVMDMYRRLGVFDYALSVFLTMEDRDVVSWNCLILSCSDSGNKEVALDQFWLMREMEIQPDEYTVSMVVSICSDLRELSKGKQALALCIKMGFLSNSIVLGAGIDMFSKCNRLDDSVKLFRELEKWDSVLCNSMIGSYSWHCCGEDALRLFILAMTQSVRPDKFTFSSVLSSMNAVMLDHGADVHSLVIKLGFDLDTAVATSLMEMYFKTGSVDLAMGVFAKTDGKDLIFWNTVIMGLARNSRAVESLAIFNQLLMNQSLKPDRVTLMGILVACCYAGFVNEGIQIFSSMEKAHGVNPGNEHYACIIELLCRVGMINEAKDIADKIPFEPSSHIWEPILCASLDLGDTRLAETVAKTMLESEPKSSFPYLVLIKIYEMTWRWENSVKLRYAMNEHKLKSAQGSSKISIESSVFSFEADQLQIHGGHDTCALLDLLSWDSFDQKIHWSA

SEQ ID NO: 30373 - protein, 621 aa, Arabidopsis thaliana
  misc_feature (1)..(621): Ceres Seq. ID no. 4957175
MPSSLYFSRLVNRSLLSKSPTLAKIVHAQLLEAGFVRTTYWGNRCLQLYFKSGSVINALQLFDDIPDKNTITWNVCLKGLFKNGYLNNALDLFDEMPERDVVSWNTMISGLVSCGFHEYGIRVFFDMQRWEIRPTEFTFSILASLVTCVRHGEQIHGNAICSGVSRYNLVVWNSVMDMYRRLGVFDYALSVFLTMEDRDVVSWNCLILSCSDSGNKEVALDQFWLMREMEIQPDEYTVSMVVSICSDLRELSKGKQALALCIKMGFLSNSIVLGAGIDMFSKCNRLDDSVKLFRELEKWDSVLCNSMIGSYSWHCCGEDALRLFILAMTQSVRPDKFTFSSVLSSMNAVMLDHGADVHSLVIKLGFDLDTAVATSLMEMYFKTGSVDLAMGVFAKTDGKDLIFWNTVIMGLARNSRAVESLAIFNQLLMNQSLKPDRVTLMGILVACCYAGFVNEGIQIFSSMEKAHGVNPGNEHYACIIELLCRVGMINEAKDIADKIPFEPSSHIWEPILCASLDLGDTRLAETVAKTMLESEPKSSFPYLVLIKIYEMTWRWENSVKLRYAMNEHKLKSAQGSSKISIESSVFSFEADQLQIHGGHDTCALLDLLSWDSFDQKIHWSA

SEQ ID NO: 30374 - protein, 526 aa, Arabidopsis thaliana
  misc_feature (1)..(526): Ceres Seq. ID no. 4957176
MPERDVVSWNTMISGLVSCGFHEYGIRVFFDMQRWEIRPTEFTFSILASLVTCVRHGEQIHGNAICSGVSRYNLVVWNSVMDMYRRLGVFDYALSVFLTMEDRDVVSWNCLILSCSDSGNKEVALDQFWLMREMEIQPDEYTVSMVVSICSDLRELSKGKQALALCIKMGFLSNSIVLGAGIDMFSKCNRLDDSVKLFRELEKWDSVLCNSMIGSYSWHCCGEDALRLFILAMTQSVRPDKFTFSSVLSSMNAVMLDHGADVHSLVIKLGFDLDTAVATSLMEMYFKTGSVDLAMGVFAKTDGKDLIFWNTVIMGLARNSRAVESLAIFNQLLMNQSLKPDRVTLMGILVACCYAGFVNEGIQIFSSMEKAHGVNPGNEHYACIIELLCRVGMINEAKDIADKIPFEPSSHIWEPILCASLDLGDTRLAETVAKTMLESEPKSSFPYLVLIKIYEMTWRWENSVKLRYAMNEHKLKSAQGSSKISIESSVFSFEADQLQIHGGHDTCALLDLLSWDSFDQKIHWSA

SEQ ID NO: 30375 - DNA, 1179 bp, Arabidopsis thaliana
  misc_feature (1)..(1179): Ceres Seq. ID no. 4957757
atgcttgatgattacatagcgaaatcgaagctcagtgagagtttaacctctacggtttggttagcgaagcacaagttaaccggcgaagaagcagtgatgaagtgtttcgacctctcgaagctcaatcgcaatctccgagactgtttaaacaacgaactggagtttctatcttctgttgatcatcccaatatcattcgtctcctccatgtttctcaagatgatgattttctcgttatggttttggaatattgtgatggaggaactttatcatcgtatattcaacgttatggtagagttgaagaagatatcgccaagagatttatgaagcaaattggagctggtttggaaattattcatgataatcacattatccatagagacttgaaacctgagaatattttaattgacggatctggtgatgatttggtgttgaagattgccgattttagtcttgcaagaaaactacatccgggcaagtatcttgaaacagtgtgtggttctccgttttacatggctcctgaagttcttcagtttcagagatacaatgaaaaggctgatatgtggagtgtaggagcaatccttttcgagctacttcacgggtatccaccattccgtggtaataacaatgttcaggttctaaggaacatcaaatctagtacagctcttccattctctcggcttattcttcaacagatgcatcctgattgcatcgacgtctgctcaagattgctttctattaacccagctgccacactgggcatagaagattttccttttcttggccgtataaagaacagtagggtttgggtcaaggacacaacattttcttcaagacaacatggaacaagggaaagaaaagtggctacaattaacggaagacttcaatttgacctttcacaggatgcatacctcccacagaggcttcttgaaaacctgatgtatatttacaatactattgaaatggctcgtgtaactggagtccctacctcctaccttatttcaagaggagagagcatcaaggttctatctcaactacttaggaaagctaaacagaaaacctggttcttccaaatgctgagaagttggaacctgaacaaggaacttatgaaggttttagaagcaagaactggtttctacgagccaattgctactctggattttgcttcgttgtactcgtaa

SEQ ID NO: 30376 - protein, 392 aa, Arabidopsis thaliana
  misc_feature (1)..(392): Ceres Seq. ID no. 4957758
MLDDYIAKSKLSESLTSTVWLAKHKLTGEEAVMKCFDLSKLNRNLRDCLNNELEFLSSVDHPNIIRLLHVSQDDDFLVMVLEYCDGGTLSSYIQRYGRVEEDIAKRFMKQIGAGLEIIHDNHIIHRDLKPENILIDGSGDDLVLKIADFSLARKLHPGKYLETVCGSPFYMAPEVLQFQRYNEKADMWSVGAILFELLHGYPPFRGNNNVQVLRNIKSSTALPFSRLILQQMHPDCIDVCSRLLSINPAATLGIEDFPFLGRIKNSRVWVKDTTFSSRQHGTRERKVATINGRLQFDLSQDAYLPQRLLENLMYIYNTIEMARVTGVPTSYLISRGESIKVLSQLLRKAKQKTWFFQMLRSWNLNKELMKVLEARTGFYEPIATLDFASLYS

SEQ ID NO: 30377 - protein, 360 aa, Arabidopsis thaliana
  misc_feature (1)..(360): Ceres Seq. ID no. 4957759
MKCFDLSKLNRNLRDCLNNELEFLSSVDHPNIIRLLHVSQDDDFLVMVLEYCDGGTLSSYIQRYGRVEEDIAKRFMKQIGAGLEIIHDNHIIHRDLKPENILIDGSGDDLVLKIADFSLARKLHPGKYLETVCGSPFYMAPEVLQFQRYNEKADMWSVGAILFELLHGYPPFRGNNNVQVLRNIKSSTALPFSRLILQQMHPDCIDVCSRLLSINPAATLGIEDFPFLGRIKNSRVWVKDTTFSSRQHGTRERKVATINGRLQFDLSQDAYLPQRLLENLMYIYNTIEMARVTGVPTSYLISRGESIKVLSQLLRKAKQKTWFFQMLRSWNLNKELMKVLEARTGFYEPIATLDFASLYS

SEQ ID NO: 30378 - protein, 314 aa, Arabidopsis thaliana
  misc_feature (1)..(314): Ceres Seq. ID no. 4957760
MVLEYCDGGTLSSYIQRYGRVEEDIAKRFMKQIGAGLEIIHDNHIIHRDLKPENILIDGSGDDLVLKIADFSLARKLHPGKYLETVCGSPFYMAPEVLQFQRYNEKADMWSVGAILFELLHGYPPFRGNNNVQVLRNIKSSTALPFSRLILQQMHPDCIDVCSRLLSINPAATLGIEDFPFLGRIKNSRVWVKDTTFSSRQHGTRERKVATINGRLQFDLSQDAYLPQRLLENLMYIYNTIEMARVTGVPTSYLISRGESIKVLSQLLRKAKQKTWFFQMLRSWNLNKELMKVLEARTGFYEPIATLDFASLYS

SEQ ID NO: 30379 - DNA, 2097 bp, Arabidopsis thaliana
  misc_feature (1)..(2097): Ceres Seq. ID no. 4957791
atggaatctgaaatcgcctccgagtttcttcctttctgccggatttacaaagacggtcgtgtagaacgactcatcggcaccgataccatcccggcctctctagatccaacatacgacgtcgtttcaaaagacgttatatactcaccggagaataacctctccgttcgtctcttcctccctcacaaatcaacaaaactcaccgccggtaacaagctccctctacttatctacatccacggcggagcttggatcatcgagtcacctttctccccactctaccacaattacctcactgaagtagtcaaatccgctaactgcctcgctgtctctgttcagtatcgccgtgcaccggaagatcctgttccggcggcttatgaagatgtatggtccgcgattcagtggatttttgctcattctaatggatctggtcctgtagattggattaacaaacacgccgatttcggtaaagttttcctcggcggagatagcgcaggcggtaacatatcgcatcacatggcgatgaaagctggtaaagagaagaagctagatctcaaaatcaaaggtattgctgttgttcatccagctttctggggaacagatccggttgatgaatacgatgtgcaagataaagaaacgagaagcggaatcgcggaaatttgggagaagattgcgagtccgaatagtgttaatgggacggatgatccgttgtttaatgtaaacggatccgggtcggatttttctgggttgggatgtgataaggttttggttgcggtagctgggaaagatgtgtttgttaggcaaggattggcttatgcggcgaagctggagaagtgtgagtgggaaggtactgttgaggtggttgaggaagaaggtgaggaccatgtgtttcatttgcagaatcctaaatctgataaggctttgaaattcttgaagaagtttgtcgagtttattattgaaaatattccgggaaccatgctccgaagaatcacttgttcttcttcacttgcttcaccctctctcttcctccgcttctttcgccaactccctcgctcttactcctcaccgaccaccatcgccgtctcaggccgcaacattcgccgactatcaactccaaccactcttcgttgcatttgttcacactcttcatctgaaatcatctccgagcatcctccgttcgtcagggtttacaaagacggtcgtatcgaacgtctttccggcaccgaaacagtcccggcttctctaaacccacgaaacgacgtcgtttcaaaagacgttgtctactcaccggggcataacctctccgttcgtctctttctccctcacaaatcaacacaactcgccgccggtaacaaactccctctacttatctacttccacggcggagcttggataaacgaatcccctttctccccaatctaccacaatttcctcacggaggtagttaaatccgctaactgcctcgccgtctcggttcaataccgccgtgcaccggaagatccggttccggctgcctatgaagatacatggtctgctattcaatggattttctcacattcctgtggatctggtgaagaagattggattaacaaatacgctgatttcgaaagagtttttctcgccggagatagtgccggtggtaatatatctcatcacatggctatgagagctggtaaagagaagcttaagcctagaatcaaagggactgtgattgtgcatccagcgatttgggggaaagatccggtcgatgagcacgatgtgcaagatagagagatcagagacggagttgcagaagtttgggagaaaattgtgagtccgaatagtgttgatggagcggatgatccgtggtttaatgtggttggatccgggtcgaatttttccgggatgggatgtgacaaggttttggttgaggtggctgggaaagatgtgttttggcggcaaggattagcttacgcggcgaagctaaagaagagtgggtggaaaggagaggtggaggtgattgaggaagaagatgaagagcattgcttccatctcttaaatccaagttctgaaaatgctcccagcttcatgaagagatttgtggagtttatcactggttaa

SEQ ID NO: 30380 - protein, 698 aa, Arabidopsis thaliana
  misc_feature (1)..(698): Ceres Seq. ID no. 4957792
MESEIASEFLPFCRIYKDGRVERLIGTDTIPASLDPTYDVVSKDVIYSPENNLSVRLFLPHKSTKLTAGNKLPLLIYIHGGAWIIESPFSPLYHNYLTEVVKSANCLAVSVQYRRAPEDPVPAAYEDVWSAIQWIFAHSNGSGPVDWINKHADFGKVFLGGDSAGGNISHHMAMKAGKEKKLDLKIKGIAVVHPAFWGTDPVDEYDVQDKETRSGIAEIWEKIASPNSVNGTDDPLFNVNGSGSDFSGLGCDKVLVAVAGKDVFVRQGLAYAAKLEKCEWEGTVEVVEEEGEDHVFHLQNPKSDKALKFLKKFVEFIIENIPGTMLRRITCSSSLASPSLFLRFFRQLPRSYSSPTTIAVSGRNIRRLSTPTTLRCICSHSSSEIISEHPPFVRVYKDGRIERLSGTETVPASLNPRNDVVSKDVVYSPGHNLSVRLFLPHKSTQLAAGNKLPLLIYFHGGAWINESPFSPIYHNFLTEVVKSANCLAVSVQYRRAPEDPVPAAYEDTWSAIQWIFSHSCGSGEEDWINKYADFERVFLAGDSAGGNISHHMAMRAGKEKLKPRIKGTVIVHPAIWGKDPVDEHDVQDREIRDGVAEVWEKIVSPNSVDGADDPWFNVVGSGSNFSGMGCDKVLVEVAGKDVFWRQGLAYAAKLKKSGWKGEVEVIEEEDEEHCFHLLNPSSENAPSFMKRFVEFITG

SEQ ID NO: 30381 - protein, 527 aa, Arabidopsis thaliana
  misc_feature (1)..(527): Ceres Seq. ID no. 4957793
MAMKAGKEKKLDLKIKGIAVVHPAFWGTDPVDEYDVQDKETRSGIAEIWEKIASPNSVNGTDDPLFNVNGSGSDFSGLGCDKVLVAVAGKDVFVRQGLAYAAKLEKCEWEGTVEVVEEEGEDHVFHLQNPKSDKALKFLKKFVEFIIENIPGTMLRRITCSSSLASPSLFLRFFRQLPRSYSSPTTIAVSGRNIRRLSTPTTLRCICSHSSSEIISEHPPFVRVYKDGRIERLSGTETVPASLNPRNDVVSKDVVYSPGHNLSVRLFLPHKSTQLAAGNKLPLLIYFHGGAWINESPFSPIYHNFLTEVVKSANCLAVSVQYRRAPEDPVPAAYEDTWSAIQWIFSHSCGSGEEDWINKYADFERVFLAGDSAGGNISHHMAMRAGKEKLKPRIKGTVIVHPAIWGKDPVDEHDVQDREIRDGVAEVWEKIVSPNSVDGADDPWFNVVGSGSNFSGMGCDKVLVEVAGKDVFWRQGLAYAAKLKKSGWKGEVEVIEEEDEEHCFHLLNPSSENAPSFMKRFVEFITG

SEQ ID NO: 30382 - protein, 525 aa, Arabidopsis thaliana
  misc_feature (1)..(525): Ceres Seq. ID no. 4957794
MKAGKEKKLDLKIKGIAVVHPAFWGTDPVDEYDVQDKETRSGIAEIWEKIASPNSVNGTDDPLFNVNGSGSDFSGLGCDKVLVAVAGKDVFVRQGLAYAAKLEKCEWEGTVEVVEEEGEDHVFHLQNPKSDKALKFLKKFVEFIIENIPGTMLRRITCSSSLASPSLFLRFFRQLPRSYSSPTTIAVSGRNIRRLSTPTTLRCICSHSSSEIISEHPPFVRVYKDGRIERLSGTETVPASLNPRNDVVSKDVVYSPGHNLSVRLFLPHKSTQLAAGNKLPLLIYFHGGAWINESPFSPIYHNFLTEVVKSANCLAVSVQYRRAPEDPVPAAYEDTWSAIQWIFSHSCGSGEEDWINKYADFERVFLAGDSAGGNISHHMAMRAGKEKLKPRIKGTVIVHPAIWGKDPVDEHDVQDREIRDGVAEVWEKIVSPNSVDGADDPWFNVVGSGSNFSGMGCDKVLVEVAGKDVFWRQGLAYAAKLKKSGWKGEVEVIEEEDEEHCFHLLNPSSENAPSFMKRFVEFITG

SEQ ID NO: 30383 - DNA, 1378 bp, Arabidopsis thaliana
  misc_feature (1)..(1378): Ceres Seq. ID no. 4957818
gtttcttcttcacactctgattctcttactatttgactctgttgttgttgttattgttgtgatatcaagagagtgggtttgagatcatgccaaattctggaaaaagtttgagtttttaattcgaatcgagaaaaaataaaaatgggttctttaggtgatgagcttagtttgggatcgatctttgggagaggagtttcgatgaatgttgtggcggttgagaaagttgatgaacatgttaagaagcttgaagaagagaagagaaagctcgaaagttgtcaacttgagcttcctctgtctttgcagattttaaacgatgcgattttgtatctgaaggataagagatgttcagagatggagactcaaccattgttgaaagatttcatttctgttaataaacctattcaaggagaaagaggaatagaattgctgaaaagagaggagctaatgagggagaagaagtttcagcaatggaaagctaatgatgatcacactagtaagatcaagagcaagcttgagattaagagaaatgaggagaaatctcctatgttgttgattccaaaggtggaaactggtttaggcctcggtttaagttcgagttcgataagaagaaaagggattgttgcctcatgtggctttacttctaactctatgccacaaccaccaacaccagcagtaccacaacaaccagcatttcttaagcagcaagctttacggaagcaaagaaggtgttggaatccagagttgcatcgccgatttgtcgatgcattgcaacagctaggtggaccgggagtggcaactcctaaacaaattagagaacatatgcaagaagaaggcttaaccaatgatgaagtcaagagtcatttacagaaatacaggttacacatcaggaagccaaattcgaatgcggagaaacaatcagcagttgttttagggtttaacttgtggaattcttcagcacaagatgaagaagagacatgtgaaggaggagaatcattgaagagaagcaatgcgcaatcagattctcctcaaggtcctttgcagttaccgtctacaacaacaacaactggtggagatagtagcatggaagatgttgaagatgctaagtctgagagctttcaactggagagattgagatcaccataaatctcaagaaaccaaactcttgatcacggttttgttattttggattcattactatatctattagtagtgaatgagaacaataattatagaaaggtttatagatatatatatagagaaaaagagagagtgaggatggttcaaattatttgcagagattatacttagccttgtttttgtaaacggctttttttggttgggtttttatttttcttgaggcattatccaatattcaagt

SEQ ID NO: 30384 - protein, 333 aa, Arabidopsis thaliana
  misc_feature (1)..(333): Ceres Seq. ID no. 4957819
MGSLGDELSLGSIFGRGVSMNVVAVEKVDEHVKKLEEEKRKLESCQLELPLSLQILNDAILYLKDKRCSEMETQPLLKDFISVNKPIQGERGIELLKREELMREKKFQQWKANDDHTSKIKSKLEIKRNEEKSPMLLIPKVETGLGLGLSSSSIRRKGIVASCGFTSNSMPQPPTPAVPQQPAFLKQQALRKQRRCWNPELHRRFVDALQQLGGPGVATPKQIREHMQEEGLTNDEVKSHLQKYRLHIRKPNSNAEKQSAVVLGFNLWNSSAQDEEETCEGGESLKRSNAQSDSPQGPLQLPSTTTTTGGDSSMEDVEDAKSESFQLERLRSP

SEQ ID NO: 30385 - protein, 314 aa, Arabidopsis thaliana
  misc_feature (1)..(314): Ceres Seq. ID no. 4957820
MNVVAVEKVDEHVKKLEEEKRKLESCQLELPLSLQILNDAILYLKDKRCSEMETQPLLKDFISVNKPIQGERGIELLKREELMREKKFQQWKANDDHTSKIKSKLEIKRNEEKSPMLLIPKVETGLGLGLSSSSIRRKGIVASCGFTSNSMPQPPTPAVPQQPAFLKQQALRKQRRCWNPELHRRFVDALQQLGGPGVATPKQIREHMQEEGLTNDEVKSHLQKYRLHIRKPNSNAEKQSAVVLGFNLWNSSAQDEEETCEGGESLKRSNAQSDSPQGPLQLPSTTTTTGGDSSMEDVEDAKSESFQLERLRSP

SEQ ID NO: 30386 - protein, 263 aa, Arabidopsis thaliana
  misc_feature (1)..(263): Ceres Seq. ID no. 4957821
METQPLLKDFISVNKPIQGERGIELLKREELMREKKFQQWKANDDHTSKIKSKLEIKRNEEKSPMLLIPKVETGLGLGLSSSSIRRKGIVASCGFTSNSMPQPPTPAVPQQPAFLKQQALRKQRRCWNPELHRRFVDALQQLGGPGVATPKQIREHMQEEGLTNDEVKSHLQKYRLHIRKPNSNAEKQSAVVLGFNLWNSSAQDEEETCEGGESLKRSNAQSDSPQGPLQLPSTTTTTGGDSSMEDVEDAKSESFQLERLRSP

SEQ ID NO: 30387 - DNA, 3462 bp, Arabidopsis thaliana
  misc_feature (1)..(3462): Ceres Seq. ID no. 4957911
atggcacacaaggttaaggcatcttttcagtcacttaaaacgatgccggctgactatagatttcttggttcaccaatctctgatcaccttgagaccaatttgattactccaccaaatggtcacttaaagaatggggttaatggcactgcaagttctgttggtggaatggatagtgttaatgaggattcaccttatagtgtccgcagcattttaaatggagagcggtcttcaattggtgatggagattctattttgcccttgcctgagagtaatgatcgcaagtggagcgacacaaatgtatatgctcggaaaaaggtactgcaattttgggtccaacttccaaacggtaactgggagctgggaaagataatgtcaacttcaggagaagagtctgttatcgtggtaactgagggaaaagttttaaaagtcaaatcagagactttagtacctgcaaatcctgatattcttgatggagtagacgatctcatgcaactaagttatttaaatgagccagcagtgttgtacaaccttgagtataggtacaaccaggacatgatatatacaaaagcagggccggttctggtggctgtgaatcccttcaaggaggttcctttgtacggtaatcgcaacattgaagcatacaggaagagatcaaatgagagccctcatgtctatgctattgcagatacagcaatacgtgaaatgatacgagatgaagttaaccaatcaatcattatcagtggagagagtggagcaggaaagactgagacagcaaagatagcgatgcaatacttggctgctcttggaggtggaagtgggatcgagtatgagatactaaagactaatcccatcttggaagcatttggaaatgcaaaaacattgagaaacgataattctagtcgttttggtaagttgatagaaattcattttagtgaaacagggaagatttcgggtgctcaaattcaaacatttttactagaaaagtcaagagtggttcaatgtacggaaggagaaaggtcatatcatatattctatcaactttgtgctggggcttcacctacacttagagagaagttaaatttgacaagtgcaaaacagtataactatttgaaacaaagcaattgctattcaattaacggagttgatgacgctgaacgttttcacgccgttaaggaagctttagatattgtgcatgttagtaaagaagatcaagaaaatgtatttgcaatgcttgctgcagtattatggctagggaatgtttcttttaccattattgacaacgaaaatcacgttgaacctgaaccagatgaaagtttgtcaactgttgctaaattgattgggtgcaacatcaatgagcttaagctagctctatcaaagcgtaatatgagagttaataatgatactattgtacagaagctaacactatcgcaggccattgacgcaagagatgctttagcaaagtcaatctatgcctgcctatttgactggctagttgaacagattaacaaatctcttgcggtgggaaagaggagaactggcagatccatcagcattcttgatatctatggctttgaatcattcaataaaaatagttttgagcagttctgtataaattatgcaaatgagagattgcagcaacacttcaaccgtcatctcttcaagcttgagcaggaggaatatattcaggatggcattgactggacaagggttgattttgaggacaaccaagaatgtcttagtctctttgaaaagaaaccattagggctgctttctcttctggatgaggaatccacatttccaaatggcacagatttgacacttgccaacaagcttaaacaacatctaaatgataattcctgttttagaggagatcgggggaaggctttcacagttgcgcattatgctggagaggttacatatgagacgactggatttctagagaagaaccgagatttgttgcattcagattctattcaacttttgtcgtcttgctcttgccacctccctcaggcgtttgcttctagtatgctcatttattctgaaaaacctcttgtcggtcctttacacaaagcaggtggagctgattcccagcgactgagtgtagcaactaaatttaagggtcaacttttccaattgatgcaacgtctagggaacactaccccacattttattcgctgcataaagccaaacaatgttcagtctgccgggttgtatgagcaaggacttgtcttacagcagctaagatgttgtggtgtcctagaggtcgttcgaatatcccggtctggatttcccacgagaatgtttcatcataaatttgcccgaaggtatggtttccttctgctggagaacattgcagcaaaagatcctctaagtgtttcggttgcaattctccatcagtttaatatcttgccagagatgtaccaagttggctacacaaaattgtttttcagaactggccagattggggttcttgaagatacaaggaatcgcactctgcatggcattttacgtcttcaaagttattttagagggcaccaagctcgctgtcgtctaaaagagcttaaaaccggaattactattcttcaatcatttgttcgtggagaaaagatgagaaaggaatacacggagttactgcagaggcatcgagcttctgctgctatacaaagccatgttaagagaaggattgctagccaacagtataaagccacagttgatgcatctgctgtaatacaatcagcaattcgtggagagctggttagaagatgtgcgggggatattggatggcttagttctggtggcaccaagagaaatgagtcagacgaggtgctagtgaaggcatcatatctttccgatcttcagcgtagggttcttagaaccgaagctgctcttcgtgagaaagaagaggagaacgacatcctccgacaaagagtccagcagtacgataaccggtggtctgaatatgaaacaaagatgaaatccatggaagaaatttggcaaaagcagatgaaatctttgcaatccagtctttccatcgcaaagaaaagcctagaggttgaggactcagcgagaaactcggatgcatcggtgaatgcaagcgatgcaacagatttagattcaggaggtagtcattaccaaatgggccatggcaggtcaagaagtgtaggcgtgggtttaagcgtgataagccggttagctgaggaatttggacaaagagctcaggtatttggtgacgacagaaagttcttgatggaagtgaaatctggtcaggtggaagcaaacttgaatccggaccgggagctacgaaggctgaaacagatgtttgagacatggaagaaagattatggagggagactaagggaaacgaaactgatacttagcaaacttgggagtgaagaaacaggtggttcagcggagaaggtgaagatgaattggtgggggaggttgaggagtactaggtattaa

SEQ ID NO: 30388 - protein, 1153 aa, Arabidopsis thaliana
  misc_feature (1)..(1153): Ceres Seq. ID no. 4957912
MAHKVKASFQSLKTMPADYRFLGSPISDHLETNLITPPNGHLKNGVNGTASSVGGMDSVNEDSPYSVRSILNGERSSIGDGDSILPLPESNDRKWSDTNVYARKKVLQFWVQLPNGNWELGKIMSTSGEESVIVVTEGKVLKVKSETLVPANPDILDGVDDLMQLSYLNEPAVLYNLEYRYNQDMIYTKAGPVLVAVNPFKEVPLYGNRNIEAYRKRSNESPHVYAIADTAIREMIRDEVNQSIIISGESGAGKTETAKIAMQYLAALGGGSGIEYEILKTNPILEAFGNAKTLRNDNSSRFGKLIEIHFSETGKISGAQIQTFLLEKSRVVQCTEGERSYHIFYQLCAGASPTLREKLNLTSAKQYNYLKQSNCYSINGVDDAERFHAVKEALDIVHVSKEDQENVFAMLAAVLWLGNVSFTIIDNENHVEPEPDESLSTVAKLIGCNINELKLALSKRNMRVNNDTIVQKLTLSQAIDARDALAKSIYACLFDWLVEQINKSLAVGKRRTGRSISILDIYGFESFNKNSFEQFCINYANERLQQHFNRHLFKLEQEEYIQDGIDWTRVDFEDNQECLSLFEKKPLGLLSLLDEESTFPNGTDLTLANKLKQHLNDNSCFRGDRGKAFTVAHYAGEVTYETTGFLEKNRDLLHSDSIQLLSSCSCHLPQAFASSMLIYSEKPLVGPLHKAGGADSQRLSVATKFKGQLFQLMQRLGNTTPHFIRCIKPNNVQSAGLYEQGLVLQQLRCCGVLEVVRISRSGFPTRMFHHKFARRYGFLLLENIAAKDPLSVSVAILHQFNILPEMYQVGYTKLFFRTGQIGVLEDTRNRTLHGILRLQSYFRGHQARCRLKELKTGITILQSFVRGEKMRKEYTELLQRHRASAAIQSHVKRRIASQQYKATVDASAVIQSAIRGELVRRCAGDIGWLSSGGTKRNESDEVLVKASYLSDLQRRVLRTEAALREKEEENDILRQRVQQYDNRWSEYETKMKSMEEIWQKQMKSLQSSLSIAKKSLEVEDSARNSDASVNASDATDLDSGGSHYQMGHGRSRSVGVGLSVISRLAEEFGQRAQVFGDDRKFLMEVKSGQVEANLNPDRELRRLKQMFETWKKDYGGRLRETKLILSKLGSEETGGSAEKVKMNWWGRLRSTRY

SEQ ID NO: 30389 - protein, 1139 aa, Arabidopsis thaliana
  misc_feature (1)..(1139): Ceres Seq. ID no. 4957913
MPADYRFLGSPISDHLETNLITPPNGHLKNGVNGTASSVGGMDSVNEDSPYSVRSILNGERSSIGDGDSILPLPESNDRKWSDTNVYARKKVLQFWVQLPNGNWELGKIMSTSGEESVIVVTEGKVLKVKSETLVPANPDILDGVDDLMQLSYLNEPAVLYNLEYRYNQDMIYTKAGPVLVAVNPFKEVPLYGNRNIEAYRKRSNESPHVYAIADTAIREMIRDEVNQSIIISGESGAGKTETAKIAMQYLAALGGGSGIEYEILKTNPILEAFGNAKTLRNDNSSRFGKLIEIHFSETGKISGAQIQTFLLEKSRVVQCTEGERSYHIFYQLCAGASPTLREKLNLTSAKQYNYLKQSNCYSINGVDDAERFHAVKEALDIVHVSKEDQENVFAMLAAVLWLGNVSFTIIDNENHVEPEPDESLSTVAKLIGCNINELKLALSKRNMRVNNDTIVQKLTLSQAIDARDALAKSIYACLFDWLVEQINKSLAVGKRRTGRSISILDIYGFESFNKNSFEQFCINYANERLQQHFNRHLFKLEQEEYIQDGIDWTRVDFEDNQECLSLFEKKPLGLLSLLDEESTFPNGTDLTLANKLKQHLNDNSCFRGDRGKAFTVAHYAGEVTYETTGFLEKNRDLLHSDSIQLLSSCSCHLPQAFASSMLIYSEKPLVGPLHKAGGADSQRLSVATKFKGQLFQLMQRLGNTTPHFIRCIKPNNVQSAGLYEQGLVLQQLRCCGVLEVVRISRSGFPTRMFHHKFARRYGFLLLENIAAKDPLSVSVAILHQFNILPEMYQVGYTKLFFRTGQIGVLEDTRNRTLHGILRLQSYFRGHQARCRLKELKTGITILQSFVRGEKMRKEYTELLQRHRASAAIQSHVKRRIASQQYKATVDASAVIQSAIRGELVRRCAGDIGWLSSGGTKRNESDEVLVKASYLSDLQRRVLRTEAALREKEEENDILRQRVQQYDNRWSEYETKMKSMEEIWQKQMKSLQSSLSIAKKSLEVEDSARNSDASVNASDATDLDSGGSHYQMGHGRSRSVGVGLSVISRLAEEFGQRAQVFGDDRKFLMEVKSGQVEANLNPDRELRRLKQMFETWKKDYGGRLRETKLILSKLGSEETGGSAEKVKMNWWGRLRSTRY

SEQ ID NO: 30390 - protein, 1098 aa, Arabidopsis thaliana
  misc_feature (1)..(1098): Ceres Seq. ID no. 4957914
MDSVNEDSPYSVRSILNGERSSIGDGDSILPLPESNDRKWSDTNVYARKKVLQFWVQLPNGNWELGKIMSTSGEESVIVVTEGKVLKVKSETLVPANPDILDGVDDLMQLSYLNEPAVLYNLEYRYNQDMIYTKAGPVLVAVNPFKEVPLYGNRNIEAYRKRSNESPHVYAIADTAIREMIRDEVNQSIIISGESGAGKTETAKIAMQYLAALGGGSGIEYEILKTNPILEAFGNAKTLRNDNSSRFGKLIEIHFSETGKISGAQIQTFLLEKSRVVQCTEGERSYHIFYQLCAGASPTLREKLNLTSAKQYNYLKQSNCYSINGVDDAERFHAVKEALDIVHVSKEDQENVFAMLAAVLWLGNVSFTIIDNENHVEPEPDESLSTVAKLIGCNINELKLALSKRNMRVNNDTIVQKLTLSQAIDARDALAKSIYACLFDWLVEQINKSLAVGKRRTGRSISILDIYGFESFNKNSFEQFCINYANERLQQHFNRHLFKLEQEEYIQDGIDWTRVDFEDNQECLSLFEKKPLGLLSLLDEESTFPNGTDLTLANKLKQHLNDNSCFRGDRGKAFTVAHYAGEVTYETTGFLEKNRDLLHSDSIQLLSSCSCHLPQAFASSMLIYSEKPLVGPLHKAGGADSQRLSVATKFKGQLFQLMQRLGNTTPHFIRCIKPNNVQSAGLYEQGLVLQQLRCCGVLEVVRISRSGFPTRMFHHKFARRYGFLLLENIAAKDPLSVSVAILHQFNILPEMYQVGYTKLFFRTGQIGVLEDTRNRTLHGILRLQSYFRGHQARCRLKELKTGITILQSFVRGEKMRKEYTELLQRHRASAAIQSHVKRRIASQQYKATVDASAVIQSAIRGELVRRCAGDIGWLSSGGTKRNESDEVLVKASYLSDLQRRVLRTEAALREKEEENDILRQRVQQYDNRWSEYETKMKSMEEIWQKQMKSLQSSLSIAKKSLEVEDSARNSDASVNASDATDLDSGGSHYQMGHGRSRSVGVGLSVISRLAEEFGQRAQVFGDDRKFLMEVKSGQVEANLNPDRELRRLKQMFETWKKDYGGRLRETKLILSKLGSEETGGSAEKVKMNWWGRLRSTRY

SEQ ID NO: 30391 - DNA, 1193 bp, Arabidopsis thaliana
  misc_feature (1)..(1193): Ceres Seq. ID no. 4957947
ttcttagcttcttctctctcaaccctcaaaagatcttcgtcatctctgtattcaacacatagtgatgaatcgagactaacaaaatcaaattctcttcactctgattcgcagtcatagtttaccaatttcttctaactcgcaagcaatggcttgccttggaagaaaattctccagaattggttgaattcgtttttttttcatttccagaaattttagtatgtttaagagatgcaattagtgcctagtgatgatgatgatgatagaaaggaacagattttattcgacgaatcaacatcctcaaacgaaatcgtagcagcggaaagaggagatcgtgttgtggaggaaggacaagtttcagaaatagctgagactgatgatgacgaaaccacacttcttgtttctggagatcaaccacaatgtcgaatttgccttgatgttggaggggaagatctgattgctccgtgcaattgtaaaggtactcaaaagcacgttcacagatcttgtctcgataattggcgctccaccaaggaaggttttgcattttcgcattgtacagagtgtagagcctttttcaaactccgagccaatgtgcctgctgatagatggtggttgagattgagatttcagctgctggttgctagagatcatgccttcatcttcatttctgtccagatgattgtagcattcttggggttactagtttacaagttctacggtgaagaactacgagaaatgtttggttatgaggaacatccttatgggttctacacattggctgttttggccattgtcttggtaggactgctatatggattcttcatcgccataatatgtggccaaaagatcaacgagcggcattaccatgttctcgccaaacaagaactcacaaaggaatatatagtggaagaccgcgactgcaagaatgttcctgagcttgatcagagtcatgtgatggaactaaaaatgttgggactttattgaacatatactacaagaaaagagcttgttggatctttactcttcatgtcacctgtaaattatattcttcattgatttatatggttgcttcaacgaacgattgtgtcatctccaagtggttttttgatttttttttttttttaagttgtatatcttctgatgaacatgtttatctgttcgagtatacatatcagaagtaaattggtttacaaagt

SEQ ID NO: 30392 - protein, 250 aa, Arabidopsis thaliana
  misc_feature (1)..(250): Ceres Seq. ID no. 4957948
MQLVPSDDDDDRKEQILFDESTSSNEIVAAERGDRVVEEGQVSEIAETDDDETTLLVSGDQPQCRICLDVGGEDLIAPCNCKGTQKHVHRSCLDNWRSTKEGFAFSHCTECRAFFKLRANVPADRWWLRLRFQLLVARDHAFIFISVQMIVAFLGLLVYKFYGEELREMFGYEEHPYGFYTLAVLAIVLVGLLYGFFIAIICGQKINERHYHVLAKQELTKEYIVEDRDCKNVPELDQSHVMELKMLGLY

SEQ ID NO: 30393 - DNA, 2265 bp, Arabidopsis thaliana
  misc_feature (1)..(2265): Ceres Seq. ID no. 4958676
atgaccgttggtgccggaatcagcgtcaccgactcagatttggtggtgctaggtcaccgtgttcttcacggcgttccggagaatgtcttagttaccccagcttcgggaaacgccttaatcgacggcgcgttcatcggcgtcacgtcagatcaaaccggaagccaccgtgtcttctcccttggcaaactcgaagacctaaggtttatgtgtgtcttccggtttaaattatggtggatgactcaaagaatggggactaatgggaaagagattccttgtgagactcagtttctaatcgtagaagcaaaccaaggttctgatttaggaggaagagatcaatcttcttcgtacgttgtattcttacctatacttgaaggagattttagagctgttcttcaagggaacgaggctaatgagctagagatttgtcttgaaagtggtgatccaaccgttgaccaattcgaagggagtcatttggtttttgtggctgctggctccgacccttttgatgtcattaccaaagctgtcaaggctgttgaacaacatcttcaaacattttcacaccgagagagaaagaaaatgccagatatgttgaattggtttggttggtgcacttgggatgcattctataccaatgtcacagccaaagacgtcaagcaaggacttgagagcctcaaagctggtggggttaccccaaagtttgtcataattgatgatggatggcaatctgttggcatggatgagaccagtgtagaattcaacgctgataatgctgccaattttgcaaaccggttaactcacatcaaggagaatcataagtttcaaaaggatggcaaagaaggccaccgggtggatgacccttcattgagtcttggacatgttatcacagacattaagagtaataattcgctcaagtatgtttatgtttggcatgcgataacaggatattggggaggagtcaaaccaggtgtttctggtatggaacactacgaatccaaggttgcgtatccagtttcttcaccaggagttatgtccagtgagaattgtggatgtttagaaagcataactaagaatggacttggtttggtgaatcctgagaaagtctttagcttctataatgatcttcactcataccttgcatccgttggggtcgatggtgtcaaagtagacgtccaaaacattcttgaaactcttggagctggacatggtggtcgtgtcaaacttgcaaagaagtatcaccaggctttggaagcttctatttcaagaaacttccctgacaatggtattatctcttgcatgagtcataacacagatggtctctacagcgcaaaaaagactgctgttataagagcatcagacgatttctggcctagagaccccgcttcacacacgatccacattgcttctgttgcatataacacacttttccttggagagtttatgcagccggactgggacatgtttcatagtttgcatccgatggctgaatatcatgctgcagctcgcgcggttggaggatgtgccatatatgtcagcgacaaaccgggacaacatgacttcaaccttttaagaaagctagtacttcgagacggttccatactcagagcaaagcttcccggaagaccaaccagtgattgcttcttcagtgatccagtcagagacaataaaagtcttctgaaaatatggaacctgaacgaattcactggcgttattggagttttcaactgccaaggcgctggatggtgtaagaacgagaagagatacctaatccatgaccaagaacctgggaccatttctggttgtgtccgaaccaatgatgttcattatcttcataaagtagcagcctttgaatggacaggagattccattgtctattcccatctcagaggagagttagtgtatctcccaaaagatacatctttaccagtgacattgatgccacgtgaatacgaagttttcacggtggttccggtgaaggaattttccgatggaagtaaatttgcaccggtggggcttatggagatgtttaattctggaggagccattgtgagtttaagatacgatgacgaggggactaaatttgtcgttaggatgaaacttcgaggcagtggtttggttggtgtttactcgtccgttcgacgaccacgaagtgttacggtggattcagacgacgtggagtaccggtatgaaccggaatccggtttagttacgtttactttaggagttccggagaaagaattgtatctgtgggacgtggtcatccaataa

SEQ ID NO: 30394 - protein, 754 aa, Arabidopsis thaliana
  misc_feature (1)..(754): Ceres Seq. ID no. 4958677
MTVGAGISVTDSDLVVLGHRVLHGVPENVLVTPASGNALIDGAFIGVTSDQTGSHRVFSLGKLEDLRFMCVFRFKLWWMTQRMGTNGKEIPCETQFLIVEANQGSDLGGRDQSSSYVVFLPILEGDFRAVLQGNEANELEICLESGDPTVDQFEGSHLVFVAAGSDPFDVITKAVKAVEQHLQTFSHRERKKMPDMLNWFGWCTWDAFYTNVTAKDVKQGLESLKAGGVTPKFVIIDDGWQSVGMDETSVEFNADNAANFANRLTHIKENHKFQKDGKEGHRVDDPSLSLGHVITDIKSNNSLKYVYVWHAITGYWGGVKPGVSGMEHYESKVAYPVSSPGVMSSENCGCLESITKNGLGLVNPEKVFSFYNDLHSYLASVGVDGVKVDVQNILETLGAGHGGRVKLAKKYHQALEASISRNFPDNGIISCMSHNTDGLYSAKKTAVIRASDDFWPRDPASHTIHIASVAYNTLFLGEFMQPDWDMFHSLHPMAEYHAAARAVGGCAIYVSDKPGQHDFNLLRKLVLRDGSILRAKLPGRPTSDCFFSDPVRDNKSLLKIWNLNEFTGVIGVFNCQGAGWCKNEKRYLIHDQEPGTISGCVRTNDVHYLHKVAAFEWTGDSIVYSHLRGELVYLPKDTSLPVTLMPREYEVFTVVPVKEFSDGSKFAPVGLMEMFNSGGAIVSLRYDDEGTKFVVRMKLRGSGLVGVYSSVRRPRSVTVDSDDVEYRYEPESGLVTFTLGVPEKELYLWDVVIQ

SEQ ID NO: 30395 - protein, 686 aa, Arabidopsis thaliana
  misc_feature (1)..(686): Ceres Seq. ID no. 4958678
MCVFRFKLWWMTQRMGTNGKEIPCETQFLIVEANQGSDLGGRDQSSSYVVFLPILEGDFRAVLQGNEANELEICLESGDPTVDQFEGSHLVFVAAGSDPFDVITKAVKAVEQHLQTFSHRERKKMPDMLNWFGWCTWDAFYTNVTAKDVKQGLESLKAGGVTPKFVIIDDGWQSVGMDETSVEFNADNAANFANRLTHIKENHKFQKDGKEGHRVDDPSLSLGHVITDIKSNNSLKYVYVWHAITGYWGGVKPGVSGMEHYESKVAYPVSSPGVMSSENCGCLESITKNGLGLVNPEKVFSFYNDLHSYLASVGVDGVKVDVQNILETLGAGHGGRVKLAKKYHQALEASISRNFPDNGIISCMSHNTDGLYSAKKTAVIRASDDFWPRDPASHTIHIASVAYNTLFLGEFMQPDWDMFHSLHPMAEYHAAARAVGGCAIYVSDKPGQHDFNLLRKLVLRDGSILRAKLPGRPTSDCFFSDPVRDNKSLLKIWNLNEFTGVIGVFNCQGAGWCKNEKRYLIHDQEPGTISGCVRTNDVHYLHKVAAFEWTGDSIVYSHLRGELVYLPKDTSLPVTLMPREYEVFTVVPVKEFSDGSKFAPVGLMEMFNSGGAIVSLRYDDEGTKFVVRMKLRGSGLVGVYSSVRRPRSVTVDSDDVEYRYEPESGLVTFTLGVPEKELYLWDVVIQ

SEQ ID NO: 30396 - protein, 676 aa, Arabidopsis thaliana
  misc_feature (1)..(676): Ceres Seq. ID no. 4958679
MTQRMGTNGKEIPCETQFLIVEANQGSDLGGRDQSSSYVVFLPILEGDFRAVLQGNEANELEICLESGDPTVDQFEGSHLVFVAAGSDPFDVITKAVKAVEQHLQTFSHRERKKMPDMLNWFGWCTWDAFYTNVTAKDVKQGLESLKAGGVTPKFVIIDDGWQSVGMDETSVEFNADNAANFANRLTHIKENHKFQKDGKEGHRVDDPSLSLGHVITDIKSNNSLKYVYVWHAITGYWGGVKPGVSGMEHYESKVAYPVSSPGVMSSENCGCLESITKNGLGLVNPEKVFSFYNDLHSYLASVGVDGVKVDVQNILETLGAGHGGRVKLAKKYHQALEASISRNFPDNGIISCMSHNTDGLYSAKKTAVIRASDDFWPRDPASHTIHIASVAYNTLFLGEFMQPDWDMFHSLHPMAEYHAAARAVGGCAIYVSDKPGQHDFNLLRKLVLRDGSILRAKLPGRPTSDCFFSDPVRDNKSLLKIWNLNEFTGVIGVFNCQGAGWCKNEKRYLIHDQEPGTISGCVRTNDVHYLHKVAAFEWTGDSIVYSHLRGELVYLPKDTSLPVTLMPREYEVFTVVPVKEFSDGSKFAPVGLMEMFNSGGAIVSLRYDDEGTKFVVRMKLRGSGLVGVYSSVRRPRSVTVDSDDVEYRYEPESGLVTFTLGVPEKELYLWDVVIQ

SEQ ID NO: 30397 - DNA, 984 bp, Arabidopsis thaliana
  misc_feature (1)..(984): Ceres Seq. ID no. 4958714
atgtctcaaagcggcggtgacttcaacctctccgacgagattctcgccgtgattcccaccgacccttatgatcaactcgacctcgccaggaagatcacttccatggctatcgcttcaagggtttcgaatctggaatctcaagtctccggcttgagacagaagcttcttgagaaggatcggcttgttcatgaacttgaagacagagtctcttcctttgaaagactttaccatgaagctgactcgagtttgaagaatgttgtcgatgaaaatatgaaactgactcaagaacgagattcactggcaatcactgcgaagaaactcggtcgtgattatgcaaagttggaagcattcaagagacaattgatgcagtcattgaatgatgataatccatctcaaactgagactgctgatgtcagaatggttcctcgaggcaaagtctcttcaagagttgcttgttctgatgttatttactctgtatgcattgtagatgagaattcaaatggatcctactcaaacaatgaaggtttaagtgaagcgaggcaaagacagtctatgactccgcagttctctcccgcgtttacaccaagcggaacaccaaagatcttatctactgctgcttctccgagaagctactctgctgcttcatcgccaaagctattctctggagctgcatctccaacatcttcacattatgatatacgtatgtggtcttcaactagccagcaatcttcagtagcaaactctcctccacgctcgcattctgtttcagctcggcatccgcggattgatgggaaagagttctttagacaagccaggagccgtttgtcttacgaacagttcagtgcattcctggctaacatcaaggaacttaacgcccggaagcagggccgcgaggaaacattacagaaagcagaggaaatatttggaaaggaaaacaatgatctttacatatcctttaagggacttctcacaagtgggcgttga

SEQ ID NO: 30398 - protein, 327 aa, Arabidopsis thaliana
  misc_feature (1)..(327): Ceres Seq. ID no. 4958715
MSQSGGDFNLSDEILAVIPTDPYDQLDLARKITSMAIASRVSNLESQVSGLRQKLLEKDRLVHELEDRVSSFERLYHEADSSLKNVVDENMKLTQERDSLAITAKKLGRDYAKLEAFKRQLMQSLNDDNPSQTETADVRMVPRGKVSSRVACSDVIYSVCIVDENSNGSYSNNEGLSEARQRQSMTPQFSPAFTPSGTPKILSTAASPRSYSAASSPKLFSGAASPTSSHYDIRMWSSTSQQSSVANSPPRSHSVSARHPRIDGKEFFRQARSRLSYEQFSAFLANIKELNARKQGREETLQKAEEIFGKENNDLYISFKGLLTSGR

SEQ ID NO: 30399 - protein, 293 aa, Arabidopsis thaliana
  misc_feature (1)..(293): Ceres Seq. ID no. 4958716
MAIASRVSNLESQVSGLRQKLLEKDRLVHELEDRVSSFERLYHEADSSLKNVVDENMKLTQERDSLAITAKKLGRDYAKLEAFKRQLMQSLNDDNPSQTETADVRMVPRGKVSSRVACSDVIYSVCIVDENSNGSYSNNEGLSEARQRQSMTPQFSPAFTPSGTPKILSTAASPRSYSAASSPKLFSGAASPTSSHYDIRMWSSTSQQSSVANSPPRSHSVSARHPRIDGKEFFRQARSRLSYEQFSAFLANIKELNARKQGREETLQKAEEIFGKENNDLYISFKGLLTSGR

SEQ ID NO: 30400 - protein, 237 aa, Arabidopsis thaliana
  misc_feature (1)..(237): Ceres Seq. ID no. 4958717
MKLTQERDSLAITAKKLGRDYAKLEAFKRQLMQSLNDDNPSQTETADVRMVPRGKVSSRVACSDVIYSVCIVDENSNGSYSNNEGLSEARQRQSMTPQFSPAFTPSGTPKILSTAASPRSYSAASSPKLFSGAASPTSSHYDIRMWSSTSQQSSVANSPPRSHSVSARHPRIDGKEFFRQARSRLSYEQFSAFLANIKELNARKQGREETLQKAEEIFGKENNDLYISFKGLLTSGR

SEQ ID NO: 30401 - DNA, 3138 bp, Arabidopsis thaliana
  misc_feature (1)..(3138): Ceres Seq. ID no. 4958718
atggttcgagcccaaaaccgaaccagacccactactcatcccgacgatgcgcgagctttgaactccatcttcgcggcttggaagattcgggcgccgagggaatggaacatcagcggcgaactttgctccggcgtcgccatcgacgccagtgtactcgactcaaaccatgcctacaatcctctcatcaaatgcgactgtagtttccaaaactccacaatctgccgcataaataacataaaggtttatgcgatagatgttgtaggacctatacctccagagctctggaccttaacatacctcaccaatctgctcactgtctcctgctattgggaatttgactcggatgcagtggatgtaaaagcctctgaaaccttgacttttggaatcaacgcgttgtctggccctattcctaaggaaatcggtttgcttacggatttaagattacttggtattagttcaaataacttttccggttccttaccagctgagattgggagttgtacaaaactacagcaaatgtacatcgatagttctggactcagcggaggaatacctttatcatttgctaattttgtggagttggaagtcgcttggattatggatgtggaacttacaggtcggataccagactttataggattctggaccaaacttactaccttgaggatcctcggaactggtttgagcggcccaataccgtcgtcattttccaacttaattgctttgacagaactgaggcttggtgatatatccaatggaagctcttctcttgatttcatcaaagacatgaaatctctaagtgtattagtattgaggaacaacaatctcactgggacaataccgtctactattggaggatacacaagtttgcaacaagttgatttgagcttcaacaaattacatggaccaattccggcttcacttttcaacttaagtcgacttactcacttgtttctgggaaacaacacgttgaatggatccttgcccactctaaaggggcagtctctgagcaatttagatgtgtcgtacaatgatttgtctggaagtcttccttcatgggtcagcttaccagatttgaagctcaatctagttgctaacaacttcacactggaaggtcttgacaacagggttttatcaggactacattgcctgcagaagaacttcccctgcaatcgaggcgaaggaatctgtaagtgtaacaaaaagataccctcacaaattatgttctccatgttgaatgtgcaaacatatggacagggctccaatgtcttattggaaaaaaattgttttaagactttcgctattgactggtgtctagattataacttttcgatcaactgcggaggcccagagataaggtctgttagtggagcactatttgaaaaggaggacgcggatcttggaccagcttcgtttgttgtgagtgctgcaaagagatgggcagccagtagtgtaggaaattttgctggcagtagcaacaatatatacatagctacttcactagcacaatttatcaacactatggactcagagctttttcagtcagcacgactttctgcatcttccctaaggtattatgggttggggctagaaaatggagggtacaccgtaacacttcagtttgctgaagtacaaattgaaggttctaactcttggaaaggtattggaagacgacgttttaacatttatgtccagggaagacttgttgaaaaggattttgatatacgcagaacagctggtggctcttcggttcgagcagttcagagagaatataaaacaaatgtatcagaaaatcatctcgaagtccatcttttctgggctggaaaaggaacatgttgtattcctatccaaggggcttatgggccattaatagcggccgtcagtgcgacaccagatttcacaccaactgtggctaataggccaccatcaaagggaaagagcaggactggtactattgtgggtgtcattgttggtgttggacttttgagcatctttgcgggtgtggttatcctcgtcattcgaaaaagaagaaaaccgtacacagatgatgaagagatacttagtatggacgtaaagccttacacctttacttactcggaacttaagaatgcaacacaagattttgatctctcaaacaagcttggagagggagggtttggggctgtttataagggaaacctcaatgatggaagagaggtggcggtgaagcagttgtcaattggatcacggcaagggaagggacaatttgttgcagaaattattgcaatttcttcagttctacatcgcaacctagtaaaactttacgggtgctgctttgaaggagatcatcgtttgctcgtatatgagtatctccctaatggaagtctcgatcaggcattatttggggataagagtttgcatcttgattggtcaacccgttatgagatatgtctgggagtagccagaggtctagtttatctccacgaggaagcaagtgttcgcataatacacagagatgtgaaggccagcaacattttactggactctgaactggtcccaaaagtttctgattttgggcttgcaaaactatatgatgacaagaaaacccatattagtaccagagtggcagggacgattgggtatcttgcgccagagtatgccatgcgtggacatctaacagagaaaacagatgtgtatgcctttggtgttgtggctcttgagctagtgagtggaaggaaaaactctgatgagaacctggaagagggaaaaaaatatcttcttgaatgggcatggaatctacacgagaaaaaccgtgacgttgaactaatagatgatgagctaagtgaatacaacatggaagaagtgaaacgcatgattggcattgctctgctttgcactcagtcatcttatgcgttgagaccaccaatgtcacgagtagtagccatgttgtcaggagatgctgaggtcaatgatgccacctctaagccaggctacctaaccgactgtacatttgatgacaccacaagctcctcattcagcaactttcaaacgaaagacactagcttctcgacgagctttatagcgcctggcccggagatgccacttagagacggcgaatcgaagccaatggttggattcaagatcaaggagggaagatga

SEQ ID NO: 30402 - protein, 1045 aa, Arabidopsis thaliana
  misc_feature (1)..(1045): Ceres Seq. ID no. 4958719
MVRAQNRTRPTTHPDDARALNSIFAAWKIRAPREWNISGELCSGVAIDASVLDSNHAYNPLIKCDCSFQNSTICRINNIKVYAIDVVGPIPPELWTLTYLTNLLTVSCYWEFDSDAVDVKASETLTFGINALSGPIPKEIGLLTDLRLLGISSNNFSGSLPAEIGSCTKLQQMYIDSSGLSGGIPLSFANFVELEVAWIMDVELTGRIPDFIGFWTKLTTLRILGTGLSGPIPSSFSNLIALTELRLGDISNGSSSLDFIKDMKSLSVLVLRNNNLTGTIPSTIGGYTSLQQVDLSFNKLHGPIPASLFNLSRLTHLFLGNNTLNGSLPTLKGQSLSNLDVSYNDLSGSLPSWVSLPDLKLNLVANNFTLEGLDNRVLSGLHCLQKNFPCNRGEGICKCNKKIPSQIMFSMLNVQTYGQGSNVLLEKNCFKTFAIDWCLDYNFSINCGGPEIRSVSGALFEKEDADLGPASFVVSAAKRWAASSVGNFAGSSNNIYIATSLAQFINTMDSELFQSARLSASSLRYYGLGLENGGYTVTLQFAEVQIEGSNSWKGIGRRRFNIYVQGRLVEKDFDIRRTAGGSSVRAVQREYKTNVSENHLEVHLFWAGKGTCCIPIQGAYGPLIAAVSATPDFTPTVANRPPSKGKSRTGTIVGVIVGVGLLSIFAGVVILVIRKRRKPYTDDEEILSMDVKPYTFTYSELKNATQDFDLSNKLGEGGFGAVYKGNLNDGREVAVKQLSIGSRQGKGQFVAEIIAISSVLHRNLVKLYGCCFEGDHRLLVYEYLPNGSLDQALFGDKSLHLDWSTRYEICLGVARGLVYLHEEASVRIIHRDVKASNILLDSELVPKVSDFGLAKLYDDKKTHISTRVAGTIGYLAPEYAMRGHLTEKTDVYAFGVVALELVSGRKNSDENLEEGKKYLLEWAWNLHEKNRDVELIDDELSEYNMEEVKRMIGIALLCTQSSYALRPPMSRVVAMLSGDAEVNDATSKPGYLTDCTFDDTTSSSFSNFQTKDTSFSTSFIAPGPEMPLRDGESKPMVGFKIKEGR

SEQ ID NO: 30403 - protein, 873 aa, Arabidopsis thaliana
  misc_feature (1)..(873): Ceres Seq. ID no. 4958720
MYIDSSGLSGGIPLSFANFVELEVAWIMDVELTGRIPDFIGFWTKLTTLRILGTGLSGPIPSSFSNLIALTELRLGDISNGSSSLDFIKDMKSLSVLVLRNNNLTGTIPSTIGGYTSLQQVDLSFNKLHGPIPASLFNLSRLTHLFLGNNTLNGSLPTLKGQSLSNLDVSYNDLSGSLPSWVSLPDLKLNLVANNFTLEGLDNRVLSGLHCLQKNFPCNRGEGICKCNKKIPSQIMFSMLNVQTYGQGSNVLLEKNCFKTFAIDWCLDYNFSINCGGPEIRSVSGALFEKEDADLGPASFVVSAAKRWAASSVGNFAGSSNNIYIATSLAQFINTMDSELFQSARLSASSLRYYGLGLENGGYTVTLQFAEVQIEGSNSWKGIGRRRFNIYVQGRLVEKDFDIRRTAGGSSVRAVQREYKTNVSENHLEVHLFWAGKGTCCIPIQGAYGPLIAAVSATPDFTPTVANRPPSKGKSRTGTIVGVIVGVGLLSIFAGVVILVIRKRRKPYTDDEEILSMDVKPYTFTYSELKNATQDFDLSNKLGEGGFGAVYKGNLNDGREVAVKQLSIGSRQGKGQFVAEIIAISSVLHRNLVKLYGCCFEGDHRLLVYEYLPNGSLDQALFGDKSLHLDWSTRYEICLGVARGLVYLHEEASVRIIHRDVKASNILLDSELVPKVSDFGLAKLYDDKKTHISTRVAGTIGYLAPEYAMRGHLTEKTDVYAFGVVALELVSGRKNSDENLEEGKKYLLEWAWNLHEKNRDVELIDDELSEYNMEEVKRMIGIALLCTQSSYALRPPMSRVVAMLSGDAEVNDATSKPGYLTDCTFDDTTSSSFSNFQTKDTSFSTSFIAPGPEMPLRDGESKPMVGFKIKEGR

SEQ ID NO: 30404 - protein, 846 aa, Arabidopsis thaliana
  misc_feature (1)..(846): Ceres Seq. ID no. 4958721
MDVELTGRIPDFIGFWTKLTTLRILGTGLSGPIPSSFSNLIALTELRLGDISNGSSSLDFIKDMKSLSVLVLRNNNLTGTIPSTIGGYTSLQQVDLSFNKLHGPIPASLFNLSRLTHLFLGNNTLNGSLPTLKGQSLSNLDVSYNDLSGSLPSWVSLPDLKLNLVANNFTLEGLDNRVLSGLHCLQKNFPCNRGEGICKCNKKIPSQIMFSMLNVQTYGQGSNVLLEKNCFKTFAIDWCLDYNFSINCGGPEIRSVSGALFEKEDADLGPASFVVSAAKRWAASSVGNFAGSSNNIYIATSLAQFINTMDSELFQSARLSASSLRYYGLGLENGGYTVTLQFAEVQIEGSNSWKGIGRRRFNIYVQGRLVEKDFDIRRTAGGSSVRAVQREYKTNVSENHLEVHLFWAGKGTCCIPIQGAYGPLIAAVSATPDFTPTVANRPPSKGKSRTGTIVGVIVGVGLLSIFAGVVILVIRKRRKPYTDDEEILSMDVKPYTFTYSELKNATQDFDLSNKLGEGGFGAVYKGNLNDGREVAVKQLSIGSRQGKGQFVAEIIAISSVLHRNLVKLYGCCFEGDHRLLVYEYLPNGSLDQALFGDKSLHLDWSTRYEICLGVARGLVYLHEEASVRIIHRDVKASNILLDSELVPKVSDFGLAKLYDDKKTHISTRVAGTIGYLAPEYAMRGHLTEKTDVYAFGVVALELVSGRKNSDENLEEGKKYLLEWAWNLHEKNRDVELIDDELSEYNMEEVKRMIGIALLCTQSSYALRPPMSRVVAMLSGDAEVNDATSKPGYLTDCTFDDTTSSSFSNFQTKDTSFSTSFIAPGPEMPLRDGESKPMVGFKIKEGR

SEQ ID NO: 30405 - DNA, 1920 bp, Arabidopsis thaliana
  misc_feature (1)..(1920): Ceres Seq. ID no. 4958734
atgccagagcattgggtctttgtcccaaaacctcatgaagtaggttcatggaaaaaggttccatcagacttttgtcctttcataccggtccgacgaggacagtgtatcaatggggttacatattacctagcttggattgacatgtataattctgtgcttgtgagtttcgacataagatcggaagagctcacaatgagccaaatacctcggagggacgacggagatggatccaggaagaatgtgagtcttatagagtatggtggaaaagttactcttcttgactctaaccatcttagagacaaggggatgttggttttaagggttctggaagatgccgggatcaacaaggaatggtccaaaaagactatggttttgcatccttatcagctgcatttagtccaagtagacattatattcaacgtaaacgatattatgaaagaaatgtggggtgttgcactgagttttgttatagctttagtggtcgtcaagatcagtctctggctctatagatgggctaaccctaactgctccggcaaactacctccaggttcaatggggtttccggtgatcggagaaaccgttgagttcttcaaaccttacagtttcaacgaaatccatccatttgtcaagaaaagaatgttcaagcacggtggttcattattccggacgaatatcctcggctctaaaacgattgtttcgacagatccggaagtgaactttgagattctcaaacaagagaacaggtgtttcatcatgagctatccagaagctcttgttagaatctttgggaaagataacttgttcttcaagcaaggcaaggacttccacaggtacatgagacatattgctctgcagcttcttggccctgagtgtttgaagcagagatttatacaacaaatcgacatagcaacaagcgagcatctcaaatctgtctccttccaaggcgttgtagacgtcaaagatactagtggaagattgatattggaacaaatgatcctgatgatcataagtaacatcaaacctgagactaagagcaaactgatagagagttttagagatttcagctttgatttggttaggtccccttttgatccttctttttggaacgctctttacaatggtcttatggcacgcagcaatgtgatgaagatgctaaaaagaatgttcaaagagaggagagaagaagcaacatcggatgactcaaaatatggagacttcatggagacaatgatatatgaggtggagaaagaaggcgatacgatcaacgaggaaagatcagtagagctaatacttagtttactgattgcgtcttatgaaactacttctactatgactgcattaactgtgaaattcatagctgaaaaccccaaagtgcttatggagctgaagagagaacatgagaccatcctccaaaacagagctgataaagaatctggagttacttggaaagaatatagatccatgatgaatttcacccatatggttatcaatgagtctcttcgtttaggaagtttgtcacctgctatgtttagaaaggcggtgaatgatgtggagatcaaagggtatacaattccagcaggatggattgtattggtggttccatctcttcttcattatgaccctcaaatctatgaacaaccatgtgagtttaatccatggagatgggaggggaaagaattgctttctggctctaaaacgttcatggcgtttggtggtggtgcaagactatgtgcaggagcagagtttgctaggcttcagatggctatatttcttcatcatctagtcacaacgtatgacttctctttgatcgataaatcttatatcatccgagcacccttacttcgattctccaagccgatacgcataacgatctccgagaatcctttaagttcatctcatcaaaatgcaaatcttttttag

SEQ ID NO: 30406 - protein, 639 aa, Arabidopsis thaliana
  misc_feature (1)..(639): Ceres Seq. ID no. 4958735
MPEHWVFVPKPHEVGSWKKVPSDFCPFIPVRRGQCINGVTYYLAWIDMYNSVLVSFDIRSEELTMSQIPRRDDGDGSRKNVSLIEYGGKVTLLDSNHLRDKGMLVLRVLEDAGINKEWSKKTMVLHPYQLHLVQVDIIFNVNDIMKEMWGVALSFVIALVVVKISLWLYRWANPNCSGKLPPGSMGFPVIGETVEFFKPYSFNEIHPFVKKRMFKHGGSLFRTNILGSKTIVSTDPEVNFEILKQENRCFIMSYPEALVRIFGKDNLFFKQGKDFHRYMRHIALQLLGPECLKQRFIQQIDIATSEHLKSVSFQGVVDVKDTSGRLILEQMILMIISNIKPETKSKLIESFRDFSFDLVRSPFDPSFWNALYNGLMARSNVMKMLKRMFKERREEATSDDSKYGDFMETMIYEVEKEGDTINEERSVELILSLLIASYETTSTMTALTVKFIAENPKVLMELKREHETILQNRADKESGVTWKEYRSMMNFTHMVINESLRLGSLSPAMFRKAVNDVEIKGYTIPAGWIVLVVPSLLHYDPQIYEQPCEFNPWRWEGKELLSGSKTFMAFGGGARLCAGAEFARLQMAIFLHHLVTTYDFSLIDKSYIIRAPLLRFSKPIRITISENPLSSSHQNANLF

SEQ ID NO: 30407 - protein, 592 aa, Arabidopsis thaliana
  misc_feature (1)..(592): Ceres Seq. ID no. 4958736
MYNSVLVSFDIRSEELTMSQIPRRDDGDGSRKNVSLIEYGGKVTLLDSNHLRDKGMLVLRVLEDAGINKEWSKKTMVLHPYQLHLVQVDIIFNVNDIMKEMWGVALSFVIALVVVKISLWLYRWANPNCSGKLPPGSMGFPVIGETVEFFKPYSFNEIHPFVKKRMFKHGGSLFRTNILGSKTIVSTDPEVNFEILKQENRCFIMSYPEALVRIFGKDNLFFKQGKDFHRYMRHIALQLLGPECLKQRFIQQIDIATSEHLKSVSFQGVVDVKDTSGRLILEQMILMIISNIKPETKSKLIESFRDFSFDLVRSPFDPSFWNALYNGLMARSNVMKMLKRMFKERREEATSDDSKYGDFMETMIYEVEKEGDTINEERSVELILSLLIASYETTSTMTALTVKFIAENPKVLMELKREHETILQNRADKESGVTWKEYRSMMNFTHMVINESLRLGSLSPAMFRKAVNDVEIKGYTIPAGWIVLVVPSLLHYDPQIYEQPCEFNPWRWEGKELLSGSKTFMAFGGGARLCAGAEFARLQMAIFLHHLVTTYDFSLIDKSYIIRAPLLRFSKPIRITISENPLSSSHQNANLF

SEQ ID NO: 30408 - protein, 575 aa, Arabidopsis thaliana
  misc_feature (1)..(575): Ceres Seq. ID no. 4958737
MSQIPRRDDGDGSRKNVSLIEYGGKVTLLDSNHLRDKGMLVLRVLEDAGINKEWSKKTMVLHPYQLHLVQVDIIFNVNDIMKEMWGVALSFVIALVVVKISLWLYRWANPNCSGKLPPGSMGFPVIGETVEFFKPYSFNEIHPFVKKRMFKHGGSLFRTNILGSKTIVSTDPEVNFEILKQENRCFIMSYPEALVRIFGKDNLFFKQGKDFHRYMRHIALQLLGPECLKQRFIQQIDIATSEHLKSVSFQGVVDVKDTSGRLILEQMILMIISNIKPETKSKLIESFRDFSFDLVRSPFDPSFWNALYNGLMARSNVMKMLKRMFKERREEATSDDSKYGDFMETMIYEVEKEGDTINEERSVELILSLLIASYETTSTMTALTVKFIAENPKVLMELKREHETILQNRADKESGVTWKEYRSMMNFTHMVINESLRLGSLSPAMFRKAVNDVEIKGYTIPAGWIVLVVPSLLHYDPQIYEQPCEFNPWRWEGKELLSGSKTFMAFGGGARLCAGAEFARLQMAIFLHHLVTTYDFSLIDKSYIIRAPLLRFSKPIRITISENPLSSSHQNANLF

SEQ ID NO: 30409 - DNA, 2484 bp, Arabidopsis thaliana
  misc_feature (1)..(2484): Ceres Seq. ID no. 4958915
atggaggaaattgaagaaggaagcagcaacaacagcataagacgtgttggtaccggaagtagtgaccggagatgggttgatggaagcgaggtagactctgaaacgccgctgttttcagaaatcagagatagagactatagttttgggaatttgaggagaagattaatgaaaaaacccaaaagagctgattctcttgatgttgaagctatggaaattgcaggttctcatggtcacaatctcaaggatttgtcacttttgactacacttggaatagcgtttcagacgttaggtgttgtgtatggtgatatgggaacaagtcctttgtatgtgttcagtgatgtgtttagtaaagttcctataagatcagaagttgatgttcttggagctttgtctctcgttatctacactattgctgtgattcctttggcaaagtatgtatttgtagtccttaaagctaacgacaatggcgaaggagggacatttgcgttgtattcacttatttgtaggtatgcaaaggtgaataagctgccaaatcaacaacctgcggatgagcagatctcgagttttaggcttaaactcccaactcctgagctggaaagagctctggggattaaagaagctttggagacaaaagggtatttgaaaactcttcttttgcttttagtcctaatgggaacttccatgattattggcgatggaattctaacaccagctatgtcagtgatgtctgcaatgagtggtctacaaggtgaagttaaaggatttggaacaaatgcattggttatgtcttcgattgtgattctcgtggctttgttcagcatacaacggtttgggacgggtaaagttggttttctatttgctccagttctggcgctctggttcttctctcttggtgctattggaatctataatctgttgaagtatgacttcactgtcataagagcactaaacccgttttatatcgttttgttcttcaacaagaatagcaaacaggcttggtctgctcttggtggatgtgtcttatgcataacaggagctgaagcaatgtttgcagatttaggacatttctcagttcgttctatacagatggcatttacttgcgtggtgttcccatgccttctcttagcttacatgggtcaagctgcttatctaacaaagcatcccgaggcctcagctcgcatattctatgattcagttccaaagagtttgttctggccggtgtttgtgattgcaacattagctgctatgatagctagccaagccatgatctccgcgactttctcatgcgtcaaacaagccatggctctcggttgctttccaaggctgaagataatccacacttctaagaaacggataggtcaaatctatataccagttatcaactggttcttgatgatcatgtgcattcttgtcgtctccatcttcagaagcacaacccacattgccaatgcttacggcatagcagaggtaggtgtaatgatggttagcacagttttggtaactctagtgatgcttcttatttggcaaaccaatatatttctcgccctttgctttccccttatatttggatcagtggagaccatttacttgctagctgttctcaccaagatattggaaggcggttgggttccgctagtattcgccactttcttcctcactgtaatgtacatttggaactacggaagtgtactcaagtaccaaagcgaggtcagggaaagaatctccatggattttatgcgtgagctcggttcaactcttgggaccattcgaatccctgggattggactcctttataacgagcttgtccaaggtataccttccatttttggacagttcttgctcactcttcctgcgattcactcaacaatcatctttgtctgcatcaaatatgttcctgtcccggttgttcctcaagaagagaggttcctcttcagacgggtttgtcctaaggactaccatatgttcaggtgcattgcgaggtatggttacaaagatgtcagaaaagaagattctagagtctttgaacagcttcttattgaaagtctagagaagttcttgagatgtgaagcattagaggatgctctagagagcactctgaatgattttgatcccgatagagtttccgttgcaagtgatacttacacggacgacctcatggctcctctcatccaccgtgcaaagcgttctgagccagagcaagagttggattcagaggttttgccatcttcaagcgtagggtcgtctatggaggaagatccagctctggaatatgaacttgcggctttgagagaagccacagactcggggctaacgtatttactggctcatggagatgtaagggcgaagaagaattcgattttcgtgaagaagcttgtgattaattacttctatgcgtttctaaggagaaattgcagagctggagctgcgaatctcactgttcctcatatgaacatcttgcaagctgggatgacttatatggtctag

SEQ ID NO: 30410 - protein, 827 aa, Arabidopsis thaliana
  misc_feature (1)..(827): Ceres Seq. ID no. 4958916
MEEIEEGSSNNSIRRVGTGSSDRRWVDGSEVDSETPLFSEIRDRDYSFGNLRRRLMKKPKRADSLDVEAMEIAGSHGHNLKDLSLLTTLGIAFQTLGVVYGDMGTSPLYVFSDVFSKVPIRSEVDVLGALSLVIYTIAVIPLAKYVFVVLKANDNGEGGTFALYSLICRYAKVNKLPNQQPADEQISSFRLKLPTPELERALGIKEALETKGYLKTLLLLLVLMGTSMIIGDGILTPAMSVMSAMSGLQGEVKGFGTNALVMSSIVILVALFSIQRFGTGKVGFLFAPVLALWFFSLGAIGIYNLLKYDFTVIRALNPFYIVLFFNKNSKQAWSALGGCVLCITGAEAMFADLGHFSVRSIQMAFTCVVFPCLLLAYMGQAAYLTKHPEASARIFYDSVPKSLFWPVFVIATLAAMIASQAMISATFSCVKQAMALGCFPRLKIIHTSKKRIGQIYIPVINWFLMIMCILVVSIFRSTTHIANAYGIAEVGVMMVSTVLVTLVMLLIWQTNIFLALCFPLIFGSVETIYLLAVLTKILEGGWVPLVFATFFLTVMYIWNYGSVLKYQSEVRERISMDFMRELGSTLGTIRIPGIGLLYNELVQGIPSIFGQFLLTLPAIHSTIIFVCIKYVPVPVVPQEERFLFRRVCPKDYHMFRCIARYGYKDVRKEDSRVFEQLLIESLEKFLRCEALEDALESTLNDFDPDRVSVASDTYTDDLMAPLIHRAKRSEPEQELDSEVLPSSSVGSSMEEDPALEYELAALREATDSGLTYLLAHGDVRAKKNSIFVKKLVINYFYAFLRRNCRAGAANLTVPHMNILQAGMTYMV

SEQ ID NO: 30411 - protein, 772 aa, Arabidopsis thaliana
  misc_feature (1)..(772): Ceres Seq. ID no. 4958917
MKKPKRADSLDVEAMEIAGSHGHNLKDLSLLTTLGIAFQTLGVVYGDMGTSPLYVFSDVFSKVPIRSEVDVLGALSLVIYTIAVIPLAKYVFVVLKANDNGEGGTFALYSLICRYAKVNKLPNQQPADEQISSFRLKLPTPELERALGIKEALETKGYLKTLLLLLVLMGTSMIIGDGILTPAMSVMSAMSGLQGEVKGFGTNALVMSSIVILVALFSIQRFGTGKVGFLFAPVLALWFFSLGAIGIYNLLKYDFTVIRALNPFYIVLFFNKNSKQAWSALGGCVLCITGAEAMFADLGHFSVRSIQMAFTCVVFPCLLLAYMGQAAYLTKHPEASARIFYDSVPKSLFWPVFVIATLAAMIASQAMISATFSCVKQAMALGCFPRLKIIHTSKKRIGQIYIPVINWFLMIMCILVVSIFRSTTHIANAYGIAEVGVMMVSTVLVTLVMLLIWQTNIFLALCFPLIFGSVETIYLLAVLTKILEGGWVPLVFATFFLTVMYIWNYGSVLKYQSEVRERISMDFMRELGSTLGTIRIPGIGLLYNELVQGIPSIFGQFLLTLPAIHSTIIFVCIKYVPVPVVPQEERFLFRRVCPKDYHMFRCIARYGYKDVRKEDSRVFEQLLIESLEKFLRCEALEDALESTLNDFDPDRVSVASDTYTDDLMAPLIHRAKRSEPEQELDSEVLPSSSVGSSMEEDPALEYELAALREATDSGLTYLLAHGDVRAKKNSIFVKKLVINYFYAFLRRNCRAGAANLTVPHMNILQAGMTYMV

SEQ ID NO: 30412 - protein, 758 aa, Arabidopsis thaliana
  misc_feature (1)..(758): Ceres Seq. ID no. 4958918
MEIAGSHGHNLKDLSLLTTLGIAFQTLGVVYGDMGTSPLYVFSDVFSKVPIRSEVDVLGALSLVIYTIAVIPLAKYVFVVLKANDNGEGGTFALYSLICRYAKVNKLPNQQPADEQISSFRLKLPTPELERALGIKEALETKGYLKTLLLLLVLMGTSMIIGDGILTPAMSVMSAMSGLQGEVKGFGTNALVMSSIVILVALFSIQRFGTGKVGFLFAPVLALWFFSLGAIGIYNLLKYDFTVIRALNPFYIVLFFNKNSKQAWSALGGCVLCITGAEAMFADLGHFSVRSIQMAFTCVVFPCLLLAYMGQAAYLTKHPEASARIFYDSVPKSLFWPVFVIATLAAMIASQAMISATFSCVKQAMALGCFPRLKIIHTSKKRIGQIYIPVINWFLMIMCILVVSIFRSTTHIANAYGIAEVGVMMVSTVLVTLVMLLIWQTNIFLALCFPLIFGSVETIYLLAVLTKILEGGWVPLVFATFFLTVMYIWNYGSVLKYQSEVRERISMDFMRELGSTLGTIRIPGIGLLYNELVQGIPSIFGQFLLTLPAIHSTIIFVCIKYVPVPVVPQEERFLFRRVCPKDYHMFRCIARYGYKDVRKEDSRVFEQLLIESLEKFLRCEALEDALESTLNDFDPDRVSVASDTYTDDLMAPLIHRAKRSEPEQELDSEVLPSSSVGSSMEEDPALEYELAALREATDSGLTYLLAHGDVRAKKNSIFVKKLVINYFYAFLRRNCRAGAANLTVPHMNILQAGMTYMV

SEQ ID NO: 30413 - DNA, 1434 bp, Arabidopsis thaliana
  misc_feature (1)..(1434): Ceres Seq. ID no. 4958938
atggaaaagacttttgctctgattaccatttttcttgcttttgctttctccgggaaatgcagcgacgttttcagcagatgtgattttcctgagggattcgtctttggatcttccacttctgcttatcagtgggaaggagctgttgcggaagacggaaggaaacctagtgtctgggacagattttgtcactcacataataaccaaggtaacggagatataacatgtgatgggtatcacaaatacaaggaagatgtgaagttgatggtggacactaacttagatgctttcagattctccatctcttggtctaggctaatacctaatagaagaggccctgttaaccaaaagggtcttcagttctacaagaatcttatccaagaattagtaaaccatggaattgaaccatatgttacactgcaccactttgatcatcctcaatatcttgaggacgaatatgaaggatggctcaaccacatgatcgtcgaagactttactgcttatgcagatgtttgcttcagagagtttggaaaccatgtcaaattctggaccacgatcaacgagggcaatatattctctattggaggttacaacgatggggattcaccgcctggtcgttgttccataccaggccaaaactgcttattagggaactcttccactgaaccatatattgtaggccataatttgttgcttgcgcacgcctctgtttcaagactatataagcaaaattacaaggataagcagggaggttccataggctttagcatattgacgatagggtttagtccttccacaagctccaaagatgatgccattgcaactcaaagagccaacgatttcttcaacggctggatgcttgggcctcttatatatggagactatccggatacaatgaaaagaatcgtcggatcaagaatgcccgttttctcggaggaagaatcagaacaagtgaaaggctcatctgactatataggaatcaatcactatcttgcagcttctatcacaaacagcaaactgaaaccttctatttcaggaaaccctgatttctactcagacatgaaccagagctatggcaatcctcctgtctacgttcttgagaatggtcgaccgataaatcgagattcgcagttgaaagaaaaggacacaccaaggattgagttcttacaagcttacattggtggtgtgctgaaatccattaggaatggatcagatacgagaggctactttgtatggtcacttatggatttatacgagattaaggggggatacgatgttggttatggattgtactctgtcaatttcagtgatcctcatcgcaaaagatctcccaaactctctgctcattggtattctgattttctcaagggcaaaaccgcttttcttggttctcaaggcatcacggaattgcagagcaacctctctccttactcctag

SEQ ID NO: 30414 - protein, 477 aa, Arabidopsis thaliana
  misc_feature (1)..(477): Ceres Seq. ID no. 4958939
MEKTFALITIFLAFAFSGKCSDVFSRCDFPEGFVFGSSTSAYQWEGAVAEDGRKPSVWDRFCHSHNNQGNGDITCDGYHKYKEDVKLMVDTNLDAFRFSISWSRLIPNRRGPVNQKGLQFYKNLIQELVNHGIEPYVTLHHFDHPQYLEDEYEGWLNHMIVEDFTAYADVCFREFGNHVKFWTTINEGNIFSIGGYNDGDSPPGRCSIPGQNCLLGNSSTEPYIVGHNLLLAHASVSRLYKQNYKDKQGGSIGFSILTIGFSPSTSSKDDAIATQRANDFFNGWMLGPLIYGDYPDTMKRIVGSRMPVFSEEESEQVKGSSDYIGINHYLAASITNSKLKPSISGNPDFYSDMNQSYGNPPVYVLENGRPINRDSQLKEKDTPRIEFLQAYIGGVLKSIRNGSDTRGYFVWSLMDLYEIKGGYDVGYGLYSVNFSDPHRKRSPKLSAHWYSDFLKGKTAFLGSQGITELQSNLSPYS

SEQ ID NO: 30415 - protein, 390 aa, Arabidopsis thaliana
  misc_feature (1)..(390): Ceres Seq. ID no. 4958940
MVDTNLDAFRFSISWSRLIPNRRGPVNQKGLQFYKNLIQELVNHGIEPYVTLHHFDHPQYLEDEYEGWLNHMIVEDFTAYADVCFREFGNHVKFWTTINEGNIFSIGGYNDGDSPPGRCSIPGQNCLLGNSSTEPYIVGHNLLLAHASVSRLYKQNYKDKQGGSIGFSILTIGFSPSTSSKDDAIATQRANDFFNGWMLGPLIYGDYPDTMKRIVGSRMPVFSEEESEQVKGSSDYIGINHYLAASITNSKLKPSISGNPDFYSDMNQSYGNPPVYVLENGRPINRDSQLKEKDTPRIEFLQAYIGGVLKSIRNGSDTRGYFVWSLMDLYEIKGGYDVGYGLYSVNFSDPHRKRSPKLSAHWYSDFLKGKTAFLGSQGITELQSNLSPYS

SEQ ID NO: 30416 - protein, 319 aa, Arabidopsis thaliana
  misc_feature (1)..(319): Ceres Seq. ID no. 4958941
MIVEDFTAYADVCFREFGNHVKFWTTINEGNIFSIGGYNDGDSPPGRCSIPGQNCLLGNSSTEPYIVGHNLLLAHASVSRLYKQNYKDKQGGSIGFSILTIGFSPSTSSKDDAIATQRANDFFNGWMLGPLIYGDYPDTMKRIVGSRMPVFSEEESEQVKGSSDYIGINHYLAASITNSKLKPSISGNPDFYSDMNQSYGNPPVYVLENGRPINRDSQLKEKDTPRIEFLQAYIGGVLKSIRNGSDTRGYFVWSLMDLYEIKGGYDVGYGLYSVNFSDPHRKRSPKLSAHWYSDFLKGKTAFLGSQGITELQSNLSPYS

SEQ ID NO: 30417 - DNA, 2445 bp, Arabidopsis thaliana
  misc_feature (1)..(2445): Ceres Seq. ID no. 4959201
atgggaaagattggtattgttttctttgcttcgttgctcttcttgctaattatattcccaagttgtgcctttgcagctataaccagagcaagtcctttgtcaataggacaaactctgagctcccctaatggaacttatgagttagggttcttcagtccaaacaactctcggaatcagtatgttgggatctggttcaagaacatcacccctcgggttgttgtctgggtggctaacagagataagccagttacaaacaacgcagcgaatctcactatcaacagcaatgggagccttatcttggttgagagagaacaaaatgttgtttggtcaataggagaaactttctcttctaacgagcttcgtgctgagctattagaaaacggaaatcttgtactcattgatggagtttcagaaagaaacttatgggaaagtttcgagcatcttggtgatactatgttacttgaatcatctgtgatgtatgatgttccgaataacaagaaacgtgttttatcttcttggaaaaatcccaccgatccttcacctggagaattcgtagctgagcttacgacacaagtacctccgcaaggctttataatgagaggatccaggccttactggagaggtggtccatgggcaagggtaaggttcaccggcataccagaaatggatggatcacatgtaagcaaattcgacatttcccaagatgttgcagccggcacaggatctttgacttattcattagaacgaagaaattcgaacctgtcgtacactacgctcacatcagcgggatcgttaaagatcatttggaataatggctctggttgggttactgacttggaggcccctgtaagctcatgtgatgtttataatacatgtggaccttttggcttgtgtataagatctaatcccccaaagtgtgaatgcttgaaaggctttgtaccaaaatcagatgaggagtggaataaaaggaattggactggtggttgtatgagaagaacaaatttatcttgtgatgtgaactcttctgcaacagcacaagccaataatggagacatcttcgacatagttgcaaatgtgaagcctccagacttttatgaatatctaagtttgatcaatgaagaggattgccaacaacgttgtcttggaaactgttcttgcacggcattttcctatattgaacaaattggatgtttggtatggaatcgagagcttgtggatgtaatgcagtttgttgctggaggagaaactctttccattcgtcttgcaagttctgagttagctggaagcaatcgagtgaagattattgttgctagcattgtcagcatttctgttttcatgatcttggtttttgcctcttattggtactggagatacaaagccaaacaaaatgattcaaatcctataccattggagacatcacaagatgcatggagggaacaactgaaaccacaagatgtaaatttctttgatatgcaaaccatattaactatcaccaataactttagcatggaaaataagcttggtcaaggtggattcggtccagtgtataagggaaatctacaagatgggaaagaaatagccataaaacgcctttcgagcacctctggacagggtctagaggagttcatgaatgaaataatactcatctcgaaactccaacacagaaacttggtccgccttttgggatgttgcattgaaggagaagaaaagctattgatttatgagtttatggcgaacaaaagcctcaatacctttatctttgattcgacgaaaaagcttgagcttgattggcccaagcggtttgaaatcattcaaggtattgcttgcggacttctttatcttcaccgcgactcatgtcttagggttgtacaccgagatatgaaggtcagcaacatccttttagacgaggaaatgaacccaaaaatatcagattttggattggctcggatgtttcaaggaacccaacatcaagccaacactcgcagggttgttggaacgctcggatacatgtctccagagtatgcttggacaggcatgttctctgagaaatccgacatctacgcatttggagttctgctattggaaatcataaccggcaagaggatttcaagtttcaccattggagaggaaggcaaaactcttcttgaatttgcatgggattcttggtgcgaaagcggtggatcggatctactggaccaagatatctctagctcgggttctgaatccgaagtagcgagatgtgttcagattggtttgctctgtattcaacaacaagccggggatagacccaacattgcacaagtaatgtcaatgcttacaaccacaatggatcttccgaaaccaaaacaacccgtattcgcaatgcaagtccaagagagtgattcagagtctaagactatgtactctgtcaataatataacacaaactgctatagttggtcgataa

SEQ ID NO: 30418 - protein, 814 aa, Arabidopsis thaliana
  misc_feature (1)..(814): Ceres Seq. ID no. 4959202
MGKIGIVFFASLLFLLIIFPSCAFAAITRASPLSIGQTLSSPNGTYELGFFSPNNSRNQYVGIWFKNITPRVVVWVANRDKPVTNNAANLTINSNGSLILVEREQNVVWSIGETFSSNELRAELLENGNLVLIDGVSERNLWESFEHLGDTMLLESSVMYDVPNNKKRVLSSWKNPTDPSPGEFVAELTTQVPPQGFIMRGSRPYWRGGPWARVRFTGIPEMDGSHVSKFDISQDVAAGTGSLTYSLERRNSNLSYTTLTSAGSLKIIWNNGSGWVTDLEAPVSSCDVYNTCGPFGLCIRSNPPKCECLKGFVPKSDEEWNKRNWTGGCMRRTNLSCDVNSSATAQANNGDIFDIVANVKPPDFYEYLSLINEEDCQQRCLGNCSCTAFSYIEQIGCLVWNRELVDVMQFVAGGETLSIRLASSELAGSNRVKIIVASIVSISVFMILVFASYWYWRYKAKQNDSNPIPLETSQDAWREQLKPQDVNFFDMQTILTITNNFSMENKLGQGGFGPVYKGNLQDGKEIAIKRLSSTSGQGLEEFMNEIILISKLQHRNLVRLLGCCIEGEEKLLIYEFMANKSLNTFIFDSTKKLELDWPKRFEIIQGIACGLLYLHRDSCLRVVHRDMKVSNILLDEEMNPKISDFGLARMFQGTQHQANTRRVVGTLGYMSPEYAWTGMFSEKSDIYAFGVLLLEIITGKRISSFTIGEEGKTLLEFAWDSWCESGGSDLLDQDISSSGSESEVARCVQIGLLCIQQQAGDRPNIAQVMSMLTTTMDLPKPKQPVFAMQVQESDSESKTMYSVNNITQTAIVGR

SEQ ID NO: 30419 - protein, 663 aa, Arabidopsis thaliana
  misc_feature (1)..(663): Ceres Seq. ID no. 4959203
MLLESSVMYDVPNNKKRVLSSWKNPTDPSPGEFVAELTTQVPPQGFIMRGSRPYWRGGPWARVRFTGIPEMDGSHVSKFDISQDVAAGTGSLTYSLERRNSNLSYTTLTSAGSLKIIWNNGSGWVTDLEAPVSSCDVYNTCGPFGLCIRSNPPKCECLKGFVPKSDEEWNKRNWTGGCMRRTNLSCDVNSSATAQANNGDIFDIVANVKPPDFYEYLSLINEEDCQQRCLGNCSCTAFSYIEQIGCLVWNRELVDVMQFVAGGETLSIRLASSELAGSNRVKIIVASIVSISVFMILVFASYWYWRYKAKQNDSNPIPLETSQDAWREQLKPQDVNFFDMQTILTITNNFSMENKLGQGGFGPVYKGNLQDGKEIAIKRLSSTSGQGLEEFMNEIILISKLQHRNLVRLLGCCIEGEEKLLIYEFMANKSLNTFIFDSTKKLELDWPKRFEIIQGIACGLLYLHRDSCLRVVHRDMKVSNILLDEEMNPKISDFGLARMFQGTQHQANTRRVVGTLGYMSPEYAWTGMFSEKSDIYAFGVLLLEIITGKRISSFTIGEEGKTLLEFAWDSWCESGGSDLLDQDISSSGSESEVARCVQIGLLCIQQQAGDRPNIAQVMSMLTTTMDLPKPKQPVFAMQVQESDSESKTMYSVNNITQTAIVGR

SEQ ID NO: 30420 - protein, 656 aa, Arabidopsis thaliana
  misc_feature (1)..(656): Ceres Seq. ID no. 4959204
MYDVPNNKKRVLSSWKNPTDPSPGEFVAELTTQVPPQGFIMRGSRPYWRGGPWARVRFTGIPEMDGSHVSKFDISQDVAAGTGSLTYSLERRNSNLSYTTLTSAGSLKIIWNNGSGWVTDLEAPVSSCDVYNTCGPFGLCIRSNPPKCECLKGFVPKSDEEWNKRNWTGGCMRRTNLSCDVNSSATAQANNGDIFDIVANVKPPDFYEYLSLINEEDCQQRCLGNCSCTAFSYIEQIGCLVWNRELVDVMQFVAGGETLSIRLASSELAGSNRVKIIVASIVSISVFMILVFASYWYWRYKAKQNDSNPIPLETSQDAWREQLKPQDVNFFDMQTILTITNNFSMENKLGQGGFGPVYKGNLQDGKEIAIKRLSSTSGQGLEEFMNEIILISKLQHRNLVRLLGCCIEGEEKLLIYEFMANKSLNTFIFDSTKKLELDWPKRFEIIQGIACGLLYLHRDSCLRVVHRDMKVSNILLDEEMNPKISDFGLARMFQGTQHQANTRRVVGTLGYMSPEYAWTGMFSEKSDIYAFGVLLLEIITGKRISSFTIGEEGKTLLEFAWDSWCESGGSDLLDQDISSSGSESEVARCVQIGLLCIQQQAGDRPNIAQVMSMLTTTMDLPKPKQPVFAMQVQESDSESKTMYSVNNITQTAIVGR

SEQ ID NO: 30421 - DNA, 1161 bp, Arabidopsis thaliana
  misc_feature (1)..(1161): Ceres Seq. ID no. 4959236
aaacctccaacttttttttgttttatcagattgtaaatttagggaagagactttcgcaagcaatctagaagcaaatcgatcgccaaatctccggattatttgcaagaatcgttcccagataatcttccccagattctccacttctccagctctgatcggagtgttgctcgaacagcttgaagaagacgacgaagatatggctacttcgaagaaaatgatcacacgtgaagaatgggagaagaaactaaatgctgtgaagcttaggaaagaagatatgaatactttggtgatgaattttcttgtgactgaaggatatgttgaagctgctgagaaattccaaagggagtctggaaccaaaccagagatagatcttgcgaccattactgatcgaatggctgttaaaaaggctgttcaaaacggaaatgtcgaggatgcgattgaaaaagttaatgatttgaatcctgagatactagacacgaatccggagctcttttttcatcttcagcagcaaaggttgatagaattaattcgacaagggaagacagaagaggccttagagtttgctcaggaggaacttgcaccacgtggcgaagaaaaccaagcgtttctggaagaattggaaaaaactgtagccctacttgtttttgacgatgcctctacctgcccggttaaagagcttcttgatctttcccaccgtcttaagacagcaagtgaagtaaatgcagcgattcttacaagccagagccacgaaaaagatcctaaacttccaagcttgttgaagatgttgatttgggctcaaactcaactggacgagaaagcagtgtatccgcacattaatgatttgtctaccggtaagctcgaagacccgtcagaatgattccgtacttctttcagccattggaaatcagtagcaaaaaggaacaatgaatggtgctctcttctcttcccgtcaatctcaataacttacaattcatatgctttctgcttttccttttcttctgcatcgggatttgttggacccgcaatcgttaggatatggggaggggaacataagcttttgtaggcaatgaattactctagtcaaatgttcttattatcaacatatttgatgactcattgcatacgtgcatttgatttgaatgaagttatcgactttgtttg

SEQ ID NO: 30422 - protein, 291 aa, Arabidopsis thaliana
  misc_feature (1)..(291): Ceres Seq. ID no. 4959237
NLQLFFVLSDCKFREETFASNLEANRSPNLRIICKNRSQIIFPRFSTSPALIGVLLEQLEEDDEDMATSKKMITREEWEKKLNAVKLRKEDMNTLVMNFLVTEGYVEAAEKFQRESGTKPEIDLATITDRMAVKKAVQNGNVEDAIEKVNDLNPEILDTNPELFFHLQQQRLIELIRQGKTEEALEFAQEELAPRGEENQAFLEELEKTVALLVFDDASTCPVKELLDLSHRLKTASEVNAAILTSQSHEKDPKLPSLLKMLIWAQTQLDEKAVYPHINDLSTGKLEDPSE

SEQ ID NO: 30423 - protein, 226 aa, Arabidopsis thaliana
  misc_feature (1)..(226): Ceres Seq. ID no. 4959238
MATSKKMITREEWEKKLNAVKLRKEDMNTLVMNFLVTEGYVEAAEKFQRESGTKPEIDLATITDRMAVKKAVQNGNVEDAIEKVNDLNPEILDTNPELFFHLQQQRLIELIRQGKTEEALEFAQEELAPRGEENQAFLEELEKTVALLVFDDASTCPVKELLDLSHRLKTASEVNAAILTSQSHEKDPKLPSLLKMLIWAQTQLDEKAVYPHINDLSTGKLEDPSE

SEQ ID NO: 30424 - protein, 220 aa, Arabidopsis thaliana
  misc_feature (1)..(220): Ceres Seq. ID no. 4959239
MITREEWEKKLNAVKLRKEDMNTLVMNFLVTEGYVEAAEKFQRESGTKPEIDLATITDRMAVKKAVQNGNVEDAIEKVNDLNPEILDTNPELFFHLQQQRLIELIRQGKTEEALEFAQEELAPRGEENQAFLEELEKTVALLVFDDASTCPVKELLDLSHRLKTASEVNAAILTSQSHEKDPKLPSLLKMLIWAQTQLDEKAVYPHINDLSTGKLEDPSE

SEQ ID NO: 30425 - DNA, 2466 bp, Arabidopsis thaliana
  misc_feature (1)..(2466): Ceres Seq. ID no. 4959248
atggatttcttgttcttgttattggagagaaaaaataaacacatggggaagaagagggtcgtgttgctttggcttagcatctttataagttttagctctgcagagataacggaagagagccctttgtcaataggacaaactctcagctcctccaatggagtttatgaactgggcttcttcagttttaataactcccaaaatcagtatgtcggaatctccttcaagggtatcattccccgggtggttgtgtgggtggcaaatagagaaaagcctgttacagactctgcggcaaatctggttatcagcagcaacggaagtcttcagttatttaatggcaaacatggtgttgtgtggtccagtggaaaagctcttgcatctaacgggtctcgtgtagagcttttagacagtggaaatctagttgtcatagaaaaagtttcgggaagaactctatgggaaagttttgagcatcttggtgatactctgctccctcactcaactatcatgtataatgtccacaccggtgagaagcgagggttgacttcttggaaaagttacactgatccatcgcctggtgactttgtcgttctgattacaccgcaagtgccatcacaggggtttcttatgagaggctcgaccccttattttagatctggtccatgggctaaaacaaagttcaccgggttacctcaaatggatgaatcatacacaagtccattcagcttaacacaggatgtaaatgggtcaggatactattcgtattttgatagagacaacaaacgttcacgtattaggttaacaccagatggatcaatgaaggcgttacggtataatggaatggactgggacacaacctacgagggtcctgccaattcatgtgatatttatggcgtatgtggaccttttggtttttgtgttatctcagttcctccaaagtgtaaatgcttcaaaggttttattcctaaatccattgaggagtggaaaacaggaaactggactagtggttgtgtgaggcgtagcgaactacattgtcaaggaaactctactggcaaagatgcaaatgtcttccatactgttcccaacataaagcctccagacttttacgaatacgcagattctgtggatgcggaagaatgccaacaaaattgcctcaacaattgttcttgcttggccttcgcttatattcctggaatagggtgcttaatgtggagcaaggacctaatggacacagttcaatttgctgcaggaggagaacttctttccattcgtcttgcacgttctgagctagacgtaaataagcgcaagaagaccatcattgctattacagtgagccttaccctttttgtgatcttgggctttactgcgtttggtttctggagacgcagagtggaacaaaatgaagatgcatggaggaatgatctgcaaacacaagacgtcccaggtctagaatattttgagatgaataccatacaaactgccaccaataatttcagtctatcaaacaaactcggtcatggtggatttggttcagtttacaaggcgagaaacggaaaactgcaagatggaagggaaattgcggtaaaacgcctttctagcagctctgagcagggcaaacaggagttcatgaatgaaatagtactgatatcaaaactccaacacagaaacttagtccgggttttgggatgctgcgtcgaaggaacagagaagctattgatttatgagtttatgaaaaacaaaagccttgatacttttgtctttgtttttacacggtgtttttgcttagattcaaaaaaaaggcttgagatagattggccaaagagatttgatatcattcaaggtattgcacgtggacttctctatctccatcgtgactcacgcctcagaataattcaccgagacctgaaggtcagcaacattcttctggacgagaaaatgaacccgaaaatatcagattttgggttggctcggatgtttcatggaaccgaatatcaggataaaactcgcagggttgtcggaactctaggttatatgtctcctgagtatgcatgggctggagtattctctgagaaatcagacatctacagcttcggagttctactgctagaaatcatcagcggagagaagatctcgaggttcagctatggcgaagaaggaaaaacacttcttgcatatgcatgggaatgttggtgtggagcccgaggagttaatcttttggaccaagctcttggtgattcttgtcacccatatgaagttggaaggtgtgtccagattggtttgctttgtgttcaataccagcctgcagacagaccaaacacacttgagttgctttctatgcttaccacaacatcagatcttcctctgccaaaacaacctacatttgtagtgcacacgagagatggcaaatctccgtcaaatgattcgatgatcactgtcaatgagatgacagagtctgtgatccatggacgttga

SEQ ID NO: 30426 - protein, 821 aa, Arabidopsis thaliana
  misc_feature (1)..(821): Ceres Seq. ID no. 4959249
MDFLFLLLERKNKHMGKKRVVLLWLSIFISFSSAEITEESPLSIGQTLSSSNGVYELGFFSFNNSQNQYVGISFKGIIPRVVVWVANREKPVTDSAANLVISSNGSLQLFNGKHGVVWSSGKALASNGSRVELLDSGNLVVIEKVSGRTLWESFEHLGDTLLPHSTIMYNVHTGEKRGLTSWKSYTDPSPGDFVVLITPQVPSQGFLMRGSTPYFRSGPWAKTKFTGLPQMDESYTSPFSLTQDVNGSGYYSYFDRDNKRSRIRLTPDGSMKALRYNGMDWDTTYEGPANSCDIYGVCGPFGFCVISVPPKCKCFKGFIPKSIEEWKTGNWTSGCVRRSELHCQGNSTGKDANVFHTVPNIKPPDFYEYADSVDAEECQQNCLNNCSCLAFAYIPGIGCLMWSKDLMDTVQFAAGGELLSIRLARSELDVNKRKKTIIAITVSLTLFVILGFTAFGFWRRRVEQNEDAWRNDLQTQDVPGLEYFEMNTIQTATNNFSLSNKLGHGGFGSVYKARNGKLQDGREIAVKRLSSSSEQGKQEFMNEIVLISKLQHRNLVRVLGCCVEGTEKLLIYEFMKNKSLDTFVFVFTRCFCLDSKKRLEIDWPKRFDIIQGIARGLLYLHRDSRLRIIHRDLKVSNILLDEKMNPKISDFGLARMFHGTEYQDKTRRVVGTLGYMSPEYAWAGVFSEKSDIYSFGVLLLEIISGEKISRFSYGEEGKTLLAYAWECWCGARGVNLLDQALGDSCHPYEVGRCVQIGLLCVQYQPADRPNTLELLSMLTTTSDLPLPKQPTFVVHTRDGKSPSNDSMITVNEMTESVIHGR

SEQ ID NO: 30427 - protein, 807 aa, Arabidopsis thaliana
  misc_feature (1)..(807): Ceres Seq. ID no. 4959250
MGKKRVVLLWLSIFISFSSAEITEESPLSIGQTLSSSNGVYELGFFSFNNSQNQYVGISFKGIIPRVVVWVANREKPVTDSAANLVISSNGSLQLFNGKHGVVWSSGKALASNGSRVELLDSGNLVVIEKVSGRTLWESFEHLGDTLLPHSTIMYNVHTGEKRGLTSWKSYTDPSPGDFVVLITPQVPSQGFLMRGSTPYFRSGPWAKTKFTGLPQMDESYTSPFSLTQDVNGSGYYSYFDRDNKRSRIRLTPDGSMKALRYNGMDWDTTYEGPANSCDIYGVCGPFGFCVISVPPKCKCFKGFIPKSIEEWKTGNWTSGCVRRSELHCQGNSTGKDANVFHTVPNIKPPDFYEYADSVDAEECQQNCLNNCSCLAFAYIPGIGCLMWSKDLMDTVQFAAGGELLSIRLARSELDVNKRKKTIIAITVSLTLFVILGFTAFGFWRRRVEQNEDAWRNDLQTQDVPGLEYFEMNTIQTATNNFSLSNKLGHGGFGSVYKARNGKLQDGREIAVKRLSSSSEQGKQEFMNEIVLISKLQHRNLVRVLGCCVEGTEKLLIYEFMKNKSLDTFVFVFTRCFCLDSKKRLEIDWPKRFDIIQGIARGLLYLHRDSRLRIIHRDLKVSNILLDEKMNPKISDFGLARMFHGTEYQDKTRRVVGTLGYMSPEYAWAGVFSEKSDIYSFGVLLLEIISGEKISRFSYGEEGKTLLAYAWECWCGARGVNLLDQALGDSCHPYEVGRCVQIGLLCVQYQPADRPNTLELLSMLTTTSDLPLPKQPTFVVHTRDGKSPSNDSMITVNEMTESVIHGR

SEQ ID NO: 30428 - protein, 654 aa, Arabidopsis thaliana
  misc_feature (1)..(654): Ceres Seq. ID no. 4959251
MYNVHTGEKRGLTSWKSYTDPSPGDFVVLITPQVPSQGFLMRGSTPYFRSGPWAKTKFTGLPQMDESYTSPFSLTQDVNGSGYYSYFDRDNKRSRIRLTPDGSMKALRYNGMDWDTTYEGPANSCDIYGVCGPFGFCVISVPPKCKCFKGFIPKSIEEWKTGNWTSGCVRRSELHCQGNSTGKDANVFHTVPNIKPPDFYEYADSVDAEECQQNCLNNCSCLAFAYIPGIGCLMWSKDLMDTVQFAAGGELLSIRLARSELDVNKRKKTIIAITVSLTLFVILGFTAFGFWRRRVEQNEDAWRNDLQTQDVPGLEYFEMNTIQTATNNFSLSNKLGHGGFGSVYKARNGKLQDGREIAVKRLSSSSEQGKQEFMNEIVLISKLQHRNLVRVLGCCVEGTEKLLIYEFMKNKSLDTFVFVFTRCFCLDSKKRLEIDWPKRFDIIQGIARGLLYLHRDSRLRIIHRDLKVSNILLDEKMNPKISDFGLARMFHGTEYQDKTRRVVGTLGYMSPEYAWAGVFSEKSDIYSFGVLLLEIISGEKISRFSYGEEGKTLLAYAWECWCGARGVNLLDQALGDSCHPYEVGRCVQIGLLCVQYQPADRPNTLELLSMLTTTSDLPLPKQPTFVVHTRDGKSPSNDSMITVNEMTESVIHGR

SEQ ID NO: 30429 - DNA, 2421 bp, Arabidopsis thaliana
  misc_feature (1)..(2421): Ceres Seq. ID no. 4959259
atggggaagaagaggatagtgttctttgcttatttgcccttttttaccatctttatgagttttagctttgcagggataaccaaagagagtcccttttcaattggacaaactctcagctcctctaatggtgtttatgaattgggattcttcagtcttaataactcccaaaatcagtatctcggaatttggttcaagagtatcattccccaggtggttgtgtgggtggctaatagagaaaagcctgttacagactctgcggcaaatctcggtatcagcagcaatggtagtcttctgttatctaatggcaaacatggcgttgtgtggtctaccggagatatttttgcatctaatgggtctcgtgcagagcttacagaccatggaaatcttgttttcatagacaaagtttcgggaaggactctatggcaaagctttgagcatcttggtaatactctgctccctacgtcaattatgatgtataatctcgtcgctggtgagaagcgaggattgactgcttggaaaagttacaccgatccatcgcctggcgaatttgtggctctgattacaccgcaagtgccatcacaggggattattatgagaggctcgacacgttattatagaaccggtccatgggctaaaacaaggttcactggatcaccacaaatggatgaatcatacacaagtccattcatcttaacacaggatgtaaatgggtcaggatacttttcatttgttgaaagaggcaaaccttcacgcatgattttaacatcagagggaacaatgaaggtcttagtgcataatggaatggactgggaatcaacctacgagggtccagccaattcatgtgatatatatggcgtatgtggaccttttgggctttgtgttgtatcaattcctccaaaatgtaaatgcttcaaaggttttgttcctaaattcgctaaggagtggaagaaaggaaactggactagtggttgtgtgaggcgtaccgaactacattgtcaaggaaactccagtggcaaagatgcaaatgtcttctatactgttcccaacataaagcctccagacttttacgagtatgcaaattctcagaatgctgaagaatgccaccaaaattgcctccacaattgttcttgcttggcgttttcttatattcctggaatagggtgcttaatgtggagcaaggatctaatggacacaaggcaattttctgcagcaggagaacttctttccattcgtcttgcacgttctgagctagatgtaaataagcgcaagatgaccattgttgctagtacagtgagcctgaccctattcgtgatctttggatttgctgcatttggtttctggagatgcagagtggaacataatgctcatatatcaaacgatgcatggaggaattttctgcaatcacaagacgtcccaggtttagaattttttgagatgaatgccatacaaactgccaccaataatttcagtctatcaaacaaactcggtcctggtggatttggttctgtttacaaggcgagaaacggaaaactgcaagatggaagagaaattgcggtaaaacgtctttctagcagctctgggcagggcaaacaggagttcatgaatgaaatagtactgatatcaaaactccaacacagaaacttagtccgggttttgggatgctgcgtcgaaggaacagagaagctattgatttatgggttcttgaaaaacaaaagcctggatacttttgtctttgatgcaagaaaaaagctcgaacttgattggccaaagagatttgagatcattgaaggtattgcacgtggacttctctatctccaccgtgactcacgcctcagagtaattcaccgagacctgaaggtcagcaacattcttctggatgagaaaatgaacccgaaaatatcagattttggtttggctcggatgtttcagggaacccaatatcaggaaaaaactcgcagggttgtcggaactctaggatatatgtctcctgagtatgcatggactggcgtattctctgagaaatccgatatctacagtttcggagttctgttgttagaaatcatcagcggaaagaagatctcaagtttcagctatggcgaggagggaaaagcacttcttgcatatgcatgggaatgttggtgtgaaacccgagaagttaattttttggaccaagctcttgctgattctagtcacccatctgaagttggaaggtgtgtacagattggtttgctctgtgttcaacacgagcctgcagacagaccaaacacacttgagttgctgtctatgcttaccacaacatcagatcttcctctgcccaaaaaacccacatttgtagtgcacactagaaaagacgaatcaccgtcaaatgattcgatgatcactgtcaatgagatgacagagtctgtgatccaaggacgttga

SEQ ID NO: 30430 - protein, 806 aa, Arabidopsis thaliana
  misc_feature (1)..(806): Ceres Seq. ID no. 4959260
MGKKRIVFFAYLPFFTIFMSFSFAGITKESPFSIGQTLSSSNGVYELGFFSLNNSQNQYLGIWFKSIIPQVVVWVANREKPVTDSAANLGISSNGSLLLSNGKHGVVWSTGDIFASNGSRAELTDHGNLVFIDKVSGRTLWQSFEHLGNTLLPTSIMMYNLVAGEKRGLTAWKSYTDPSPGEFVALITPQVPSQGIIMRGSTRYYRTGPWAKTRFTGSPQMDESYTSPFILTQDVNGSGYFSFVERGKPSRMILTSEGTMKVLVHNGMDWESTYEGPANSCDIYGVCGPFGLCVVSIPPKCKCFKGFVPKFAKEWKKGNWTSGCVRRTELHCQGNSSGKDANVFYTVPNIKPPDFYEYANSQNAEECHQNCLHNCSCLAFSYIPGIGCLMWSKDLMDTRQFSAAGELLSIRLARSELDVNKRKMTIVASTVSLTLFVIFGFAAFGFWRCRVEHNAHISNDAWRNFLQSQDVPGLEFFEMNAIQTATNNFSLSNKLGPGGFGSVYKARNGKLQDGREIAVKRLSSSSGQGKQEFMNEIVLISKLQHRNLVRVLGCCVEGTEKLLIYGFLKNKSLDTFVFDARKKLELDWPKRFEIIEGIARGLLYLHRDSRLRVIHRDLKVSNILLDEKMNPKISDFGLARMFQGTQYQEKTRRVVGTLGYMSPEYAWTGVFSEKSDIYSFGVLLLEIISGKKISSFSYGEEGKALLAYAWECWCETREVNFLDQALADSSHPSEVGRCVQIGLLCVQHEPADRPNTLELLSMLTTTSDLPLPKKPTFVVHTRKDESPSNDSMITVNEMTESVIQGR

SEQ ID NO: 30431 - protein, 788 aa, Arabidopsis thaliana
  misc_feature (1)..(788): Ceres Seq. ID no. 4959261
MSFSFAGITKESPFSIGQTLSSSNGVYELGFFSLNNSQNQYLGIWFKSIIPQVVVWVANREKPVTDSAANLGISSNGSLLLSNGKHGVVWSTGDIFASNGSRAELTDHGNLVFIDKVSGRTLWQSFEHLGNTLLPTSIMMYNLVAGEKRGLTAWKSYTDPSPGEFVALITPQVPSQGIIMRGSTRYYRTGPWAKTRFTGSPQMDESYTSPFILTQDVNGSGYFSFVERGKPSRMILTSEGTMKVLVHNGMDWESTYEGPANSCDIYGVCGPFGLCVVSIPPKCKCFKGFVPKFAKEWKKGNWTSGCVRRTELHCQGNSSGKDANVFYTVPNIKPPDFYEYANSQNAEECHQNCLHNCSCLAFSYIPGIGCLMWSKDLMDTRQFSAAGELLSIRLARSELDVNKRKMTIVASTVSLTLFVIFGFAAFGFWRCRVEHNAHISNDAWRNFLQSQDVPGLEFFEMNAIQTATNNFSLSNKLGPGGFGSVYKARNGKLQDGREIAVKRLSSSSGQGKQEFMNEIVLISKLQHRNLVRVLGCCVEGTEKLLIYGFLKNKSLDTFVFDARKKLELDWPKRFEIIEGIARGLLYLHRDSRLRVIHRDLKVSNILLDEKMNPKISDFGLARMFQGTQYQEKTRRVVGTLGYMSPEYAWTGVFSEKSDIYSFGVLLLEIISGKKISSFSYGEEGKALLAYAWECWCETREVNFLDQALADSSHPSEVGRCVQIGLLCVQHEPADRPNTLELLSMLTTTSDLPLPKKPTFVVHTRKDESPSNDSMITVNEMTESVIQGR

SEQ ID NO: 30432 - protein, 650 aa, Arabidopsis thaliana
  misc_feature (1)..(650): Ceres Seq. ID no. 4959262
MMYNLVAGEKRGLTAWKSYTDPSPGEFVALITPQVPSQGIIMRGSTRYYRTGPWAKTRFTGSPQMDESYTSPFILTQDVNGSGYFSFVERGKPSRMILTSEGTMKVLVHNGMDWESTYEGPANSCDIYGVCGPFGLCVVSIPPKCKCFKGFVPKFAKEWKKGNWTSGCVRRTELHCQGNSSGKDANVFYTVPNIKPPDFYEYANSQNAEECHQNCLHNCSCLAFSYIPGIGCLMWSKDLMDTRQFSAAGELLSIRLARSELDVNKRKMTIVASTVSLTLFVIFGFAAFGFWRCRVEHNAHISNDAWRNFLQSQDVPGLEFFEMNAIQTATNNFSLSNKLGPGGFGSVYKARNGKLQDGREIAVKRLSSSSGQGKQEFMNEIVLISKLQHRNLVRVLGCCVEGTEKLLIYGFLKNKSLDTFVFDARKKLELDWPKRFEIIEGIARGLLYLHRDSRLRVIHRDLKVSNILLDEKMNPKISDFGLARMFQGTQYQEKTRRVVGTLGYMSPEYAWTGVFSEKSDIYSFGVLLLEIISGKKISSFSYGEEGKALLAYAWECWCETREVNFLDQALADSSHPSEVGRCVQIGLLCVQHEPADRPNTLELLSMLTTTSDLPLPKKPTFVVHTRKDESPSNDSMITVNEMTESVIQGR

SEQ ID NO: 30433 - DNA, 2250 bp, Arabidopsis thaliana
  misc_feature (1)..(2250): Ceres Seq. ID no. 4959270
atgaggatcacgttctttgcttctttgctcttatttaccaataccatctttataagttttagctttgcaattgcagggataaacaaagagagtcctttgtcaataggacaaactctcagctcctctaatggagtttatgaattgggtttcttcagttttaataactcggaaaatcattatcttggaatctggttcaagggaatcattccccgggtggttgtgtgggtggccaatagagaaaatcctgttacagattccacagcaaatctcgctatcagcagcaacgcaagtcttctgttatataatggaaaacatggcgttgcatggtccagtggtgaaactcttgcttctaacgggtctcgtgcagagctttcagacaccggaaatcttattgtcatagacaatttttcgggaagaactctttggcaaagctttgaccatcttggtgatactatgcttcctttctcagctctgatgtataacctcgccactggcgagaagcaggtcttgacttcttggaaaagttacactaatccagcggttggtgactttgtgcttcagattacaacgcaagtgccaacacaagctttaactatgagaggctcgaagccttattggagaagcggtccatgggctaaaacaagaaacttcaaacttccacgtatagtgataacatcgaagggttcactggagatttctaggcatagtgggactgattgggtattgaactttgtggctccagcgcactcatgtgattattacggtgtatgtggaccttttgggatttgtgtcaagtcagtgtgtaaatgcttcaaagggtttataccaaaatatattgaggagtggaaaagaggaaattggactgatggttgtgtgaggcgtaccaaactacattgtcaggaaaactcaactaaaaaagatgcaaacttcttccatccagttgccaacataaagcctccagacttttacgaatttgcaagtgctgtggatgcagaaggatgctacaaaatttgcctccacaactgttcttgcttggccttttcttatattcatggaattgggtgcttaatatggaaccaagacttcatggacacagtgcaattttctgcaggaggagagattctttccattcgtcttgcacgttctgaattaggtgggaataagcgcaagaagaccattactgctagtattgtcagcctttctctttttctgatattgggttctactgcgtttggtttctggagatacagagttaaacataatgcttcacaagatgcaccgaaatatgatttggaaccacaagatgtctcaggttcatatttgtttgagatgaacaccattcaaactgccaccaataatttcagtctctcaaataaactgggacaaggtggatttggttcagtttacaagggaaagctgcaagatgggaaagaaattgctgtaaaacggctttctagcagctcagggcagggcaaagaggagttcatgaatgaaatagtactcatctcaaaactacaacacaaaaacttagttcggattttaggatgttgcattgaaggagaagagaggctgttgatttatgagtttatgttgaacaaaagccttgatacttttctcttcgattcaagaaaaaggcttgagattgactggccaaagagatttgatatcattcaaggtattgcgcgtggaattcactatctccatcgtgactcatgcctcaaggtaattcaccgtgatctgaaggtcagcaatattcttcttgacgagaagatgaatccaaagatatcagattttggattggctcggatgtatcagggaaccgaatatcaggacaatactcgcagggtcgtaggaactctaggatatatgtctccagaggatatattagaaatcataagcggagagaagatctcaagattcagctatggcaaagaagaaaaaacccttattgcatatgcatgggaatcttggtgtgaaactggaggagttgatcttttggataaagatgttgctgattcatgtcgcccattagaagttgagagatgtattcagattggtcttctctgtgttcaacaccaacctgcagacagaccaaacacacttgagttgatgtctatgctcacgacaacatcagatcttccatcaccaaaacaacccacatttgtagtgcactggagagatgacgaatcatcgtctaaggatttgatcactgtgaatgagatgacaaagtctgtgatcttagggcgttga

SEQ ID NO: 30434 - protein, 749 aa, Arabidopsis thaliana
  misc_feature (1)..(749): Ceres Seq. ID no. 4959271
MRITFFASLLLFTNTIFISFSFAIAGINKESPLSIGQTLSSSNGVYELGFFSFNNSENHYLGIWFKGIIPRVVVWVANRENPVTDSTANLAISSNASLLLYNGKHGVAWSSGETLASNGSRAELSDTGNLIVIDNFSGRTLWQSFDHLGDTMLPFSALMYNLATGEKQVLTSWKSYTNPAVGDFVLQITTQVPTQALTMRGSKPYWRSGPWAKTRNFKLPRIVITSKGSLEISRHSGTDWVLNFVAPAHSCDYYGVCGPFGICVKSVCKCFKGFIPKYIEEWKRGNWTDGCVRRTKLHCQENSTKKDANFFHPVANIKPPDFYEFASAVDAEGCYKICLHNCSCLAFSYIHGIGCLIWNQDFMDTVQFSAGGEILSIRLARSELGGNKRKKTITASIVSLSLFLILGSTAFGFWRYRVKHNASQDAPKYDLEPQDVSGSYLFEMNTIQTATNNFSLSNKLGQGGFGSVYKGKLQDGKEIAVKRLSSSSGQGKEEFMNEIVLISKLQHKNLVRILGCCIEGEERLLIYEFMLNKSLDTFLFDSRKRLEIDWPKRFDIIQGIARGIHYLHRDSCLKVIHRDLKVSNILLDEKMNPKISDFGLARMYQGTEYQDNTRRVVGTLGYMSPEDILEIISGEKISRFSYGKEEKTLIAYAWESWCETGGVDLLDKDVADSCRPLEVERCIQIGLLCVQHQPADRPNTLELMSMLTTTSDLPSPKQPTFVVHWRDDESSSKDLITVNEMTKSVILGR

SEQ ID NO: 30435 - protein, 598 aa, Arabidopsis thaliana
  misc_feature (1)..(598): Ceres Seq. ID no. 4959272
MLPFSALMYNLATGEKQVLTSWKSYTNPAVGDFVLQITTQVPTQALTMRGSKPYWRSGPWAKTRNFKLPRIVITSKGSLEISRHSGTDWVLNFVAPAHSCDYYGVCGPFGICVKSVCKCFKGFIPKYIEEWKRGNWTDGCVRRTKLHCQENSTKKDANFFHPVANIKPPDFYEFASAVDAEGCYKICLHNCSCLAFSYIHGIGCLIWNQDFMDTVQFSAGGEILSIRLARSELGGNKRKKTITASIVSLSLFLILGSTAFGFWRYRVKHNASQDAPKYDLEPQDVSGSYLFEMNTIQTATNNFSLSNKLGQGGFGSVYKGKLQDGKEIAVKRLSSSSGQGKEEFMNEIVLISKLQHKNLVRILGCCIEGEERLLIYEFMLNKSLDTFLFDSRKRLEIDWPKRFDIIQGIARGIHYLHRDSCLKVIHRDLKVSNILLDEKMNPKISDFGLARMYQGTEYQDNTRRVVGTLGYMSPEDILEIISGEKISRFSYGKEEKTLIAYAWESWCETGGVDLLDKDVADSCRPLEVERCIQIGLLCVQHQPADRPNTLELMSMLTTTSDLPSPKQPTFVVHWRDDESSSKDLITVNEMTKSVILGR

SEQ ID NO: 30436 - protein, 591 aa, Arabidopsis thaliana
  misc_feature (1)..(591): Ceres Seq. ID no. 4959273
MYNLATGEKQVLTSWKSYTNPAVGDFVLQITTQVPTQALTMRGSKPYWRSGPWAKTRNFKLPRIVITSKGSLEISRHSGTDWVLNFVAPAHSCDYYGVCGPFGICVKSVCKCFKGFIPKYIEEWKRGNWTDGCVRRTKLHCQENSTKKDANFFHPVANIKPPDFYEFASAVDAEGCYKICLHNCSCLAFSYIHGIGCLIWNQDFMDTVQFSAGGEILSIRLARSELGGNKRKKTITASIVSLSLFLILGSTAFGFWRYRVKHNASQDAPKYDLEPQDVSGSYLFEMNTIQTATNNFSLSNKLGQGGFGSVYKGKLQDGKEIAVKRLSSSSGQGKEEFMNEIVLISKLQHKNLVRILGCCIEGEERLLIYEFMLNKSLDTFLFDSRKRLEIDWPKRFDIIQGIARGIHYLHRDSCLKVIHRDLKVSNILLDEKMNPKISDFGLARMYQGTEYQDNTRRVVGTLGYMSPEDILEIISGEKISRFSYGKEEKTLIAYAWESWCETGGVDLLDKDVADSCRPLEVERCIQIGLLCVQHQPADRPNTLELMSMLTTTSDLPSPKQPTFVVHWRDDESSSKDLITVNEMTKSVILGR

SEQ ID NO: 30437 - DNA, 1020 bp, Arabidopsis thaliana
  misc_feature (1)..(1020): Ceres Seq. ID no. 4959297
atgacaaccaaggcggtgctaatctcaagcggcgtcgccaccgtggctctgttactgaaactctctgttccggtagctgttgatttctccgtgtcacgagctccgatcttgtggagctccttgttgtcatggctgaaaccaccgtatctttacgttgttaccaacggaattatcatcactatcgttgcttcttctaagtattaccgaagtcaccatgaccgtgatgaagaagatgagatcgtcgtgtacggtggtggaggttataagatccagacggaggagccgattgtgaatcaacatcaagcttctccgaggattctggaggttaaggatttggatactggtgcgcattttggtttcgttgtggcgaatctggaggctgaggaactggaatcagaggcggttacggcggttgtgtttgacgatgaggaggaggagaagaagattatagatagcgcggcgacggcggaggatgaaattgaagaggagcttaagagtgtgattatggttgagaattcagatctggttgaatccgatgtcataccgccgccgatgatgatcgaatcggagaatcttcctccgattgagaagcctctcgttacttcaaggttcggtcaccggaaattgatgaaagcaagtcaagaaggtggaagagctttgagagtgacgaagccgaagaagaacgagacgttggagaatacgtggaagatgataacggaagggaaatcaacgccgttgactagacagttataccggagatctgacacgtttggacgtggagattccgggggagttgacggtgaggtgaaaccggtttataagaagtcggatacgtttagggacaggactaattattatcagttggcggagacggcgaaggtgaggaaagagccgtcgctgagtcaggaagagttgaatcggcgagttgaggcgtttataaagaagtttaatgaggagatgaagttgcagagaatggagtctctcagacagtacaaagagataactagccgtggggtttag

SEQ ID NO: 30438 - protein, 339 aa, Arabidopsis thaliana
  misc_feature (1)..(339): Ceres Seq. ID no. 4959298
MTTKAVLISSGVATVALLLKLSVPVAVDFSVSRAPILWSSLLSWLKPPYLYVVTNGIIITIVASSKYYRSHHDRDEEDEIVVYGGGGYKIQTEEPIVNQHQASPRILEVKDLDTGAHFGFVVANLEAEELESEAVTAVVFDDEEEEKKIIDSAATAEDEIEEELKSVIMVENSDLVESDVIPPPMMIESENLPPIEKPLVTSRFGHRKLMKASQEGGRALRVTKPKKNETLENTWKMITEGKSTPLTRQLYRRSDTFGRGDSGGVDGEVKPVYKKSDTFRDRTNYYQLAETAKVRKEPSLSQEELNRRVEAFIKKFNEEMKLQRMESLRQYKEITSRGV

SEQ ID NO: 30439 - protein, 171 aa, Arabidopsis thaliana
  misc_feature (1)..(171): Ceres Seq. ID no. 4959299
MVENSDLVESDVIPPPMMIESENLPPIEKPLVTSRFGHRKLMKASQEGGRALRVTKPKKNETLENTWKMITEGKSTPLTRQLYRRSDTFGRGDSGGVDGEVKPVYKKSDTFRDRTNYYQLAETAKVRKEPSLSQEELNRRVEAFIKKFNEEMKLQRMESLRQYKEITSRGV

SEQ ID NO: 30440 - DNA, 1287 bp, Arabidopsis thaliana
  misc_feature (1)..(1287): Ceres Seq. ID no. 4959406
atggcgttgttgggatttgcttgcgggcctcgttacagacagctgcagtatgaggtcctccatcgaactctggagaaagcaggtcctgcttttatcaaatttggtcaatggattgctacgcgacctgatcggtttaataaggatttgtgtttgcagctttcaaagcttcacagtaatgctcctgagcacagttttgcgttcaccaaaaagagcattgaaaatgcatttggtcgtaaactctctgagatatttgaggaatttgatgaggcgccagtggcatctgggagtatagctcaagtacaccgagcttccttgaagtttcagtatgcaggacaaaaggtgaagtcctcggaagttgctgtgaaagttagacatccttgtgttgaggaaacgatgaagcgagattttgtgataattaatttcgtggcgaggctaaccacttttattccggggttaaattggcttagattggacgagtgtgtgcaacagtttagtgtctacatgttgtcccaagttgatctctcaagggaagcttctcatttgagtcggtttatatataacttccgtggatggaaagatgtctcttttcctaagcccatctatcctctaatacatcccgctgttttagtcgagacgtatgagcacggagagagtgtggctcgttatgttgatggctccgaaggacaagaaaaacttaaggctaaagtagctcatatcggaactaatgctctcttgaaaatgctcctggtcgacaacttcattcatgctgatatgcatcctgggaatattcttgtccggccaaacaatactagaagaggtctattcagatcgaggaagccacacatcgttttcctagatgtgggcatgactgcagaactttcaaaaactgaccgagataacctactcggatttttcaaggccgttgcacgtagagacggccggactgctgctgaacgaacacttaaattatctaaacaacagaattgtcctgatccacaggcctttatcaaggaagtagaagaagcatttacattctggggaacagaggaaggggatctagtccatccagcggattgtatgcacgaactattcgagaaaatgaggagtcatagagttaatatcgacggcaatgtgtccaccgtcatgtttacaacattagttctcgagggttggcaacggaaactggatccaggatacgatgtgatgcgtacgctacaaacaatgctgctgaaaacggattggatgaaatcactttcttacacgatcgatggacttatggctccgtag

SEQ ID NO: 30441 - protein, 428 aa, Arabidopsis thaliana; identical to SEQ ID NO: 2530
  misc_feature (1)..(428): Ceres Seq. ID no. 4959407

SEQ ID NO: 30442 - protein, 297 aa, Arabidopsis thaliana
  misc_feature (1)..(297): Ceres Seq. ID no. 4959408
MKRDFVIINFVARLTTFIPGLNWLRLDECVQQFSVYMLSQVDLSREASHLSRFIYNFRGWKDVSFPKPIYPLIHPAVLVETYEHGESVARYVDGSEGQEKLKAKVAHIGTNALLKMLLVDNFIHADMHPGNILVRPNNTRRGLFRSRKPHIVFLDVGMTAELSKTDRDNLLGFFKAVARRDGRTAAERTLKLSKQQNCPDPQAFIKEVEEAFTFWGTEEGDLVHPADCMHELFEKMRSHRVNIDGNVSTVMFTTLVLEGWQRKLDPGYDVMRTLQTMLLKTDWMKSLSYTIDGLMAP

SEQ ID NO: 30443 - protein, 261 aa, Arabidopsis thaliana
  misc_feature (1)..(261): Ceres Seq. ID no. 4959409
MLSQVDLSREASHLSRFIYNFRGWKDVSFPKPIYPLIHPAVLVETYEHGESVARYVDGSEGQEKLKAKVAHIGTNALLKMLLVDNFIHADMHPGNILVRPNNTRRGLFRSRKPHIVFLDVGMTAELSKTDRDNLLGFFKAVARRDGRTAAERTLKLSKQQNCPDPQAFIKEVEEAFTFWGTEEGDLVHPADCMHELFEKMRSHRVNIDGNVSTVMFTTLVLEGWQRKLDPGYDVMRTLQTMLLKTDWMKSLSYTIDGLMAP

SEQ ID NO: 30444 - DNA, 2457 bp, Arabidopsis thaliana
  misc_feature (1)..(2457): Ceres Seq. ID no. 4959410
atggggaagaagaggatcatgttctttgcttccttgctcttaattaccatctttttaagtttcagctatgcagggataacgagagaaagtcctctgtcaataggaaaaactctcagctcctctaatggagtttatgaattgggattcttcagttttaataactcccaaaatcagtatgttggaatctggttcaagggtatcattccccgggtggttgtgtgggtggccaatagagaaaagcctgttacagactctgcagcaaatttaactatcagcagcaatggaagtcttctgttgtttaatgaaaatcatagcgttgtgtggtccattggagaaacttttgcatctaacgggtctcgtgcggagcttacagacaacggaaatttagttgtcatagacaataattcgggaagaactctatgggaaagctttgagcattttggtgacactatgctacctttctcaaacctgatgtataatcttgccacaggtgagaagcgggtgttgacttcttggaaaagtcacactgatccatcgcctggcgattttacggttcagattacaccgcaagttccatcccaggcgtgtactatgagaggctcaaagacttattggagaagcggtccatgggctaaaacaaggttcaccgggatacctgtaatggatgacacatatacaagtccattcagccttcagcaagatacaaacgggtcaggatccttcacttattttgaaagaaacttcaaactttcatatataatgataacatcagaaggctcactgaagatttttcagcataatggaatggactgggaattaaacttcgaggctccagaaaattcatgcgatatttacggcttttgtggaccttttggaatttgtgttatgtcagtacctccaaagtgtaaatgcttcaaagggtttgtaccaaaatccattgaggagtggaaaagaggaaactggactgatggttgtgtgaggcatactgaactacattgccaaggaaacactaatggtaaaactgtaaacggcttctatcacgttgccaacataaagcctccagacttttacgaatttgcaagttttgtggatgctgaaggatgctaccaaatttgcctccacaattgttcttgcttggcctttgcttatatcaatggaataggttgcttaatgtggaaccaagacctaatggacgcagtgcaattttctgcagggggagaaattctttccattcgccttgcaagttctgaactaggtggaaataagcgcaacaaaatcattgttgctagtattgtgagcctttctctttttgtgatactggcttttgctgcgttttgtttcttgagatacaaagtgaaacataccgcgaagatatcaaagattgcttcaaaagaggcatggaataatgatctagagccacaagatgtctcaggtttaaagttctttgagatgaataccattcaaactgccactgataatttcagtctctcaaataaactaggacaaggtggatttggctcagtttacaagggaaagctgcaagatgggaaagaaattgctgtaaaacggctttctagcagctccggacagggaaaagaggagttcatgaatgaaatagtactcatctcgaaactacaacataaaaacttggttaggattctgggatgttgcattgaaggagaagagaggctgttggtatatgagtttttgctgaacaaaagccttgatacttttctcttcgttctgatcgtttctatacggtattattgcttagattcaagaaaaaggcttgagattgactggcctaagagatttaatatcattgaaggcattgcgcgtgggcttcactatctccaccgtgactcatgcctcagggtcattcaccgtgatcttaaggttagcaatattcttctggatgagaagatgaacccaaaaatatcagactttggattggctcggatgtatcagggaaccgaatatcaggacaacactcgtagggttgcaggaactctaggatatatggctcccgagtatgcatggactgggatgttctctgagaaatcagatatctacagttttggagttatactgttggaaatcatcaccggggagaagatctcaagattcagctatggtagacaaggaaaaacccttcttgcatatgcatgggaatcttggtgtgaaagtggaggaatcgatcttttggataaagatgttgctgattcatgtcacccattagaagttgagagatgtgtgcagattggtttgctatgtgttcaacaccaacctgctgatagaccaaacacaatggagttgttgtctatgctcaccacaacatcagatcttacatcaccaaaacagcccacatttgtagtgcacacgagagatgaagaatctctgtctcagggtttgatcaccgtcaatgagatgacccaatctgtgatccttgggcgttaa

SEQ ID NO: 30445 - protein, 818 aa, Arabidopsis thaliana
  misc_feature (1)..(818): Ceres Seq. ID no. 4959411
MGKKRIMFFASLLLITIFLSFSYAGITRESPLSIGKTLSSSNGVYELGFFSFNNSQNQYVGIWFKGIIPRVVVWVANREKPVTDSAANLTISSNGSLLLFNENHSVVWSIGETFASNGSRAELTDNGNLVVIDNNSGRTLWESFEHFGDTMLPFSNLMYNLATGEKRVLTSWKSHTDPSPGDFTVQITPQVPSQACTMRGSKTYWRSGPWAKTRFTGIPVMDDTYTSPFSLQQDTNGSGSFTYFERNFKLSYIMITSEGSLKIFQHNGMDWELNFEAPENSCDIYGFCGPFGICVMSVPPKCKCFKGFVPKSIEEWKRGNWTDGCVRHTELHCQGNTNGKTVNGFYHVANIKPPDFYEFASFVDAEGCYQICLHNCSCLAFAYINGIGCLMWNQDLMDAVQFSAGGEILSIRLASSELGGNKRNKIIVASIVSLSLFVILAFAAFCFLRYKVKHTAKISKIASKEAWNNDLEPQDVSGLKFFEMNTIQTATDNFSLSNKLGQGGFGSVYKGKLQDGKEIAVKRLSSSSGQGKEEFMNEIVLISKLQHKNLVRILGCCIEGEERLLVYEFLLNKSLDTFLFVLIVSIRYYCLDSRKRLEIDWPKRFNIIEGIARGLHYLHRDSCLRVIHRDLKVSNILLDEKMNPKISDFGLARMYQGTEYQDNTRRVAGTLGYMAPEYAWTGMFSEKSDIYSFGVILLEIITGEKISRFSYGRQGKTLLAYAWESWCESGGIDLLDKDVADSCHPLEVERCVQIGLLCVQHQPADRPNTMELLSMLTTTSDLTSPKQPTFVVHTRDEESLSQGLITVNEMTQSVILGR

SEQ ID NO: 30446 - protein, 812 aa, Arabidopsis thaliana
  misc_feature (1)..(812): Ceres Seq. ID no. 4959412
MFFASLLLITIFLSFSYAGITRESPLSIGKTLSSSNGVYELGFFSFNNSQNQYVGIWFKGIIPRVVVWVANREKPVTDSAANLTISSNGSLLLFNENHSVVWSIGETFASNGSRAELTDNGNLVVIDNNSGRTLWESFEHFGDTMLPFSNLMYNLATGEKRVLTSWKSHTDPSPGDFTVQITPQVPSQACTMRGSKTYWRSGPWAKTRFTGIPVMDDTYTSPFSLQQDTNGSGSFTYFERNFKLSYIMITSEGSLKIFQHNGMDWELNFEAPENSCDIYGFCGPFGICVMSVPPKCKCFKGFVPKSIEEWKRGNWTDGCVRHTELHCQGNTNGKTVNGFYHVANIKPPDFYEFASFVDAEGCYQICLHNCSCLAFAYINGIGCLMWNQDLMDAVQFSAGGEILSIRLASSELGGNKRNKIIVASIVSLSLFVILAFAAFCFLRYKVKHTAKISKIASKEAWNNDLEPQDVSGLKFFEMNTIQTATDNFSLSNKLGQGGFGSVYKGKLQDGKEIAVKRLSSSSGQGKEEFMNEIVLISKLQHKNLVRILGCCIEGEERLLVYEFLLNKSLDTFLFVLIVSIRYYCLDSRKRLEIDWPKRFNIIEGIARGLHYLHRDSCLRVIHRDLKVSNILLDEKMNPKISDFGLARMYQGTEYQDNTRRVAGTLGYMAPEYAWTGMFSEKSDIYSFGVILLEIITGEKISRFSYGRQGKTLLAYAWESWCESGGIDLLDKDVADSCHPLEVERCVQIGLLCVQHQPADRPNTMELLSMLTTTSDLTSPKQPTFVVHTRDEESLSQGLITVNEMTQSVILGR

SEQ ID NO: 30447 - protein, 668 aa, Arabidopsis thaliana
  misc_feature (1)..(668): Ceres Seq. ID no. 4959413
MLPFSNLMYNLATGEKRVLTSWKSHTDPSPGDFTVQITPQVPSQACTMRGSKTYWRSGPWAKTRFTGIPVMDDTYTSPFSLQQDTNGSGSFTYFERNFKLSYIMITSEGSLKIFQHNGMDWELNFEAPENSCDIYGFCGPFGICVMSVPPKCKCFKGFVPKSIEEWKRGNWTDGCVRHTELHCQGNTNGKTVNGFYHVANIKPPDFYEFASFVDAEGCYQICLHNCSCLAFAYINGIGCLMWNQDLMDAVQFSAGGEILSIRLASSELGGNKRNKIIVASIVSLSLFVILAFAAFCFLRYKVKHTAKISKIASKEAWNNDLEPQDVSGLKFFEMNTIQTATDNFSLSNKLGQGGFGSVYKGKLQDGKEIAVKRLSSSSGQGKEEFMNEIVLISKLQHKNLVRILGCCIEGEERLLVYEFLLNKSLDTFLFVLIVSIRYYCLDSRKRLEIDWPKRFNIIEGIARGLHYLHRDSCLRVIHRDLKVSNILLDEKMNPKISDFGLARMYQGTEYQDNTRRVAGTLGYMAPEYAWTGMFSEKSDIYSFGVILLEIITGEKISRFSYGRQGKTLLAYAWESWCESGGIDLLDKDVADSCHPLEVERCVQIGLLCVQHQPADRPNTMELLSMLTTTSDLTSPKQPTFVVHTRDEESLSQGLITVNEMTQSVILGR

SEQ ID NO: 30448 - DNA, 3372 bp, Arabidopsis thaliana
  misc_feature (1)..(3372): Ceres Seq. ID no. 4959487
atggaagtaactttagggccaatgacttatttatggattgttgtgtcttttgctctgaacttgttatggattcttgtcaggtatcctgatgacgtccatgatcgtaagtgggttccattctcagaagatgaattgatgacagtaaacaacactgtagatacagactttgataatccttatgacccgccaaaagctgtaattagcacggctgccataccaaccaatgccagttcaagtctgatccttacttggctaacttccaatccagaagatcagatctacatctacattcactttcttgaactacaagtgttacggggcaatgaaactaggatattcgacattttgatgaatggaatcattacttctccagcttatagtcctacggactcggttgtcgacacagtatacaacaaagaacctctaaggtgcaatgcttcagtatgcagcttggaactaagaaaaacactcggttcaactcttccacctctaattaacgccatcgagattttcacagtacttgagtttccagaaacagcaacatatgaagatgatttcagtgcaattgagaacatccgagctgcgtatgcattaagcaacgggagtggagatccatgcgtccctaaaccatcccactatctcaaatgcagcaacttcacggatacgtccgtagtacaattgagaatcatttccctaaatttatcctcaatgagattatccggtgtcatatcacctagcattcaaactctgaccaagcttcaagtgctggacttgtcgaataacaatttgaccggaggagtacccggatttctatccaacatggtgtccttgttgtcaatagacttaagcaataatagtttaagtggtccgattccacaagctcttcttgatagacgaaaggaaggattggatttaaagtttcatggaaacacaaaactttatgagtttatttcacacaggaaaaagaattttccattagtagcagttgttgcctcagcttctgccatcgccattgtcctggttgttcttggtgtccttttcatctgccttcgaagaaagccaccaagtagagaggctccacactcatcaatcgaaacagtaaagagaagatttacttattcagaggttatggcaatgacaaataatttcaagaaaattattggtgaaggagggtttggaatcatctatcacggtcatctgaacgatggccagcaagtagctgttaaagtactatctgaatcatcatcccaaggatacaagcagttcaaggctgaggttgaacttttaatgagagttcatcatgtaaacctggtaaaccttgctggatattgtgatgacagcaaccacttagcactgatctatgagttcatggagaatagagacttaaaagagcatctctcaggaaaagaaggctcctcattcttggactggccatgtagactaaaaatagctgcagaagctgcacttggattggaatacttgcacacaggatgcaaaccaccgatgattcatagagatgttaaaagcacaaatatattgttgaatgaagactttcaggcaaaactcggtgattttggactttcgagatctttccctatcgggggtgaaactcatgtgtcgacagttgttgtcggaactcatggatttctcgatcctgaatattaccaaacacagcggttgtccgagaagagtgatgtctacagtttcggtattgtcttactagaaatcatcacaaacaaacttgtgattgatcaaactcgtgaaaggcctcatatagcagaatgggtgaggtatatgctttcaataggtgatatcgaaagtgtaatggatccaaaccttaaggggaaatatgactctagctctgcctggaaagttcttgaactagcgatgttgtgttcgaaactttctttagcagaaagaccaaacatggctcaaattgttcatgaactaaatgagtatctattgtacgagaactcaagaagagaaatcagtcaagatgtgaggtcaaaaaattccagtgaagtgagcacaaacaccgaaatggctcctatggcactgaacctcctcgaaaaggcatctcctttttccaattccttctcctatgctaatgctacagatgcgagccttagagctggtcgaaaagggttgagtttttctgtctcttacctcgttgattcattgggtttacctaaaaaggtcgcagaatcgatctcaaagaaagtcagcttcgaggacaaaggcaatcctgattctgttctgagtctattgagaagtcatgggttcactgattctcagatctcaagcatcattacggattatccacaattgctagtagctgatgctgagaaatcaattggtcccaagcttcagtttctgcagtccagaggagcttcaaggtctgagctcactcatattgtatctacagttcctgaaatcttggggaagagaggggacaaaactatcagcatatactatgattttgttaaagagattatagaagcggataagagttccaagttcgaaaagttatgtcattctttgccagagggtagtaagcaggagaacaaaatcagaaatgttttggttttgagagaattgggtgttcctcaaaggttgttgttcccattgcttatatctgatcaccaacctgtctgtggaaaagaaaattttgaagaatcactcaagaaagttgttgagatgggttttgatccaaccacctcaaagtttgtcaaagctcttagggttgtttacagattccgcgacaaaactatagaagcaaaagttaatgtctgtaaaagtttaggcttttctgttggagatgtatgggcaatgtttaagaagtgtccttcctttctgaatttctctgagaacaagatagttcaaacttgggaaaccctgaagaagtgtggactactcgaagacgatgtcctctcagtgttgaagaagtttccacaatgcattaatgcttcagagcagaagataatgaactccattgaaacatttctaggcttaggatttagcagagatgaggttgcaatgatagccaagcgctttcctcaatgccttattttatctgcagagacagtgaagaaaaagactgagtttctggtgaagaagatgaattggccactaaaggctgtggtttcaacccctgcggtacttggatacagcttagagaagaggactatcccaaggtgtaatgtaattaaagctctcatgtccaaaggatcgcttggaagtgaactccctggaatgtcgtctgttttggtatgtaccaatgaagaattcttatgcaggtatgtgaagaaccatgatgacaagaagatagtacctgagttgatggctattttcaccggagatcgcgtttcatag

SEQ ID NO: 30449 - protein, 1123 aa, Arabidopsis thaliana
  misc_feature (1)..(1123): Ceres Seq. ID no. 4959488
MEVTLGPMTYLWIVVSFALNLLWILVRYPDDVHDRKWVPFSEDELMTVNNTVDTDFDNPYDPPKAVISTAAIPTNASSSLILTWLTSNPEDQIYIYIHFLELQVLRGNETRIFDILMNGIITSPAYSPTDSVVDTVYNKEPLRCNASVCSLELRKTLGSTLPPLINAIEIFTVLEFPETATYEDDFSAIENIRAAYALSNGSGDPCVPKPSHYLKCSNFTDTSVVQLRIISLNLSSMRLSGVISPSIQTLTKLQVLDLSNNNLTGGVPGFLSNMVSLLSIDLSNNSLSGPIPQALLDRRKEGLDLKFHGNTKLYEFISHRKKNFPLVAVVASASAIAIVLVVLGVLFICLRRKPPSREAPHSSIETVKRRFTYSEVMAMTNNFKKIIGEGGFGIIYHGHLNDGQQVAVKVLSESSSQGYKQFKAEVELLMRVHHVNLVNLAGYCDDSNHLALIYEFMENRDLKEHLSGKEGSSFLDWPCRLKIAAEAALGLEYLHTGCKPPMIHRDVKSTNILLNEDFQAKLGDFGLSRSFPIGGETHVSTVVVGTHGFLDPEYYQTQRLSEKSDVYSFGIVLLEIITNKLVIDQTRERPHIAEWVRYMLSIGDIESVMDPNLKGKYDSSSAWKVLELAMLCSKLSLAERPNMAQIVHELNEYLLYENSRREISQDVRSKNSSEVSTNTEMAPMALNLLEKASPFSNSFSYANATDASLRAGRKGLSFSVSYLVDSLGLPKKVAESISKKVSFEDKGNPDSVLSLLRSHGFTDSQISSIITDYPQLLVADAEKSIGPKLQFLQSRGASRSELTHIVSTVPEILGKRGDKTISIYYDFVKEIIEADKSSKFEKLCHSLPEGSKQENKIRNVLVLRELGVPQRLLFPLLISDHQPVCGKENFEESLKKVVEMGFDPTTSKFVKALRVVYRFRDKTIEAKVNVCKSLGFSVGDVWAMFKKCPSFLNFSENKIVQTWETLKKCGLLEDDVLSVLKKFPQCINASEQKIMNSIETFLGLGFSRDEVAMIAKRFPQCLILSAETVKKKTEFLVKKMNWPLKAVVSTPAVLGYSLEKRTIPRCNVIKALMSKGSLGSELPGMSSVLVCTNEEFLCRYVKNHDDKKIVPELMAIFTGDRVS

SEQ ID NO: 30450 - protein, 1116 aa, Arabidopsis thaliana
  misc_feature (1)..(1116): Ceres Seq. ID no. 4959489
MTYLWIVVSFALNLLWILVRYPDDVHDRKWVPFSEDELMTVNNTVDTDFDNPYDPPKAVISTAAIPTNASSSLILTWLTSNPEDQIYIYIHFLELQVLRGNETRIFDILMNGIITSPAYSPTDSVVDTVYNKEPLRCNASVCSLELRKTLGSTLPPLINAIEIFTVLEFPETATYEDDFSAIENIRAAYALSNGSGDPCVPKPSHYLKCSNFTDTSVVQLRIISLNLSSMRLSGVISPSIQTLTKLQVLDLSNNNLTGGVPGFLSNMVSLLSIDLSNNSLSGPIPQALLDRRKEGLDLKFHGNTKLYEFISHRKKNFPLVAVVASASAIAIVLVVLGVLFICLRRKPPSREAPHSSIETVKRRFTYSEVMAMTNNFKKIIGEGGFGIIYHGHLNDGQQVAVKVLSESSSQGYKQFKAEVELLMRVHHVNLVNLAGYCDDSNHLALIYEFMENRDLKEHLSGKEGSSFLDWPCRLKIAAEAALGLEYLHTGCKPPMIHRDVKSTNILLNEDFQAKLGDFGLSRSFPIGGETHVSTVVVGTHGFLDPEYYQTQRLSEKSDVYSFGIVLLEIITNKLVIDQTRERPHIAEWVRYMLSIGDIESVMDPNLKGKYDSSSAWKVLELAMLCSKLSLAERPNMAQIVHELNEYLLYENSRREISQDVRSKNSSEVSTNTEMAPMALNLLEKASPFSNSFSYANATDASLRAGRKGLSFSVSYLVDSLGLPKKVAESISKKVSFEDKGNPDSVLSLLRSHGFTDSQISSIITDYPQLLVADAEKSIGPKLQFLQSRGASRSELTHIVSTVPEILGKRGDKTISIYYDFVKEIIEADKSSKFEKLCHSLPEGSKQENKIRNVLVLRELGVPQRLLFPLLISDHQPVCGKENFEESLKKVVEMGFDPTTSKFVKALRVVYRFRDKTIEAKVNVCKSLGFSVGDVWAMFKKCPSFLNFSENKIVQTWETLKKCGLLEDDVLSVLKKFPQCINASEQKIMNSIETFLGLGFSRDEVAMIAKRFPQCLILSAETVKKKTEFLVKKMNWPLKAVVSTPAVLGYSLEKRTIPRCNVIKALMSKGSLGSELPGMSSVLVCTNEEFLCRYVKNHDDKKIVPELMAIFTGDRVS

SEQ ID NO: 30451 - protein, 1078 aa, Arabidopsis thaliana
  misc_feature (1)..(1078): Ceres Seq. ID no. 4959490
MTVNNTVDTDFDNPYDPPKAVISTAAIPTNASSSLILTWLTSNPEDQIYIYIHFLELQVLRGNETRIFDILMNGIITSPAYSPTDSVVDTVYNKEPLRCNASVCSLELRKTLGSTLPPLINAIEIFTVLEFPETATYEDDFSAIENIRAAYALSNGSGDPCVPKPSHYLKCSNFTDTSVVQLRIISLNLSSMRLSGVISPSIQTLTKLQVLDLSNNNLTGGVPGFLSNMVSLLSIDLSNNSLSGPIPQALLDRRKEGLDLKFHGNTKLYEFISHRKKNFPLVAVVASASAIAIVLVVLGVLFICLRRKPPSREAPHSSIETVKRRFTYSEVMAMTNNFKKIIGEGGFGIIYHGHLNDGQQVAVKVLSESSSQGYKQFKAEVELLMRVHHVNLVNLAGYCDDSNHLALIYEFMENRDLKEHLSGKEGSSFLDWPCRLKIAAEAALGLEYLHTGCKPPMIHRDVKSTNILLNEDFQAKLGDFGLSRSFPIGGETHVSTVVVGTHGFLDPEYYQTQRLSEKSDVYSFGIVLLEIITNKLVIDQTRERPHIAEWVRYMLSIGDIESVMDPNLKGKYDSSSAWKVLELAMLCSKLSLAERPNMAQIVHELNEYLLYENSRREISQDVRSKNSSEVSTNTEMAPMALNLLEKASPFSNSFSYANATDASLRAGRKGLSFSVSYLVDSLGLPKKVAESISKKVSFEDKGNPDSVLSLLRSHGFTDSQISSIITDYPQLLVADAEKSIGPKLQFLQSRGASRSELTHIVSTVPEILGKRGDKTISIYYDFVKEIIEADKSSKFEKLCHSLPEGSKQENKIRNVLVLRELGVPQRLLFPLLISDHQPVCGKENFEESLKKVVEMGFDPTTSKFVKALRVVYRFRDKTIEAKVNVCKSLGFSVGDVWAMFKKCPSFLNFSENKIVQTWETLKKCGLLEDDVLSVLKKFPQCINASEQKIMNSIETFLGLGFSRDEVAMIAKRFPQCLILSAETVKKKTEFLVKKMNWPLKAVVSTPAVLGYSLEKRTIPRCNVIKALMSKGSLGSELPGMSSVLVCTNEEFLCRYVKNHDDKKIVPELMAIFTGDRVS

SEQ ID NO: 30452 - DNA, 614 bp, Arabidopsis thaliana
  misc_feature (1)..(614): Ceres Seq. ID no. 4959549
aaatcagacaaaagcctcgcatctctctctcttgggatctgaatcttcaaattgaaaacaaaaagatcacaagagaaaaaaacaaaaaaaaatgcctcatggaactcttgaagttgttcttgtcagcgccaaaggtctcgaggacgcagattttctgaatcagaagagcaacgttgcagaaggaatggggacaactccggaatggaatgagacatttatcttcactgtctctgaaggaactacagagttaaaagcgaaaatcttcgacaaagatgtcggtacagaggatgatgcggttggtgaagcaactattccgttggagccggttttcgtggaaggaagtattccaccaactgcatacaatgtggtgaaagatgaagagtacaaaggagagatttgggtggctctctccttcaagccctcggaaaaccgaagcaggggtatggacgaggagtcctatgggggctggaaaaactctgaagcatcatactaagagaagaaaccattgtgtgtcactgtttgatttgagtcttgggaacaaaatgttgagttttcatttgaaagcgtattttttgttcagattgtttttaatgatttcataaactcgtgagatt

SEQ ID NO: 30453 - protein, 133 aa, Arabidopsis thaliana
  misc_feature (1)..(133): Ceres Seq. ID no. 4959550
MPHGTLEVVLVSAKGLEDADFLNQKSNVAEGMGTTPEWNETFIFTVSEGTTELKAKIFDKDVGTEDDAVGEATIPLEPVFVEGSIPPTAYNVVKDEEYKGEIWVALSFKPSENRSRGMDEESYGGWKNSEASY

SEQ ID NO: 30454 - protein, 102 aa, Arabidopsis thaliana
  misc_feature (1)..(102): Ceres Seq. ID no. 4959551
MGTTPEWNETFIFTVSEGTTELKAKIFDKDVGTEDDAVGEATIPLEPVFVEGSIPPTAYNVVKDEEYKGEIWVALSFKPSENRSRGMDEESYGGWKNSEASY

SEQ ID NO: 30455 - protein, 75 aa, Arabidopsis thaliana
  misc_feature (1)..(75): Ceres Seq. ID no. 4959552
MKSTKERFGWLSPSSPRKTEAGVWTRSPMGAGKTLKHHTKRRNHCVSLFDLSLGNKMLSFHLKAYFLFRLFLMIS

SEQ ID NO: 30456 - DNA, 705 bp, Arabidopsis thaliana
  misc_feature (1)..(705): Ceres Seq. ID no. 4959614
atgcaggcggaggagataatatgccgtgtttcagacgaagagatcatcgagaattacctgaggccaaagataaacggtgaaacatcttcaatcccgagatatgttgtggaattggcagaggagctgtacactgtagagccttggctgcttcctcgacaaacagctccaattctcaaccctggcgagtggttctactttgggaaacgcaatcgaaagtatagtaacttggaaggtgttcattgcgagggatcgtggatactcgaagacggttgcatcgcagtcctgtccaaggagacgggtgaggaaattggtggaacgacgagatttaggtattactataggaacaagggggataaagagagtcgtctgaagatgagcaattggtttatgagagagtatcgtctctattacaaatccaggagagtcttcaatggacgtcaggtgatggagccacttcactgctacatagtgaacaaatacattcatgatgatggcatttttgatatctgcaatatgggaaacaactatttcggcaatcgctatcgcgaaagcaactcccaaaatactgttgtggatgcttcggttgacattctcctccaacacactctacattttgcggacgttgcatttgcctcgcatttgatattgacacacctatacatacattcattgattcaatcatataatatatcaattcatacttga

SEQ ID NO: 30457 - protein, 234 aa, Arabidopsis thaliana
  misc_feature (1)..(234): Ceres Seq. ID no. 4959615
MQAEEIICRVSDEEIIENYLRPKINGETSSIPRYVVELAEELYTVEPWLLPRQTAPILNPGEWFYFGKRNRKYSNLEGVHCEGSWILEDGCIAVLSKETGEEIGGTTRFRYYYRNKGDKESRLKMSNWFMREYRLYYKSRRVFNGRQVMEPLHCYIVNKYIHDDGIFDICNMGNNYFGNRYRESNSQNTVVDASVDILLQHTLHFADVAFASHLILTHLYIHSLIQSYNISIHT

SEQ ID NO: 30458 - DNA, 751 bp, Arabidopsis thaliana
  misc_feature (1)..(751): Ceres Seq. ID no. 4960291
aaatttctcaaaatcgcaaaatctttgcctctttcttctctaatcgaactaaatcttaaaactttgctgattgattgattttcgattccgggagaagaaaaatggtatctgggttgattaatgagaaccctatcatttacccaaagaaagagaggcgtcttcgtactgatacaagcattactgatgagcttacaccagaaccaattgatcaacttgagatttttgatcatataagagatatcaaagatccagagcatcctaatactctggaagatctcagagtagttacagaagactcagttgaagtggatgatgagaacagttatgttagggttacgttcactccaactgtcgaacattgtagcatggcaaccgttatcggtctttgtgtccgtgtgaaacttctacgaagccttccttctcgatacaagattgatataagggtagcacctggttctcatgcaacagaagatgcattgaataaacaactaaacgataaagaacgtgtggcggctgcactagagaatccaaacctcgtggagatggttgatgaatgcctgccatcagaagagtgaattgcttttattttcttgtgagcaagtaatttacacaagcctggtggtctcagtttacactatcaatacatgtctctgttttatttgcaaagattttgatccatcacatcgactaggacttgcattgtaatacttactctgatttcaagtttgttctcaatcatttcaataaagtc

SEQ ID NO: 30459 - protein, 157 aa, Arabidopsis thaliana
  misc_feature (1)..(157): Ceres Seq. ID no. 4960292
MVSGLINENPIIYPKKERRLRTDTSITDELTPEPIDQLEIFDHIRDIKDPEHPNTLEDLRVVTEDSVEVDDENSYVRVTFTPTVEHCSMATVIGLCVRVKLLRSLPSRYKIDIRVAPGSHATEDALNKQLNDKERVAAALENPNLVEMVDECLPSEE

SEQ ID NO: 30460 - DNA, 687 bp, Arabidopsis thaliana
  misc_feature (1)..(687): Ceres Seq. ID no. 4960373
atggggtcacttttgcagggttttactaaatcactcgccatgactttcctctccgagattggtgacaaaacgttcttcgctgctgctattttggcgatgcggtatcctaggaggcttgtattagctggttgtttatcagctttgattgtcatgactatattatctgctacacttggttgggctgctccaaatctgatctctcggaaatggactcatcatataacaacattcttgttctttggctttgggttatggtctttgtgggatggttttaaagaaggaggaggttctgaagaattggcagaagttgaagcagaactggattctgatttgaagaagactaatgatcaatcgaaaaacagtaagattgaagatgaacagaaaaagcagaaaagaccattccttactgcattcttctctcccatttttctcaaggcgttttcgattaacttctttggtgaatggggtgacaagagtcagcttgcgaccattggtttggctgcagatgaaaatccactcggcgtggtccttggcggaattgtggcacaaacattgtgtaccacagctgctgtgcttggtggcaagagcttagcatctcaaatatccgaacgaattgtggctctttccggtggaatgcttttcattatcttcggcattcagtcgcttcttactccggttgatgcttga

SEQ ID NO: 30461 - protein, 228 aa, Arabidopsis thaliana
  misc_feature (1)..(228): Ceres Seq. ID no. 4960374
MGSLLQGFTKSLAMTFLSEIGDKTFFAAAILAMRYPRRLVLAGCLSALIVMTILSATLGWAAPNLISRKWTHHITTFLFFGFGLWSLWDGFKEGGGSEELAEVEAELDSDLKKTNDQSKNSKIEDEQKKQKRPFLTAFFSPIFLKAFSINFFGEWGDKSQLATIGLAADENPLGVVLGGIVAQTLCTTAAVLGGKSLASQISERIVALSGGMLFIIFGIQSLLTPVDA

SEQ ID NO: 30462 - protein, 215 aa, Arabidopsis thaliana
  misc_feature (1)..(215): Ceres Seq. ID no. 4960375
MTFLSEIGDKTFFAAAILAMRYPRRLVLAGCLSALIVMTILSATLGWAAPNLISRKWTHHITTFLFFGFGLWSLWDGFKEGGGSEELAEVEAELDSDLKKTNDQSKNSKIEDEQKKQKRPFLTAFFSPIFLKAFSINFFGEWGDKSQLATIGLAADENPLGVVLGGIVAQTLCTTAAVLGGKSLASQISERIVALSGGMLFIIFGIQSLLTPVDA

SEQ ID NO: 30463 - protein, 196 aa, Arabidopsis thaliana
  misc_feature (1)..(196): Ceres Seq. ID no. 4960376
MRYPRRLVLAGCLSALIVMTILSATLGWAAPNLISRKWTHHITTFLFFGFGLWSLWDGFKEGGGSEELAEVEAELDSDLKKTNDQSKNSKIEDEQKKQKRPFLTAFFSPIFLKAFSINFFGEWGDKSQLATIGLAADENPLGVVLGGIVAQTLCTTAAVLGGKSLASQISERIVALSGGMLFIIFGIQSLLTPVDA

SEQ ID NO: 30464 - DNA, 893 bp, Arabidopsis thaliana
  misc_feature (1)..(893): Ceres Seq. ID no. 4960512
gagtatttatcacattaattattatcatacaataacagcgtttcaccattctcttttcaatattttcagttactttctataagaaccattcacttattcttttttctctctatctgtgattatggcttcctctatttccgctgctgaagtgaaagttgtcccagaagagtataatttcttgcaaaaacatgtcgccttcttcgacagaaacaaagatggtatcgtttatccctcggagacatttcaaggatttagagcaatcggatgtggatatttgttgtcaacattcgctgctgttttcatcaacatcagtctcagcagcaaaactcgtccggggaaaggattctcattctcgtttccgatagaggttaagaatgtccgcctagggatacatagcagcgattcaggcgtttacgacaaggatggacggtttgtggcttcaaagttcgaggagatatttgcgaagcatgctcacacacatcgcgatgctttgaccagcaaggaacttaaagaacttctcaaggcaaacagagaacctaatgattgtaaaggagggattttagcgtttggggagtggaaggtattgtataatttgtgcaaagacaagagtggtttgctacacaaggagatagtgagagccgtctatgatggttctcttttcgaacaactcgagaaacaaagatcttctaaaactccttagaatcatcaaaaaaaaaatcctaatgtaaattcattgttatgctcgtgaatctgttttagttaaatctttagtagttacagtaatctatggtgtgaagattgggatgtgtttgattttcaagaattatagtttatttgtgtaagtacttgtgtgattgtatcttattcaaataaaagattatatgatttttttt

SEQ ID NO: 30465 - protein, 192 aa, Arabidopsis thaliana
  misc_feature (1)..(192): Ceres Seq. ID no. 4960513
MASSISAAEVKVVPEEYNFLQKHVAFFDRNKDGIVYPSETFQGFRAIGCGYLLSTFAAVFINISLSSKTRPGKGFSFSFPIEVKNVRLGIHSSDSGVYDKDGRFVASKFEEIFAKHAHTHRDALTSKELKELLKANREPNDCKGGILAFGEWKVLYNLCKDKSGLLHKEIVRAVYDGSLFEQLEKQRSSKTP

SEQ ID NO: 30466 - DNA, 619 bp, Arabidopsis thaliana
  misc_feature (1)..(619): Ceres Seq. ID no. 4960596
tgtttttgataacaaagtggagtggggaatcgacttggcctcagagcatgaaagatacttgacagaggttgagtttgatcaaaagccaataattgtgtataactacccgaaaggaatcaaagctttttacatgagacttaacgatgatgagaagacagttgctgccatggatgtccttgttccaaagattaattaggttggagaactcattggtggaagccaaagggaagaacgatatgatgttatcaaacagaggatcgaggagatgggtctaccaatggagccatatgagtggtacctagacttgcgtcgttatggaacagtgaagcattgtggatttggacttggcttcgaacgtatgattcagttcgctacaggaattgataacatcagagatgttattcctttccctcgctatcctggaaaagctgatctctgattcctctctagacacacaattctggtctggtctcgacatggttttagtttccttttaaattggttaaatgaaaattgtattgatttttatctatactctgtttctcaagctgtgagagctaatatgaagggaaacaaagttatatgaagggaaacaaagttatacttttgggttagcttc

SEQ ID NO: 30467 - protein, 64 aa, Arabidopsis thaliana
  misc_feature (1)..(64): Ceres Seq. ID no. 4960597
VFDNKVEWGIDLASEHERYLTEVEFDQKPIIVYNYPKGIKAFYMRLNDDEKTVAAMDVLVPKIN

SEQ ID NO: 30468 - protein, 57 aa, Arabidopsis thaliana
  misc_feature (1)..(57): Ceres Seq. ID no. 4960598
MGLPMEPYEWYLDLRRYGTVKHCGFGLGFERMIQFATGIDNIRDVIPFPRYPGKADL

SEQ ID NO: 30469 - protein, 53 aa, Arabidopsis thaliana
  misc_feature (1)..(53): Ceres Seq. ID no. 4960599
MEPYEWYLDLRRYGTVKHCGFGLGFERMIQFATGIDNIRDVIPFPRYPGKADL

SEQ ID NO: 30470 - DNA, 3357 bp, Arabidopsis thaliana
  misc_feature (1)..(3357): Ceres Seq. ID no. 4960709
atgacgactacttcagaaatttctcttcaagaagaatacgtcaccgacgccgttgaccaccgtggacttgccgccagaagatccaataccggtagatggagagccgccttgttcataatcggtgtggaggtggctgagaggttcgcttactatggaatcggatcaaacttaataagctacttgactggaccacttggtgaatccacggctgtagccgccgctaatgtcaacgcgtggtcaggaattgccactcttcttcctgttcttggagcttttgtcgccgacgcatttctcggtcgttaccgaacaattatcatctcttctcttatctacgtcctgggattggcgtttctgactttatctgcgtttctgattcccaatactactgaagtgacatcttcaacttcttcttttctcaatgtactcttcttcttctctctgtatttggtggctattggacaaagtggacacaagccttgtgttcaagcttttggtgctgaccagtttgatgaaaaagactctcaagagaaatctgacagaagctccttcttcaactggtggtaccttagtctgtctgcaggaatctgctttgcgattttagttgttgtatacatccaggaagagttcagctgggcttttgggtttggaatcccatgtgtgttcatggtgatctctcttgttcttttcgtgtcagggagaaggatttataggtacagtaaaagaagacatgaagaggaaataaacccttttacgaggataggtagagtcttctttgtagcactcaagaaccaaagattgagttcatcagacttgtgcaaagttgagctagaggcaaatacatccccagagaaacagagttttttcaacaaagcattgcttgtacccaatgattcttctcaaggagaaaacgcatccaagtctagtgatgttgaagatgccacagctcttatcaggctaattccagtatggtttacgactctggcttacgcgataccctacgcgcaatacatgacatttttcactaagcaaggcgtcacaatggatagaacaattcttcctggtgttaagatcccacctgcttctcttcaggtctttatcggcatatcaatagtcctctttgtccccatctacgaccgagttttcgtccccatcgccaggttaataaccaaagaaccttgtggcatcacaaccctcaaaagaattggaactggaattgtactgtcgactatcactatggtaattgcagctctggttgagttcaagcggctcgagactgcgaaagaacacgggcttatagaccaaccggaagcaactcttccaatgtcgatatggtggttaatccctcagtacttgttgctgggattggctgacgtatatactttagtgggaatgcaagagttcttctacagccaagtccctactgagctgagaagcatcggtctcgcgctttacttaagcgcgttgggcgtgggaagcttattaagcagcttactcatctctctgatagacttggccactggaggagacgcaggaaacagctggtttaacagtaatctgaacagagctcatcttgattacttctattggttactagcgattgttagcgccgttgggttctttacgttcttgttcatttccaagtcgtacatctatcgtcgagtggatcgaaaaatgacgacgacttccaaaacttctcttcaagaagaatacgtcatcgacgccgttgaccaccgtggcttttccgccagaaggtctattaccggtagatggagagctgcatggttcattatcggtgtggaggtggcggagaggttcgcgaactacgggatcggatcaaacctgataagctacttgactggaccacttggtcaatctacggcggtcgccgccgctaatgtcaacgcttggtctggaatttccactattcttcctcttcttggagcttttgtcgccgacgcttttcttggtcgctacataacaattatcatcgcttcttttatctatgtcctgggactggcgtttctgactttatctgcgtttctgattcccaacaatactgaagtgacctcgtcaccttcttcttttctcaatgcactcttcttcttctctctttatttggtggctattggacaaagtggacacaagccttgtgttcaggcttttggtgcagatcagtttgatgagaagaacccgcaagagaatagtgatagaagctctttcttcaactggtggtaccttagtatgtgtgcaggaatcggcctagcgattttagtggttgtgtacatccaagaaaatgtaagctgggcacttgggtttggaatcccatgtgtgttcatggtgatctctcttgttcttttcgttttagggagaaagagttataggtttagtaaaacaagacaagaagaggaaacaaacccgtttacgagaataggtagagtcttctttgtagcattcaagaaccagagattgaattcatcagacttgtgcaaagttgagctaatagaggcaaatcgatctcaagaatctccagaggagctgagttttctcaacaaagcattgcttgtcccaaatgattctgatgaaggagaagtggcatgcaagtctagagatgtcgaagatgctacagctcttgtcaggcttattccagtatggcttacaactttggcttacgcgatacctttcgcgcagtacatgactttctttacaaagcaaggtgtcacaatggaaagaacaatatttccaggtgtagagatcccacctgcttctcttcaggttcttatcagcatatcaattgttctctttgtccccatctatgaccgtgttttggtcccaatcggaaggtcaataactaaagatccttgtggcatcacaactctcaaaagaattggaaccggaatggtactagcaactctcactatggtggtggctgctttggttgagtcaaagcggctcgagactgcaaaagaatacggacttatagaccaaccgaaaacaactcttccaatgtcgatatggtggttattccctcagtatatgttactgggattggctgacgtacacactttagtaggaatgcaagagttcttctacagccaagtccccactgagctgagaagcctcggtctcgcgatttacttaagtgcaatgggcgttggaagcttattaagcagcttactcatctatctgatcgatttggccactggaggagacgccggaaacagctggttcaacagtaatctgaacagagcccatctagattacttctattggttacttgcggttgttagtgccgttgggttctttacgttcttgttcatctccaagtcctatatatatcgccgggtggacgtagtgtag

SEQ ID NO: 30471 - protein, 1118 aa, Arabidopsis thaliana
  misc_feature (1)..(1118): Ceres Seq. ID no. 4960710
MTTTSEISLQEEYVTDAVDHRGLAARRSNTGRWRAALFIIGVEVAERFAYYGIGSNLISYLTGPLGESTAVAAANVNAWSGIATLLPVLGAFVADAFLGRYRTIIISSLIYVLGLAFLTLSAFLIPNTTEVTSSTSSFLNVLFFFSLYLVAIGQSGHKPCVQAFGADQFDEKDSQEKSDRSSFFNWWYLSLSAGICFAILVVVYIQEEFSWAFGFGIPCVFMVISLVLFVSGRRIYRYSKRRHEEEINPFTRIGRVFFVALKNQRLSSSDLCKVELEANTSPEKQSFFNKALLVPNDSSQGENASKSSDVEDATALIRLIPVWFTTLAYAIPYAQYMTFFTKQGVTMDRTILPGVKIPPASLQVFIGISIVLFVPIYDRVFVPIARLITKEPCGITTLKRIGTGIVLSTITMVIAALVEFKRLETAKEHGLIDQPEATLPMSIWWLIPQYLLLGLADVYTLVGMQEFFYSQVPTELRSIGLALYLSALGVGSLLSSLLISLIDLATGGDAGNSWFNSNLNRAHLDYFYWLLAIVSAVGFFTFLFISKSYIYRRVDRKMTTTSKTSLQEEYVIDAVDHRGFSARRSITGRWRAAWFIIGVEVAERFANYGIGSNLISYLTGPLGQSTAVAAANVNAWSGISTILPLLGAFVADAFLGRYITIIIASFIYVLGLAFLTLSAFLIPNNTEVTSSPSSFLNALFFFSLYLVAIGQSGHKPCVQAFGADQFDEKNPQENSDRSSFFNWWYLSMCAGIGLAILVVVYIQENVSWALGFGIPCVFMVISLVLFVLGRKSYRFSKTRQEEETNPFTRIGRVFFVAFKNQRLNSSDLCKVELIEANRSQESPEELSFLNKALLVPNDSDEGEVACKSRDVEDATALVRLIPVWLTTLAYAIPFAQYMTFFTKQGVTMERTIFPGVEIPPASLQVLISISIVLFVPIYDRVLVPIGRSITKDPCGITTLKRIGTGMVLATLTMVVAALVESKRLETAKEYGLIDQPKTTLPMSIWWLFPQYMLLGLADVHTLVGMQEFFYSQVPTELRSLGLAIYLSAMGVGSLLSSLLIYLIDLATGGDAGNSWFNSNLNRAHLDYFYWLLAVVSAVGFFTFLFISKSYIYRRVDVV

SEQ ID NO: 30472 - protein, 897 aa, Arabidopsis thaliana
  misc_feature (1)..(897): Ceres Seq. ID no. 4960711
MVISLVLFVSGRRIYRYSKRRHEEEINPFTRIGRVFFVALKNQRLSSSDLCKVELEANTSPEKQSFFNKALLVPNDSSQGENASKSSDVEDATALIRLIPVWFTTLAYAIPYAQYMTFFTKQGVTMDRTILPGVKIPPASLQVFIGISIVLFVPIYDRVFVPIARLITKEPCGITTLKRIGTGIVLSTITMVIAALVEFKRLETAKEHGLIDQPEATLPMSIWWLIPQYLLLGLADVYTLVGMQEFFYSQVPTELRSIGLALYLSALGVGSLLSSLLISLIDLATGGDAGNSWFNSNLNRAHLDYFYWLLAIVSAVGFFTFLFISKSYIYRRVDRKMTTTSKTSLQEEYVIDAVDHRGFSARRSITGRWRAAWFIIGVEVAERFANYGIGSNLISYLTGPLGQSTAVAAANVNAWSGISTILPLLGAFVADAFLGRYITIIIASFIYVLGLAFLTLSAFLIPNNTEVTSSPSSFLNALFFFSLYLVAIGQSGHKPCVQAFGADQFDEKNPQENSDRSSFFNWWYLSMCAGIGLAILVVVYIQENVSWALGFGIPCVFMVISLVLFVLGRKSYRFSKTRQEEETNPFTRIGRVFFVAFKNQRLNSSDLCKVELIEANRSQESPEELSFLNKALLVPNDSDEGEVACKSRDVEDATALVRLIPVWLTTLAYAIPFAQYMTFFTKQGVTMERTIFPGVEIPPASLQVLISISIVLFVPIYDRVLVPIGRSITKDPCGITTLKRIGTGMVLATLTMVVAALVESKRLETAKEYGLIDQPKTTLPMSIWWLFPQYMLLGLADVHTLVGMQEFFYSQVPTELRSLGLAIYLSAMGVGSLLSSLLIYLIDLATGGDAGNSWFNSNLNRAHLDYFYWLLAVVSAVGFFTFLFISKSYIYRRVDVV

SEQ ID NO: 30473 - protein, 782 aa, Arabidopsis thaliana
  misc_feature (1)..(782): Ceres Seq. ID no. 4960712
MTFFTKQGVTMDRTILPGVKIPPASLQVFIGISIVLFVPIYDRVFVPIARLITKEPCGITTLKRIGTGIVLSTITMVIAALVEFKRLETAKEHGLIDQPEATLPMSIWWLIPQYLLLGLADVYTLVGMQEFFYSQVPTELRSIGLALYLSALGVGSLLSSLLISLIDLATGGDAGNSWFNSNLNRAHLDYFYWLLAIVSAVGFFTFLFISKSYIYRRVDRKMTTTSKTSLQEEYVIDAVDHRGFSARRSITGRWRAAWFIIGVEVAERFANYGIGSNLISYLTGPLGQSTAVAAANVNAWSGISTILPLLGAFVADAFLGRYITIIIASFIYVLGLAFLTLSAFLIPNNTEVTSSPSSFLNALFFFSLYLVAIGQSGHKPCVQAFGADQFDEKNPQENSDRSSFFNWWYLSMCAGIGLAILVVVYIQENVSWALGFGIPCVFMVISLVLFVLGRKSYRFSKTRQEEETNPFTRIGRVFFVAFKNQRLNSSDLCKVELIEANRSQESPEELSFLNKALLVPNDSDEGEVACKSRDVEDATALVRLIPVWLTTLAYAIPFAQYMTFFTKQGVTMERTIFPGVEIPPASLQVLISISIVLFVPIYDRVLVPIGRSITKDPCGITTLKRIGTGMVLATLTMVVAALVESKRLETAKEYGLIDQPKTTLPMSIWWLFPQYMLLGLADVHTLVGMQEFFYSQVPTELRSLGLAIYLSAMGVGSLLSSLLIYLIDLATGGDAGNSWFNSNLNRAHLDYFYWLLAVVSAVGFFTFLFISKSYIYRRVDVV

SEQ ID NO: 30474 - DNA, 3087 bp, Arabidopsis thaliana
  misc_feature (1)..(3087): Ceres Seq. ID no. 4961166
atggctgcgaagcttctgcattcattggcagatgatagtgcagatctgcagaagcaaattggatgtatgaatgggatttttcaaatctttgatcgtcaccatgttcttactggccgacgaaaaagtcttactttaggtaatggaaatgccattaacatcaattatgaaagagactctgttgatacaatttatcaacaaaaagaaactgactccaacattggtgggaatgtgaaagagaagcgaagggtttcaacagaatcatctagagtttctttctcatcttcgtgctcttcctccccatcgtcttctgagttcaatagaggagttcaacctgacgcttctgcgtatgaccgagctaattttcaagaatctcctacaagtgatcctgagatgactgaagggaatggattttcacatttgggacttgacctcagagatgttgtgagagactcaatgtacagagaagccagagggcttttgagtaagactccaatgactagagaggaagtagttagacagagcagacgagaggattctccaaggccttatggtttgaagcaatcaactcccatggatctcaatgagtccttcagagttctagcaagacttagagaaacatctcaacattataacgagcttggcatgaaagatgcgcctcgttactcagttgattctcatgatacgttgaaatccagacagaagctgaaagagttgcctaggctttcgctggatagtagagaacgagcgacgcgaaactccagtgttgatcccaaatcaagtaagctttcagaaagtttcagtgaaagctgttcaagcagtagcaagaaacggcctcccagtgttgtagcaaagctcatgggattggagacattgcccggttctccattgggtagagacattcatcagtttggtctgaacaaaaccaacatctctgaccaaaatgacgatccattctcaagatcattgagggagaaaaatctgaaccgtgcaatccgtttttctcctagctcaccgagaagcttggggaaggacccggcttctccaagatggagaaactctgattttgttatgaaacctctatcaaatacaagattccccgttgaaccagctccatggaaacacgctgatagaaaccgagttttgcaaaagcaagctagcatgcctgtgaaagcgaagccgtatgaagcacctaattttcctcctactgtgtacagtgaaatggagcggagattgaatgatcttgagttcaaacattctggaaaagatctgcgagcccttaaacaaatattagagtctatgcagtcaaaaggtttcctagatactgagaaacaacaacaatccacaaactttgcagttcaaagagattatgaaagagaaaattctgcaacttccaaccatgcaatgtcatccagaacgagagttcagtcttcttcatctaaccaggtatatcaatccccgattgtgattatgaaacctgccaagcttgttgagaaggctggtattcctgcgtcatcccttattcccattcacagcctaactggcatcaagaagatccgtagagaaaaacctgatgataaaggaacttcagcaagtaatagtaaacgggtgacaaaagattgtagtcctggaaaccgaagagctgaatcatgtaccagctcgtttgataagaaatctgacagcagaaatgtgcggtcttcttcaaaaaagcctcagcaggtttccaaagaaagtgcttcaaagagttcaggatctgtaagtccaagattacagcagaagaagcttgagtatgataagcgttcacggccaccaacccctcctgattctagcaaatcaaggaaaccgtcaaaccaacaacttgtggaatctacttctcctggtggcagacgtagacccaagggtcagaagagtttgcagcaagttgatgaccaacttagtcaagcaagcaatgaatctaggacgtcaagtcatggcatttgtactcaatccgaaacagaagcctctgcttgtgtagaaaaatctactgaagctgatggtggtaaaagtccatctgtaatcgaggcagccaaagctgtagtctctaacttaatgcagaataaatccagtccaaggtttagtgaagatggattgtcagctaacctttcactagttgctttggaacatccaagtcctatttctgttctcgacgcttcaacgtacagagagactgaaccatcacccgtgaagacacaagctgatcatgtgataggtaatgttgcccatgattttggtgatgaaaattgtgaggaccagtggaatccagcatacagtttctcagaaaccacatcaagcttttcgccagagataaaccgtaagaagctacagaatgttgagcacttggttcaaaagctcagacgattgaactctagccatgatgaagccagccaagattatattgcatcgctctgtgagaacgcagatcctaccaccgatcatagatacatttctgagattctattagcctcgggtcttctcctaagagaccttggctcaggattgacaacgtttcaacttcacccttctggccacccaatcaatcctgagctgttctttgttcttgagcagacaaagggaagcagcactacgcatctgttacacaaagaagaaagtaaggttctgaaaaatgagaagctcaaccggaaacttgtgtttgatctcgttaatgagattctggtggagaaactagcgtcagttgaagccacgacgaatccattgatgaagtcatatgctaaggtgactaagaaagccgtgagtgcgcaacaactactgaaagaactgtgttcagcgatagaaacacagcaaaagcaagccacaaagagatcagaaaactttttattggaagaagaagacgacttcttgaaaagtatacttgctgaagatgtgacgattcgatctgggaactgggcagacttcagtggagaaatgtcaggattggtgctggatgttgagaggcttgtcttcaaggatctggttaatgaaatcgtgcatgcagagacaagccgtctgcaagcaaagtcaggaaggcgacgaacgctttttgctgaccagtag

SEQ ID NO: 30475 - protein, 1028 aa, Arabidopsis thaliana
  misc_feature (1)..(1028): Ceres Seq. ID no. 4961167
MAAKLLHSLADDSADLQKQIGCMNGIFQIFDRHHVLTGRRKSLTLGNGNAININYERDSVDTIYQQKETDSNIGGNVKEKRRVSTESSRVSFSSSCSSSPSSSEFNRGVQPDASAYDRANFQESPTSDPEMTEGNGFSHLGLDLRDVVRDSMYREARGLLSKTPMTREEVVRQSRREDSPRPYGLKQSTPMDLNESFRVLARLRETSQHYNELGMKDAPRYSVDSHDTLKSRQKLKELPRLSLDSRERATRNSSVDPKSSKLSESFSESCSSSSKKRPPSVVAKLMGLETLPGSPLGRDIHQFGLNKTNISDQNDDPFSRSLREKNLNRAIRFSPSSPRSLGKDPASPRWRNSDFVMKPLSNTRFPVEPAPWKHADRNRVLQKQASMPVKAKPYEAPNFPPTVYSEMERRLNDLEFKHSGKDLRALKQILESMQSKGFLDTEKQQQSTNFAVQRDYERENSATSNHAMSSRTRVQSSSSNQVYQSPIVIMKPAKLVEKAGIPASSLIPIHSLTGIKKIRREKPDDKGTSASNSKRVTKDCSPGNRRAESCTSSFDKKSDSRNVRSSSKKPQQVSKESASKSSGSVSPRLQQKKLEYDKRSRPPTPPDSSKSRKPSNQQLVESTSPGGRRRPKGQKSLQQVDDQLSQASNESRTSSHGICTQSETEASACVEKSTEADGGKSPSVIEAAKAVVSNLMQNKSSPRFSEDGLSANLSLVALEHPSPISVLDASTYRETEPSPVKTQADHVIGNVAHDFGDENCEDQWNPAYSFSETTSSFSPEINRKKLQNVEHLVQKLRRLNSSHDEASQDYIASLCENADPTTDHRYISEILLASGLLLRDLGSGLTTFQLHPSGHPINPELFFVLEQTKGSSTTHLLHKEESKVLKNEKLNRKLVFDLVNEILVEKLASVEATTNPLMKSYAKVTKKAVSAQQLLKELCSAIETQQKQATKRSENFLLEEEDDFLKSILAEDVTIRSGNWADFSGEMSGLVLDVERLVFKDLVNEIVHAETSRLQAKSGRRRTLFADQ

SEQ ID NO: 30476 - protein, 1006 aa, Arabidopsis thaliana
  misc_feature (1)..(1006): Ceres Seq. ID no. 4961168
MNGIFQIFDRHHVLTGRRKSLTLGNGNAININYERDSVDTIYQQKETDSNIGGNVKEKRRVSTESSRVSFSSSCSSSPSSSEFNRGVQPDASAYDRANFQESPTSDPEMTEGNGFSHLGLDLRDVVRDSMYREARGLLSKTPMTREEVVRQSRREDSPRPYGLKQSTPMDLNESFRVLARLRETSQHYNELGMKDAPRYSVDSHDTLKSRQKLKELPRLSLDSRERATRNSSVDPKSSKLSESFSESCSSSSKKRPPSVVAKLMGLETLPGSPLGRDIHQFGLNKTNISDQNDDPFSRSLREKNLNRAIRFSPSSPRSLGKDPASPRWRNSDFVMKPLSNTRFPVEPAPWKHADRNRVLQKQASMPVKAKPYEAPNFPPTVYSEMERRLNDLEFKHSGKDLRALKQILESMQSKGFLDTEKQQQSTNFAVQRDYERENSATSNHAMSSRTRVQSSSSNQVYQSPIVIMKPAKLVEKAGIPASSLIPIHSLTGIKKIRREKPDDKGTSASNSKRVTKDCSPGNRRAESCTSSFDKKSDSRNVRSSSKKPQQVSKESASKSSGSVSPRLQQKKLEYDKRSRPPTPPDSSKSRKPSNQQLVESTSPGGRRRPKGQKSLQQVDDQLSQASNESRTSSHGICTQSETEASACVEKSTEADGGKSPSVIEAAKAVVSNLMQNKSSPRFSEDGLSANLSLVALEHPSPISVLDASTYRETEPSPVKTQADHVIGNVAHDFGDENCEDQWNPAYSFSETTSSFSPEINRKKLQNVEHLVQKLRRLNSSHDEASQDYIASLCENADPTTDHRYISEILLASGLLLRDLGSGLTTFQLHPSGHPINPELFFVLEQTKGSSTTHLLHKEESKVLKNEKLNRKLVFDLVNEILVEKLASVEATTNPLMKSYAKVTKKAVSAQQLLKELCSAIETQQKQATKRSENFLLEEEDDFLKSILAEDVTIRSGNWADFSGEMSGLVLDVERLVFKDLVNEIVHAETSRLQAKSGRRRTLFADQ

SEQ ID NO: 30477 - protein, 898 aa, Arabidopsis thaliana
  misc_feature (1)..(898): Ceres Seq. ID no. 4961169
MTEGNGFSHLGLDLRDVVRDSMYREARGLLSKTPMTREEVVRQSRREDSPRPYGLKQSTPMDLNESFRVLARLRETSQHYNELGMKDAPRYSVDSHDTLKSRQKLKELPRLSLDSRERATRNSSVDPKSSKLSESFSESCSSSSKKRPPSVVAKLMGLETLPGSPLGRDIHQFGLNKTNISDQNDDPFSRSLREKNLNRAIRFSPSSPRSLGKDPASPRWRNSDFVMKPLSNTRFPVEPAPWKHADRNRVLQKQASMPVKAKPYEAPNFPPTVYSEMERRLNDLEFKHSGKDLRALKQILESMQSKGFLDTEKQQQSTNFAVQRDYERENSATSNHAMSSRTRVQSSSSNQVYQSPIVIMKPAKLVEKAGIPASSLIPIHSLTGIKKIRREKPDDKGTSASNSKRVTKDCSPGNRRAESCTSSFDKKSDSRNVRSSSKKPQQVSKESASKSSGSVSPRLQQKKLEYDKRSRPPTPPDSSKSRKPSNQQLVESTSPGGRRRPKGQKSLQQVDDQLSQASNESRTSSHGICTQSETEASACVEKSTEADGGKSPSVIEAAKAVVSNLMQNKSSPRFSEDGLSANLSLVALEHPSPISVLDASTYRETEPSPVKTQADHVIGNVAHDFGDENCEDQWNPAYSFSETTSSFSPEINRKKLQNVEHLVQKLRRLNSSHDEASQDYIASLCENADPTTDHRYISEILLASGLLLRDLGSGLTTFQLHPSGHPINPELFFVLEQTKGSSTTHLLHKEESKVLKNEKLNRKLVFDLVNEILVEKLASVEATTNPLMKSYAKVTKKAVSAQQLLKELCSAIETQQKQATKRSENFLLEEEDDFLKSILAEDVTIRSGNWADFSGEMSGLVLDVERLVFKDLVNEIVHAETSRLQAKSGRRRTLFADQ

SEQ ID NO: 30478 - DNA, 2073 bp, Arabidopsis thaliana
  misc_feature (1)..(2073): Ceres Seq. ID no. 4961339
atggctcatgagcagcaacacctccaaatagtaattcttcaagctcttgtaacagaacctttggaggaatctcaatcccgttcccatttggaatcggcgggaaggattgctatctcaatagttggtacgaggttgtctgtaacagcaccacttccgggtcctgcaaaactgatcaacagggaagtggtgaacatatctcttccaaaatctgacttcttcagcccttacggagtagttcacatcaaaggtcctgtgacttcgttgggttgttctagtaatattagtcaaggacttcaaaaaacactaccagatttgaacatcacaggcaggggtagtccatattttctaacagatgagaaccgccttgtggcggttggttgtggtacgaaggcgttaatgaccgatatagaatcggagatcttaggttgtgaatcaagctgcaaagacacaaagagtaatgaagtaggtaactcgctttgtaacggttacaaatgttgccaagcgaggttacccgtagagcgtccgcaagcagtaggtgtcaacatagagagcaataacgatacaagaggagaagggtgcaaagctgcgttcttgacaagtatgaagtatttcccgtcaaatatcaccaaaccagaatggttccaggccgatggctacgctgtagtagaactaggatggtattttgatacttcagattctcgctttaggaaccctttgggttgcacaaacttgacccgttctagtggctcttacttcttaaccgacatttgcctttgccgttacggttacttttccagaatgagttatagaagctgttattgcggcagtggctacagaggaaacccatacatacgaggtggatgcatcgacattgatgaatgcgaagtacccaacaagtgtggagaagacacttgtgtgaacatggctggaaggtacagttgcgtgccaaagataaccaagcctgccaaactcgctcatgtgcttcgagggatttttgggttatacaaatttatcagaaagcgaaggcggatcatccgtagcatgaagttcttcaaacgtaatggaggcctattgttgaaacaacagttaacaacaaaggacggcagtgtcgagatgtcaaaaatattcagctcgagagagttggagaaagccactgataacttcagcatagatagagtgcttgggcaaggcggtcaaggcactgtgtacaaaagaatgcttgtagatgggagtattgttgcggttaaaagatccaaagttgtggatgaagacaaaatggaagagtttatcaatgagattgttcttctgtcacaaatcaatcaccgcaacattgtgaaactcttgggatgttgcttggagacagaagttccaatcttggtgtacgaatatattcccaatggagatctgttcaagcggcttcatgatgaatatgatgattacatgatgacttgggaagtgcgacttcgcatagccgtagagatagcaggagctctttcgtacatgcactcagctgcatcttttccaatattccatagagatatcaaaactaccaatatactgttggatgagaaatacagagcaaaaatatctgatttcggaacttcaagatcggtagcgactgatcaaactcacttaacaacattagttgcaggaacttttgggtacatggatccagagtacttcctgtcgagccaatacactcacaaaagcgatgtatatagtttcggtgttgtgttggtggagctcataacgggagaaaaaccaatgtcacgtgtccggtctgaagaaggcataggtttggcaacttatttcctcgaggcaatgaaagagaacagagctgttgacataattgatattaggatcaaagacgaaagcaagcaagtaatggcggtagcaaaactcgccagaagatgtcttaatcgaaaagggaataagcggccaaacatgagagaggtttcaataaagctagagaggatccgttcatcacccaaagatttagatgtccataccgaaaacgaagaagaagaagaagaggatcaacttatggaaatcaatagaatatatgattcttga

SEQ ID NO: 30479 - protein, 690 aa, Arabidopsis thaliana
  misc_feature (1)..(690): Ceres Seq. ID no. 4961340
MAHEQQHLQIVILQALVTEPLEESQSRSHLESAGRIAISIVGTRLSVTAPLPGPAKLINREVVNISLPKSDFFSPYGVVHIKGPVTSLGCSSNISQGLQKTLPDLNITGRGSPYFLTDENRLVAVGCGTKALMTDIESEILGCESSCKDTKSNEVGNSLCNGYKCCQARLPVERPQAVGVNIESNNDTRGEGCKAAFLTSMKYFPSNITKPEWFQADGYAVVELGWYFDTSDSRFRNPLGCTNLTRSSGSYFLTDICLCRYGYFSRMSYRSCYCGSGYRGNPYIRGGCIDIDECEVPNKCGEDTCVNMAGRYSCVPKITKPAKLAHVLRGIFGLYKFIRKRRRIIRSMKFFKRNGGLLLKQQLTTKDGSVEMSKIFSSRELEKATDNFSIDRVLGQGGQGTVYKRMLVDGSIVAVKRSKVVDEDKMEEFINEIVLLSQINHRNIVKLLGCCLETEVPILVYEYIPNGDLFKRLHDEYDDYMMTWEVRLRIAVEIAGALSYMHSAASFPIFHRDIKTTNILLDEKYRAKISDFGTSRSVATDQTHLTTLVAGTFGYMDPEYFLSSQYTHKSDVYSFGVVLVELITGEKPMSRVRSEEGIGLATYFLEAMKENRAVDIIDIRIKDESKQVMAVAKLARRCLNRKGNKRPNMREVSIKLERIRSSPKDLDVHTENEEEEEEDQLMEINRIYDS

SEQ ID NO: 30480 - protein, 558 aa, Arabidopsis thaliana
  misc_feature (1)..(558): Ceres Seq. ID no. 4961341
MTDIESEILGCESSCKDTKSNEVGNSLCNGYKCCQARLPVERPQAVGVNIESNNDTRGEGCKAAFLTSMKYFPSNITKPEWFQADGYAVVELGWYFDTSDSRFRNPLGCTNLTRSSGSYFLTDICLCRYGYFSRMSYRSCYCGSGYRGNPYIRGGCIDIDECEVPNKCGEDTCVNMAGRYSCVPKITKPAKLAHVLRGIFGLYKFIRKRRRIIRSMKFFKRNGGLLLKQQLTTKDGSVEMSKIFSSRELEKATDNFSIDRVLGQGGQGTVYKRMLVDGSIVAVKRSKVVDEDKMEEFINEIVLLSQINHRNIVKLLGCCLETEVPILVYEYIPNGDLFKRLHDEYDDYMMTWEVRLRIAVEIAGALSYMHSAASFPIFHRDIKTTNILLDEKYRAKISDFGTSRSVATDQTHLTTLVAGTFGYMDPEYFLSSQYTHKSDVYSFGVVLVELITGEKPMSRVRSEEGIGLATYFLEAMKENRAVDIIDIRIKDESKQVMAVAKLARRCLNRKGNKRPNMREVSIKLERIRSSPKDLDVHTENEEEEEEDQLMEINRIYDS

SEQ ID NO: 30481 - protein, 490 aa, Arabidopsis thaliana
  misc_feature (1)..(490): Ceres Seq. ID no. 4961342
MKYFPSNITKPEWFQADGYAVVELGWYFDTSDSRFRNPLGCTNLTRSSGSYFLTDICLCRYGYFSRMSYRSCYCGSGYRGNPYIRGGCIDIDECEVPNKCGEDTCVNMAGRYSCVPKITKPAKLAHVLRGIFGLYKFIRKRRRIIRSMKFFKRNGGLLLKQQLTTKDGSVEMSKIFSSRELEKATDNFSIDRVLGQGGQGTVYKRMLVDGSIVAVKRSKVVDEDKMEEFINEIVLLSQINHRNIVKLLGCCLETEVPILVYEYIPNGDLFKRLHDEYDDYMMTWEVRLRIAVEIAGALSYMHSAASFPIFHRDIKTTNILLDEKYRAKISDFGTSRSVATDQTHLTTLVAGTFGYMDPEYFLSSQYTHKSDVYSFGVVLVELITGEKPMSRVRSEEGIGLATYFLEAMKENRAVDIIDIRIKDESKQVMAVAKLARRCLNRKGNKRPNMREVSIKLERIRSSPKDLDVHTENEEEEEEDQLMEINRIYDS

SEQ ID NO: 30482 - DNA, 2082 bp, Arabidopsis thaliana
  misc_feature (1)..(2082): Ceres Seq. ID no. 4961412
atgacgcagaagctcgtacgccttgtgatcgtctctctggctattactgtcactttacttcaagcaaaaaccgataaccaagaagtctccgcgttgaacgtaatgttcacgagcttaaattcgccgtcgaaactcaaaggttggaaagctaacggaggtgatccctgcgaagattcttgggaaggcgtcaaatgcaaaggctcttcggtcactgaattacagttatcaggctttgagctaggtggatctcgcggttatctactaagcaacctcaaatctctcacaacttttgatctcagcaaaaacaatctcaaaggaaacataccttatcaactcccacccaacattgccaatctagacttttctgaaaacgaactcgatggaaacgtgccctactcgttatctcaaatgaaaaatctccaaagcattaatcttggacaaaacaagctcaatggagaactaccagatatgtttcagaaactgtccaaactcgaaactctggacttttcgttgaataaactctctgggaaattacctcagagttttgctaatctcacaagcctcaaaaaactacacttgcaggataatcgattcacaggcgacataaacgttctcaggaaccttgccatcgatgacttgaacgtcgaagacaaccagtttgaaggatggatacctaatgagcttaaggacatagacagtttactgactggaggtaacgactggtcaactgaaactgctccaccaccaccaccgggtgttaaatatggccgaaaatcttcgggttcgaaagacggaggaggtataaccgccggaactggaatggtgatcgctggagcatgtttaggcgttcttgtgttgatcattgttttaattgcgctcgtttccaagaaaaaatcatctctctcacctcatttcatcgacgaagataacagtcatcacaccccaaagttcaaatctctcacctcgcatggatctgcgcaagagcttcgtgttgatttcggcaacgattacaaaggtatacgacacatttcaacctatcttggactaaaacattatgtttcgtcgcgtgtgatgtctttcactgataccgaatttgcgaacaagctcaatgcaaaacgaaccacttcaactcgttccgctgtggaattcgagctctctgatttgcaaagcgcaacagccaatttctcacctggaaatctactaggggaaggctcaatcggacgtgtttacagagccaaatattccgacggacgtactttggcggttaagaagatcgattcaacgttgtttgattcgggtaaatcagaaggaataacgccgattgtaatgagcctctcaaagattaggcatcaaaatatagcagagctcgtaggctattgctcagagcaaggtcacaacatgttagtctacgaatacttcaggaatggctcactccatgagttccttcatttgtcagattgcttcagtaaacccttgacttggaacacaagagtcagaatcgccttgggaaccgctcgagccgttgagtacctgcacgaggcatgttcaccttctgtgatgcataagaatatcaagtcttctaacattttgctagacgcagatctcaaccctcgtctctcagattacggcctctcaaaattctaccttgtgagcattaaaacgagtcaaaatctaggagaaggatacaatgcaccagaagccagggacccttctgcttatacaccaaagagtgacgtctacagctttggcgtcgtcatgttagagcttctcaccggtcgagttccatttgacgggtcaaagccaaggccggagagatcgttggtacggtgggcgacaccacaacttcacgacatagatgcattgtcgaatatagcggatccagctctgcacggactttacccaccaaaatcattgtcaagattcgccgacattatcgcattatgtgttcaggtggaaccggagttccgaccaccgatgtcagaagttgtggaggcgcttgtacggatggttcaacggtcaagtatgaagcttaaagatgatctttcatcgtcttatcgagcccacgacgattatgattactag

SEQ ID NO: 30483 - protein, 693 aa, Arabidopsis thaliana
  misc_feature (1)..(693): Ceres Seq. ID no. 4961413
MTQKLVRLVIVSLAITVTLLQAKTDNQEVSALNVMFTSLNSPSKLKGWKANGGDPCEDSWEGVKCKGSSVTELQLSGFELGGSRGYLLSNLKSLTTFDLSKNNLKGNIPYQLPPNIANLDFSENELDGNVPYSLSQMKNLQSINLGQNKLNGELPDMFQKLSKLETLDFSLNKLSGKLPQSFANLTSLKKLHLQDNRFTGDINVLRNLAIDDLNVEDNQFEGWIPNELKDIDSLLTGGNDWSTETAPPPPPGVKYGRKSSGSKDGGGITAGTGMVIAGACLGVLVLIIVLIALVSKKKSSLSPHFIDEDNSHHTPKFKSLTSHGSAQELRVDFGNDYKGIRHISTYLGLKHYVSSRVMSFTDTEFANKLNAKRTTSTRSAVEFELSDLQSATANFSPGNLLGEGSIGRVYRAKYSDGRTLAVKKIDSTLFDSGKSEGITPIVMSLSKIRHQNIAELVGYCSEQGHNMLVYEYFRNGSLHEFLHLSDCFSKPLTWNTRVRIALGTARAVEYLHEACSPSVMHKNIKSSNILLDADLNPRLSDYGLSKFYLVSIKTSQNLGEGYNAPEARDPSAYTPKSDVYSFGVVMLELLTGRVPFDGSKPRPERSLVRWATPQLHDIDALSNIADPALHGLYPPKSLSRFADIIALCVQVEPEFRPPMSEVVEALVRMVQRSSMKLKDDLSSSYRAHDDYDY

SEQ ID NO: 30484 - protein, 659 aa, Arabidopsis thaliana
  misc_feature (1)..(659): Ceres Seq. ID no. 4961414
MFTSLNSPSKLKGWKANGGDPCEDSWEGVKCKGSSVTELQLSGFELGGSRGYLLSNLKSLTTFDLSKNNLKGNIPYQLPPNIANLDFSENELDGNVPYSLSQMKNLQSINLGQNKLNGELPDMFQKLSKLETLDFSLNKLSGKLPQSFANLTSLKKLHLQDNRFTGDINVLRNLAIDDLNVEDNQFEGWIPNELKDIDSLLTGGNDWSTETAPPPPPGVKYGRKSSGSKDGGGITAGTGMVIAGACLGVLVLIIVLIALVSKKKSSLSPHFIDEDNSHHTPKFKSLTSHGSAQELRVDFGNDYKGIRHISTYLGLKHYVSSRVMSFTDTEFANKLNAKRTTSTRSAVEFELSDLQSATANFSPGNLLGEGSIGRVYRAKYSDGRTLAVKKIDSTLFDSGKSEGITPIVMSLSKIRHQNIAELVGYCSEQGHNMLVYEYFRNGSLHEFLHLSDCFSKPLTWNTRVRIALGTARAVEYLHEACSPSVMHKNIKSSNILLDADLNPRLSDYGLSKFYLVSIKTSQNLGEGYNAPEARDPSAYTPKSDVYSFGVVMLELLTGRVPFDGSKPRPERSLVRWATPQLHDIDALSNIADPALHGLYPPKSLSRFADIIALCVQVEPEFRPPMSEVVEALVRMVQRSSMKLKDDLSSSYRAHDDYDY

SEQ ID NO: 30485 - protein, 557 aa, Arabidopsis thaliana
  misc_feature (1)..(557): Ceres Seq. ID no. 4961415
MKNLQSINLGQNKLNGELPDMFQKLSKLETLDFSLNKLSGKLPQSFANLTSLKKLHLQDNRFTGDINVLRNLAIDDLNVEDNQFEGWIPNELKDIDSLLTGGNDWSTETAPPPPPGVKYGRKSSGSKDGGGITAGTGMVIAGACLGVLVLIIVLIALVSKKKSSLSPHFIDEDNSHHTPKFKSLTSHGSAQELRVDFGNDYKGIRHISTYLGLKHYVSSRVMSFTDTEFANKLNAKRTTSTRSAVEFELSDLQSATANFSPGNLLGEGSIGRVYRAKYSDGRTLAVKKIDSTLFDSGKSEGITPIVMSLSKIRHQNIAELVGYCSEQGHNMLVYEYFRNGSLHEFLHLSDCFSKPLTWNTRVRIALGTARAVEYLHEACSPSVMHKNIKSSNILLDADLNPRLSDYGLSKFYLVSIKTSQNLGEGYNAPEARDPSAYTPKSDVYSFGVVMLELLTGRVPFDGSKPRPERSLVRWATPQLHDIDALSNIADPALHGLYPPKSLSRFADIIALCVQVEPEFRPPMSEVVEALVRMVQRSSMKLKDDLSSSYRAHDDYDY

SEQ ID NO: 30486 - DNA, 441 bp, Arabidopsis thaliana
  misc_feature (1)..(441): Ceres Seq. ID no. 4961446
atgggagatgtagttttgttcatagatgaaacatatttgaaatcgagttttaatcgctgtagaatctgtcacgaagaagaagctgagagctactttgaagctccttgttcttgttcaggaaccatcaagttcgctcacagagattgcatacaacgatggtgtgatgagaaaggaaacacaatttgtgaaatttgtctccagttttcggttattttgttgataaagcatgcatttgatgcggtttatggaactgaagagtatccctatacaatattcacggctataggcatactattaccaatgctcgttatcattcgaaccatcacagctattcaaaggagtctccgatatcaaattctcgaatcagaagaagatacattgagctctgaagaagaagatcatggtttggaggaggaagagcaacaacaacatatagcttga

SEQ ID NO: 30487 - protein, 146 aa, Arabidopsis thaliana
  misc_feature (1)..(146): Ceres Seq. ID no. 4961447
MGDVVLFIDETYLKSSFNRCRICHEEEAESYFEAPCSCSGTIKFAHRDCIQRWCDEKGNTICEICLQFSVILLIKHAFDAVYGTEEYPYTIFTAIGILLPMLVIIRTITAIQRSLRYQILESEEDTLSSEEEDHGLEEEEQQQHIA

SEQ ID NO: 30488 - DNA, 897 bp, Arabidopsis thaliana
  misc_feature (1)..(897): Ceres Seq. ID no. 4961610
atgagtttgcctccaggattcaggtttcatcccactgatgaagaactggtggcttactatcttgataggaaggtcaacggccaagccattgagctcgagatcatcccagaagttgatctttataaatgcgagccatgggacttgcctgaaaagtcatttttgccgggaaacgacatggaatggtacttttacagcacaagggataagaagtatccaaatggctctaggacgaaccgtgcgacccgagcgggttactggaaggccacggggaaagatcgtacagtagaatcaaagaagatgaagatgggaatgaagaagacactggtttattatagaggaagggctcctcatggccttcgtactaattgggtcatgcatgaatatcgtctcacgcacgctccttcctcctccttgaaggagtcgtatgcattgtgccgagtgtttaagaagaacatacaaattccaaagagaaaaggggaagaagaagaagcagaagaagagagcactagtgtaggaaaagaagaggaagaagaaaaggagaagaagtggagaaaatgtgatggtaattatattgaagacgagagcttgaaaagagcatccgcggagacatcttcatcagagctaactcaaggggtccttttagacgaagcaaacagctcatccatatttgctcttcatttctcatcttctcttctggacgatcatgatcatcttttctcaaactattctcatcagcttccatatcatcctcctcttcaactccaagatttccctcaactttctatgaacgaagcagagattatgtcaatccaacaagactttcaatgcagagactctatgaacgggacacttgacgaaatcttctcttcttccgccactttccccgcttccctttga

SEQ ID NO: 30489 - protein, 298 aa, Arabidopsis thaliana
  misc_feature (1)..(298): Ceres Seq. ID no. 4961611
MSLPPGFRFHPTDEELVAYYLDRKVNGQAIELEIIPEVDLYKCEPWDLPEKSFLPGNDMEWYFYSTRDKKYPNGSRTNRATRAGYWKATGKDRTVESKKMKMGMKKTLVYYRGRAPHGLRTNWVMHEYRLTHAPSSSLKESYALCRVFKKNIQIPKRKGEEEEAEEESTSVGKEEEEEKEKKWRKCDGNYIEDESLKRASAETSSSELTQGVLLDEANSSSIFALHFSSSLLDDHDHLFSNYSHQLPYHPPLQLQDFPQLSMNEAEIMSIQQDFQCRDSMNGTLDEIFSSSATFPASL

SEQ ID NO: 30490 - protein, 240 aa, Arabidopsis thaliana
  misc_feature (1)..(240): Ceres Seq. ID no. 4961612
MEWYFYSTRDKKYPNGSRTNRATRAGYWKATGKDRTVESKKMKMGMKKTLVYYRGRAPHGLRTNWVMHEYRLTHAPSSSLKESYALCRVFKKNIQIPKRKGEEEEAEEESTSVGKEEEEEKEKKWRKCDGNYIEDESLKRASAETSSSELTQGVLLDEANSSSIFALHFSSSLLDDHDHLFSNYSHQLPYHPPLQLQDFPQLSMNEAEIMSIQQDFQCRDSMNGTLDEIFSSSATFPASL

SEQ ID NO: 30491 - protein, 199 aa, Arabidopsis thaliana
  misc_feature (1)..(199): Ceres Seq. ID no. 4961613
MKMGMKKTLVYYRGRAPHGLRTNWVMHEYRLTHAPSSSLKESYALCRVFKKNIQIPKRKGEEEEAEEESTSVGKEEEEEKEKKWRKCDGNYIEDESLKRASAETSSSELTQGVLLDEANSSSIFALHFSSSLLDDHDHLFSNYSHQLPYHPPLQLQDFPQLSMNEAEIMSIQQDFQCRDSMNGTLDEIFSSSATFPASL

SEQ ID NO: 30492 - DNA, 789 bp, Arabidopsis thaliana
  misc_feature (1)..(789): Ceres Seq. ID no. 4961622
atgtcaggactcgatatctatcctcacgatccttcttcttcttcttcgaccagctctatcgatctatccaatgaagctttcttcagcaccggtggtctgtttctcgaaccaccaggcgtttcctcttccttcttcgactctatctcctccaaatgctccgactcagagccactgcatttccccggttactggagaaacaaaacccgtctccgctccggtaagaactttatgttcctgtccgtgagcttgagtaaagacagatctgagcagcaatgtaagaaggctttggcgcaaaacgacgaaattcccggcaaggataatcgaaaacgaagtgttatcggtggcgtgaggagacgcgggaccatgaacacaaggaagcatctctgggctggtgctgtagctgccatggtttcaaaaacattcttagctccacttgagagactaaagcttgaatatacagttcgtggtgaacagaggaacttgttggtggttgctaagtcaattgcaactacacagggcttgactggattctggaaaggtaatttgctcaatgttcttcgaactgctcctttcaaagccgtcaatttttgtgcctatgatacctatagaaagcaattgcttaaaatcgctgggaatcaagaagcaaccaactttgaaagattcgttgctggtgccgctgctgggattactgctactgtgctctgcttgccactcgacactgtattgccttcggcttcaataagttactttgtctacgagtgtatgaagatagtacttaaagtagaataa

SEQ ID NO: 30493 - protein, 262 aa, Arabidopsis thaliana
  misc_feature (1)..(262): Ceres Seq. ID no. 4961623
MSGLDIYPHDPSSSSSTSSIDLSNEAFFSTGGLFLEPPGVSSSFFDSISSKCSDSEPLHFPGYWRNKTRLRSGKNFMFLSVSLSKDRSEQQCKKALAQNDEIPGKDNRKRSVIGGVRRRGTMNTRKHLWAGAVAAMVSKTFLAPLERLKLEYTVRGEQRNLLVVAKSIATTQGLTGFWKGNLLNVLRTAPFKAVNFCAYDTYRKQLLKIAGNQEATNFERFVAGAAAGITATVLCLPLDTVLPSASISYFVYECMKIVLKVE

SEQ ID NO: 30494 - protein, 186 aa, Arabidopsis thaliana
  misc_feature (1)..(186): Ceres Seq. ID no. 4961624
MFLSVSLSKDRSEQQCKKALAQNDEIPGKDNRKRSVIGGVRRRGTMNTRKHLWAGAVAAMVSKTFLAPLERLKLEYTVRGEQRNLLVVAKSIATTQGLTGFWKGNLLNVLRTAPFKAVNFCAYDTYRKQLLKIAGNQEATNFERFVAGAAAGITATVLCLPLDTVLPSASISYFVYECMKIVLKVE

SEQ ID NO: 30495 - protein, 141 aa, Arabidopsis thaliana
  misc_feature (1)..(141): Ceres Seq. ID no. 4961625
MNTRKHLWAGAVAAMVSKTFLAPLERLKLEYTVRGEQRNLLVVAKSIATTQGLTGFWKGNLLNVLRTAPFKAVNFCAYDTYRKQLLKIAGNQEATNFERFVAGAAAGITATVLCLPLDTVLPSASISYFVYECMKIVLKVE

SEQ ID NO: 30496 - DNA, 2736 bp, Arabidopsis thaliana
  misc_feature (1)..(2736): Ceres Seq. ID no. 4961715
atggattgcataaagagtattggtagatccgctttcgttgccatcgcgccggaatctccgttcatagcagccggaacaatggccggagcagtagatctttcgtttagttcatccgccaatctcgagatctttgaactcgattttcagtccaacgatcgtgagctaaaactagtaggtcaatgccaaagttccgagcggtttaatcgactcgcttggggaagttatggctctggatccgatggtctcatagccggtggtctagttgacgggaacatcggtttatggaatccaattagttctgagtctggtgaaattgcgcacgttagagatttgtcaaaacacaaaggacctgttcgtggtcttgaatttaatgttaagtctccaaatcaacttgcttctggggctgatgatggtacagtttgtatttgggatttagcaaatccttcaaagccttctcattatctaaagggtactggttcttatatgcaaagtgaaatctcttctttatcatggaataaagggtttcaacatgttttagcatctacctcacacaacgggactacagtgatatgggatgtgaataacgagaagattataacagacttgaaaactaccgttaggtgctcagttttgcaatgggatcctgatcattttaatcagattttggttgcttcagatgaagatagttcaccgaatgtgaagagtggtgatacttgttatacaacaggtgtgattgcaatggagtggtgtccaagtgacagcttgtatctacttacctgtgggaaagacaaccgaactatttgttggaacacaaagacaggaaagattgtggctgagttacctactggtcaaaactggaattttgatgttcattggtatccaaagatgcctggagttatatcagcatcttcagttgatgggaaaattggcatctataaccttgaggtagctctttgcagtttcgttttggtctttctgcatagcttggccacagaaaaaagtttggtgaatcgaatttctaaatttgaagctgcattagaaaatggagagaagacttcccttaggggtttatgcgagaagaaaacagaagaggccgaatctgaggaagagaaggaaacatggggactgctgaaaattatgcttgaagaagatgggaacgcaaagacgaagttgcgtagccatcttggctttagtttaccatctgaggaaaatgatcaaactgctaatgagcctcatgctacatgttcttctacaaacgtggaagaaactcagaaagtgccagaaccagaaggagaagaagaagagagctctgatccaacatttgatgatgccatccaacgttcattgattgtgggagattacaaggaagcagtggctcagtgtttttctgcaaataagatggctgatgctttagttattgctcatgttggtggtacagaattgtgggagagtactcgtgataaatatataaggatgagcaatgctccttacatgaaggttgtttctgcaatgatgaacaatgatctaatgacctaccttcatacaagacaacctaaatcctggaaagaaactcttgctctcatctgcacttttgcagaaggagatgaatggataagcctctgcgatgctcttgcctcaaatttgatggctgctggttttactttggctgcaactctgtgttacatttgcgcaggcaatgtcgacaaaacagtagacatttggtcaatgagccttgaaaaacaaagtgctgggaaatcttatgctgagtgtgttcaagatcttatggagaaaactcttgtccttgctttgacaacttgcaacaagagagtcagtgcgtctctacgtaaactctttgaaagttatgctgagatattggctagtcaaggacttattgcaacagctatgaagttcttaaaacttctggagtctggtgatttctcacctgaactttcaatcttgcgtgatcggatttctctgtatgcagaacctgaagctgctaacacttctgcttcaacaaacactcagcctaaaatttccaatccatatcaagagaaatcttttactccagctccattaagcaatgctcagccatcaagaagtattactttttttcctttgaatcctcctcgagaactaaagaacgcggaccaatatcagcaaccaaccatggattatcattcatttaatcgatccgctggcccagcttacaatgctccacccggtcctggttcatatcgatccatccattcacaagttggtccatatataaactccaagattccccaaactgttgctcctccagtccgacctatgactccaacacaccaggtagcggtgcaaccagaacctgtagctccaccaccaactgttcagactgcagatacttccaatgtaccagcccaccagaaacctattgtggcttcattgacaaggctatttaaagagacatttgaaccattaagaggttattcaagagatactcctgccaagaagcgtgaggcagaagataattgctcaagaaagctaggagctctgttttcaaaactaaataatggggacatctcgaagaacgctgctgaaaaactcactcagctctgtcaagctctggacaaacgtgattttggtgcagcgttaaaaatacaggggcttatgacaagcaccgaatgggatgagtgcagttcttggcttccaacacttaagaaaatgatcgtcacgggaaggcaaaatgtgcggtga

SEQ ID NO: 30497 - protein, 911 aa, Arabidopsis thaliana
  misc_feature (1)..(911): Ceres Seq. ID no. 4961716
MDCIKSIGRSAFVAIAPESPFIAAGTMAGAVDLSFSSSANLEIFELDFQSNDRELKLVGQCQSSERFNRLAWGSYGSGSDGLIAGGLVDGNIGLWNPISSESGEIAHVRDLSKHKGPVRGLEFNVKSPNQLASGADDGTVCIWDLANPSKPSHYLKGTGSYMQSEISSLSWNKGFQHVLASTSHNGTTVIWDVNNEKIITDLKTTVRCSVLQWDPDHFNQILVASDEDSSPNVKSGDTCYTTGVIAMEWCPSDSLYLLTCGKDNRTICWNTKTGKIVAELPTGQNWNFDVHWYPKMPGVISASSVDGKIGIYNLEVALCSFVLVFLHSLATEKSLVNRISKFEAALENGEKTSLRGLCEKKTEEAESEEEKETWGLLKIMLEEDGNAKTKLRSHLGFSLPSEENDQTANEPHATCSSTNVEETQKVPEPEGEEEESSDPTFDDAIQRSLIVGDYKEAVAQCFSANKMADALVIAHVGGTELWESTRDKYIRMSNAPYMKVVSAMMNNDLMTYLHTRQPKSWKETLALICTFAEGDEWISLCDALASNLMAAGFTLAATLCYICAGNVDKTVDIWSMSLEKQSAGKSYAECVQDLMEKTLVLALTTCNKRVSASLRKLFESYAEILASQGLIATAMKFLKLLESGDFSPELSILRDRISLYAEPEAANTSASTNTQPKISNPYQEKSFTPAPLSNAQPSRSITFFPLNPPRELKNADQYQQPTMDYHSFNRSAGPAYNAPPGPGSYRSIHSQVGPYINSKIPQTVAPPVRPMTPTHQVAVQPEPVAPPPTVQTADTSNVPAHQKPIVASLTRLFKETFEPLRGYSRDTPAKKREAEDNCSRKLGALFSKLNNGDISKNAAEKLTQLCQALDKRDFGAALKIQGLMTSTEWDECSSWLPTLKKMIVTGRQNVR

SEQ ID NO: 30498 - protein, 885 aa, Arabidopsis thaliana
  misc_feature (1)..(885): Ceres Seq. ID no. 4961717
MAGAVDLSFSSSANLEIFELDFQSNDRELKLVGQCQSSERFNRLAWGSYGSGSDGLIAGGLVDGNIGLWNPISSESGEIAHVRDLSKHKGPVRGLEFNVKSPNQLASGADDGTVCIWDLANPSKPSHYLKGTGSYMQSEISSLSWNKGFQHVLASTSHNGTTVIWDVNNEKIITDLKTTVRCSVLQWDPDHFNQILVASDEDSSPNVKSGDTCYTTGVIAMEWCPSDSLYLLTCGKDNRTICWNTKTGKIVAELPTGQNWNFDVHWYPKMPGVISASSVDGKIGIYNLEVALCSFVLVFLHSLATEKSLVNRISKFEAALENGEKTSLRGLCEKKTEEAESEEEKETWGLLKIMLEEDGNAKTKLRSHLGFSLPSEENDQTANEPHATCSSTNVEETQKVPEPEGEEEESSDPTFDDAIQRSLIVGDYKEAVAQCFSANKMADALVIAHVGGTELWESTRDKYIRMSNAPYMKVVSAMMNNDLMTYLHTRQPKSWKETLALICTFAEGDEWISLCDALASNLMAAGFTLAATLCYICAGNVDKTVDIWSMSLEKQSAGKSYAECVQDLMEKTLVLALTTCNKRVSASLRKLFESYAEILASQGLIATAMKFLKLLESGDFSPELSILRDRISLYAEPEAANTSASTNTQPKISNPYQEKSFTPAPLSNAQPSRSITFFPLNPPRELKNADQYQQPTMDYHSFNRSAGPAYNAPPGPGSYRSIHSQVGPYINSKIPQTVAPPVRPMTPTHQVAVQPEPVAPPPTVQTADTSNVPAHQKPIVASLTRLFKETFEPLRGYSRDTPAKKREAEDNCSRKLGALFSKLNNGDISKNAAEKLTQLCQALDKRDFGAALKIQGLMTSTEWDECSSWLPTLKKMIVTGRQNVR

SEQ ID NO: 30499 - protein, 750 aa, Arabidopsis thaliana
  misc_feature (1)..(750): Ceres Seq. ID no. 4961718
MQSEISSLSWNKGFQHVLASTSHNGTTVIWDVNNEKIITDLKTTVRCSVLQWDPDHFNQILVASDEDSSPNVKSGDTCYTTGVIAMEWCPSDSLYLLTCGKDNRTICWNTKTGKIVAELPTGQNWNFDVHWYPKMPGVISASSVDGKIGIYNLEVALCSFVLVFLHSLATEKSLVNRISKFEAALENGEKTSLRGLCEKKTEEAESEEEKETWGLLKIMLEEDGNAKTKLRSHLGFSLPSEENDQTANEPHATCSSTNVEETQKVPEPEGEEEESSDPTFDDAIQRSLIVGDYKEAVAQCFSANKMADALVIAHVGGTELWESTRDKYIRMSNAPYMKVVSAMMNNDLMTYLHTRQPKSWKETLALICTFAEGDEWISLCDALASNLMAAGFTLAATLCYICAGNVDKTVDIWSMSLEKQSAGKSYAECVQDLMEKTLVLALTTCNKRVSASLRKLFESYAEILASQGLIATAMKFLKLLESGDFSPELSILRDRISLYAEPEAANTSASTNTQPKISNPYQEKSFTPAPLSNAQPSRSITFFPLNPPRELKNADQYQQPTMDYHSFNRSAGPAYNAPPGPGSYRSIHSQVGPYINSKIPQTVAPPVRPMTPTHQVAVQPEPVAPPPTVQTADTSNVPAHQKPIVASLTRLFKETFEPLRGYSRDTPAKKREAEDNCSRKLGALFSKLNNGDISKNAAEKLTQLCQALDKRDFGAALKIQGLMTSTEWDECSSWLPTLKKMIVTGRQNVR

SEQ ID NO: 30500 - DNA, 588 bp, Arabidopsis thaliana
  misc_feature (1)..(588): Ceres Seq. ID no. 4961726
atgatgtgcatgaaatgcatgataattcagccagtaggtgctagttgctcaaatatttcatgtagttcatcaatgggaaaatattactgtaaaatatgcaagttgtttgacgatgatagggaaatctatcattgtccatactgcaatctctgccggctaggaaaaggactgagcatagactactttcattgcatgaaatgtaatgcttgtatgtcgcgactcatagtagaacatgtatgcagagaaaagtgcttagaagataattgtccgatttgtcatgaatacatatttacctcaaattctccggtgaaggctcttccatgcggtcacgtgatgcattcaacatgctttcaggagtacacatgttcgcattacacatgccctatttgcagcaagtcgctcggggatatgcaggtttactttagaatgttagacgcactgcttgcagaacaaaagatgccagatgaatacttaaaccaaactcaggtaatactgtgtaatgactgtggaagaaaggggaatgctccttaccattggctctatcacaagtgttcttcttgtgcctcctacaacaccagacttttctag

SEQ ID NO: 30501 - protein, 195 aa, Arabidopsis thaliana
  misc_feature (1)..(195): Ceres Seq. ID no. 4961727
MMCMKCMIIQPVGASCSNISCSSSMGKYYCKICKLFDDDREIYHCPYCNLCRLGKGLSIDYFHCMKCNACMSRLIVEHVCREKCLEDNCPICHEYIFTSNSPVKALPCGHVMHSTCFQEYTCSHYTCPICSKSLGDMQVYFRMLDALLAEQKMPDEYLNQTQVILCNDCGRKGNAPYHWLYHKCSSCASYNTRLF

SEQ ID NO: 30502 - protein, 194 aa, Arabidopsis thaliana
  misc_feature (1)..(194): Ceres Seq. ID no. 4961728
MCMKCMIIQPVGASCSNISCSSSMGKYYCKICKLFDDDREIYHCPYCNLCRLGKGLSIDYFHCMKCNACMSRLIVEHVCREKCLEDNCPICHEYIFTSNSPVKALPCGHVMHSTCFQEYTCSHYTCPICSKSLGDMQVYFRMLDALLAEQKMPDEYLNQTQVILCNDCGRKGNAPYHWLYHKCSSCASYNTRLF

SEQ ID NO: 30503 - protein, 192 aa, Arabidopsis thaliana
  misc_feature (1)..(192): Ceres Seq. ID no. 4961729
MKCMIIQPVGASCSNISCSSSMGKYYCKICKLFDDDREIYHCPYCNLCRLGKGLSIDYFHCMKCNACMSRLIVEHVCREKCLEDNCPICHEYIFTSNSPVKALPCGHVMHSTCFQEYTCSHYTCPICSKSLGDMQVYFRMLDALLAEQKMPDEYLNQTQVILCNDCGRKGNAPYHWLYHKCSSCASYNTRLF

SEQ ID NO: 30504 - DNA, 2640 bp, Arabidopsis thaliana
  misc_feature (1)..(2640): Ceres Seq. ID no. 4961900
atggagggtgaagttgctactaacggagtgattctcaagcataatggtgtaaaggatatttctttagaaacttgttggccagagaagaagaaaccggttgaggcaacgagtcttagcagtggttcatcagacatagaagaagagattagtgtggaatgtcctaagcgagtggctaatcaaagacggaaacggtctaaagctgatgagattaaaacgaaatcttcaagaaagaggaaatgtgatgatgagaacaagtgtgaagagaatgagaagaagcagaggagctctgttaaaaagagagcaactacatggaaagaagaagaagttgttgttgatgatgaaaagaaatgcgaacaacaactccaactagttccttccagcaaggcaacatctcgaagcaggagcaagaaatcagtcagtgtggatacttggttggttaacaacgagattgatgttagcgctttgagttcgcgttctgagtctgaactttcggattcttatctgaaaaccgagtactttaatgactgcagaagcatgacaaggagtttaaaggcaaatttgggagagcttgcaatttgccatcaatgctctaaaggggaaagaagatatcttttcatttgcaccttttgtgaagtgaggttgtattgttttccatgcataaagaaatggtatccccatttgtccacggatgatatccttgaaaaatgtcccttttgccgaggaacttgcaactgctgcacatgtttgcactctagtggtttaatcgagacatctaagagaaagctcgataaatacgaaagattttatcatcttcgcttcttgattgtggcgatgcttcctttcctgaaaaagttatgcaaagcacaagatcaagaaatcgaaaccgaggctaaggttcaagattcaatggcttctcaagttgatatatccgagagtctatgctcaaatgaagagcgtgtcttctgtaaccactgtgcaacatcaattgttgacttgcatcgaagctgtccaaagtgttcatatgaattgtgtctgaactgttgccaagagatccgtggaggttggctttctgaccgcccggaatgtcagctacaattcgagtacagagggacccggtatatacatggcgaagctgcagaaccgagctcttcttctgtttccgaggatgaaactaaaactccatccatcaagtggaatgctgatgaaaatggaagcatacggtgtgcgccaaaagagctaggaggttgcggggactctgtgctggagcttaagcgaatcttaccagtgacttggatgtcagatttggagcaaaaggcagaaacattcttagcctcttatagtatcaaaccgccaatgtcatattgtagatgttcttctgatatgagtagtatgaagaggaaggcagcttcgagggacggatctagtgacaattacctttattctcctgattctttggatgtcctgaagcaagaagaacttctgcatttccaagagcattggtccaaaggtgaaccagtgattgttcgaaatgctcttaacaacacagctggtttaagctgggagccaatggtgatgtggcgggctttatgtgagaatgttgattcagcaattagctctaatatgtctgatgtcaaagctatcgattgtttagctaattgtgaggtgaagataaatactctatgtttctttgaaggatatagcaaaggaagaacatatgaaaacttctggcctgagatgctgaagctgaaggattggcctccttcagacaagtttgaaaaccttttacctcgtcactgcgatgagttcatttccgcattaccatttcaagaatacagcgatcctagatcaggaattctcaacattgctacaaaacttcctgaaggacttcttaaaccagatcttggtccaaaaacttatgttgcatatgggacttcagatgagctcggtagaggagattcagtcactaagcttcactgtgatatgtcagatgctgttaatattctgatgcatactgctgaagtaacactaagtgaggagcaaaggtctgcaattgcagatttgaaacagaaacataagcaacagaatgagaaagagcttcaggagcaaaatggtttagaggaagaagaggttgtgagtgatgagattgtggtttatgatgaaacaagtggtgcactttgggacatctttaaaagagaagatgttcctaagcttgaagagtatctaaggaagcattgcatagaattcagacatacttattgctctcgtgttacaaaggtgtatcatccaatacatgatcagtcatatttcttaaccgtggagcataaaagaaaactcaaggcagaatttggtatggttacttggattgagccatggacatttgtgcaaaagctaggagaagcagtgtttattccagcaggttgtcctcatcaagttcggaatctcaagtcgtgcacaaaggtagctgttgattttgtttcccctgaaaacatcgatgagtgtctccgtttgactgatgagtttcgacaactccctaagaaccataaagccagagaagacaaacttgagataaaaaagatggtgatctatgcagttgaacaagctctgaaagaagtggagacattattgctagatcgcagctaa

SEQ ID NO: 30505 - protein, 879 aa, Arabidopsis thaliana
  misc_feature (1)..(879): Ceres Seq. ID no. 4961901
MEGEVATNGVILKHNGVKDISLETCWPEKKKPVEATSLSSGSSDIEEEISVECPKRVANQRRKRSKADEIKTKSSRKRKCDDENKCEENEKKQRSSVKKRATTWKEEEVVVDDEKKCEQQLQLVPSSKATSRSRSKKSVSVDTWLVNNEIDVSALSSRSESELSDSYLKTEYFNDCRSMTRSLKANLGELAICHQCSKGERRYLFICTFCEVRLYCFPCIKKWYPHLSTDDILEKCPFCRGTCNCCTCLHSSGLIETSKRKLDKYERFYHLRFLIVAMLPFLKKLCKAQDQEIETEAKVQDSMASQVDISESLCSNEERVFCNHCATSIVDLHRSCPKCSYELCLNCCQEIRGGWLSDRPECQLQFEYRGTRYIHGEAAEPSSSSVSEDETKTPSIKWNADENGSIRCAPKELGGCGDSVLELKRILPVTWMSDLEQKAETFLASYSIKPPMSYCRCSSDMSSMKRKAASRDGSSDNYLYSPDSLDVLKQEELLHFQEHWSKGEPVIVRNALNNTAGLSWEPMVMWRALCENVDSAISSNMSDVKAIDCLANCEVKINTLCFFEGYSKGRTYENFWPEMLKLKDWPPSDKFENLLPRHCDEFISALPFQEYSDPRSGILNIATKLPEGLLKPDLGPKTYVAYGTSDELGRGDSVTKLHCDMSDAVNILMHTAEVTLSEEQRSAIADLKQKHKQQNEKELQEQNGLEEEEVVSDEIVVYDETSGALWDIFKREDVPKLEEYLRKHCIEFRHTYCSRVTKVYHPIHDQSYFLTVEHKRKLKAEFGMVTWIEPWTFVQKLGEAVFIPAGCPHQVRNLKSCTKVAVDFVSPENIDECLRLTDEFRQLPKNHKAREDKLEIKKMVIYAVEQALKEVETLLLDRS

SEQ ID NO: 30506 - protein, 701 aa, Arabidopsis thaliana
  misc_feature (1)..(701): Ceres Seq. ID no. 4961902
MTRSLKANLGELAICHQCSKGERRYLFICTFCEVRLYCFPCIKKWYPHLSTDDILEKCPFCRGTCNCCTCLHSSGLIETSKRKLDKYERFYHLRFLIVAMLPFLKKLCKAQDQEIETEAKVQDSMASQVDISESLCSNEERVFCNHCATSIVDLHRSCPKCSYELCLNCCQEIRGGWLSDRPECQLQFEYRGTRYIHGEAAEPSSSSVSEDETKTPSIKWNADENGSIRCAPKELGGCGDSVLELKRILPVTWMSDLEQKAETFLASYSIKPPMSYCRCSSDMSSMKRKAASRDGSSDNYLYSPDSLDVLKQEELLHFQEHWSKGEPVIVRNALNNTAGLSWEPMVMWRALCENVDSAISSNMSDVKAIDCLANCEVKINTLCFFEGYSKGRTYENFWPEMLKLKDWPPSDKFENLLPRHCDEFISALPFQEYSDPRSGILNIATKLPEGLLKPDLGPKTYVAYGTSDELGRGDSVTKLHCDMSDAVNILMHTAEVTLSEEQRSAIADLKQKHKQQNEKELQEQNGLEEEEVVSDEIVVYDETSGALWDIFKREDVPKLEEYLRKHCIEFRHTYCSRVTKVYHPIHDQSYFLTVEHKRKLKAEFGMVTWIEPWTFVQKLGEAVFIPAGCPHQVRNLKSCTKVAVDFVSPENIDECLRLTDEFRQLPKNHKAREDKLEIKKMVIYAVEQALKEVETLLLDRS

SEQ ID NO: 30507 - protein, 602 aa, Arabidopsis thaliana
  misc_feature (1)..(602): Ceres Seq. ID no. 4961903
MLPFLKKLCKAQDQEIETEAKVQDSMASQVDISESLCSNEERVFCNHCATSIVDLHRSCPKCSYELCLNCCQEIRGGWLSDRPECQLQFEYRGTRYIHGEAAEPSSSSVSEDETKTPSIKWNADENGSIRCAPKELGGCGDSVLELKRILPVTWMSDLEQKAETFLASYSIKPPMSYCRCSSDMSSMKRKAASRDGSSDNYLYSPDSLDVLKQEELLHFQEHWSKGEPVIVRNALNNTAGLSWEPMVMWRALCENVDSAISSNMSDVKAIDCLANCEVKINTLCFFEGYSKGRTYENFWPEMLKLKDWPPSDKFENLLPRHCDEFISALPFQEYSDPRSGILNIATKLPEGLLKPDLGPKTYVAYGTSDELGRGDSVTKLHCDMSDAVNILMHTAEVTLSEEQRSAIADLKQKHKQQNEKELQEQNGLEEEEVVSDEIVVYDETSGALWDIFKREDVPKLEEYLRKHCIEFRHTYCSRVTKVYHPIHDQSYFLTVEHKRKLKAEFGMVTWIEPWTFVQKLGEAVFIPAGCPHQVRNLKSCTKVAVDFVSPENIDECLRLTDEFRQLPKNHKAREDKLEIKKMVIYAVEQALKEVETLLLDRS

SEQ ID NO: 30508 - DNA, 3072 bp, Arabidopsis thaliana
  misc_feature (1)..(3072): Ceres Seq. ID no. 4961940
atgtcttcaatgaaatccgtctcggctttggacaatgtagtggtgaagtcaccaaacgatcggaggttatacagagtgattgaattggagaatggattgtgtgctctgctcattcacgatccagatatttaccccgaaggctctgttccggatcaaattgatgaagatgacgaggacggtgaagaagaagatagtgacgggagctctgaagatgatgatgatgatgaagatgatgaggaagatggggaaggagatgaagaagatgaggatgaggatgaagatgaagtgaaagggaaaggggatcatcagaccaaaaaggctgctgcagctatgtgtgtttcaatgggaagcttcttggatcctccggaggcacaaggcctggctcactttcttgaacacatgctttttatgggtagcactgagttccccgatgagaatgaatatgatagttacttgtctaagcatggtggatcctctaacgcatacacagaaatggagcatacatgctatcacttcgaagtcaagagagaatttcttcaaggggccttgaaaagattctctcagttttttgttgcaccgctcatgaagactgaagctatggaacgggaagtcctggccgttgattcagaatttaaccaggccctccaaaatgatgcatgtcgcctgcaacaacttcagtgctatacatctgcaaagggtcatccttttaataggtttgcatggggtaaggataccgcagtcttaagtggtgcaatggaaaatggggttgatctacgggaatgtattgtgaaattatacaaggaatattaccatggtggactgatgaagctcgttgtcattgggggagaatctctcgacatgcttgaaagttgggttgtagaactatttggtgatgtcaaaaacggatccaaaatcaggccaactctggaggcagaaggtcctatttggaaaggcggtaagttatatcgcctagaggcggttaaagatgttcatatacttgatttgacatggactctccctcctcttcgctctgcctatgtgaagaagccggaagactacctagcacatctattaggacatgagggtagaggaagtctgcattcattcctcaaagccaagggttgggcaacctcactgtctgctggtgttggggatgatggaatcaaccgctcgtctctagcatatgtgttcggcatgtccatacatctcactgactctggtttagagaagatttatgacatcattggttacatctatcaatatctcaagttattgcgtgatgtgtcaccacaagaatggatattcaaggaactccaagatattgggaacatggacttcagatttgctgaggagcagccggcagatgattatgctgctgagctctcagagaatatgcttgcttatccagtggagcacgttatttatggtgattatgtgtaccagacatgggatccaaaattgatagaagatcttatgggttttttcacacctcagaacatgaggattgatgttgtttcgaaatccatcaagtcggaagagttccaacaagaaccttggttcggttctagttacatagaggaagatgttccattgtctttgatggaatcatggagcaatccttcagaagtagataactctttacatctcccctcgaaaaaccaattcatcccttgtgatttttcgatccgagccattaactctgatgtggatcccaaaagtcagtctcctccgagatgtataattgatgaaccgttcatgaaattctggtacaagcttgacgaaacttttaaggttcctcgtgcaaatacatacttccgcataaatttgaagggggcatatgccagtgtgaagaactgccttttgacagaattatatattaaccttctgaaagatgagcttaatgagatcatctaccaggcaacaaaacttgaaacttctttatctatgtatggtgataagctagagcttaaagtgtatggctttaatgagaaaattccagctcttctatcaaaaatcttagccatagccaaatccttcatgccaaacctggagcgatttaaggttatcaaagaaaacatggagagagggtttaggaatactaatatgaagcctttgaaccattctacatacttgagactgcaactcttgtgtaaacggatctatgacagcgatgaaaagttgtctgtactaaatgatttgtctctcgatgatctcaacagctttattcctgaactccgctctcagatatttattgaggctctatgtcatggtaatttgtccgaagacgaagcagtgaacatatcaaacattttcaaagacagtttgacggttgaaccactcccaagcaaatgtagacatggtgaacagataacatgtttccctatgggtgccaaacttgtgagagatgtcaatgtgaagaacaaatctgaaacaaactcagtagtcgagctttactatcaaatcgagcctgaagaagctcaatcaacgagaacgaaagctgtgctggatctctttcatgaaatcatagaagagccattgttcaatcagttgaggacaaaggagcagcttggttatgttgtcgagtgtggccctcgcttaacgtatcgtgtgcacggtttctgtttctgtgttcaatcttctaagtacggtccagttcatttgctggggagagttgacaatttcataaaagatatcgaagggcttctggaacaactggatgatgaatcctatgaagattaccgaagtggtatgattgctagattgctggaaaaggatccctctctcttgtccgagacaaatgacttatggagtcagattgttgacaaaaggtacatgtttgatttctcccacaaagaagcagaagaactaagaagtatacagaagaaagatgtgatcagttggtacaaaacctatttcagagaatcatcacccaaatgtcgtaggcttgcggtaagggtttggggatgcgataccaatatgaaagaaactcaaacagatcaaaaggcggtgcaggtcatcgcagacgcagtggctttcaagtcaacttctaagttttaccccagcctttgctaa

SEQ ID NO: 30509 - protein, 1023 aa, Arabidopsis thaliana
  misc_feature (1)..(1023): Ceres Seq. ID no. 4961941
MSSMKSVSALDNVVVKSPNDRRLYRVIELENGLCALLIHDPDIYPEGSVPDQIDEDDEDGEEEDSDGSSEDDDDDEDDEEDGEGDEEDEDEDEDEVKGKGDHQTKKAAAAMCVSMGSFLDPPEAQGLAHFLEHMLFMGSTEFPDENEYDSYLSKHGGSSNAYTEMEHTCYHFEVKREFLQGALKRFSQFFVAPLMKTEAMEREVLAVDSEFNQALQNDACRLQQLQCYTSAKGHPFNRFAWGKDTAVLSGAMENGVDLRECIVKLYKEYYHGGLMKLVVIGGESLDMLESWVVELFGDVKNGSKIRPTLEAEGPIWKGGKLYRLEAVKDVHILDLTWTLPPLRSAYVKKPEDYLAHLLGHEGRGSLHSFLKAKGWATSLSAGVGDDGINRSSLAYVFGMSIHLTDSGLEKIYDIIGYIYQYLKLLRDVSPQEWIFKELQDIGNMDFRFAEEQPADDYAAELSENMLAYPVEHVIYGDYVYQTWDPKLIEDLMGFFTPQNMRIDVVSKSIKSEEFQQEPWFGSSYIEEDVPLSLMESWSNPSEVDNSLHLPSKNQFIPCDFSIRAINSDVDPKSQSPPRCIIDEPFMKFWYKLDETFKVPRANTYFRINLKGAYASVKNCLLTELYINLLKDELNEIIYQATKLETSLSMYGDKLELKVYGFNEKIPALLSKILAIAKSFMPNLERFKVIKENMERGFRNTNMKPLNHSTYLRLQLLCKRIYDSDEKLSVLNDLSLDDLNSFIPELRSQIFIEALCHGNLSEDEAVNISNIFKDSLTVEPLPSKCRHGEQITCFPMGAKLVRDVNVKNKSETNSVVELYYQIEPEEAQSTRTKAVLDLFHEIIEEPLFNQLRTKEQLGYVVECGPRLTYRVHGFCFCVQSSKYGPVHLLGRVDNFIKDIEGLLEQLDDESYEDYRSGMIARLLEKDPSLLSETNDLWSQIVDKRYMFDFSHKEAEELRSIQKKDVISWYKTYFRESSPKCRRLAVRVWGCDTNMKETQTDQKAVQVIADAVAFKSTSKFYPSLC

SEQ ID NO: 30510 - protein, 1020 aa, Arabidopsis thaliana
  misc_feature (1)..(1020): Ceres Seq. ID no. 4961942
MKSVSALDNVVVKSPNDRRLYRVIELENGLCALLIHDPDIYPEGSVPDQIDEDDEDGEEEDSDGSSEDDDDDEDDEEDGEGDEEDEDEDEDEVKGKGDHQTKKAAAAMCVSMGSFLDPPEAQGLAHFLEHMLFMGSTEFPDENEYDSYLSKHGGSSNAYTEMEHTCYHFEVKREFLQGALKRFSQFFVAPLMKTEAMEREVLAVDSEFNQALQNDACRLQQLQCYTSAKGHPFNRFAWGKDTAVLSGAMENGVDLRECIVKLYKEYYHGGLMKLVVIGGESLDMLESWVVELFGDVKNGSKIRPTLEAEGPIWKGGKLYRLEAVKDVHILDLTWTLPPLRSAYVKKPEDYLAHLLGHEGRGSLHSFLKAKGWATSLSAGVGDDGINRSSLAYVFGMSIHLTDSGLEKIYDIIGYIYQYLKLLRDVSPQEWIFKELQDIGNMDFRFAEEQPADDYAAELSENMLAYPVEHVIYGDYVYQTWDPKLIEDLMGFFTPQNMRIDVVSKSIKSEEFQQEPWFGSSYIEEDVPLSLMESWSNPSEVDNSLHLPSKNQFIPCDFSIRAINSDVDPKSQSPPRCIIDEPFMKFWYKLDETFKVPRANTYFRINLKGAYASVKNCLLTELYINLLKDELNEIIYQATKLETSLSMYGDKLELKVYGFNEKIPALLSKILAIAKSFMPNLERFKVIKENMERGFRNTNMKPLNHSTYLRLQLLCKRIYDSDEKLSVLNDLSLDDLNSFIPELRSQIFIEALCHGNLSEDEAVNISNIFKDSLTVEPLPSKCRHGEQITCFPMGAKLVRDVNVKNKSETNSVVELYYQIEPEEAQSTRTKAVLDLFHEIIEEPLFNQLRTKEQLGYVVECGPRLTYRVHGFCFCVQSSKYGPVHLLGRVDNFIKDIEGLLEQLDDESYEDYRSGMIARLLEKDPSLLSETNDLWSQIVDKRYMFDFSHKEAEELRSIQKKDVISWYKTYFRESSPKCRRLAVRVWGCDTNMKETQTDQKAVQVIADAVAFKSTSKFYPSLC

SEQ ID NO: 30511 - protein, 913 aa, Arabidopsis thaliana
  misc_feature (1)..(913): Ceres Seq. ID no. 4961943
MCVSMGSFLDPPEAQGLAHFLEHMLFMGSTEFPDENEYDSYLSKHGGSSNAYTEMEHTCYHFEVKREFLQGALKRFSQFFVAPLMKTEAMEREVLAVDSEFNQALQNDACRLQQLQCYTSAKGHPFNRFAWGKDTAVLSGAMENGVDLRECIVKLYKEYYHGGLMKLVVIGGESLDMLESWVVELFGDVKNGSKIRPTLEAEGPIWKGGKLYRLEAVKDVHILDLTWTLPPLRSAYVKKPEDYLAHLLGHEGRGSLHSFLKAKGWATSLSAGVGDDGINRSSLAYVFGMSIHLTDSGLEKIYDIIGYIYQYLKLLRDVSPQEWIFKELQDIGNMDFRFAEEQPADDYAAELSENMLAYPVEHVIYGDYVYQTWDPKLIEDLMGFFTPQNMRIDVVSKSIKSEEFQQEPWFGSSYIEEDVPLSLMESWSNPSEVDNSLHLPSKNQFIPCDFSIRAINSDVDPKSQSPPRCIIDEPFMKFWYKLDETFKVPRANTYFRINLKGAYASVKNCLLTELYINLLKDELNEIIYQATKLETSLSMYGDKLELKVYGFNEKIPALLSKILAIAKSFMPNLERFKVIKENMERGFRNTNMKPLNHSTYLRLQLLCKRIYDSDEKLSVLNDLSLDDLNSFIPELRSQIFIEALCHGNLSEDEAVNISNIFKDSLTVEPLPSKCRHGEQITCFPMGAKLVRDVNVKNKSETNSVVELYYQIEPEEAQSTRTKAVLDLFHEIIEEPLFNQLRTKEQLGYVVECGPRLTYRVHGFCFCVQSSKYGPVHLLGRVDNFIKDIEGLLEQLDDESYEDYRSGMIARLLEKDPSLLSETNDLWSQIVDKRYMFDFSHKEAEELRSIQKKDVISWYKTYFRESSPKCRRLAVRVWGCDTNMKETQTDQKAVQVIADAVAFKSTSKFYPSLC

SEQ ID NO: 30512 - DNA, 1398 bp, Arabidopsis thaliana
  misc_feature (1)..(1398): Ceres Seq. ID no. 4961993
atggttgagattcagggaagattcaaaagaattgagtcggctttcaacgtagccgcggctcgtgtacatccaccgtgtgataacagtagcggaagcgatcattcgccggatctttccgatttggtcgcatcttttatagagaaagagggacaaatagtattacgtgaagaagaagaaacttcttccgacgataacaatttggaagatgtgaatgagaggttacggaagcttctagaaggtttatcctgtggcgaagagcggatgagaatactgtcagcgacgatggaggttgctggaacgttcgtcggagatattagttcttctaagcgtcacttaatggcgtttctacgtaacaagggttttgatgcaggtctttgcaagtcgagttgggaaagattcggcaaaaacaccggcggaaaatacgagtacgtcgacgttcgttgtggcggagattataataatcggtatttcgtcgagacaaaccttgccggagagtttgagatagctagaccaacgaaaaggtacctctcaatactaagccaagtgccacgcgtcttcgtgggaacttcagaggaactgaaactgctcgtgagaatcatgtgccatgagatgagacggtcgatgaagcacgtagggatccacgtgccaccgtggaggagaaacggttacatgcaagctaagtggttcggtttctataaacgaacttcgacgaccaataactacgaaatggttaatacttatgatacgactgcgtttaagggttgcaaggaagagttttgggaagctaaaggtcttaaggttatggttggtcagctttcgattgctttcaacattagtgcgctttgccggaaaggaaccgttcatccgtcgccaccgccggcgataaagaccgacgaacagtttctatctcttctccccgtagctatcctctctctcgtggcggcgctctcggtggaggatcgtgaagttcttgcttacctcatctcaaactccggcgactcaaatcgtatctctcgtctcaagaaaaacaaagaagataatcatcactctcctctctttctttgtgattgttttagttgttacacgagttactgggtcagatgggacacgtcaccgaggcgccaactcattcacgagatcatcgatgcttacgaagatagtttggagatgaagaagaaaaagaaagatcggagaaagcgatcgggaaaagcttctggacgagttaactcgataggaacgagtcgactcagtgaattgggttcgagttcagccgagtttgctggtggtgactcggagaaagatggaaattgcggcggtgaagaggcggagaaggagaaaggctccgttggaaaggttatgagtttcattggtcagagatttttgggagtttggggataa

SEQ ID NO: 30513 - protein, 465 aa, Arabidopsis thaliana
  misc_feature (1)..(465): Ceres Seq. ID no. 4961994
MVEIQGRFKRIESAFNVAAARVHPPCDNSSGSDHSPDLSDLVASFIEKEGQIVLREEEETSSDDNNLEDVNERLRKLLEGLSCGEERMRILSATMEVAGTFVGDISSSKRHLMAFLRNKGFDAGLCKSSWERFGKNTGGKYEYVDVRCGGDYNNRYFVETNLAGEFEIARPTKRYLSILSQVPRVFVGTSEELKLLVRIMCHEMRRSMKHVGIHVPPWRRNGYMQAKWFGFYKRTSTTNNYEMVNTYDTTAFKGCKEEFWEAKGLKVMVGQLSIAFNISALCRKGTVHPSPPPAIKTDEQFLSLLPVAILSLVAALSVEDREVLAYLISNSGDSNRISRLKKNKEDNHHSPLFLCDCFSCYTSYWVRWDTSPRRQLIHEIIDAYEDSLEMKKKKKDRRKRSGKASGRVNSIGTSRLSELGSSSAEFAGGDSEKDGNCGGEEAEKEKGSVGKVMSFIGQRFLGVWG

SEQ ID NO: 30514 - protein, 378 aa, Arabidopsis thaliana
  misc_feature (1)..(378): Ceres Seq. ID no. 4961995
MRILSATMEVAGTFVGDISSSKRHLMAFLRNKGFDAGLCKSSWERFGKNTGGKYEYVDVRCGGDYNNRYFVETNLAGEFEIARPTKRYLSILSQVPRVFVGTSEELKLLVRIMCHEMRRSMKHVGIHVPPWRRNGYMQAKWFGFYKRTSTTNNYEMVNTYDTTAFKGCKEEFWEAKGLKVMVGQLSIAFNISALCRKGTVHPSPPPAIKTDEQFLSLLPVAILSLVAALSVEDREVLAYLISNSGDSNRISRLKKNKEDNHHSPLFLCDCFSCYTSYWVRWDTSPRRQLIHEIIDAYEDSLEMKKKKKDRRKRSGKASGRVNSIGTSRLSELGSSSAEFAGGDSEKDGNCGGEEAEKEKGSVGKVMSFIGQRFLGVWG

SEQ ID NO: 30515 - protein, 371 aa, Arabidopsis thaliana
  misc_feature (1)..(371): Ceres Seq. ID no. 4961996
MEVAGTFVGDISSSKRHLMAFLRNKGFDAGLCKSSWERFGKNTGGKYEYVDVRCGGDYNNRYFVETNLAGEFEIARPTKRYLSILSQVPRVFVGTSEELKLLVRIMCHEMRRSMKHVGIHVPPWRRNGYMQAKWFGFYKRTSTTNNYEMVNTYDTTAFKGCKEEFWEAKGLKVMVGQLSIAFNISALCRKGTVHPSPPPAIKTDEQFLSLLPVAILSLVAALSVEDREVLAYLISNSGDSNRISRLKKNKEDNHHSPLFLCDCFSCYTSYWVRWDTSPRRQLIHEIIDAYEDSLEMKKKKKDRRKRSGKASGRVNSIGTSRLSELGSSSAEFAGGDSEKDGNCGGEEAEKEKGSVGKVMSFIGQRFLGVWG

SEQ ID NO: 30516 - DNA, 1710 bp, Arabidopsis thaliana
  misc_feature (1)..(1710): Ceres Seq. ID no. 4962173
atggatccaattgaatcagtggagtacaatggctttgaaactaccaatggtaactctcacaacgacgaccatggttggaagaaagtagtgtacccaaaacgtaaccggaagcaaaaaccggcggatcaagcggcggcgacgaagaatggtgtcaccgggaatctaattcccaatggtactttatccaatggaggaggcaacgtcttccgttctcttgaggagcaagctgaaggtcgtcatctacagatcctcgccgcgaagaaagcttccgatacggcggatgtgtcggacgggggaagatctaaatggcgatctaacgggtacggcgacgaagggtatgattttgatgacagcgacagtgaaatcgcggtggggaaggagaatttgaaagcggaggaagttaagaaaccgaaggttaagaaggtgaagaagcctaaggttactttagctgaagctgctgctaagattgatgtatctaatctcgcagctttcctcgttgaagcttcgattccactttctcatattcctgaagcagtgtataagacatcagctgattggattaaccaacgtcccattgaggcacttggagcctttgtattgtggggcttggattgtattcttgctgacttggctgtacaacaaggaggtgtcaagggtggtaagaaaggagcacaacaggcttcttcgaaatctcaggttgcgatatttgtggcggtagcaatggttttgcgtaagaaacctgatgctttaactaatatattgccaactttgagggagaatcccaagtatcagggacaggataagcttccagttacagtttggatgatggctcaggcctcccaaggtgatatatcagtaggcttgtactcgtgggctcacaacttgttaccggtggtcagtagcaagagttgcaatcctcagtcaagggatctcattcttcagttggttgagaggatcttgtccaacccgaaggcccggaccatacttgtaaatggggctgttaggaagggagagcgattgattccacctccttcgtttgagatcttggttcgacttacattccctgcatcttccgcaagagtgaaggctacagagaggtttgaggcaatatatcccttgctgaaggaggtgtctcttgctggtgctcctgggagtaaggcaatgaagcaagtcacacagcaaatattcacttttgctctgaaagcagccggggaagaaaatcccttattagccaaggaagcggctgcaatcactatctgggctctcactcaaaatgttgattgctgcaagcattgggagaatctttataccgacaatttgaaagccagtgttgctgttcttaaaaagctcattggcgagtggaaggagcgttctgtcaagctgactcctgctgaaaccctcactctcaaccaaacaatgaagagcttgaggcaaaagaacgaggaagctcttactgagggaggtaatggtgtaagccagtccctatacaaagacgcagacaagtactgcaaggtgatcgctgggaaactctccagtggtggctgcatcaaaagtatagctaccactgctgcacttctagctgctactggttttgctggtgctgctgctctgtctgccaaccctgaggctatagcttacctaaagaacctggtggagtcattggacatcaacaaattcaccgagacagttatgacagcattgaagaactga

SEQ ID NO: 30517 - protein, 569 aa, Arabidopsis thaliana
  misc_feature (1)..(569): Ceres Seq. ID no. 4962174
MDPIESVEYNGFETTNGNSHNDDHGWKKVVYPKRNRKQKPADQAAATKNGVTGNLIPNGTLSNGGGNVFRSLEEQAEGRHLQILAAKKASDTADVSDGGRSKWRSNGYGDEGYDFDDSDSEIAVGKENLKAEEVKKPKVKKVKKPKVTLAEAAAKIDVSNLAAFLVEASIPLSHIPEAVYKTSADWINQRPIEALGAFVLWGLDCILADLAVQQGGVKGGKKGAQQASSKSQVAIFVAVAMVLRKKPDALTNILPTLRENPKYQGQDKLPVTVWMMAQASQGDISVGLYSWAHNLLPVVSSKSCNPQSRDLILQLVERILSNPKARTILVNGAVRKGERLIPPPSFEILVRLTFPASSARVKATERFEAIYPLLKEVSLAGAPGSKAMKQVTQQIFTFALKAAGEENPLLAKEAAAITIWALTQNVDCCKHWENLYTDNLKASVAVLKKLIGEWKERSVKLTPAETLTLNQTMKSLRQKNEEALTEGGNGVSQSLYKDADKYCKVIAGKLSSGGCIKSIATTAALLAATGFAGAAALSANPEAIAYLKNLVESLDINKFTETVMTALKN

SEQ ID NO: 30518 - protein, 329 aa, Arabidopsis thaliana
  misc_feature (1)..(329): Ceres Seq. ID no. 4962175
MVLRKKPDALTNILPTLRENPKYQGQDKLPVTVWMMAQASQGDISVGLYSWAHNLLPVVSSKSCNPQSRDLILQLVERILSNPKARTILVNGAVRKGERLIPPPSFEILVRLTFPASSARVKATERFEAIYPLLKEVSLAGAPGSKAMKQVTQQIFTFALKAAGEENPLLAKEAAAITIWALTQNVDCCKHWENLYTDNLKASVAVLKKLIGEWKERSVKLTPAETLTLNQTMKSLRQKNEEALTEGGNGVSQSLYKDADKYCKVIAGKLSSGGCIKSIATTAALLAATGFAGAAALSANPEAIAYLKNLVESLDINKFTETVMTALKN

SEQ ID NO: 30519 - protein, 295 aa, Arabidopsis thaliana
  misc_feature (1)..(295): Ceres Seq. ID no. 4962176
MMAQASQGDISVGLYSWAHNLLPVVSSKSCNPQSRDLILQLVERILSNPKARTILVNGAVRKGERLIPPPSFEILVRLTFPASSARVKATERFEAIYPLLKEVSLAGAPGSKAMKQVTQQIFTFALKAAGEENPLLAKEAAAITIWALTQNVDCCKHWENLYTDNLKASVAVLKKLIGEWKERSVKLTPAETLTLNQTMKSLRQKNEEALTEGGNGVSQSLYKDADKYCKVIAGKLSSGGCIKSIATTAALLAATGFAGAAALSANPEAIAYLKNLVESLDINKFTETVMTALKN

SEQ ID NO: 30520 - DNA, 2937 bp, Arabidopsis thaliana
  misc_feature (1)..(2937): Ceres Seq. ID no. 4962323
atggcgatgttgggtaatgttcttcatctctctccaatggtgttagccaccacgacgactacgaaaccatctcttctaaaccagagcaagtgtaccaaagccacgccatcgtcgttaaagaattgcaaaaccatagacgaactcaaaatgtttcatcgttcgctcacgaagcaaggacttgataatgatgtctccactataactaagcttgtagcacggagttgtgaattgggtactcgtgaaagtttgagctttgctaaagaagtgtttgagaacagtgaatcgtatggaacttgtttcatgtacaattctttgattcgaggatatgcatcttctgggttatgcaacgaagctatattgttatttcttcgaatgatgaattctgggatttctccagataagtacacgtttccttttggattgagtgcgtgtgcgaaaagcagagcgaaaggtaatgggattcagattcatgggttgattgtgaagatgggttatgcgaaagatttgtttgtgcagaactcgctggttcatttttacgccgagtgtggagagcttgatagtgcacgtaaggtgtttgatgaaatgtctgagagaaatgttgtttcttggacgagtatgatttgtggttacgcgaggcgggattttgctaaagacgctgttgatttgttttttcggatggtgagagatgaagaggtgactcctaattcggttacaatggtgtgtgtgatatcggcttgtgctaagctagaggatcttgagacgggcgagaaggtttatgcttttatccgtaattctggtattgaagttaatgatcttatggttagtgcactggttgatatgtacatgaaatgcaatgccattgatgtagcaaaacggctttttgatgaatatggtgctagtaatttggatttgtgcaatgcaatggcatcaaattatgtacggcaagggttaacgagggaggctttaggtgtttttaatctgatgatggactctggtgttagacctgataggatttcgatgttgagtgcgatttcatcttgttcacaattgagaaatatcttgtggggaaagagctgtcatgggtatgtattgaggaatgggtttgagagttgggataatatatgcaatgcgttgattgatatgtacatgaaatgtcataggcaagatactgcgtttaggatctttgatcggatgtcgaacaagacagtggtgacgtggaactcgattgttgctggctatgtagagaatggtgaggtggatgcagcctgggaaacatttgaaaccatgcctgagaaaaacattgtttcttggaatacgattatcagcggtctggtgcaaggaagtttgtttgaggaagcgattgaagttttctgttctatgcaaagccaagagggtgtcaatgcggatggtgtgacaatgatgagtattgcatctgcttgtgggcacttgggagctcttgatctagctaaatggatatattactacattgagaagaacggaattcagcttgatgtcagacttggtacaaccttagtagatatgttttctaggtgtggggatcctgaaagtgctatgtcaatttttaatagtttgacaaacagagatgtctcagcttggacagcggctataggagcaatggctatggcaggaaacgctgagcgagcaattgagcttttcgatgatatgattgaacaagggttgaaaccagatggggttgcgtttgttggagcactgacagcttgcagccatggtggattggtccaacagggtaaggaaattttctattcgatgttgaaacttcatggagtttctccagaagatgtgcactatggatgtatggttgatctgcttggtcgagcaggattgttagaggaagctgtgcaactcattgaggacatgcctatggagccaaacgatgtgatttggaactctcttttagctgcttgtcgtgttcagggaaatgtggagatggcagcttatgcagccgagaagatacaagtcttggctccagagagaactgggagttatgttcttctgtcaaatgtttatgcatcagctggaagatggaacgacatggcgaaagtgagactgagtatgaaggagaaagggttacgtaaaccgccagggactagttcaatacagattcgaggtaaaacccatgagttcacatcaggggacgagtcacaccctgaaatgccaaacatagaagcaatgctagatgaagttagtcaaagagcgagtcacttaggccatgtacctgatcttagtaatgttcttatggatgttgatgagaaagagaagatctttatgcttagcagacacagcgagaaacttgcaatggcctatggactcattagctcaaacaaaggcacaacaatccgaatagtcaagaacctaagagtatgctctgattgtcattcatttgcaaaatttgcatccaaagtatacaacagagaaatcattctaagagacaataaccggtttcattacatccgtcaagggaagtgttcttgcggtgacttctgtttgacggatgacgatctcgaagttctcaaaggttgtttagatctaggctttggtttcaactacgacgagatccctgcgctctgcaagactttacctgctttagagctttgctattcaatgagccaaaaaaatttagacgataagcatacaccatcactccaattgccaattggaagatctctagtcccgtcgtgtgataatccggatgatgtgaaagctagactcaaatgctgggcacaagccgttgcctcggctataggagcaatggctatggcaggaaacgctgagcgagcaaacgctaagggtttaatacagattcgaggtaagacccatgagttcacttcaggagatgagtctcaccctgaaatgccaaaaattggagcaatgctcaccatagagcaagcaacttag

SEQ ID NO: 30521 - protein, 978 aa, Arabidopsis thaliana
  misc_feature (1)..(978): Ceres Seq. ID no. 4962324
MAMLGNVLHLSPMVLATTTTTKPSLLNQSKCTKATPSSLKNCKTIDELKMFHRSLTKQGLDNDVSTITKLVARSCELGTRESLSFAKEVFENSESYGTCFMYNSLIRGYASSGLCNEAILLFLRMMNSGISPDKYTFPFGLSACAKSRAKGNGIQIHGLIVKMGYAKDLFVQNSLVHFYAECGELDSARKVFDEMSERNVVSWTSMICGYARRDFAKDAVDLFFRMVRDEEVTPNSVTMVCVISACAKLEDLETGEKVYAFIRNSGIEVNDLMVSALVDMYMKCNAIDVAKRLFDEYGASNLDLCNAMASNYVRQGLTREALGVFNLMMDSGVRPDRISMLSAISSCSQLRNILWGKSCHGYVLRNGFESWDNICNALIDMYMKCHRQDTAFRIFDRMSNKTVVTWNSIVAGYVENGEVDAAWETFETMPEKNIVSWNTIISGLVQGSLFEEAIEVFCSMQSQEGVNADGVTMMSIASACGHLGALDLAKWIYYYIEKNGIQLDVRLGTTLVDMFSRCGDPESAMSIFNSLTNRDVSAWTAAIGAMAMAGNAERAIELFDDMIEQGLKPDGVAFVGALTACSHGGLVQQGKEIFYSMLKLHGVSPEDVHYGCMVDLLGRAGLLEEAVQLIEDMPMEPNDVIWNSLLAACRVQGNVEMAAYAAEKIQVLAPERTGSYVLLSNVYASAGRWNDMAKVRLSMKEKGLRKPPGTSSIQIRGKTHEFTSGDESHPEMPNIEAMLDEVSQRASHLGHVPDLSNVLMDVDEKEKIFMLSRHSEKLAMAYGLISSNKGTTIRIVKNLRVCSDCHSFAKFASKVYNREIILRDNNRFHYIRQGKCSCGDFCLTDDDLEVLKGCLDLGFGFNYDEIPALCKTLPALELCYSMSQKNLDDKHTPSLQLPIGRSLVPSCDNPDDVKARLKCWAQAVASAIGAMAMAGNAERANAKGLIQIRGKTHEFTSGDESHPEMPKIGAMLTIEQAT

SEQ ID NO: 30522 - protein, 976 aa, Arabidopsis thaliana
  misc_feature (1)..(976): Ceres Seq. ID no. 4962325
MLGNVLHLSPMVLATTTTTKPSLLNQSKCTKATPSSLKNCKTIDELKMFHRSLTKQGLDNDVSTITKLVARSCELGTRESLSFAKEVFENSESYGTCFMYNSLIRGYASSGLCNEAILLFLRMMNSGISPDKYTFPFGLSACAKSRAKGNGIQIHGLIVKMGYAKDLFVQNSLVHFYAECGELDSARKVFDEMSERNVVSWTSMICGYARRDFAKDAVDLFFRMVRDEEVTPNSVTMVCVISACAKLEDLETGEKVYAFIRNSGIEVNDLMVSALVDMYMKCNAIDVAKRLFDEYGASNLDLCNAMASNYVRQGLTREALGVFNLMMDSGVRPDRISMLSAISSCSQLRNILWGKSCHGYVLRNGFESWDNICNALIDMYMKCHRQDTAFRIFDRMSNKTVVTWNSIVAGYVENGEVDAAWETFETMPEKNIVSWNTIISGLVQGSLFEEAIEVFCSMQSQEGVNADGVTMMSIASACGHLGALDLAKWIYYYIEKNGIQLDVRLGTTLVDMFSRCGDPESAMSIFNSLTNRDVSAWTAAIGAMAMAGNAERAIELFDDMIEQGLKPDGVAFVGALTACSHGGLVQQGKEIFYSMLKLHGVSPEDVHYGCMVDLLGRAGLLEEAVQLIEDMPMEPNDVIWNSLLAACRVQGNVEMAAYAAEKIQVLAPERTGSYVLLSNVYASAGRWNDMAKVRLSMKEKGLRKPPGTSSIQIRGKTHEFTSGDESHPEMPNIEAMLDEVSQRASHLGHVPDLSNVLMDVDEKEKIFMLSRHSEKLAMAYGLISSNKGTTIRIVKNLRVCSDCHSFAKFASKVYNREIILRDNNRFHYIRQGKCSCGDFCLTDDDLEVLKGCLDLGFGFNYDEIPALCKTLPALELCYSMSQKNLDDKHTPSLQLPIGRSLVPSCDNPDDVKARLKCWAQAVASAIGAMAMAGNAERANAKGLIQIRGKTHEFTSGDESHPEMPKIGAMLTIEQAT

SEQ ID NO: 30523 - protein, 966 aa, Arabidopsis thaliana
  misc_feature (1)..(966): Ceres Seq. ID no. 4962326
MVLATTTTTKPSLLNQSKCTKATPSSLKNCKTIDELKMFHRSLTKQGLDNDVSTITKLVARSCELGTRESLSFAKEVFENSESYGTCFMYNSLIRGYASSGLCNEAILLFLRMMNSGISPDKYTFPFGLSACAKSRAKGNGIQIHGLIVKMGYAKDLFVQNSLVHFYAECGELDSARKVFDEMSERNVVSWTSMICGYARRDFAKDAVDLFFRMVRDEEVTPNSVTMVCVISACAKLEDLETGEKVYAFIRNSGIEVNDLMVSALVDMYMKCNAIDVAKRLFDEYGASNLDLCNAMASNYVRQGLTREALGVFNLMMDSGVRPDRISMLSAISSCSQLRNILWGKSCHGYVLRNGFESWDNICNALIDMYMKCHRQDTAFRIFDRMSNKTVVTWNSIVAGYVENGEVDAAWETFETMPEKNIVSWNTIISGLVQGSLFEEAIEVFCSMQSQEGVNADGVTMMSIASACGHLGALDLAKWIYYYIEKNGIQLDVRLGTTLVDMFSRCGDPESAMSIFNSLTNRDVSAWTAAIGAMAMAGNAERAIELFDDMIEQGLKPDGVAFVGALTACSHGGLVQQGKEIFYSMLKLHGVSPEDVHYGCMVDLLGRAGLLEEAVQLIEDMPMEPNDVIWNSLLAACRVQGNVEMAAYAAEKIQVLAPERTGSYVLLSNVYASAGRWNDMAKVRLSMKEKGLRKPPGTSSIQIRGKTHEFTSGDESHPEMPNIEAMLDEVSQRASHLGHVPDLSNVLMDVDEKEKIFMLSRHSEKLAMAYGLISSNKGTTIRIVKNLRVCSDCHSFAKFASKVYNREIILRDNNRFHYIRQGKCSCGDFCLTDDDLEVLKGCLDLGFGFNYDEIPALCKTLPALELCYSMSQKNLDDKHTPSLQLPIGRSLVPSCDNPDDVKARLKCWAQAVASAIGAMAMAGNAERANAKGLIQIRGKTHEFTSGDESHPEMPKIGAMLTIEQAT

SEQ ID NO: 30524 - DNA, 2766 bp, Arabidopsis thaliana
  misc_feature (1)..(2766): Ceres Seq. ID no. 4962377
atgttgcaacagcctctcagactagatatcaagagaaagtttgctcaacgatcagagagagtcaaatctgttgatctgcatcctactgaaccatggattctagcaagtttgtattctggaaccgtgtgtatttggaactaccagacacagacgattacaaaatccttcgaggtgacggaattgccagttaggtcggccaagtttattccgcgcaagcaatgggttgtggctggagcggatgatatgtacatccgtgtatacaattacaatacaatggacaaggtcaaagtatttgaggctcattcggattacattaggtgtgtagctgtccatccgacccttccatatgtgctgtcatcttctgatgatatgctcataaagctttgggactgggaaaacggttgggcttgtactcagatatttgagggacattcgcactatgtgatgcaagtggtatttaatccaaaagataccaacacttttgccagtgcttcgcttgatcgtaccataaagatatggaatcttggttccccagacccaaattttacactggatgctcatcagaaaggagtcaactgtgtagattatttcacagggggtgataaaccctatctaattaccggctctgatgatcatactgctaaggtatgggactatcaaaccaaaagttgtgtccagacgctagatgggcacacacacaatgtttctgccgtatgtttccatccagagcttccaataataatcacaggttctgaggatggcactgttcgcatttggcacgccactacctacaggctagaaaacacattaaattatggtctcgagagagtttgggccattggttacatcaaaagttctcggcgggttgtgattggatatgatgaaggaaccatcatggttaaacttggacgagaaattcctgtcgctagcatggacagtagcggaaaaatcatatgggctaagcataatgaaattcaaaccgcaaacatcaaaagtattggtgcaggttacgaggctactgatggagaaagacttcccttgtctgttaaagagttggggacctgtgatctttatccacaaagcttgaagcacaaccctaatgggaggtttgtcgtagtctgcggtgatggagagtacataatctacactgctttggcgtggagaaatagatcttttgggtctggcctggaatttgtttggtcatctgagggggaatgtgcggttagagaaagctcatcaaagataaagatattcagtaaaaatttccaggaaaggaagagtatccggcctactttctcagctgagaagatttttggaggaaccttgttagcaatgtgttcgaatgatttcatctgcttctatgattgggccgaatgcaggctgattcaacaaattgatgtcaccgtaaagaatctttattgggctgaaagtggtgatttagtagccattgctagtgatacgtcattctacatcttgaagtacaatcgagagttggtttcctcgcattttgatagtggaagaccaactgatgaagagggtgttgaggatgcttttgaggttctccacgagaatgatgaacgtgttaggaccggtatatgggttggggactgcttcatttacaacaactcttcttggaagcttaactattgtgttggaggcgaggtaaccacaatgtatcatttggaccgcccaatgtatttgttaggctatattgccaaccaaagccgggtttacttggtagacaaagaattcaatgtcataggatataccctgctgcttagcctgattgaatacaagactcttgtgatgcgaggcgatttggatagagccaatcaaattttacctacaattcctaaagagcagcataacaatgttgctcatttcttggaatctcggggaatgattgaagatgctttagaaattgcgacagatccagactacaaatttgatctggccatacaactgggtagacttgaaattgcaaaggaaattgctgaagaagtacagagcgagtctaaatggaagcagttaggagagttagccatgtcctcggggaagctgcaattggccgaggattgcatgaagtacgctatggatttgagtggtttgttactactatattcttctttgggagatgctgaaggggtgtcaaaacttgcatgccttgctaaggaacaggggaagaacaatgttgcctttctttgcttatttacgctgggtagattggaagattgtctgcagttattggtggagagtaaccggataccagaagctgctctgatggcacgttcttatcttccaagcaaagtttcggagatagtagctctatggagggaagatctcagcaaggttaatccaaaagcagctgaatctttagctgatcctgaagagtactcaaatctttttgaggattggcaagttgctctttctgttgaagcgaacactgcagagacaaggggagtttataccgctgcagaaaattatccatcccatgccgataaaccttccattacccttgtggaagcctttagaaacctgcaagttgaagcagaggaatcacttgaaaatggaaacatcgatcacgaggtagcagaagaaaacggtcatgtagagaatgaaggagatgaagaggaacaacaggaagaagaagtgaatgaagaagagggagttgtggatgcagactctacggacggtgctgtacttgttaatggaagtgagggtgaggaagagtggggtacgaataacaaaggaaacccatcagcctaa

SEQ ID NO: 30525 - protein, 921 aa, Arabidopsis thaliana
  misc_feature (1)..(921): Ceres Seq. ID no. 4962378
MLQQPLRLDIKRKFAQRSERVKSVDLHPTEPWILASLYSGTVCIWNYQTQTITKSFEVTELPVRSAKFIPRKQWVVAGADDMYIRVYNYNTMDKVKVFEAHSDYIRCVAVHPTLPYVLSSSDDMLIKLWDWENGWACTQIFEGHSHYVMQVVFNPKDTNTFASASLDRTIKIWNLGSPDPNFTLDAHQKGVNCVDYFTGGDKPYLITGSDDHTAKVWDYQTKSCVQTLDGHTHNVSAVCFHPELPIIITGSEDGTVRIWHATTYRLENTLNYGLERVWAIGYIKSSRRVVIGYDEGTIMVKLGREIPVASMDSSGKIIWAKHNEIQTANIKSIGAGYEATDGERLPLSVKELGTCDLYPQSLKHNPNGRFVVVCGDGEYIIYTALAWRNRSFGSGLEFVWSSEGECAVRESSSKIKIFSKNFQERKSIRPTFSAEKIFGGTLLAMCSNDFICFYDWAECRLIQQIDVTVKNLYWAESGDLVAIASDTSFYILKYNRELVSSHFDSGRPTDEEGVEDAFEVLHENDERVRTGIWVGDCFIYNNSSWKLNYCVGGEVTTMYHLDRPMYLLGYIANQSRVYLVDKEFNVIGYTLLLSLIEYKTLVMRGDLDRANQILPTIPKEQHNNVAHFLESRGMIEDALEIATDPDYKFDLAIQLGRLEIAKEIAEEVQSESKWKQLGELAMSSGKLQLAEDCMKYAMDLSGLLLLYSSLGDAEGVSKLACLAKEQGKNNVAFLCLFTLGRLEDCLQLLVESNRIPEAALMARSYLPSKVSEIVALWREDLSKVNPKAAESLADPEEYSNLFEDWQVALSVEANTAETRGVYTAAENYPSHADKPSITLVEAFRNLQVEAEESLENGNIDHEVAEENGHVENEGDEEEQQEEEVNEEEGVVDADSTDGAVLVNGSEGEEEWGTNNKGNPSA

SEQ ID NO: 30526 - protein, 840 aa, Arabidopsis thaliana
  misc_feature (1)..(840): Ceres Seq. ID no. 4962379
MYIRVYNYNTMDKVKVFEAHSDYIRCVAVHPTLPYVLSSSDDMLIKLWDWENGWACTQIFEGHSHYVMQVVFNPKDTNTFASASLDRTIKIWNLGSPDPNFTLDAHQKGVNCVDYFTGGDKPYLITGSDDHTAKVWDYQTKSCVQTLDGHTHNVSAVCFHPELPIIITGSEDGTVRIWHATTYRLENTLNYGLERVWAIGYIKSSRRVVIGYDEGTIMVKLGREIPVASMDSSGKIIWAKHNEIQTANIKSIGAGYEATDGERLPLSVKELGTCDLYPQSLKHNPNGRFVVVCGDGEYIIYTALAWRNRSFGSGLEFVWSSEGECAVRESSSKIKIFSKNFQERKSIRPTFSAEKIFGGTLLAMCSNDFICFYDWAECRLIQQIDVTVKNLYWAESGDLVAIASDTSFYILKYNRELVSSHFDSGRPTDEEGVEDAFEVLHENDERVRTGIWVGDCFIYNNSSWKLNYCVGGEVTTMYHLDRPMYLLGYIANQSRVYLVDKEFNVIGYTLLLSLIEYKTLVMRGDLDRANQILPTIPKEQHNNVAHFLESRGMIEDALEIATDPDYKFDLAIQLGRLEIAKEIAEEVQSESKWKQLGELAMSSGKLQLAEDCMKYAMDLSGLLLLYSSLGDAEGVSKLACLAKEQGKNNVAFLCLFTLGRLEDCLQLLVESNRIPEAALMARSYLPSKVSEIVALWREDLSKVNPKAAESLADPEEYSNLFEDWQVALSVEANTAETRGVYTAAENYPSHADKPSITLVEAFRNLQVEAEESLENGNIDHEVAEENGHVENEGDEEEQQEEEVNEEEGVVDADSTDGAVLVNGSEGEEEWGTNNKGNPSA

SEQ ID NO: 30527 - protein, 830 aa, Arabidopsis thaliana
  misc_feature (1)..(830): Ceres Seq. ID no. 4962380
MDKVKVFEAHSDYIRCVAVHPTLPYVLSSSDDMLIKLWDWENGWACTQIFEGHSHYVMQVVFNPKDTNTFASASLDRTIKIWNLGSPDPNFTLDAHQKGVNCVDYFTGGDKPYLITGSDDHTAKVWDYQTKSCVQTLDGHTHNVSAVCFHPELPIIITGSEDGTVRIWHATTYRLENTLNYGLERVWAIGYIKSSRRVVIGYDEGTIMVKLGREIPVASMDSSGKIIWAKHNEIQTANIKSIGAGYEATDGERLPLSVKELGTCDLYPQSLKHNPNGRFVVVCGDGEYIIYTALAWRNRSFGSGLEFVWSSEGECAVRESSSKIKIFSKNFQERKSIRPTFSAEKIFGGTLLAMCSNDFICFYDWAECRLIQQIDVTVKNLYWAESGDLVAIASDTSFYILKYNRELVSSHFDSGRPTDEEGVEDAFEVLHENDERVRTGIWVGDCFIYNNSSWKLNYCVGGEVTTMYHLDRPMYLLGYIANQSRVYLVDKEFNVIGYTLLLSLIEYKTLVMRGDLDRANQILPTIPKEQHNNVAHFLESRGMIEDALEIATDPDYKFDLAIQLGRLEIAKEIAEEVQSESKWKQLGELAMSSGKLQLAEDCMKYAMDLSGLLLLYSSLGDAEGVSKLACLAKEQGKNNVAFLCLFTLGRLEDCLQLLVESNRIPEAALMARSYLPSKVSEIVALWREDLSKVNPKAAESLADPEEYSNLFEDWQVALSVEANTAETRGVYTAAENYPSHADKPSITLVEAFRNLQVEAEESLENGNIDHEVAEENGHVENEGDEEEQQEEEVNEEEGVVDADSTDGAVLVNGSEGEEEWGTNNKGNPSA

SEQ ID NO: 30528 - DNA, 3690 bp, Arabidopsis thaliana
  misc_feature (1)..(3690): Ceres Seq. ID no. 4962681
atgaaacgcatcaatgtcgatctccatcttctccattttccgaaattcagaaaatttcaatcacgaaaagtatcttcgtccctacccaaattggaactcgatcagaaatcaccacaggagacagttttcttacttggtcaggtacttgacacttacccagatatcagaacacttagaacagtccactcaagaatcattttggaagatctacgttgtaattcttctttgggtgttaaacttatgagagcttatgcttctctaaaagatgtagcgtcagcacgcaaggtgttcgacgaaattcctgagagaaacgtaattatcattaatgttatgattagaagctatgtgaataatgggttttacggtgaaggtgttaaagtgtttgggacgatgtgtggttgtaatgttagacctgatcattatactttcccgtgtgttctaaaggcgtgttcttgctctgggactattgtcattgggaggaaaattcatgggtctgctacaaaagttgggctctcttcgactttgtttgttgggaatggtttagtttctatgtatggaaagtgtggatttttatctgaagcaaggcttgtacttgacgagatgtctaggagagatgtggtgtcttggaactcgttggttgttgggtatgcgcaaaatcagagatttgatgatgctttggaggtttgtagggaaatggagtctgtgaagataagccatgatgctggtacgatggctagtctgttaccagcagtgagtaacactacaactgaaaacgttatgtatgttaaagatatgttttttaaaatggggaaaaagagtttggtttcatggaatgtgatgatcggtgtgtatatgaaaaatgcgatgcctgttgaagctgtggaattgtattcccgaatggaggctgatgggtttgaacctgatgcagtctcaatcacaagtgtattacctgcttgtggagatacctctgctctgtctcttggtaagaaaatccatggatacattgagaggaagaagctgataccaaatctgttgttagagaatgcactgatcgacatgtatgcaaaatgcggatgtttagagaaagctagagatgtgtttgagaacatgaagtcacgtgatgttgtgtcttggacagctatgatttcagcttatggattcagcggacgaggctgtgacgcagtggcattgttttcgaaattgcaagattcgggtctcgtccctgattcaattgcgtttgtcacaacgcttgctgcttgtagccatgcggggttactagaagaaggtaggagttgtttcaaactcatgacagatcattacaagatcactcctaggttagagcatttggcttgtatggtggatcttcttggccgagccgggaaagtgaaagaagcttacagatttatacaagatatgtcaatggaaccaaacgagagagtttggggagcattattaggagcttgcagggtgcattctgatacagacatcggtctactagcagctgataaacttttccagttagcacccgagcaatcgggttactacgtattgctttctaacatatacgcaaaggctggaagatgggaagaagtgactaacatcagaaacataatgaagagcaaagggttaaagaagaatcccggagcaagcaatgttgaggtcaacagaataattcatacattcttagtaggcgacaggtcacacccgcaatccgatgagatatacagagagctggatgttctagtaaagaaaatgaaagagttaggttatgttcctgattcagagtcagcgcttcacgatgtggaagaggaagataaagagacgcatttagctgttcacagtgagaaattagccattgtgtttgctctgatgaacactaaggaggaagaagaagacagtaataataccataagaataacgaagaatcttaggatatgtggagactgtcatgttgcagctaagcttatctcacagataacttctcgagagataatcatcagagacactaatagatttcatgtgttccggttcggtgtttgctcttgtgcttctgagctcagagatagagagagcgagaggttagagataacagtagttttaccgatgattgagtcggttatggccgttcgtctctccaccggattttgctcgtcgacggcgttactcctctttgttcattcgtctgaatcgtctcatgctaaatttgtagagtatcgtacagcaccgagctcggaggagggaggaaactgcttccattatgcgtcccgccgcgtttttcagcctcaacgtatccaccatattgatgggagtgggtttctgaagtacaacagtgactatataacaagaaaacacctacggaagaatcgaactcaagccacagctgagtatgtagattcagcttcagatccagaaaagcaaactggcaagtcaaggtatcatccttcagaagaaatcagagcctctttgccacagaatgatggagattccaggctttcacctgcagaaactactagaaccatcattgaggtgaacaataaaggaaccctgatgcttacaggttctattggtgatggagttcatgagaatattctctggccagatataccttatataacagatcaaaatggaaatttatactttcaagtaaaggaggatgaggacgtcatgcagtccgttacttctgaaaataattatgtgttgctaaagcatgtatcttctgacgatgttatggatgcattgcagcaagttatagttggttttgatacgatggagatgatcaaggaaatggagctgatgggactttctgatagtgactttgaaactgaagatgatgaaagtggagatgatgacagtgaggatacaggagaagacgaagatgaggaggaatgggttgctattttagaggatgaagatgaagacgatgatgatgatgatgatgatgatgaggatgatgatgattctgattctgatgaatcgctgggagactgggcaaatttggaaacaatgaggagttgtcatcccatgttttttgcaaagagaatgactgaggttgcttcaaatgatcctgttgattggatggatcagccgtctgctggccttgctatccagggacttttgagtcatatcttagtggaagattattcagatatccaaaagaaacttgctgatagcaattctacaactaacggaaacaaggatgcagaaaacttagtggacaagcttgaagacaatagtaaggcaggtggtgacgaatctgagatagattcatcacaggatgaaaaagcaagaaatgtggtggcgttttacaagctggagatgataagaattcagcttatcacagcacaaggggatcagactgaagttgaggtggaagatgtcagaaaagcacaacctgatgctattgctcatgcatcagctgaaatcataagccgtttagaagaatctggtgataaaataactgaagcactcaaatctctgtgttggagacataacagtattcaagcagaggaagtgaagctgattgggatagattccctaggttttgacctcaggctttgcgcaggagcaaagattgagtcattgcgatttgcattctcgacaagggcaacatcagaagaaaacgcagagggacaaataagaaaactattattcccgaaaacgaaccagtcgacacaaccaaaaccaaaatga

SEQ ID NO: 30529 - protein, 1229 aa, Arabidopsis thaliana
  misc_feature (1)..(1229): Ceres Seq. ID no. 4962682
MKRINVDLHLLHFPKFRKFQSRKVSSSLPKLELDQKSPQETVFLLGQVLDTYPDIRTLRTVHSRIILEDLRCNSSLGVKLMRAYASLKDVASARKVFDEIPERNVIIINVMIRSYVNNGFYGEGVKVFGTMCGCNVRPDHYTFPCVLKACSCSGTIVIGRKIHGSATKVGLSSTLFVGNGLVSMYGKCGFLSEARLVLDEMSRRDVVSWNSLVVGYAQNQRFDDALEVCREMESVKISHDAGTMASLLPAVSNTTTENVMYVKDMFFKMGKKSLVSWNVMIGVYMKNAMPVEAVELYSRMEADGFEPDAVSITSVLPACGDTSALSLGKKIHGYIERKKLIPNLLLENALIDMYAKCGCLEKARDVFENMKSRDVVSWTAMISAYGFSGRGCDAVALFSKLQDSGLVPDSIAFVTTLAACSHAGLLEEGRSCFKLMTDHYKITPRLEHLACMVDLLGRAGKVKEAYRFIQDMSMEPNERVWGALLGACRVHSDTDIGLLAADKLFQLAPEQSGYYVLLSNIYAKAGRWEEVTNIRNIMKSKGLKKNPGASNVEVNRIIHTFLVGDRSHPQSDEIYRELDVLVKKMKELGYVPDSESALHDVEEEDKETHLAVHSEKLAIVFALMNTKEEEEDSNNTIRITKNLRICGDCHVAAKLISQITSREIIIRDTNRFHVFRFGVCSCASELRDRESERLEITVVLPMIESVMAVRLSTGFCSSTALLLFVHSSESSHAKFVEYRTAPSSEEGGNCFHYASRRVFQPQRIHHIDGSGFLKYNSDYITRKHLRKNRTQATAEYVDSASDPEKQTGKSRYHPSEEIRASLPQNDGDSRLSPAETTRTIIEVNNKGTLMLTGSIGDGVHENILWPDIPYITDQNGNLYFQVKEDEDVMQSVTSENNYVLLKHVSSDDVMDALQQVIVGFDTMEMIKEMELMGLSDSDFETEDDESGDDDSEDTGEDEDEEEWVAILEDEDEDDDDDDDDDEDDDDSDSDESLGDWANLETMRSCHPMFFAKRMTEVASNDPVDWMDQPSAGLAIQGLLSHILVEDYSDIQKKLADSNSTTNGNKDAENLVDKLEDNSKAGGDESEIDSSQDEKARNVVAFYKLEMIRIQLITAQGDQTEVEVEDVRKAQPDAIAHASAEIISRLEESGDKITEALKSLCWRHNSIQAEEVKLIGIDSLGFDLRLCAGAKIESLRFAFSTRATSEENAEGQIRKLLFPKTNQSTQPKPK

SEQ ID NO: 30530 - protein, 1149 aa, Arabidopsis thaliana
  misc_feature (1)..(1149): Ceres Seq. ID no. 4962683
MRAYASLKDVASARKVFDEIPERNVIIINVMIRSYVNNGFYGEGVKVFGTMCGCNVRPDHYTFPCVLKACSCSGTIVIGRKIHGSATKVGLSSTLFVGNGLVSMYGKCGFLSEARLVLDEMSRRDVVSWNSLVVGYAQNQRFDDALEVCREMESVKISHDAGTMASLLPAVSNTTTENVMYVKDMFFKMGKKSLVSWNVMIGVYMKNAMPVEAVELYSRMEADGFEPDAVSITSVLPACGDTSALSLGKKIHGYIERKKLIPNLLLENALIDMYAKCGCLEKARDVFENMKSRDVVSWTAMISAYGFSGRGCDAVALFSKLQDSGLVPDSIAFVTTLAACSHAGLLEEGRSCFKLMTDHYKITPRLEHLACMVDLLGRAGKVKEAYRFIQDMSMEPNERVWGALLGACRVHSDTDIGLLAADKLFQLAPEQSGYYVLLSNIYAKAGRWEEVTNIRNIMKSKGLKKNPGASNVEVNRIIHTFLVGDRSHPQSDEIYRELDVLVKKMKELGYVPDSESALHDVEEEDKETHLAVHSEKLAIVFALMNTKEEEEDSNNTIRITKNLRICGDCHVAAKLISQITSREIIIRDTNRFHVFRFGVCSCASELRDRESERLEITVVLPMIESVMAVRLSTGFCSSTALLLFVHSSESSHAKFVEYRTAPSSEEGGNCFHYASRRVFQPQRIHHIDGSGFLKYNSDYITRKHLRKNRTQATAEYVDSASDPEKQTGKSRYHPSEEIRASLPQNDGDSRLSPAETTRTIIEVNNKGTLMLTGSIGDGVHENILWPDIPYITDQNGNLYFQVKEDEDVMQSVTSENNYVLLKHVSSDDVMDALQQVIVGFDTMEMIKEMELMGLSDSDFETEDDESGDDDSEDTGEDEDEEEWVAILEDEDEDDDDDDDDDEDDDDSDSDESLGDWANLETMRSCHPMFFAKRMTEVASNDPVDWMDQPSAGLAIQGLLSHILVEDYSDIQKKLADSNSTTNGNKDAENLVDKLEDNSKAGGDESEIDSSQDEKARNVVAFYKLEMIRIQLITAQGDQTEVEVEDVRKAQPDAIAHASAEIISRLEESGDKITEALKSLCWRHNSIQAEEVKLIGIDSLGFDLRLCAGAKIESLRFAFSTRATSEENAEGQIRKLLFPKTNQSTQPKPK

SEQ ID NO: 30531 - protein, 1119 aa, Arabidopsis thaliana
  misc_feature (1)..(1119): Ceres Seq. ID no. 4962684
MIRSYVNNGFYGEGVKVFGTMCGCNVRPDHYTFPCVLKACSCSGTIVIGRKIHGSATKVGLSSTLFVGNGLVSMYGKCGFLSEARLVLDEMSRRDVVSWNSLVVGYAQNQRFDDALEVCREMESVKISHDAGTMASLLPAVSNTTTENVMYVKDMFFKMGKKSLVSWNVMIGVYMKNAMPVEAVELYSRMEADGFEPDAVSITSVLPACGDTSALSLGKKIHGYIERKKLIPNLLLENALIDMYAKCGCLEKARDVFENMKSRDVVSWTAMISAYGFSGRGCDAVALFSKLQDSGLVPDSIAFVTTLAACSHAGLLEEGRSCFKLMTDHYKITPRLEHLACMVDLLGRAGKVKEAYRFIQDMSMEPNERVWGALLGACRVHSDTDIGLLAADKLFQLAPEQSGYYVLLSNIYAKAGRWEEVTNIRNIMKSKGLKKNPGASNVEVNRIIHTFLVGDRSHPQSDEIYRELDVLVKKMKELGYVPDSESALHDVEEEDKETHLAVHSEKLAIVFALMNTKEEEEDSNNTIRITKNLRICGDCHVAAKLISQITSREIIIRDTNRFHVFRFGVCSCASELRDRESERLEITVVLPMIESVMAVRLSTGFCSSTALLLFVHSSESSHAKFVEYRTAPSSEEGGNCFHYASRRVFQPQRIHHIDGSGFLKYNSDYITRKHLRKNRTQATAEYVDSASDPEKQTGKSRYHPSEEIRASLPQNDGDSRLSPAETTRTIIEVNNKGTLMLTGSIGDGVHENILWPDIPYITDQNGNLYFQVKEDEDVMQSVTSENNYVLLKHVSSDDVMDALQQVIVGFDTMEMIKEMELMGLSDSDFETEDDESGDDDSEDTGEDEDEEEWVAILEDEDEDDDDDDDDDEDDDDSDSDESLGDWANLETMRSCHPMFFAKRMTEVASNDPVDWMDQPSAGLAIQGLLSHILVEDYSDIQKKLADSNSTTNGNKDAENLVDKLEDNSKAGGDESEIDSSQDEKARNVVAFYKLEMIRIQLITAQGDQTEVEVEDVRKAQPDAIAHASAEIISRLEESGDKITEALKSLCWRHNSIQAEEVKLIGIDSLGFDLRLCAGAKIESLRFAFSTRATSEENAEGQIRKLLFPKTNQSTQPKPK

SEQ ID NO: 30532 - DNA, 711 bp, Arabidopsis thaliana
  misc_feature (1)..(711): Ceres Seq. ID no. 4962693
atgtttgatgaacgtggatccttttctattgcccatccgtatcctggtccccttgcagctttattcaagtctataggaaagcttccagaaagggttgcttttactggagagattgttcctgttaaagagaaaagggttgatgcggtgaagaaatatgtcgaggaagctatacagtcagagatgaaagcgattagcgataccccaaattctgtccgtagtattttgaattcttccgatcagatgtatgcctcccggtgtgacagtcttagagccctgatcaatgatgcaaaggaaaaatacgttatctataagttcgttccaagctcatgtatgtttattgacccaaatggtacgaaagaaatagacttgaaggttttggaactgtcaaaaccagatccattagggacttggtcgacaaaacttgtggatggaatcaataagaacgaatcaagaagacgagctttgattcttttctgtttatattttcttgatataaacgcaagggatgcttatatggtatcagtggataggaaaggtttccacttgttggggaaggtaccgagtgaacaagaagctggagatgagtatcagtggagagagtttaggtttgagtttgaagaagaggtgaaagacgttgaagctttttgccaccaacttgtggaaatggaacaagaggttgtaagcaagtttactgaccataccggtttgtga

SEQ ID NO: 30533 - protein, 236 aa, Arabidopsis thaliana
  misc_feature (1)..(236): Ceres Seq. ID no. 4962694
MFDERGSFSIAHPYPGPLAALFKSIGKLPERVAFTGEIVPVKEKRVDAVKKYVEEAIQSEMKAISDTPNSVRSILNSSDQMYASRCDSLRALINDAKEKYVIYKFVPSSCMFIDPNGTKEIDLKVLELSKPDPLGTWSTKLVDGINKNESRRRALILFCLYFLDINARDAYMVSVDRKGFHLLGKVPSEQEAGDEYQWREFRFEFEEEVKDVEAFCHQLVEMEQEVVSKFTDHTGL

SEQ ID NO: 30534 - protein, 176 aa, Arabidopsis thaliana
  misc_feature (1)..(176): Ceres Seq. ID no. 4962695
MKAISDTPNSVRSILNSSDQMYASRCDSLRALINDAKEKYVIYKFVPSSCMFIDPNGTKEIDLKVLELSKPDPLGTWSTKLVDGINKNESRRRALILFCLYFLDINARDAYMVSVDRKGFHLLGKVPSEQEAGDEYQWREFRFEFEEEVKDVEAFCHQLVEMEQEVVSKFTDHTGL

SEQ ID NO: 30535 - protein, 156 aa, Arabidopsis thaliana
  misc_feature (1)..(156): Ceres Seq. ID no. 4962696
MYASRCDSLRALINDAKEKYVIYKFVPSSCMFIDPNGTKEIDLKVLELSKPDPLGTWSTKLVDGINKNESRRRALILFCLYFLDINARDAYMVSVDRKGFHLLGKVPSEQEAGDEYQWREFRFEFEEEVKDVEAFCHQLVEMEQEVVSKFTDHTGL

SEQ ID NO: 30536 - DNA, 1941 bp, Arabidopsis thaliana
  misc_feature (1)..(1941): Ceres Seq. ID no. 4962731
atgttgttcgatgaaatgcctaagagagattccgtgtcttggaacacaatgatttctgggtacacaagctgtgggaaattggaggatgcatggtgtttatttacatgtatgaagagatctggatctgatgttgatgggtatagttttagtaggttgttgaaagggattgcttctgtgaaaaggttcgatcttggagagcaagtgcatggtttggttataaagggaggttatgagtgtaatgtgtatgttggaagttcgcttgttgatatgtatgcgaaatgtgaaagagttgaagatgcttttgaggcttttaaggagatttcagagcctaactctgtttcatggaatgctttgattgctggatttgtgcaagtgcgagatatcaagactgctttttggttgttgggtttgatggagatgaaagctgctgtgactatggatgctggcactttcgctccacttcttactttgcttgatgatcctatgttttgtaacttgttaaagcaagttcatgctaaggttttgaaactcgggcttcaacacgagatcactatatgcaatgcgatgatcagctcttatgcagattgtgggtcagtatcagatgcaaagagagtttttgatggcttgggtggctcaaaagacttgatttcgtggaattcgatgattgcaggtttctctaaacatgagctaaaggaatctgcttttgaactgtttattcaaatgcaaagacattgggtcgaaaccgacatttatacttacaccggcttgttaagcgcttgctctggcgaagaacatcaaatttttgggaagtctttgcatggtatggtaataaagaagggattggaacaagtaacttctgcaacaaatgcattgatctctatgtatattcagtttcctacaggcaccatggaagatgctctgtctctatttgaatccttaaaatctaaggatcttatctcttggaattcgatcattacagggttcgcccagaagggtctcagcgaggatgcggtaaagttctttagctacttaagatcctcagagataaaagtcgacgattacgccttctctgcacttctcagatcatgctcggacctagcaacactccaattaggtcagcagatccacgcgctcgccactaaatcaggcttcgtatcaaacgagtttgtaatcagttctctgatcgtgatgtactcaaaatgtggcataatcgagagtgcacgaaaatgcttccaacagatttcctccaaacacagcacagtagcttggaacgcaatgattcttggatacgctcaacatggtttaggccaagtctctcttgatctcttctcccaaatgtgtaaccaaaacgtgaagctagaccatgtaaccttcacagcaatccttacagcttgtagccacaccggtttaatacaagagggactcgagttgcttaatttaatggaaccggtttacaaaatccaacctcgaatggaacattacgcagctgcagttgatctcttaggcagagcagggctcgtgaacaaagcgaaagagttaatcgaatcaatgccgttgaatcctgatccaatggtattgaaaactttccttggagtttgcagggcttgtggagagatcgaaatggctactcaagtggctaaccatttgctagagattgaaccagaagatcattttacgtatgtttcgttgtctcatatgtatagtgatctcaagaaatgggaagagaaagcaagtgtgaagaagatgatgaaggagagaggtgtaaagaaagttccaggttggagctggattgagattagaaatcaagttaaggcctttaatgctgaagatcgatcaaatcctctttgtcaagatatatatatgatgattaaagacttgactcaggaaatgcagtggcttgattctgataatggggttgatgcagattcacttcatgcttaa

SEQ ID NO: 30537 - protein, 646 aa, Arabidopsis thaliana
  misc_feature (1)..(646): Ceres Seq. ID no. 4962732
MLFDEMPKRDSVSWNTMISGYTSCGKLEDAWCLFTCMKRSGSDVDGYSFSRLLKGIASVKRFDLGEQVHGLVIKGGYECNVYVGSSLVDMYAKCERVEDAFEAFKEISEPNSVSWNALIAGFVQVRDIKTAFWLLGLMEMKAAVTMDAGTFAPLLTLLDDPMFCNLLKQVHAKVLKLGLQHEITICNAMISSYADCGSVSDAKRVFDGLGGSKDLISWNSMIAGFSKHELKESAFELFIQMQRHWVETDIYTYTGLLSACSGEEHQIFGKSLHGMVIKKGLEQVTSATNALISMYIQFPTGTMEDALSLFESLKSKDLISWNSIITGFAQKGLSEDAVKFFSYLRSSEIKVDDYAFSALLRSCSDLATLQLGQQIHALATKSGFVSNEFVISSLIVMYSKCGIIESARKCFQQISSKHSTVAWNAMILGYAQHGLGQVSLDLFSQMCNQNVKLDHVTFTAILTACSHTGLIQEGLELLNLMEPVYKIQPRMEHYAAAVDLLGRAGLVNKAKELIESMPLNPDPMVLKTFLGVCRACGEIEMATQVANHLLEIEPEDHFTYVSLSHMYSDLKKWEEKASVKKMMKERGVKKVPGWSWIEIRNQVKAFNAEDRSNPLCQDIYMMIKDLTQEMQWLDSDNGVDADSLHA

SEQ ID NO: 30538 - protein, 641 aa, Arabidopsis thaliana
  misc_feature (1)..(641): Ceres Seq. ID no. 4962733
MPKRDSVSWNTMISGYTSCGKLEDAWCLFTCMKRSGSDVDGYSFSRLLKGIASVKRFDLGEQVHGLVIKGGYECNVYVGSSLVDMYAKCERVEDAFEAFKEISEPNSVSWNALIAGFVQVRDIKTAFWLLGLMEMKAAVTMDAGTFAPLLTLLDDPMFCNLLKQVHAKVLKLGLQHEITICNAMISSYADCGSVSDAKRVFDGLGGSKDLISWNSMIAGFSKHELKESAFELFIQMQRHWVETDIYTYTGLLSACSGEEHQIFGKSLHGMVIKKGLEQVTSATNALISMYIQFPTGTMEDALSLFESLKSKDLISWNSIITGFAQKGLSEDAVKFFSYLRSSEIKVDDYAFSALLRSCSDLATLQLGQQIHALATKSGFVSNEFVISSLIVMYSKCGIIESARKCFQQISSKHSTVAWNAMILGYAQHGLGQVSLDLFSQMCNQNVKLDHVTFTAILTACSHTGLIQEGLELLNLMEPVYKIQPRMEHYAAAVDLLGRAGLVNKAKELIESMPLNPDPMVLKTFLGVCRACGEIEMATQVANHLLEIEPEDHFTYVSLSHMYSDLKKWEEKASVKKMMKERGVKKVPGWSWIEIRNQVKAFNAEDRSNPLCQDIYMMIKDLTQEMQWLDSDNGVDADSLHA

SEQ ID NO: 30539 - protein, 630 aa, Arabidopsis thaliana
  misc_feature (1)..(630): Ceres Seq. ID no. 4962734
MISGYTSCGKLEDAWCLFTCMKRSGSDVDGYSFSRLLKGIASVKRFDLGEQVHGLVIKGGYECNVYVGSSLVDMYAKCERVEDAFEAFKEISEPNSVSWNALIAGFVQVRDIKTAFWLLGLMEMKAAVTMDAGTFAPLLTLLDDPMFCNLLKQVHAKVLKLGLQHEITICNAMISSYADCGSVSDAKRVFDGLGGSKDLISWNSMIAGFSKHELKESAFELFIQMQRHWVETDIYTYTGLLSACSGEEHQIFGKSLHGMVIKKGLEQVTSATNALISMYIQFPTGTMEDALSLFESLKSKDLISWNSIITGFAQKGLSEDAVKFFSYLRSSEIKVDDYAFSALLRSCSDLATLQLGQQIHALATKSGFVSNEFVISSLIVMYSKCGIIESARKCFQQISSKHSTVAWNAMILGYAQHGLGQVSLDLFSQMCNQNVKLDHVTFTAILTACSHTGLIQEGLELLNLMEPVYKIQPRMEHYAAAVDLLGRAGLVNKAKELIESMPLNPDPMVLKTFLGVCRACGEIEMATQVANHLLEIEPEDHFTYVSLSHMYSDLKKWEEKASVKKMMKERGVKKVPGWSWIEIRNQVKAFNAEDRSNPLCQDIYMMIKDLTQEMQWLDSDNGVDADSLHA

SEQ ID NO: 30540 - DNA, 576 bp, Arabidopsis thaliana
  misc_feature (1)..(576): Ceres Seq. ID no. 4962845
atggcagaggacgagctggtcgagattgttcctaatatgaacatggagcaactcaatttcatcagtggcgatttcggtcggttcattcctcagattccgacaaaggtgcctctgtggcttgcagtggcactgaagaggagaggaaaatgcactttccggcctccggggtggatgtctgttgataatttgactcagatcttggaagcagaacgtgaatctcagtcgacattccaggcattaccatttagttacgtggagattgccagactactttttgaccatgcacgtgacgatattccagacatgtatatggtgagatccctagtcgaggacatcagagatgtacggcttcacaaacttgagactaacttaggatcatttcaaggtacatctgcagtaaagatctctaatgtatcggcaatggaagtaaacatagtacgcccatttgtgataagagccttagaagcattttataagcatgacaagccagaggctgatgtagacagagacaccagaagtagtagacaacagcgtgaaaccaacaatgaaccaaggagacctctaaggcaacgctag

SEQ ID NO: 30541 - protein, 191 aa, Arabidopsis thaliana; identical to SEQ ID NO: 29344
  misc_feature (1)..(191): Ceres Seq. ID no. 4962846

SEQ ID NO: 30542 - protein, 179 aa, Arabidopsis thaliana; identical to SEQ ID NO: 29345
  misc_feature (1)..(179): Ceres Seq. ID no. 4962847

SEQ ID NO: 30543 - protein, 177 aa, Arabidopsis thaliana
  misc_feature (1)..(177): Ceres Seq. ID no. 4962848
MEQLNFISGDFGRFIPQIPTKVPLWLAVALKRRGKCTFRPPGWMSVDNLTQILEAERESQSTFQALPFSYVEIARLLFDHARDDIPDMYMVRSLVEDIRDVRLHKLETNLGSFQGTSAVKISNVSAMEVNIVRPFVIRALEAFYKHDKPEADVDRDTRSSRQQRETNNEPRRPLRQR

SEQ ID NO: 30544 - DNA, 2160 bp, Arabidopsis thaliana
  misc_feature (1)..(2160): Ceres Seq. ID no. 4962861
atgtcggaagcatcttgtcttgcttctcctttgctctacaccaattctggaatccattctgattctttctacgcttcgcttattgatagtgccactcataaagctcagctgaagcaaatccacgcacgtttacttgttttaggtttgcagttcagtggtttcttgatcaccaagctcattcacgctagctcttcctttggtgacattacttttgcacgccaagtgttcgacgatttacctcgtcctcaaatattcccttggaatgctataatcaggggttattcaaggaacaatcacttccaagatgctcttctcatgtattccaatatgcaactcgctcgtgtttctcctgattctttcactttccctcatcttcttaaagcttgcagcggtttgtctcatcttcagatgggtagattcgttcatgctcaggtgttcaggcttggatttgatgcggatgtgtttgttcagaacggtctcattgccttgtatgcgaaatgtaggcgtttgggatctgcgagaactgtgtttgaaggactgccattgccagagaggacgatagtctcatggactgctatcgtttcagcttatgctcagaacggtgagcctatggaggctcttgagatttttagtcagatgaggaagatggatgtgaagcctgactgggtagctcttgtcagcgttctcaatgctttcacttgcttgcaggatttgaagcaagggagatctattcatgcttctgttgtgaagatgggtcttgaaatagagcctgacttactcatctctctcaacaccatgtatgcaaaatgtggccaagttgcaactgccaagattctgtttgataagatgaagtcacctaacctgattttgtggaacgccatgatctctggctatgcgaagaacggttatgccagggaagctattgatatgtttcatgagatgatcaataaagatgttagacccgacaccatctctataacatctgccatttcggcttgcgctcaagtaggttctcttgagcaggctcgcagtatgtatgaatatgtaggcagaagtgactacagggatgacgttttcataagcagcgcattaatcgatatgtttgctaaatgtggaagtgtagaaggcgcaaggttggtttttgaccgaacacttgacagggatgttgtggtgtggagtgctatgattgttgggtatggattgcacgggcgggcaagagaagcaatcagtctgtaccgtgcaatggagcgtggtggagtacatcccaatgacgtcacttttctggggcttctcatggcctgtaaccattcaggcatggtaagagaaggctggtggtttttcaaccggatggcggatcacaaaataaatccacaacagcaacattatgcatgtgtcattgatcttctcgggcgtgctggtcatctggatcaagcttatgaagtgatcaaatgcatgccggtccagcccggtgtaacggtttggggagcactcctaagcgcttgcaagaagcatcgccacgttgaactgggagaatatgcagctcaacagcttttctcaatagacccatccaacacaggccactatgtacagctctctaatctgtatgctgcagcacgtttgtgggaccgtgttgcagaggtgcgagtgagaatgaaggagaaaggattgaacaaagacgttggatgtagctgggttgaagtaaggggaaggttggaggctttccgagtgggtgataagtcacatccgagatatgaagagatagagagacaagtagagtggatagagagtagattgaaggaaggtggatttgtggctaacaaggatgcttcattgcacgatctcaacgatgaagaagctgaagagactttgtgcagccacagcgagaggatcgcgattgcgtatgggcttataagtacaccccaaggcacaccactgcggatcacaaagaatctgagagcatgcgtaaactgtcatgctgctacaaagcttatctcgaagctagtggacagagagattgttgtgagagatacaaataggttccaccattttaaggatggagtttgttcctgtggtgattattgtcttaaggttgaaaagcttacttatttaatcatcaatttaaagattctgacaaacacaatagaaaaatctgtgagataa

SEQ ID NO: 30545 - protein, 719 aa, Arabidopsis thaliana
  misc_feature (1)..(719): Ceres Seq. ID no. 4962862
MSEASCLASPLLYTNSGIHSDSFYASLIDSATHKAQLKQIHARLLVLGLQFSGFLITKLIHASSSFGDITFARQVFDDLPRPQIFPWNAIIRGYSRNNHFQDALLMYSNMQLARVSPDSFTFPHLLKACSGLSHLQMGRFVHAQVFRLGFDADVFVQNGLIALYAKCRRLGSARTVFEGLPLPERTIVSWTAIVSAYAQNGEPMEALEIFSQMRKMDVKPDWVALVSVLNAFTCLQDLKQGRSIHASVVKMGLEIEPDLLISLNTMYAKCGQVATAKILFDKMKSPNLILWNAMISGYAKNGYAREAIDMFHEMINKDVRPDTISITSAISACAQVGSLEQARSMYEYVGRSDYRDDVFISSALIDMFAKCGSVEGARLVFDRTLDRDVVVWSAMIVGYGLHGRAREAISLYRAMERGGVHPNDVTFLGLLMACNHSGMVREGWWFFNRMADHKINPQQQHYACVIDLLGRAGHLDQAYEVIKCMPVQPGVTVWGALLSACKKHRHVELGEYAAQQLFSIDPSNTGHYVQLSNLYAAARLWDRVAEVRVRMKEKGLNKDVGCSWVEVRGRLEAFRVGDKSHPRYEEIERQVEWIESRLKEGGFVANKDASLHDLNDEEAEETLCSHSERIAIAYGLISTPQGTPLRITKNLRACVNCHAATKLISKLVDREIVVRDTNRFHHFKDGVCSCGDYCLKVEKLTYLIINLKILTNTIEKSVR

SEQ ID NO: 30546 - protein, 614 aa, Arabidopsis thaliana
  misc_feature (1)..(614): Ceres Seq. ID no. 4962863
MYSNMQLARVSPDSFTFPHLLKACSGLSHLQMGRFVHAQVFRLGFDADVFVQNGLIALYAKCRRLGSARTVFEGLPLPERTIVSWTAIVSAYAQNGEPMEALEIFSQMRKMDVKPDWVALVSVLNAFTCLQDLKQGRSIHASVVKMGLEIEPDLLISLNTMYAKCGQVATAKILFDKMKSPNLILWNAMISGYAKNGYAREAIDMFHEMINKDVRPDTISITSAISACAQVGSLEQARSMYEYVGRSDYRDDVFISSALIDMFAKCGSVEGARLVFDRTLDRDVVVWSAMIVGYGLHGRAREAISLYRAMERGGVHPNDVTFLGLLMACNHSGMVREGWWFFNRMADHKINPQQQHYACVIDLLGRAGHLDQAYEVIKCMPVQPGVTVWGALLSACKKHRHVELGEYAAQQLFSIDPSNTGHYVQLSNLYAAARLWDRVAEVRVRMKEKGLNKDVGCSWVEVRGRLEAFRVGDKSHPRYEEIERQVEWIESRLKEGGFVANKDASLHDLNDEEAEETLCSHSERIAIAYGLISTPQGTPLRITKNLRACVNCHAATKLISKLVDREIVVRDTNRFHHFKDGVCSCGDYCLKVEKLTYLIINLKILTNTIEKSVR

SEQ ID NO: 30547 - protein, 610 aa, Arabidopsis thaliana
  misc_feature (1)..(610): Ceres Seq. ID no. 4962864
MQLARVSPDSFTFPHLLKACSGLSHLQMGRFVHAQVFRLGFDADVFVQNGLIALYAKCRRLGSARTVFEGLPLPERTIVSWTAIVSAYAQNGEPMEALEIFSQMRKMDVKPDWVALVSVLNAFTCLQDLKQGRSIHASVVKMGLEIEPDLLISLNTMYAKCGQVATAKILFDKMKSPNLILWNAMISGYAKNGYAREAIDMFHEMINKDVRPDTISITSAISACAQVGSLEQARSMYEYVGRSDYRDDVFISSALIDMFAKCGSVEGARLVFDRTLDRDVVVWSAMIVGYGLHGRAREAISLYRAMERGGVHPNDVTFLGLLMACNHSGMVREGWWFFNRMADHKINPQQQHYACVIDLLGRAGHLDQAYEVIKCMPVQPGVTVWGALLSACKKHRHVELGEYAAQQLFSIDPSNTGHYVQLSNLYAAARLWDRVAEVRVRMKEKGLNKDVGCSWVEVRGRLEAFRVGDKSHPRYEEIERQVEWIESRLKEGGFVANKDASLHDLNDEEAEETLCSHSERIAIAYGLISTPQGTPLRITKNLRACVNCHAATKLISKLVDREIVVRDTNRFHHFKDGVCSCGDYCLKVEKLTYLIINLKILTNTIEKSVR

SEQ ID NO: 30548 - DNA, 1827 bp, Arabidopsis thaliana
  misc_feature (1)..(1827): Ceres Seq. ID no. 4963044
atgcttcccagtgatgctgctgacccttcagtttgctatgttcctaatccttacaatccctaccagtattacaatgtatatgggagtggtcaagagtggactgactacccagcttacacaaatcctgagggtgttgacatgaattctggaatttatggagagaatgggactgttgtgtatcctcagggttatgggtatgcagcgtatccttactcgccagcaactagccctgctccacagcttggcggggaagggcagttgtacggtgctcagcagtatcagtatcctaactattttccaaacagtggaccgtatgcttcatctgtggctacacctacccagccggatctctctgcaaacaaacctgctggtgtgaagacactacctgcggatagcaataatgttgcttctgctgctggtatcacaaaaggaagtaatggatcagctccagtgaaaccaactaaccaggctacccttaacacctcaagtaatttgtatggtatgggtgctccaggaggaggtttggctgctggttatcaggaccccaggtatgcctatgaagggtattatgctcctgtgccgtggcacgatggctctaagtactctgatgtgcagagacctgtttctggtagtggagttgcatcctcctattctaagtctagcacagtaccttcatcgaggaatcaaaactaccgctcaaattctcactacacgagcgtgcaccagccttcatcagtgactggctatggtacagctcaggggtactacaacaggatgtatcagaacaagttatatggtcagtatggtagcacagggagatctgctttgggttatggttcatctgggtatgattcaagaacaaatggaagaggatgggcggccacagacaacaaatacagaagctggggcaggggtaacagttactattacggaaatgagaacaatgtagatggtttgaatgaacttaacaggggacctagagctaagggcacaaagaaccagaagggaaatctagatgatagcttagaggttaaggagcagactggagaatcaaatgtaactgaggttggggaggcggataacacatgtgttgttcctgacagagaacagtacaataaagaagatttcccagtggattatgcaaatgccatgttctttatcatcaagtcatacagtgaagatgatgtgcacaagagcattaaatataatgtttgggctagcacaccaaatggaaacaagaagcttgctgcagcataccaggaagctcaacagaaagctggcggctgtcccatctttctgtttttctcggtcaatgcaagtggacaatttgttggtcttgctgaaatgacaggaccagttgatttcaacacaaatgtggagtactggcagcaagataagtggaccggctctttccccctcaagtggcatattgtgaaggatgtgccaaacagtttactgaagcatattactttagagaacaatgagaacaaacctgttaccaacagcagagacacacaagaggttaagttggagcaaggtttgaagattgtgaaaattttcaaggagcatagcagcaagacttgcattttggatgatttctcattctacgaggttcgacagaagactatcttggagaagaaagccaagcaaacccagaaacaggtaagcgaggagaaggtaaccgatgaaaagaaggaatctgcaactgcagagtcagcgagcaaggaatctcctgcagctgttcaaacgtccagtgatgttaaggttgctgagaatgggtctgttgctaaaccagtcacaggcgatgtggtggcaaatggttgctaa

SEQ ID NO: 30549 - protein, 608 aa, Arabidopsis thaliana
  misc_feature (1)..(608): Ceres Seq. ID no. 4963045
MLPSDAADPSVCYVPNPYNPYQYYNVYGSGQEWTDYPAYTNPEGVDMNSGIYGENGTVVYPQGYGYAAYPYSPATSPAPQLGGEGQLYGAQQYQYPNYFPNSGPYASSVATPTQPDLSANKPAGVKTLPADSNNVASAAGITKGSNGSAPVKPTNQATLNTSSNLYGMGAPGGGLAAGYQDPRYAYEGYYAPVPWHDGSKYSDVQRPVSGSGVASSYSKSSTVPSSRNQNYRSNSHYTSVHQPSSVTGYGTAQGYYNRMYQNKLYGQYGSTGRSALGYGSSGYDSRTNGRGWAATDNKYRSWGRGNSYYYGNENNVDGLNELNRGPRAKGTKNQKGNLDDSLEVKEQTGESNVTEVGEADNTCVVPDREQYNKEDFPVDYANAMFFIIKSYSEDDVHKSIKYNVWASTPNGNKKLAAAYQEAQQKAGGCPIFLFFSVNASGQFVGLAEMTGPVDFNTNVEYWQQDKWTGSFPLKWHIVKDVPNSLLKHITLENNENKPVTNSRDTQEVKLEQGLKIVKIFKEHSSKTCILDDFSFYEVRQKTILEKKAKQTQKQVSEEKVTDEKKESATAESASKESPAAVQTSSDVKVAENGSVAKPVTGDVVANGC

SEQ ID NO: 30550 - protein, 562 aa, Arabidopsis thaliana
  misc_feature (1)..(562): Ceres Seq. ID no. 4963046
MNSGIYGENGTVVYPQGYGYAAYPYSPATSPAPQLGGEGQLYGAQQYQYPNYFPNSGPYASSVATPTQPDLSANKPAGVKTLPADSNNVASAAGITKGSNGSAPVKPTNQATLNTSSNLYGMGAPGGGLAAGYQDPRYAYEGYYAPVPWHDGSKYSDVQRPVSGSGVASSYSKSSTVPSSRNQNYRSNSHYTSVHQPSSVTGYGTAQGYYNRMYQNKLYGQYGSTGRSALGYGSSGYDSRTNGRGWAATDNKYRSWGRGNSYYYGNENNVDGLNELNRGPRAKGTKNQKGNLDDSLEVKEQTGESNVTEVGEADNTCVVPDREQYNKEDFPVDYANAMFFIIKSYSEDDVHKSIKYNVWASTPNGNKKLAAAYQEAQQKAGGCPIFLFFSVNASGQFVGLAEMTGPVDFNTNVEYWQQDKWTGSFPLKWHIVKDVPNSLLKHITLENNENKPVTNSRDTQEVKLEQGLKIVKIFKEHSSKTCILDDFSFYEVRQKTILEKKAKQTQKQVSEEKVTDEKKESATAESASKESPAAVQTSSDVKVAENGSVAKPVTGDVVANGC

SEQ ID NO: 30551 - protein, 441 aa, Arabidopsis thaliana
  misc_feature (1)..(441): Ceres Seq. ID no. 4963047
MGAPGGGLAAGYQDPRYAYEGYYAPVPWHDGSKYSDVQRPVSGSGVASSYSKSSTVPSSRNQNYRSNSHYTSVHQPSSVTGYGTAQGYYNRMYQNKLYGQYGSTGRSALGYGSSGYDSRTNGRGWAATDNKYRSWGRGNSYYYGNENNVDGLNELNRGPRAKGTKNQKGNLDDSLEVKEQTGESNVTEVGEADNTCVVPDREQYNKEDFPVDYANAMFFIIKSYSEDDVHKSIKYNVWASTPNGNKKLAAAYQEAQQKAGGCPIFLFFSVNASGQFVGLAEMTGPVDFNTNVEYWQQDKWTGSFPLKWHIVKDVPNSLLKHITLENNENKPVTNSRDTQEVKLEQGLKIVKIFKEHSSKTCILDDFSFYEVRQKTILEKKAKQTQKQVSEEKVTDEKKESATAESASKESPAAVQTSSDVKVAENGSVAKPVTGDVVANGC

SEQ ID NO: 30552 - DNA, 1701 bp, Arabidopsis thaliana
  misc_feature (1)..(1701): Ceres Seq. ID no. 4963109
atgggcacatcatctgggtccaatcttcctcaccagatgctacctccacgtcagcaactacaaacatctctttcgcttgtatcttcagatccccacttgtcacggtctaattctggcattgtgcgtgaatcaccagctgaaagtgctagctctcaagaaacttggccaacctcaaaatctattatgggaaggaagacagatagcggaaagacagggcctgactctcatgatcaacatgtgatccgccatgtttccattgctgataaggtatcgctacgggacatagctagagagagacttgacatagtcgctgagagaatgcatcgattaccagaagaatatctcgaggagttaaagaatggtcttaaggctatccttgaaggaaatggtgcgcagcctatagatgagtttatgtttctgcagaagtttgtccagacgagatctgatttaacttcaaagacacttgtcagggctcaccgagtgcagcttgaagttcttgtggttataaacactggtatccaagcattcttgcacccaaacatcaatctctctcagtcatcactcatcgagatctttgtgtacaagagatgcagaaacatagcttgccaaaacgaactcccggctgatggttgtccctgtgagatatgcgctaataggaaaggcttctgcaacctgtgcatgtgtgtgatatgtaacaagtttgactttgcagtcaacacatgccgctggattggctgcgacgtgtgttctcattggactcatacggattgtgctattagggatggggagatttcgatgggagtttctcccaagagcgtatctgggatgggagaaatgctgttcaagtgtcgagcgtgcaaccatacttctgaattgctggggtgggtgaaagatgtgtttcagcactgtgcaccaaactgggatagggaatctttaatgaaggaacttgacttcgttagtaggattttccgtggaagcgaagatacaagaggccggaaactcttctggaagtgtgaggagcttatggagaagattaaaggtggactggctgaagcaacagcggccaagttgatactcatgtttttccaagaaattgaattggactctccaaagagccttgaaagcggagaaggtgggggtacgatagcacctcaagatgcatgcaaccgaattgctgaagttgtaaaggaaacactgaggaaaatggagatagtgggtgaggaaaagacgaggatgtacaagaaagcgcgaatggggcttgaggaatgcgagagagaggtagaagagaaagcaaagcaagtggcggaactgcagatggagaggcagaagaagaaacaacagatagaagaggtggagaggatagtgaggctgaagcaagcagaggcagagatgtttcagttaaaagcaaacgaggcaaaagtggaagcagagagattggaaaggattgtgaaagcgaaaaaggagaaaacagaagaggaatacgcaagtaactatttgaaactgaggctgagcgaggcggaggcagagaaagagtatctgtttgaaaagataaaagagcaggaaagtggtgggaatggtggtgaagcgtcacaagcagtgatgtactcaaagatcagagaaatgctgcatggatacaatgcatcgtcgccaagggtagatccaagatcaaaccagcgaaatcctttcagatccaatccttag

SEQ ID NO: 30553 - protein, 566 aa, Arabidopsis thaliana
  misc_feature (1)..(566): Ceres Seq. ID no. 4963110
MGTSSGSNLPHQMLPPRQQLQTSLSLVSSDPHLSRSNSGIVRESPAESASSQETWPTSKSIMGRKTDSGKTGPDSHDQHVIRHVSIADKVSLRDIARERLDIVAERMHRLPEEYLEELKNGLKAILEGNGAQPIDEFMFLQKFVQTRSDLTSKTLVRAHRVQLEVLVVINTGIQAFLHPNINLSQSSLIEIFVYKRCRNIACQNELPADGCPCEICANRKGFCNLCMCVICNKFDFAVNTCRWIGCDVCSHWTHTDCAIRDGEISMGVSPKSVSGMGEMLFKCRACNHTSELLGWVKDVFQHCAPNWDRESLMKELDFVSRIFRGSEDTRGRKLFWKCEELMEKIKGGLAEATAAKLILMFFQEIELDSPKSLESGEGGGTIAPQDACNRIAEVVKETLRKMEIVGEEKTRMYKKARMGLEECEREVEEKAKQVAELQMERQKKKQQIEEVERIVRLKQAEAEMFQLKANEAKVEAERLERIVKAKKEKTEEEYASNYLKLRLSEAEAEKEYLFEKIKEQESGGNGGEASQAVMYSKIREMLHGYNASSPRVDPRSNQRNPFRSNP

SEQ ID NO: 30554 - protein, 554 aa, Arabidopsis thaliana
  misc_feature (1)..(554): Ceres Seq. ID no. 4963111
MLPPRQQLQTSLSLVSSDPHLSRSNSGIVRESPAESASSQETWPTSKSIMGRKTDSGKTGPDSHDQHVIRHVSIADKVSLRDIARERLDIVAERMHRLPEEYLEELKNGLKAILEGNGAQPIDEFMFLQKFVQTRSDLTSKTLVRAHRVQLEVLVVINTGIQAFLHPNINLSQSSLIEIFVYKRCRNIACQNELPADGCPCEICANRKGFCNLCMCVICNKFDFAVNTCRWIGCDVCSHWTHTDCAIRDGEISMGVSPKSVSGMGEMLFKCRACNHTSELLGWVKDVFQHCAPNWDRESLMKELDFVSRIFRGSEDTRGRKLFWKCEELMEKIKGGLAEATAAKLILMFFQEIELDSPKSLESGEGGGTIAPQDACNRIAEVVKETLRKMEIVGEEKTRMYKKARMGLEECEREVEEKAKQVAELQMERQKKKQQIEEVERIVRLKQAEAEMFQLKANEAKVEAERLERIVKAKKEKTEEEYASNYLKLRLSEAEAEKEYLFEKIKEQESGGNGGEASQAVMYSKIREMLHGYNASSPRVDPRSNQRNPFRSNP

SEQ ID NO: 30555 - protein, 505 aa, Arabidopsis thaliana
  misc_feature (1)..(505): Ceres Seq. ID no. 4963112
MGRKTDSGKTGPDSHDQHVIRHVSIADKVSLRDIARERLDIVAERMHRLPEEYLEELKNGLKAILEGNGAQPIDEFMFLQKFVQTRSDLTSKTLVRAHRVQLEVLVVINTGIQAFLHPNINLSQSSLIEIFVYKRCRNIACQNELPADGCPCEICANRKGFCNLCMCVICNKFDFAVNTCRWIGCDVCSHWTHTDCAIRDGEISMGVSPKSVSGMGEMLFKCRACNHTSELLGWVKDVFQHCAPNWDRESLMKELDFVSRIFRGSEDTRGRKLFWKCEELMEKIKGGLAEATAAKLILMFFQEIELDSPKSLESGEGGGTIAPQDACNRIAEVVKETLRKMEIVGEEKTRMYKKARMGLEECEREVEEKAKQVAELQMERQKKKQQIEEVERIVRLKQAEAEMFQLKANEAKVEAERLERIVKAKKEKTEEEYASNYLKLRLSEAEAEKEYLFEKIKEQESGGNGGEASQAVMYSKIREMLHGYNASSPRVDPRSNQRNPFRSNP

SEQ ID NO: 30556 - DNA, 1368 bp, Arabidopsis thaliana
  misc_feature (1)..(1368): Ceres Seq. ID no. 4963123
atgaacttgttttggaacacaggattttgtgttatagttttagtggttgcgagggttggtcattggtggtaccaatggtcaaaccctaagtctaacggcaagttacctccgggatcaatgggtttcccgatcatcggagagacattagatttctttaagccttatggattctacgagatctccccatatctcaagaaaaagatgttaaggtatgggccattatttcggacaaacattcttggagtaaaaaccgtggtatcgacggataaggatgttaacatggagattttaagacaagagaacaagtctttcattttaagttatccggatggtttaatgaagccattgggaaaagatagcttgttcttgaagattggaaacatccacaagcacatcaaacaaataactcttcatcttttgtcctccgagggtttaaaacggaaaatattaaaagatatggaccgtgtgacacgcgagcatcttagttcgaaagctaaaacaggaagattggatgttaaggacgcagtttcaaaattgataatagcccacttgacacctaagatgatgagtaatctcaaaccacagactcaagcaaagcttatgggaatttttaaggccttcacttttgattggtttcggacatcctatcttatctctgccgggaagggtctctacaacaccctttgggcatgccgagaggggatgcgagagataaaggatatatatacaatgaggaaaacgtctgaggagaagtacgatgacttcctcaacacggcaatagaagagtcagagaaagcaggagagttattgaacgaaaatgcaattataaccctcatctttaccctttcatgtgtcactcaagataccacctcaaaggcgatttgcttggctgtgaaattcctattggaaaacccaaaagttctcgcagagttaaagaaagaacatgaggtgatccttgaaagcagagaagacaaagaaggtggagttacttgggaagaatacagacacaagatgactttcaccaacatgaaaagcggatacaccattccagcaggttggatagtgatgattataccttcagtggttcattttgatcctgaaatctatgaaaacccttttgagtttaatccatggagatgggaggggaaagagttgcgggctggatctaaaacgttcatggtgtttggaaccggacttagacaatgcgctggtgcagagtttgctaggcttcagatttcagtatttcttcatcatcttgttaccacttataatttctcgttgcaccaagactgcgaggtgcttcgtgtaccagctgctcacctccctaatggcatatctataaacatctccaagtgtcccaaaaaatga

SEQ ID NO: 30557 - protein, 455 aa, Arabidopsis thaliana
  misc_feature (1)..(455): Ceres Seq. ID no. 4963124
MNLFWNTGFCVIVLVVARVGHWWYQWSNPKSNGKLPPGSMGFPIIGETLDFFKPYGFYEISPYLKKKMLRYGPLFRTNILGVKTVVSTDKDVNMEILRQENKSFILSYPDGLMKPLGKDSLFLKIGNIHKHIKQITLHLLSSEGLKRKILKDMDRVTREHLSSKAKTGRLDVKDAVSKLIIAHLTPKMMSNLKPQTQAKLMGIFKAFTFDWFRTSYLISAGKGLYNTLWACREGMREIKDIYTMRKTSEEKYDDFLNTAIEESEKAGELLNENAIITLIFTLSCVTQDTTSKAICLAVKFLLENPKVLAELKKEHEVILESREDKEGGVTWEEYRHKMTFTNMKSGYTIPAGWIVMIIPSVVHFDPEIYENPFEFNPWRWEGKELRAGSKTFMVFGTGLRQCAGAEFARLQISVFLHHLVTTYNFSLHQDCEVLRVPAAHLPNGISINISKCPKK

SEQ ID NO: 30558 - protein, 416 aa, Arabidopsis thaliana
  misc_feature (1)..(416): Ceres Seq. ID no. 4963125
MGFPIIGETLDFFKPYGFYEISPYLKKKMLRYGPLFRTNILGVKTVVSTDKDVNMEILRQENKSFILSYPDGLMKPLGKDSLFLKIGNIHKHIKQITLHLLSSEGLKRKILKDMDRVTREHLSSKAKTGRLDVKDAVSKLIIAHLTPKMMSNLKPQTQAKLMGIFKAFTFDWFRTSYLISAGKGLYNTLWACREGMREIKDIYTMRKTSEEKYDDFLNTAIEESEKAGELLNENAIITLIFTLSCVTQDTTSKAICLAVKFLLENPKVLAELKKEHEVILESREDKEGGVTWEEYRHKMTFTNMKSGYTIPAGWIVMIIPSVVHFDPEIYENPFEFNPWRWEGKELRAGSKTFMVFGTGLRQCAGAEFARLQISVFLHHLVTTYNFSLHQDCEVLRVPAAHLPNGISINISKCPKK

SEQ ID NO: 30559 - protein, 388 aa, Arabidopsis thaliana
  misc_feature (1)..(388): Ceres Seq. ID no. 4963126
MLRYGPLFRTNILGVKTVVSTDKDVNMEILRQENKSFILSYPDGLMKPLGKDSLFLKIGNIHKHIKQITLHLLSSEGLKRKILKDMDRVTREHLSSKAKTGRLDVKDAVSKLIIAHLTPKMMSNLKPQTQAKLMGIFKAFTFDWFRTSYLISAGKGLYNTLWACREGMREIKDIYTMRKTSEEKYDDFLNTAIEESEKAGELLNENAIITLIFTLSCVTQDTTSKAICLAVKFLLENPKVLAELKKEHEVILESREDKEGGVTWEEYRHKMTFTNMKSGYTIPAGWIVMIIPSVVHFDPEIYENPFEFNPWRWEGKELRAGSKTFMVFGTGLRQCAGAEFARLQISVFLHHLVTTYNFSLHQDCEVLRVPAAHLPNGISINISKCPKK

SEQ ID NO: 30560 - DNA, 1086 bp, Arabidopsis thaliana
  misc_feature (1)..(1086): Ceres Seq. ID no. 4963170
atggaagaagataaccaagaaatacaacgtgacaatgtcggatcttcatctttctttaaaacatgtttcaacgcactcaatgctctttcaggaattggaatattatcggtaccatattcacttgctcgtggaggatggttgagtctttcacttttgttactcctagccgtaaccgccttctacacatccttactcattacaaaatgtatgaatgcggaccgcaacatcaaaacatatcccgacataggagaacgcgcatttggtagaccgggaagaatcattgtgtcagtcttcatgcacctagagctctatctagtcaccacgggtttcttgatcctcgagggcgacaatcttcacaatcttttcccgggttttaccatcgaaatgatcggattgagattgaatggcaaacaagctttcatggcgaccgtcgcctttgtcattatgccaactctatggtgggataatctcagcgtcttgtcgtatgtttctatgagtggcgttttagctacgactgtgacgcttggatcaatatcttggattggcgcatttgatgggattgggtttcatcaaaaaggaaagttgataaattggagtgggatccctactgctttgagcttatatgctttttgctatggtgcgcatccagttttgcccactttgtattcttctatgaaaagcaaacatcagttcaacaatgtggcaatatacacaactctcgtaaacccggtagccaaatacgcactgatgatcacaccaaccgtgaacactataaaagattggtttccttcacggtactccaaaaaggcatacttacatctcttgataagcacatttttcatcataagtagtgtcgtgatcgccgagacacttcccttttttggttatatgatgtcgctggttggagcattattgagcgttacggtttctatacttctgccttgtttatgttacttgaagatctttggaaactacaagaaaattgggtgtgagactataatgttgtttggaatggtagtgatgagtgtttttgttggggtaataggtacttacattgcacttcgagatataattggtagtgtataa

SEQ ID NO: 30561 - protein, 361 aa, Arabidopsis thaliana
  misc_feature (1)..(361): Ceres Seq. ID no. 4963171
MEEDNQEIQRDNVGSSSFFKTCFNALNALSGIGILSVPYSLARGGWLSLSLLLLLAVTAFYTSLLITKCMNADRNIKTYPDIGERAFGRPGRIIVSVFMHLELYLVTTGFLILEGDNLHNLFPGFTIEMIGLRLNGKQAFMATVAFVIMPTLWWDNLSVLSYVSMSGVLATTVTLGSISWIGAFDGIGFHQKGKLINWSGIPTALSLYAFCYGAHPVLPTLYSSMKSKHQFNNVAIYTTLVNPVAKYALMITPTVNTIKDWFPSRYSKKAYLHLLISTFFIISSVVIAETLPFFGYMMSLVGALLSVTVSILLPCLCYLKIFGNYKKIGCETIMLFGMVVMSVFVGVIGTYIALRDIIGSV

SEQ ID NO: 30562 - protein, 292 aa, Arabidopsis thaliana
  misc_feature (1)..(292): Ceres Seq. ID no. 4963172
MNADRNIKTYPDIGERAFGRPGRIIVSVFMHLELYLVTTGFLILEGDNLHNLFPGFTIEMIGLRLNGKQAFMATVAFVIMPTLWWDNLSVLSYVSMSGVLATTVTLGSISWIGAFDGIGFHQKGKLINWSGIPTALSLYAFCYGAHPVLPTLYSSMKSKHQFNNVAIYTTLVNPVAKYALMITPTVNTIKDWFPSRYSKKAYLHLLISTFFIISSVVIAETLPFFGYMMSLVGALLSVTVSILLPCLCYLKIFGNYKKIGCETIMLFGMVVMSVFVGVIGTYIALRDIIGSV

SEQ ID NO: 30563 - protein, 263 aa, Arabidopsis thaliana
  misc_feature (1)..(263): Ceres Seq. ID no. 4963173
MHLELYLVTTGFLILEGDNLHNLFPGFTIEMIGLRLNGKQAFMATVAFVIMPTLWWDNLSVLSYVSMSGVLATTVTLGSISWIGAFDGIGFHQKGKLINWSGIPTALSLYAFCYGAHPVLPTLYSSMKSKHQFNNVAIYTTLVNPVAKYALMITPTVNTIKDWFPSRYSKKAYLHLLISTFFIISSVVIAETLPFFGYMMSLVGALLSVTVSILLPCLCYLKIFGNYKKIGCETIMLFGMVVMSVFVGVIGTYIALRDIIGSV

SEQ ID NO: 30564 - DNA, 489 bp, Arabidopsis thaliana
  misc_feature (1)..(489): Ceres Seq. ID no. 4963250
atggctcgtcgtcgttttggggctatacgtgggtcgaaagcaaaaacaagtgtagatgtgcctttgaatggcacaaaagatgtgttagtagaagaagattggagtgaattgaggaagcctagtgtagtagcttctgaagatttctggactaataccactttagatatggaaagcaatgctcacggaagtgtttcttcaatcagtacaaccaatctgactattgattctcaaggatgtggttccagctctaatgaacctgctgaatttgttaaccatggtcttgtgctatggaatcaaactcggcagcaatgggtgggagataaaagatccgagagccgtaaaagcgttggtcgagaaccgattctaaatgagaatgtgacttatgagagtctacttgggagcaacaagcgatttccgaggcctatacctcttgatgaaatggtgcagtttcttgttgaagtttgggaagaagaaggtctatacggctaa

SEQ ID NO: 30565 - protein, 162 aa, Arabidopsis thaliana
  misc_feature (1)..(162): Ceres Seq. ID no. 4963251
MARRRFGAIRGSKAKTSVDVPLNGTKDVLVEEDWSELRKPSVVASEDFWTNTTLDMESNAHGSVSSISTTNLTIDSQGCGSSSNEPAEFVNHGLVLWNQTRQQWVGDKRSESRKSVGREPILNENVTYESLLGSNKRFPRPIPLDEMVQFLVEVWEEEGLYG

SEQ ID NO: 30566 - protein, 107 aa, Arabidopsis thaliana
  misc_feature (1)..(107): Ceres Seq. ID no. 4963252
MESNAHGSVSSISTTNLTIDSQGCGSSSNEPAEFVNHGLVLWNQTRQQWVGDKRSESRKSVGREPILNENVTYESLLGSNKRFPRPIPLDEMVQFLVEVWEEEGLYG

SEQ ID NO: 30567 - DNA, 1218 bp, Arabidopsis thaliana
  misc_feature (1)..(1218): Ceres Seq. ID no. 4963513
atggtttttcagattgaccttaggagagccaataacacggaaattatgcttactaaagtaaagatgccgctacctgatatgatggctgcagttctggcaatggatgagtctgtactagatgttgatcaaatagagaatcttataaagttttgcccaaccaaggaggagatggagctacttaagaactacactggtgacaagacgaccttgggaaagtgtgagcagtacttcctagagctaatgaaggtgccacgagttgaggcaaagcttagagtcttttcttttaaatttcaattcggcactcaggtctggtggaattacttaataccgttattttctgtctatttgattctttggaggacaaaatataattttattagactattgataatgatgttttttgtgcagataacagaattcaaaaaaagtttaaatgctgtaaattctgcgtgcgaggaggtccgctcttcacaaaagctaaaagaaattatgaaaaagattctttacctggggaacacattgaaccaaggaactgcaaggggcgctgctgttggattcaagttggacagtttatcgaaattaagtgatacacgtgctgctaacagcaagatgactctcatgcattatctttgcaaggtccttgcttcaaaggcatcagttctactggacttccccaaggatcttgaaagtcttgaatcagcctcgaagatacaattgaagtctctggctgaggaaatgcaagctataatcaaaggattggaaaaactgaaccaggagctcactgcatccgaaagtgatggtcctgtttctgatgttttccgtaaaacattgggggacttcatatccgttgctgagactgaagtggcaactgtatcgagtctttactcggtcgtggtaatttgtcaacctctactagattccaagcgcctttaccttgacaatgtggttgatcctgaaaatgatttttgtgttgtttcttatgttggacggcagggaagaaatgctgatgctcttgctcactattttggcgaggatcctaaccgttgtccatttgaacaagttactgcaaccctcttgaattttataaggttgtttaagaaagcacacgaagagaatgtcaagcaagcggagctagagaagaagaaagctcttaaggaagcggaaatggagaaggcaaaaggagtcaacctcacaaagaaaccagttgatgatagctga

SEQ ID NO: 30568 - protein, 405 aa, Arabidopsis thaliana
  misc_feature (1)..(405): Ceres Seq. ID no. 4963514
MVFQIDLRRANNTEIMLTKVKMPLPDMMAAVLAMDESVLDVDQIENLIKFCPTKEEMELLKNYTGDKTTLGKCEQYFLELMKVPRVEAKLRVFSFKFQFGTQVWWNYLIPLFSVYLILWRTKYNFIRLLIMMFFVQITEFKKSLNAVNSACEEVRSSQKLKEIMKKILYLGNTLNQGTARGAAVGFKLDSLSKLSDTRAANSKMTLMHYLCKVLASKASVLLDFPKDLESLESASKIQLKSLAEEMQAIIKGLEKLNQELTASESDGPVSDVFRKTLGDFISVAETEVATVSSLYSVVVICQPLLDSKRLYLDNVVDPENDFCVVSYVGRQGRNADALAHYFGEDPNRCPFEQVTATLLNFIRLFKKAHEENVKQAELEKKKALKEAEMEKAKGVNLTKKPVDDS

SEQ ID NO: 30569 - protein, 390 aa, Arabidopsis thaliana
  misc_feature (1)..(390): Ceres Seq. ID no. 4963515
MLTKVKMPLPDMMAAVLAMDESVLDVDQIENLIKFCPTKEEMELLKNYTGDKTTLGKCEQYFLELMKVPRVEAKLRVFSFKFQFGTQVWWNYLIPLFSVYLILWRTKYNFIRLLIMMFFVQITEFKKSLNAVNSACEEVRSSQKLKEIMKKILYLGNTLNQGTARGAAVGFKLDSLSKLSDTRAANSKMTLMHYLCKVLASKASVLLDFPKDLESLESASKIQLKSLAEEMQAIIKGLEKLNQELTASESDGPVSDVFRKTLGDFISVAETEVATVSSLYSVVVICQPLLDSKRLYLDNVVDPENDFCVVSYVGRQGRNADALAHYFGEDPNRCPFEQVTATLLNFIRLFKKAHEENVKQAELEKKKALKEAEMEKAKGVNLTKKPVDDS

SEQ ID NO: 30570 - protein, 384 aa, Arabidopsis thaliana
  misc_feature (1)..(384): Ceres Seq. ID no. 4963516
MPLPDMMAAVLAMDESVLDVDQIENLIKFCPTKEEMELLKNYTGDKTTLGKCEQYFLELMKVPRVEAKLRVFSFKFQFGTQVWWNYLIPLFSVYLILWRTKYNFIRLLIMMFFVQITEFKKSLNAVNSACEEVRSSQKLKEIMKKILYLGNTLNQGTARGAAVGFKLDSLSKLSDTRAANSKMTLMHYLCKVLASKASVLLDFPKDLESLESASKIQLKSLAEEMQAIIKGLEKLNQELTASESDGPVSDVFRKTLGDFISVAETEVATVSSLYSVVVICQPLLDSKRLYLDNVVDPENDFCVVSYVGRQGRNADALAHYFGEDPNRCPFEQVTATLLNFIRLFKKAHEENVKQAELEKKKALKEAEMEKAKGVNLTKKPVDDS

SEQ ID NO: 30571 - DNA, 1290 bp, Arabidopsis thaliana
  misc_feature (1)..(1290): Ceres Seq. ID no. 4963595
atgctaaaatgtgtttctgtccaaattcaaaccagttttgtcttgtcttgtcttcttcttcttcagagcattgcaatgaaagttccagattcttcttcaccgaccggagttctcgaagaattcttcagaaccgaagaattcaatagctcctccgagacggtcaagaacccttcctcttctcgtttccgcaagatggttcagcttctcagaagcaaatccaaaaagtctcttgagaatgtcaagattccgtttcacaacaatggtgttattaagagttcttttagaagatgcagtagcatgagagaaaatctcagatttagctccaatgattctcactttcttctacattctcctagaagaatcttcaccttctctgacctcaagtctgctacaaacaatttctctttagaaaatctaattgggaaaggaggttatgctgaagtttacaaagggatgttaccaaatggacaaatggtagcgataaaacggttgatgcggggaaatagtgaagagatcattgtagactttctttcggagatgggtataatggcacatgttaaccatcccaacatagctaagcttttaggctatggagttgaaggaggaatgcatcttgttcttgagttatcacctcatggcagcttagcttctatgctctatagctccaaggagaagatgaaatggagcattaggtacaagatagcattaggagttgcggagggtctagtgtatcttcatagaggatgtcataggagaattatacatagagatatcaaagccgcaaacattcttctcacacatgatttttctcctcagatatgtgactttgggcttgcgaagtggttacctgaaaattggacacaccacattgtttccaaatttgagggcacattcgggtatcttgctccagagtacttaacacatgggatagtagatgaaaagaccgatgtattcgccttgggtgtacttttactggaacttgttaccggacgacgagctctcgattactccaagcaaagtcttgttctatgggctaaaccattgatgaagaagaacaaaattagagagctaatcgatccatctctggcgggtgagtacgaatggaggcagataaaacttgtgcttttggctgctgcgttatcaatccaacaatcatcgatagagaggcctgaaatgagtcaggttgttgagatcctcaaaggcaacttgaaagatctcaagtgcatcatgaaatgcagagttcccttttataggaaagctttcagggatgaagttggcaaaaaagattag

SEQ ID NO: 30572 - protein, 429 aa, Arabidopsis thaliana
  misc_feature (1)..(429): Ceres Seq. ID no. 4963596
MLKCVSVQIQTSFVLSCLLLLQSIAMKVPDSSSPTGVLEEFFRTEEFNSSSETVKNPSSSRFRKMVQLLRSKSKKSLENVKIPFHNNGVIKSSFRRCSSMRENLRFSSNDSHFLLHSPRRIFTFSDLKSATNNFSLENLIGKGGYAEVYKGMLPNGQMVAIKRLMRGNSEEIIVDFLSEMGIMAHVNHPNIAKLLGYGVEGGMHLVLELSPHGSLASMLYSSKEKMKWSIRYKIALGVAEGLVYLHRGCHRRIIHRDIKAANILLTHDFSPQICDFGLAKWLPENWTHHIVSKFEGTFGYLAPEYLTHGIVDEKTDVFALGVLLLELVTGRRALDYSKQSLVLWAKPLMKKNKIRELIDPSLAGEYEWRQIKLVLLAAALSIQQSSIERPEMSQVVEILKGNLKDLKCIMKCRVPFYRKAFRDEVGKKD

SEQ ID NO: 30573 - protein, 404 aa, Arabidopsis thaliana
  misc_feature (1)..(404): Ceres Seq. ID no. 4963597
MKVPDSSSPTGVLEEFFRTEEFNSSSETVKNPSSSRFRKMVQLLRSKSKKSLENVKIPFHNNGVIKSSFRRCSSMRENLRFSSNDSHFLLHSPRRIFTFSDLKSATNNFSLENLIGKGGYAEVYKGMLPNGQMVAIKRLMRGNSEEIIVDFLSEMGIMAHVNHPNIAKLLGYGVEGGMHLVLELSPHGSLASMLYSSKEKMKWSIRYKIALGVAEGLVYLHRGCHRRIIHRDIKAANILLTHDFSPQICDFGLAKWLPENWTHHIVSKFEGTFGYLAPEYLTHGIVDEKTDVFALGVLLLELVTGRRALDYSKQSLVLWAKPLMKKNKIRELIDPSLAGEYEWRQIKLVLLAAALSIQQSSIERPEMSQVVEILKGNLKDLKCIMKCRVPFYRKAFRDEVGKKD

SEQ ID NO: 30574 - protein, 365 aa, Arabidopsis thaliana
  misc_feature (1)..(365): Ceres Seq. ID no. 4963598
MVQLLRSKSKKSLENVKIPFHNNGVIKSSFRRCSSMRENLRFSSNDSHFLLHSPRRIFTFSDLKSATNNFSLENLIGKGGYAEVYKGMLPNGQMVAIKRLMRGNSEEIIVDFLSEMGIMAHVNHPNIAKLLGYGVEGGMHLVLELSPHGSLASMLYSSKEKMKWSIRYKIALGVAEGLVYLHRGCHRRIIHRDIKAANILLTHDFSPQICDFGLAKWLPENWTHHIVSKFEGTFGYLAPEYLTHGIVDEKTDVFALGVLLLELVTGRRALDYSKQSLVLWAKPLMKKNKIRELIDPSLAGEYEWRQIKLVLLAAALSIQQSSIERPEMSQVVEILKGNLKDLKCIMKCRVPFYRKAFRDEVGKKD

SEQ ID NO: 30575 - DNA, 1311 bp, Arabidopsis thaliana
  misc_feature (1)..(1311): Ceres Seq. ID no. 4963751
atgctaaattcgtctggagtaagaactcaacgaagaagcccaagacctttgtctctaggaggtagaaagattattactccaacaaaatttgcttatgatcatcataatcctgataaagttttggattttgtagaaatggattgcttagaacccaaaacaaagaacaatctcactggaaagcttctcttagtagcttcactcttaattttagccattattgtgatcagtcaatcttcaagtttcacatctccaagcgcgttttctcaaagagaggaaggagtgactcatgtgttagtcactggtggtgctggttatatcgggtcacatgcggctttaagacttcttagagattcataccgcgtaaccattgtggacaatctttcgcgtggaaatcttggtgcggttaagactttacagcaattattcccgcagacaggaagacttcagttcatttatgctgacttaggagatcccttagcggtcgagaaaatcttctcggagaatgcttttgacgctgtaatgcattttgctgcggtagcttatgtcggagaaagcactctttatcctctaaaatattaccataacattacatcaaacacgttaggagttcttgaagctatggctagacataaagtaaagaaactgatatattctagcacttgtgctacatatggagagcctgaaaaaatgccgattactgaagacactccacaggtaccgattaatccatacggaaaagctaaaaagatggcagaggatatgatcttggatttctcaaagaactctgacatggcggttatgatcttaagatacttcaatgtgattggttcagatccaggaggtagattaggagaagcgccaagacccgaacttcgtgagcaaggaaggatttctggtgcttgtttcgatgcagctcgtggtttcattcccggactacaagtgaaaggaacggattacaaaacatcggacggtacttgcattagagactatatagatgttactgacctcgtggatgctcacgtgaaggctctcgagaaagctcagcctcgaaaagtcggtatctacaatgttggaaccggaaaagggagatcggttaaagaattcgttgaggcatgtaagaaggcgacaggagttgagatcaaagtagatttcttgcctcgacgaccgggagattacgcagaggtttacagtgatccaacaaagattttgaaagatttgaattggactgctcgattcactaatcttcaagatagtcttcaagttgcttggagatggcaaaaaattcatcctcatggatataattcttattaa

SEQ ID NO: 30576 - protein, 436 aa, Arabidopsis thaliana
  misc_feature (1)..(436): Ceres Seq. ID no. 4963752
MLNSSGVRTQRRSPRPLSLGGRKIITPTKFAYDHHNPDKVLDFVEMDCLEPKTKNNLTGKLLLVASLLILAIIVISQSSSFTSPSAFSQREEGVTHVLVTGGAGYIGSHAALRLLRDSYRVTIVDNLSRGNLGAVKTLQQLFPQTGRLQFIYADLGDPLAVEKIFSENAFDAVMHFAAVAYVGESTLYPLKYYHNITSNTLGVLEAMARHKVKKLIYSSTCATYGEPEKMPITEDTPQVPINPYGKAKKMAEDMILDFSKNSDMAVMILRYFNVIGSDPGGRLGEAPRPELREQGRISGACFDAARGFIPGLQVKGTDYKTSDGTCIRDYIDVTDLVDAHVKALEKAQPRKVGIYNVGTGKGRSVKEFVEACKKATGVEIKVDFLPRRPGDYAEVYSDPTKILKDLNWTARFTNLQDSLQVAWRWQKIHPHGYNSY

SEQ ID NO: 30577 - protein, 391 aa, Arabidopsis thaliana; identical to SEQ ID NO: 28776
  misc_feature (1)..(391): Ceres Seq. ID no. 4963753

SEQ ID NO: 30578 - protein, 263 aa, Arabidopsis thaliana; identical to SEQ ID NO: 28777
  misc_feature (1)..(263): Ceres Seq. ID no. 4963754

SEQ ID NO: 30579 - DNA, 819 bp, Arabidopsis thaliana
  misc_feature (1)..(819): Ceres Seq. ID no. 4963830
atgggagacgtatatttcaaccatttcgctcagcaactgcagatgtctgaccaagagaagggtgaaatgtcaagacattcacaccctcattcaatcaatgaagaatctgagtcgtcaactctggaaagggtagcagcagagtcattaacaaacaaagtccttgatagaggactaatggagtatggatgtccacattacagaagaaggtgttgcattagagctccttgctgtaatgagatctttggttgccatcactgtcattatgaggcgaagcagaacaacataaatgtagatcagaagcagaggcatgatattcctcgccaccaagttgaacaggttatttgtttactttgtggtactgaacaagaggtgggccaaatttgtatccactgtggagtgtgcatggggaagtacttctgtaaagtctgcaagctctacgatgatgataacggtcacccttgtgtcgaaggagcaatgcatcacgactgccccatttgctttgagtttctgtttgaatcacggaacgatgtgacggttttaccatgtggacacacaattcatcagaagtgcttggaggaaatgagagatcattaccaatatgcgtgcccactttgctcaaaatctgtatgcgacatgtcaaaagtgtgggagaagtttgacatggagattgcggctacaccaatgccagaaccataccagaacagaatggttcagattctctgcaacgactgtgggaagaaagcagaggtacagtaccatgtggtggctcagaaatgcccaaactgcaaatcatacaacactcgccaaaccagaggctga

SEQ ID NO: 30580 - protein, 272 aa, Arabidopsis thaliana
  misc_feature (1)..(272): Ceres Seq. ID no. 4963831
MGDVYFNHFAQQLQMSDQEKGEMSRHSHPHSINEESESSTLERVAAESLTNKVLDRGLMEYGCPHYRRRCCIRAPCCNEIFGCHHCHYEAKQNNINVDQKQRHDIPRHQVEQVICLLCGTEQEVGQICIHCGVCMGKYFCKVCKLYDDDNGHPCVEGAMHHDCPICFEFLFESRNDVTVLPCGHTIHQKCLEEMRDHYQYACPLCSKSVCDMSKVWEKFDMEIAATPMPEPYQNRMVQILCNDCGKKAEVQYHVVAQKCPNCKSYNTRQTRG

SEQ ID NO: 30581 - protein, 258 aa, Arabidopsis thaliana
  misc_feature (1)..(258): Ceres Seq. ID no. 4963832
MSDQEKGEMSRHSHPHSINEESESSTLERVAAESLTNKVLDRGLMEYGCPHYRRRCCIRAPCCNEIFGCHHCHYEAKQNNINVDQKQRHDIPRHQVEQVICLLCGTEQEVGQICIHCGVCMGKYFCKVCKLYDDDNGHPCVEGAMHHDCPICFEFLFESRNDVTVLPCGHTIHQKCLEEMRDHYQYACPLCSKSVCDMSKVWEKFDMEIAATPMPEPYQNRMVQILCNDCGKKAEVQYHVVAQKCPNCKSYNTRQTRG

SEQ ID NO: 30582 - protein, 250 aa, Arabidopsis thaliana
  misc_feature (1)..(250): Ceres Seq. ID no. 4963833
MSRHSHPHSINEESESSTLERVAAESLTNKVLDRGLMEYGCPHYRRRCCIRAPCCNEIFGCHHCHYEAKQNNINVDQKQRHDIPRHQVEQVICLLCGTEQEVGQICIHCGVCMGKYFCKVCKLYDDDNGHPCVEGAMHHDCPICFEFLFESRNDVTVLPCGHTIHQKCLEEMRDHYQYACPLCSKSVCDMSKVWEKFDMEIAATPMPEPYQNRMVQILCNDCGKKAEVQYHVVAQKCPNCKSYNTRQTRG

SEQ ID NO: 30583 - DNA, 957 bp, Arabidopsis thaliana
  misc_feature (1)..(957): Ceres Seq. ID no. 4963861
atgcttaaagaagaaaacattcatttgcacactgaggattcagagcaagggaaattacctttgcttattttaagcttgaaagagagaagtgaagaaaaaaggccagcgattgtgtttatgcatggcacaaacacaaacaaagaatggttaaggccatggcttgaagcatatgcttcgcggggatatgtagccatcggtttagactctcgttaccacggtgaacgtgctgattgcaaaactgcatatcgagatgctcttatatcatcttggagaaatggaaacactatgccttttatctttgatactgtatgggatttgatcaaactagctgaatatcttactcagagggatgatatagacccgaaaaagataggaatcaccggtatttcgctaggagggatgcatgcttggtttgctgctgcagctgacactcgctattccgtggttgtcccattaatcggtgttcaggtgcttaacaagatagcagcaactatgaggcctattcttccttgtatgagtgagtatgaggatggtttcggttttagatgggcaatagagaatgatgagtgggaagcaagagtcaacagtatcaaacctttatttgaagaagcaaggattgatctcggaaagaacataatcgacaaagaactagtcgagaaggtgtggaacagaatagctcctggcctagcttcgaagtttgattcaccgtactcattaccagtgattgctccacggcctctttacatccttaacggcgcaaatgatcctcgatgtcctcttggcggactagaacttgcgttaaagagagctgaaaaggcgtataaggaaacagcttctcctggaaacttcaagttcaaagcagaagatggagttggacacgaagcgacgagtttcatgatcaaagaatcatcagactggtttgacaaattccttaaacaagaagatatgacaacttga

SEQ ID NO: 30584 - protein, 318 aa, Arabidopsis thaliana
  misc_feature (1)..(318): Ceres Seq. ID no. 4963862
MLKEENIHLHTEDSEQGKLPLLILSLKERSEEKRPAIVFMHGTNTNKEWLRPWLEAYASRGYVAIGLDSRYHGERADCKTAYRDALISSWRNGNTMPFIFDTVWDLIKLAEYLTQRDDIDPKKIGITGISLGGMHAWFAAAADTRYSVVVPLIGVQVLNKIAATMRPILPCMSEYEDGFGFRWAIENDEWEARVNSIKPLFEEARIDLGKNIIDKELVEKVWNRIAPGLASKFDSPYSLPVIAPRPLYILNGANDPRCPLGGLELALKRAEKAYKETASPGNFKFKAEDGVGHEATSFMIKESSDWFDKFLKQEDMTT

SEQ ID NO: 30585 - protein, 279 aa, Arabidopsis thaliana
  misc_feature (1)..(279): Ceres Seq. ID no. 4963863
MHGTNTNKEWLRPWLEAYASRGYVAIGLDSRYHGERADCKTAYRDALISSWRNGNTMPFIFDTVWDLIKLAEYLTQRDDIDPKKIGITGISLGGMHAWFAAAADTRYSVVVPLIGVQVLNKIAATMRPILPCMSEYEDGFGFRWAIENDEWEARVNSIKPLFEEARIDLGKNIIDKELVEKVWNRIAPGLASKFDSPYSLPVIAPRPLYILNGANDPRCPLGGLELALKRAEKAYKETASPGNFKFKAEDGVGHEATSFMIKESSDWFDKFLKQEDMTT

SEQ ID NO: 30586 - protein, 223 aa, Arabidopsis thaliana
  misc_feature (1)..(223): Ceres Seq. ID no. 4963864
MPFIFDTVWDLIKLAEYLTQRDDIDPKKIGITGISLGGMHAWFAAAADTRYSVVVPLIGVQVLNKIAATMRPILPCMSEYEDGFGFRWAIENDEWEARVNSIKPLFEEARIDLGKNIIDKELVEKVWNRIAPGLASKFDSPYSLPVIAPRPLYILNGANDPRCPLGGLELALKRAEKAYKETASPGNFKFKAEDGVGHEATSFMIKESSDWFDKFLKQEDMTT

SEQ ID NO: 30587 - DNA, 2679 bp, Arabidopsis thaliana
  misc_feature (1)..(2679): Ceres Seq. ID no. 4963955
atggatagtccttgttggcttttgctgctgctattaggagcttttgccattattggttgtgttcaagctcaggatcaacaagagtttatcagtttggattgcgggttacccatgactgaaccgtcttcttatactgagtcagtaaccggactacggttctcgtctgatgctgaattcatccagactggtgaaagtggtaaaatccaggcgagtatggagaatgactaccttaagccgtacacgaggctgaggtattttccagaggagagaaggaactgctatagtttgagtgttgacaagaacaggaaatatttgatcagggctaggttcatttatgggaattacgatggtcgtaactctaacccgatatttgaactgcatctaggacctaatctgtgggcaactatagatttgcaaaagtttgtgaatggtacaatggaggagatccttcacactccaacatcaaactctttgaacgtttgtcttgttaagacagggacaactacacccttgatctcagccttggaattacggccattaggaaataattcttatctcacagatggttctttgaatcttttcgttcggatatatctcaacaagacagatggctttcttcggtacccggatgatatttatgatcgcagatggcataattactttatggtggatgattggacccaaattttcaccactctcgaagtgaccaatgataacaattatgaaccaccaaaaaaggctcttgcagcggctgccacgccttctaatgccagcgcgccattgacaatcagttggccaccagacaatcctggtgaccaatattacttgtacagccacttctctgagatacaagatttacagaccaatgataccagagaatttgacatattatgggatggagctgttgttgaagaaggtttcatccctccaaagttaggggtgactactatccataatctttctccagtgacatgcaaaggagaaaattgcatttaccagctaataaaaacctcgaggtcaactcttccttctctacttaacgctcttgaaatctacacagttatccaatttccacgaaatcaacttcacctgctaattctcacatccttgagctctacatcagtggttgctgttaaaaatatcgaagctgcctataaattgagtagaatcaggtggcaaggagatccttgcgtccctcaaaagtatgcgtgggatggtttgaactgtagcaacaacacagatgtttctaaacctccaagagtattatccttaaatttgtcttcgagcggtttaactggaatcattgcggccgcaattcaaaaccttacacatttagaaaaactggacttgtcaaataacacactaactggagtggtgccggaatttctagcccagatgaaatcgttggtgatcataaacttaagcggcaacaatcttagtggtccccttcctcaaggtcttcgaagagagggactagaattactagttcaaggcaacccaaggctttgtctctctggttcctgcacagaaaaaaactcgaagaagaaattcccggtggtgattgttgcatcagttgcttctgtggccataattgttgctgtgttggttattatttttgttctcagtaagaaaaagtcatctactgtgggagctctacaacctccactgagtatgccaatggttcatgataattcacctgaaccatcaatcgagacgaaaaagagaaggtttacttattcagaggttatcaaaatgacgaataattttcaaagagttgtaggggaaggaggattcggtgttgtttgtcatggtactataaatggttctgaacaggtggctgttaaagttctctctcaatcatcaagtcaaggatataagcattttaaggcagaggttgatcttcttctacgagttcaccatacaaatttggtgagtcttgttggatattgcgatgaaagagatcacttggctctcatctatgagtttttgcccaagggagacttaagacaacatctatctggaaaaagcggtgggtcctttatcaactggggtaatcgtctacgaatagctctggaggctgcactaggattggaatatctacattctggatgcacaccaccaattgtacatagagatataaaaacgacaaacatattgctggacgaacagttaaaggccaagcttgccgatttcggcctttcgagatctttccctattggaggtgaaacacatatttcaactgtggttgctggtactcctggataccttgatcctgaatattaccagacaactcgactgggtgagaagagcgatgtgtacagcttcggaattgtgttattggagattatcacaaaccaacctgtgattgaccagtcccgttcaaagtctcacatatcacaatgggttggatttgagcttacccgaggagatattactaagatcatggatccaaacctgaacggggattacgaatctcgttctgtatggagagttcttgaactggcaatgtcgtgtgcgaatccttcttctgtgaaccgaccaaacatgtcccaagttgctaatgaactgaaagaatgtcttgtttctgaaaacttgagggaaaatatgaatatggactctcagaattctcttaaagtgagcatgagctttgacacagagttgtttccgagggcaaggtag

SEQ ID NO: 30588 - protein, 892 aa, Arabidopsis thaliana
  misc_feature (1)..(892): Ceres Seq. ID no. 4963956
MDSPCWLLLLLLGAFAIIGCVQAQDQQEFISLDCGLPMTEPSSYTESVTGLRFSSDAEFIQTGESGKIQASMENDYLKPYTRLRYFPEERRNCYSLSVDKNRKYLIRARFIYGNYDGRNSNPIFELHLGPNLWATIDLQKFVNGTMEEILHTPTSNSLNVCLVKTGTTTPLISALELRPLGNNSYLTDGSLNLFVRIYLNKTDGFLRYPDDIYDRRWHNYFMVDDWTQIFTTLEVTNDNNYEPPKKALAAAATPSNASAPLTISWPPDNPGDQYYLYSHFSEIQDLQTNDTREFDILWDGAVVEEGFIPPKLGVTTIHNLSPVTCKGENCIYQLIKTSRSTLPSLLNALEIYTVIQFPRNQLHLLILTSLSSTSVVAVKNIEAAYKLSRIRWQGDPCVPQKYAWDGLNCSNNTDVSKPPRVLSLNLSSSGLTGIIAAAIQNLTHLEKLDLSNNTLTGVVPEFLAQMKSLVIINLSGNNLSGPLPQGLRREGLELLVQGNPRLCLSGSCTEKNSKKKFPVVIVASVASVAIIVAVLVIIFVLSKKKSSTVGALQPPLSMPMVHDNSPEPSIETKKRRFTYSEVIKMTNNFQRVVGEGGFGVVCHGTINGSEQVAVKVLSQSSSQGYKHFKAEVDLLLRVHHTNLVSLVGYCDERDHLALIYEFLPKGDLRQHLSGKSGGSFINWGNRLRIALEAALGLEYLHSGCTPPIVHRDIKTTNILLDEQLKAKLADFGLSRSFPIGGETHISTVVAGTPGYLDPEYYQTTRLGEKSDVYSFGIVLLEIITNQPVIDQSRSKSHISQWVGFELTRGDITKIMDPNLNGDYESRSVWRVLELAMSCANPSSVNRPNMSQVANELKECLVSENLRENMNMDSQNSLKVSMSFDTELFPRAR

SEQ ID NO: 30589 - protein, 855 aa, Arabidopsis thaliana
  misc_feature (1)..(855): Ceres Seq. ID no. 4963957
MTEPSSYTESVTGLRFSSDAEFIQTGESGKIQASMENDYLKPYTRLRYFPEERRNCYSLSVDKNRKYLIRARFIYGNYDGRNSNPIFELHLGPNLWATIDLQKFVNGTMEEILHTPTSNSLNVCLVKTGTTTPLISALELRPLGNNSYLTDGSLNLFVRIYLNKTDGFLRYPDDIYDRRWHNYFMVDDWTQIFTTLEVTNDNNYEPPKKALAAAATPSNASAPLTISWPPDNPGDQYYLYSHFSEIQDLQTNDTREFDILWDGAVVEEGFIPPKLGVTTIHNLSPVTCKGENCIYQLIKTSRSTLPSLLNALEIYTVIQFPRNQLHLLILTSLSSTSVVAVKNIEAAYKLSRIRWQGDPCVPQKYAWDGLNCSNNTDVSKPPRVLSLNLSSSGLTGIIAAAIQNLTHLEKLDLSNNTLTGVVPEFLAQMKSLVIINLSGNNLSGPLPQGLRREGLELLVQGNPRLCLSGSCTEKNSKKKFPVVIVASVASVAIIVAVLVIIFVLSKKKSSTVGALQPPLSMPMVHDNSPEPSIETKKRRFTYSEVIKMTNNFQRVVGEGGFGVVCHGTINGSEQVAVKVLSQSSSQGYKHFKAEVDLLLRVHHTNLVSLVGYCDERDHLALIYEFLPKGDLRQHLSGKSGGSFINWGNRLRIALEAALGLEYLHSGCTPPIVHRDIKTTNILLDEQLKAKLADFGLSRSFPIGGETHISTVVAGTPGYLDPEYYQTTRLGEKSDVYSFGIVLLEIITNQPVIDQSRSKSHISQWVGFELTRGDITKIMDPNLNGDYESRSVWRVLELAMSCANPSSVNRPNMSQVANELKECLVSENLRENMNMDSQNSLKVSMSFDTELFPRAR

SEQ ID NO: 30590 - protein, 821 aa, Arabidopsis thaliana
  misc_feature (1)..(821): Ceres Seq. ID no. 4963958
MENDYLKPYTRLRYFPEERRNCYSLSVDKNRKYLIRARFIYGNYDGRNSNPIFELHLGPNLWATIDLQKFVNGTMEEILHTPTSNSLNVCLVKTGTTTPLISALELRPLGNNSYLTDGSLNLFVRIYLNKTDGFLRYPDDIYDRRWHNYFMVDDWTQIFTTLEVTNDNNYEPPKKALAAAATPSNASAPLTISWPPDNPGDQYYLYSHFSEIQDLQTNDTREFDILWDGAVVEEGFIPPKLGVTTIHNLSPVTCKGENCIYQLIKTSRSTLPSLLNALEIYTVIQFPRNQLHLLILTSLSSTSVVAVKNIEAAYKLSRIRWQGDPCVPQKYAWDGLNCSNNTDVSKPPRVLSLNLSSSGLTGIIAAAIQNLTHLEKLDLSNNTLTGVVPEFLAQMKSLVIINLSGNNLSGPLPQGLRREGLELLVQGNPRLCLSGSCTEKNSKKKFPVVIVASVASVAIIVAVLVIIFVLSKKKSSTVGALQPPLSMPMVHDNSPEPSIETKKRRFTYSEVIKMTNNFQRVVGEGGFGVVCHGTINGSEQVAVKVLSQSSSQGYKHFKAEVDLLLRVHHTNLVSLVGYCDERDHLALIYEFLPKGDLRQHLSGKSGGSFINWGNRLRIALEAALGLEYLHSGCTPPIVHRDIKTTNILLDEQLKAKLADFGLSRSFPIGGETHISTVVAGTPGYLDPEYYQTTRLGEKSDVYSFGIVLLEIITNQPVIDQSRSKSHISQWVGFELTRGDITKIMDPNLNGDYESRSVWRVLELAMSCANPSSVNRPNMSQVANELKECLVSENLRENMNMDSQNSLKVSMSFDTELFPRAR

SEQ ID NO: 30591 - DNA, 2649 bp, Arabidopsis thaliana
  misc_feature (1)..(2649): Ceres Seq. ID no. 4963967
atggagaggtctcttgagctcttgttgctccttatcagaactttggccatcattcatatttctcaagctcaaagccaacaagggttcatcagtttggattgtggtctacccgcgaatgaaccatctccttatacagagccgaggactggattgcagttttcttcggacgcagcattcatccagagtggaaaaattggtaggattcaagcaaatctggaggctgacttcctgaagccatcaacgacgatgagatattttccagacggaaaacggaactgctacaatctaaacgttgagaagggaagaaatcatcttatcagggctcggtttgtatatggaaattatgatggtcgtgacactggccccaagtttgatctgtatcttggacctaatccatgggccacgatagatttggcaaaacaagtgaatggtacacgtcccgagatcatgcacatcccaacatcaaacaagttgcaggtttgtcttgttaagactggggaaactacaccgctaatatcggttttggaagtacggccgatgggaagtggtacttatctcaccaagtctggctctctgaaactttactatcgagaatattttagcaagtctgattcttctctaaggtaccctgatgatatctatgaccgccaatggacttcgttctttgatacagagtggacacaaattaacaccactagcgatgtgggaaattccaatgactataagccaccaaaagtcgctctcactactgcggccattccaactaatgccagtgcgccattgacgaatgaatggagttcagtaaaccccgatgaacagtattacgtatacgcccatttttctgagatccaagagttgcaggcaaatgaaaccagggaattcaacatgttactaaatgggaaacttttttttggccctgtggttcctccaaagctagcaataagtactatcctaagtgtgtcgccgaatacttgtgaaggaggggagtgcaatttacagctgataagaaccaacagatcaactcttccacctctacttaacgcttatgaggtctacaaagttattcagtttccgcagttggaaacaaatgaaaccgacgtttctgctgtgaaaaacatccaagccacctatgaattgagtagaatcaactggcaaagcgatccatgcgtccctcaacagtttatgtgggatggtttaaactgcagcatcacagatataaccacgccaccaagaatcactactttaaacttgtcatcaagtggtttaactggaacgataacagctgccattcaaaatcttacgacactagaaaagctggacttgtcgaataataacttgaccggagaggtgccagaatttctaagcaacatgaaatcgctgttggtcataaacttaagcgggaacgatcttaacggtacaattcctcaatctctacaaaggaaaggacttgagctactttatcaaggaaaccccaggcttatttcccctggttcaactgaaaccaaatctggcaagagctttccagtaacaatagttgcatcagttggttctgcagccattcttattgttgtgctggttcttgtactttttctccgaaagaaaaagccgtcggctgttgaagttgttctcccgcgtccaagtaggccaacgatgaatgttccttatgctaactcacctgagccgtcaatcgagatgaaaaagagaaagtttacttattcagaggttacgaaaatgactaataatttcggaagagttgtaggggaaggaggatttggcgttgtctgccatggtactgtaaatggttctgaacaggtggctgttaaactactttcacaatcatcaactcaaggctataaagagttcaaggcagaggttgatcttcttctgagagttcaccatacgaatttggtaagccttgtcggatattgtgatgaaggagaccacttggcccttatctacgagtttgtacccaatggagacttaagacaacatttgtctggaaaaggaggtaaacccatcgtcaattggggtactcggctaagaatagcggcggaggcagcactaggtttggagtacttacacattggatgcacaccaccaatggttcatagagatgtcaaaactacaaacatattgctggacgagcattataaggccaaacttgctgattttgggctctcgagatctttccctgttggaggtgaatctcatgtttcgacggtgattgctggtactcctggttaccttgatccagatcggttgagtgagaaaagtgatgtttacagtttcgggattgttttattagagatgatcacaaaccaagcagtgattgatcgaaaccgcagaaagtctcacataacacaatgggtagggtctgagcttaacggaggagatattgctaagatcatggatctaaagcttaacggtgattatgattctcgttctgcgtggagagctcttgagctagcaatgtcgtgcgcggatcctacctcagcaagacgaccaaccatgtctcatgttgttattgaactaaaagagtgtctcgtgtctgaaaactcgaggagaaatatgagtcgaggcatggatacactaagttcccctgaagtgagcatgatctttgatgctgagatgattcccagagcaagatag

SEQ ID NO: 30592 - protein, 882 aa, Arabidopsis thaliana
  misc_feature (1)..(882): Ceres Seq. ID no. 4963968
MERSLELLLLLIRTLAIIHISQAQSQQGFISLDCGLPANEPSPYTEPRTGLQFSSDAAFIQSGKIGRIQANLEADFLKPSTTMRYFPDGKRNCYNLNVEKGRNHLIRARFVYGNYDGRDTGPKFDLYLGPNPWATIDLAKQVNGTRPEIMHIPTSNKLQVCLVKTGETTPLISVLEVRPMGSGTYLTKSGSLKLYYREYFSKSDSSLRYPDDIYDRQWTSFFDTEWTQINTTSDVGNSNDYKPPKVALTTAAIPTNASAPLTNEWSSVNPDEQYYVYAHFSEIQELQANETREFNMLLNGKLFFGPVVPPKLAISTILSVSPNTCEGGECNLQLIRTNRSTLPPLLNAYEVYKVIQFPQLETNETDVSAVKNIQATYELSRINWQSDPCVPQQFMWDGLNCSITDITTPPRITTLNLSSSGLTGTITAAIQNLTTLEKLDLSNNNLTGEVPEFLSNMKSLLVINLSGNDLNGTIPQSLQRKGLELLYQGNPRLISPGSTETKSGKSFPVTIVASVGSAAILIVVLVLVLFLRKKKPSAVEVVLPRPSRPTMNVPYANSPEPSIEMKKRKFTYSEVTKMTNNFGRVVGEGGFGVVCHGTVNGSEQVAVKLLSQSSTQGYKEFKAEVDLLLRVHHTNLVSLVGYCDEGDHLALIYEFVPNGDLRQHLSGKGGKPIVNWGTRLRIAAEAALGLEYLHIGCTPPMVHRDVKTTNILLDEHYKAKLADFGLSRSFPVGGESHVSTVIAGTPGYLDPDRLSEKSDVYSFGIVLLEMITNQAVIDRNRRKSHITQWVGSELNGGDIAKIMDLKLNGDYDSRSAWRALELAMSCADPTSARRPTMSHVVIELKECLVSENSRRNMSRGMDTLSSPEVSMIFDAEMIPRAR

SEQ ID NO: 30593 - protein, 800 aa, Arabidopsis thaliana
  misc_feature (1)..(800): Ceres Seq. ID no. 4963969
MRYFPDGKRNCYNLNVEKGRNHLIRARFVYGNYDGRDTGPKFDLYLGPNPWATIDLAKQVNGTRPEIMHIPTSNKLQVCLVKTGETTPLISVLEVRPMGSGTYLTKSGSLKLYYREYFSKSDSSLRYPDDIYDRQWTSFFDTEWTQINTTSDVGNSNDYKPPKVALTTAAIPTNASAPLTNEWSSVNPDEQYYVYAHFSEIQELQANETREFNMLLNGKLFFGPVVPPKLAISTILSVSPNTCEGGECNLQLIRTNRSTLPPLLNAYEVYKVIQFPQLETNETDVSAVKNIQATYELSRINWQSDPCVPQQFMWDGLNCSITDITTPPRITTLNLSSSGLTGTITAAIQNLTTLEKLDLSNNNLTGEVPEFLSNMKSLLVINLSGNDLNGTIPQSLQRKGLELLYQGNPRLISPGSTETKSGKSFPVTIVASVGSAAILIVVLVLVLFLRKKKPSAVEVVLPRPSRPTMNVPYANSPEPSIEMKKRKFTYSEVTKMTNNFGRVVGEGGFGVVCHGTVNGSEQVAVKLLSQSSTQGYKEFKAEVDLLLRVHHTNLVSLVGYCDEGDHLALIYEFVPNGDLRQHLSGKGGKPIVNWGTRLRIAAEAALGLEYLHIGCTPPMVHRDVKTTNILLDEHYKAKLADFGLSRSFPVGGESHVSTVIAGTPGYLDPDRLSEKSDVYSFGIVLLEMITNQAVIDRNRRKSHITQWVGSELNGGDIAKIMDLKLNGDYDSRSAWRALELAMSCADPTSARRPTMSHVVIELKECLVSENSRRNMSRGMDTLSSPEVSMIFDAEMIPRAR

SEQ ID NO: 30594 - protein, 733 aa, Arabidopsis thaliana
  misc_feature (1)..(733): Ceres Seq. ID no. 4963970
MHIPTSNKLQVCLVKTGETTPLISVLEVRPMGSGTYLTKSGSLKLYYREYFSKSDSSLRYPDDIYDRQWTSFFDTEWTQINTTSDVGNSNDYKPPKVALTTAAIPTNASAPLTNEWSSVNPDEQYYVYAHFSEIQELQANETREFNMLLNGKLFFGPVVPPKLAISTILSVSPNTCEGGECNLQLIRTNRSTLPPLLNAYEVYKVIQFPQLETNETDVSAVKNIQATYELSRINWQSDPCVPQQFMWDGLNCSITDITTPPRITTLNLSSSGLTGTITAAIQNLTTLEKLDLSNNNLTGEVPEFLSNMKSLLVINLSGNDLNGTIPQSLQRKGLELLYQGNPRLISPGSTETKSGKSFPVTIVASVGSAAILIVVLVLVLFLRKKKPSAVEVVLPRPSRPTMNVPYANSPEPSIEMKKRKFTYSEVTKMTNNFGRVVGEGGFGVVCHGTVNGSEQVAVKLLSQSSTQGYKEFKAEVDLLLRVHHTNLVSLVGYCDEGDHLALIYEFVPNGDLRQHLSGKGGKPIVNWGTRLRIAAEAALGLEYLHIGCTPPMVHRDVKTTNILLDEHYKAKLADFGLSRSFPVGGESHVSTVIAGTPGYLDPDRLSEKSDVYSFGIVLLEMITNQAVIDRNRRKSHITQWVGSELNGGDIAKIMDLKLNGDYDSRSAWRALELAMSCADPTSARRPTMSHVVIELKECLVSENSRRNMSRGMDTLSSPEVSMIFDAEMIPRAR

SEQ ID NO: 30595 - DNA, 1500 bp, Arabidopsis thaliana
  misc_feature (1)..(1500): Ceres Seq. ID no. 4964030
atgataaattatagtagttgttcatatctcttgaagctgtgtagaacccttaaacatctgcatcagtttcatgcccaattcatcacttccggcagaatctctaatgatttcaaacaaaactctgttttcgccaatgtcctcttcgccatcacctctatttcaccgtctgcgtcggcgtcgaaggaggtcgtgagctacgcgacttcagttttcagattcatcacaaacccttcaacgttttgtttcaatacgatcattaggatttgtacgcttcatgagccgtcgtctctgtcttctaaacgtttcttcgtcgagatgcgacgtcgctctgttcctccagatttccacactttccctttcgtattcaaggcttgtgcagcaaagaagaatggtgatcttacattagtcaagactctgcattgtcaagctttgagattcggattgttatctgatttgttcactttgaacactctgattcgtgtttactcattgattgctccaatcgatagtgccttgcaactgttcgacgaaaatcctcaaagagatgttgttacctacaatgtgttgatcgacgggttagtgaaggcacgtgagattgttcgtgcaagagagttgtttgattcaatgcccttacgtgatttggtttcgtggaatagtctcatttctggttatgcgcagatgaatcattgcagagaagcaatcaaactcttcgacgagatggttgctttgggtctaaaacccgataatgtcgccattgtttcaactctttcagcttgtgcacaatcaggggattggcaaaaagggaaagctattcatgattacacgaaaaggaagagacttttcattgattccttcttagctactggattggtggatttctatgcaaaatgtggtttcatcgatacagcgatggagatcttcgaattatgttcagataaaactttattcacatggaatgcaatgatcactggtcttgcaatgcacggtaacggtgagctaacggttgattacttccgtaagatggttagttctggaatcaaaccagacggagtaaccttcataagtgttttagtgggttgcagccattctggtctagttgatgaagccaggaacctttttgaccaaatgagatctttgtatgatgttaatagagagatgaagcattacgggtgtatggcggatttgcttggaagagcaggattgatcgaagaagcagcggaaatgatcgagcaaatgcctaaagatggaggaaacagagagaaactcttagcatggagcggtttgttaggcggatgcagaatccacgggaacatagagatcgcggagaaagccgcaaatcgagtcaaggcgttgagtcccgaagatggaggagtgtataaagttatggtggaaatgtatgcaaacgcagagagatgggaggaagtagttaaggttagagaaataatagacagagacaagaaagtgaagaagaatgttggatttagtaaagttttgtcatag

SEQ ID NO: 30596 - protein, 499 aa, Arabidopsis thaliana
  misc_feature (1)..(499): Ceres Seq. ID no. 4964031
MINYSSCSYLLKLCRTLKHLHQFHAQFITSGRISNDFKQNSVFANVLFAITSISPSASASKEVVSYATSVFRFITNPSTFCFNTIIRICTLHEPSSLSSKRFFVEMRRRSVPPDFHTFPFVFKACAAKKNGDLTLVKTLHCQALRFGLLSDLFTLNTLIRVYSLIAPIDSALQLFDENPQRDVVTYNVLIDGLVKAREIVRARELFDSMPLRDLVSWNSLISGYAQMNHCREAIKLFDEMVALGLKPDNVAIVSTLSACAQSGDWQKGKAIHDYTKRKRLFIDSFLATGLVDFYAKCGFIDTAMEIFELCSDKTLFTWNAMITGLAMHGNGELTVDYFRKMVSSGIKPDGVTFISVLVGCSHSGLVDEARNLFDQMRSLYDVNREMKHYGCMADLLGRAGLIEEAAEMIEQMPKDGGNREKLLAWSGLLGGCRIHGNIEIAEKAANRVKALSPEDGGVYKVMVEMYANAERWEEVVKVREIIDRDKKVKKNVGFSKVLS

SEQ ID NO: 30597 - protein, 394 aa, Arabidopsis thaliana
  misc_feature (1)..(394): Ceres Seq. ID no. 4964032
MRRRSVPPDFHTFPFVFKACAAKKNGDLTLVKTLHCQALRFGLLSDLFTLNTLIRVYSLIAPIDSALQLFDENPQRDVVTYNVLIDGLVKAREIVRARELFDSMPLRDLVSWNSLISGYAQMNHCREAIKLFDEMVALGLKPDNVAIVSTLSACAQSGDWQKGKAIHDYTKRKRLFIDSFLATGLVDFYAKCGFIDTAMEIFELCSDKTLFTWNAMITGLAMHGNGELTVDYFRKMVSSGIKPDGVTFISVLVGCSHSGLVDEARNLFDQMRSLYDVNREMKHYGCMADLLGRAGLIEEAAEMIEQMPKDGGNREKLLAWSGLLGGCRIHGNIEIAEKAANRVKALSPEDGGVYKVMVEMYANAERWEEVVKVREIIDRDKKVKKNVGFSKVLS

SEQ ID NO: 30598 - protein, 291 aa, Arabidopsis thaliana
  misc_feature (1)..(291): Ceres Seq. ID no. 4964033
MPLRDLVSWNSLISGYAQMNHCREAIKLFDEMVALGLKPDNVAIVSTLSACAQSGDWQKGKAIHDYTKRKRLFIDSFLATGLVDFYAKCGFIDTAMEIFELCSDKTLFTWNAMITGLAMHGNGELTVDYFRKMVSSGIKPDGVTFISVLVGCSHSGLVDEARNLFDQMRSLYDVNREMKHYGCMADLLGRAGLIEEAAEMIEQMPKDGGNREKLLAWSGLLGGCRIHGNIEIAEKAANRVKALSPEDGGVYKVMVEMYANAERWEEVVKVREIIDRDKKVKKNVGFSKVLS

SEQ ID NO: 30599 - DNA, 1155 bp, Arabidopsis thaliana
  misc_feature (1)..(1155): Ceres Seq. ID no. 4964091
atgtataagaatcagcttcaagagcttgcacagagaagttgtttcaacttaccatcatatacttgcataagagaaggaccagatcatgctccaagattcaaagcttctgttaacttcaatggtgagatatttgagagtcccacttactgttctactctcagacaagctgagcatgcagctgctgaagtttcccttaatgtcctttcgtctagagtcccttcaaagtctctaactgctaagattcttgatgagacagggatttacaagaacctgcttcaagagacagcacatagagctggtcttgatctaccaatgtacacaagtgtgagatcaggatcttgtcacttcccaggtttctcttgtactgttgaacttgctgggatgacgtttacaggagaatcagcaaagacaaagaaacaagctgagaaaaacgcagccattgcagcttggtcctctttgaagaaaaagaaggaacaagaagcagtagcaagagtactctcaagatttaaacccaaagaagtaagaagacgagagacaacaaaccaatggagaagaagaacaagtcaacaagattcaaacaaggatttgttgattgagagattgagatggatcaatcttttgaccaatcaagcttcttcatcatcatcaacatcaacaccgaatcaacacaaaaactccagtttcatctctctaattcccccaccaccaccacctaaatcctccaaaattttgccatttatccagcaatacaaagacagatcatcacaagaagctaagacagagacagcgacagagatgatcaacagcaaagccaaagtcaatgaaacatcaaccagattgagtaagcaaatgcccttttccgacatgaacagatacaactttgtcggagggtgtagcgtaaacccttatagtctggctccagcggttcaaatgagatcagtgattccagttttcgcagctccaccaccgaaaccaaaccccaaccttaacccatcatcattatcatcatcagtcaatgaattcacctcatccaataattcctgctctgttctgaatacgccgggattgggaggccaagagaagaagaatctaactcgcgaaatgatcaaacttggttcagaatcgagaattttggatcaaacccatgatagttag

SEQ ID NO: 30600 - protein, 384 aa, Arabidopsis thaliana
  misc_feature (1)..(384): Ceres Seq. ID no. 4964092
MYKNQLQELAQRSCFNLPSYTCIREGPDHAPRFKASVNFNGEIFESPTYCSTLRQAEHAAAEVSLNVLSSRVPSKSLTAKILDETGIYKNLLQETAHRAGLDLPMYTSVRSGSCHFPGFSCTVELAGMTFTGESAKTKKQAEKNAAIAAWSSLKKKKEQEAVARVLSRFKPKEVRRRETTNQWRRRTSQQDSNKDLLIERLRWINLLTNQASSSSSTSTPNQHKNSSFISLIPPPPPPKSSKILPFIQQYKDRSSQEAKTETATEMINSKAKVNETSTRLSKQMPFSDMNRYNFVGGCSVNPYSLAPAVQMRSVIPVFAAPPPKPNPNLNPSSLSSSVNEFTSSNNSCSVLNTPGLGGQEKKNLTREMIKLGSESRILDQTHDS

SEQ ID NO: 30601 - protein, 280 aa, Arabidopsis thaliana
  misc_feature (1)..(280): Ceres Seq. ID no. 4964093
MYTSVRSGSCHFPGFSCTVELAGMTFTGESAKTKKQAEKNAAIAAWSSLKKKKEQEAVARVLSRFKPKEVRRRETTNQWRRRTSQQDSNKDLLIERLRWINLLTNQASSSSSTSTPNQHKNSSFISLIPPPPPPKSSKILPFIQQYKDRSSQEAKTETATEMINSKAKVNETSTRLSKQMPFSDMNRYNFVGGCSVNPYSLAPAVQMRSVIPVFAAPPPKPNPNLNPSSLSSSVNEFTSSNNSCSVLNTPGLGGQEKKNLTREMIKLGSESRILDQTHDS

SEQ ID NO: 30602 - protein, 257 aa, Arabidopsis thaliana
  misc_feature (1)..(257): Ceres Seq. ID no. 4964094
MTFTGESAKTKKQAEKNAAIAAWSSLKKKKEQEAVARVLSRFKPKEVRRRETTNQWRRRTSQQDSNKDLLIERLRWINLLTNQASSSSSTSTPNQHKNSSFISLIPPPPPPKSSKILPFIQQYKDRSSQEAKTETATEMINSKAKVNETSTRLSKQMPFSDMNRYNFVGGCSVNPYSLAPAVQMRSVIPVFAAPPPKPNPNLNPSSLSSSVNEFTSSNNSCSVLNTPGLGGQEKKNLTREMIKLGSESRILDQTHDS

SEQ ID NO: 30603 - DNA, 708 bp, Arabidopsis thaliana
  misc_feature (1)..(708): Ceres Seq. ID no. 4964245
atggttttggagttttcccgacaagaaaccgacccgggtcatgattttgtgcaagagtcgaccaacctttttggtgtccaagaaagagggcagatctcgtttcccgaccagaatcttgattggtacaacaccgaaaccataaaccctaaaaaagataaacatcgttctaaaccaagttccgggagctacgatatactggagctagacgtagcggacctactagcgaaatacacgcattactgccagatttgtgggaaagggtttaagagagacgctaatctaaggatgcacatgagagcgcacggggatgagtacaagacacgtgaggccttgatcagcccaacgagccaagacaagaaaggaggatactcgttaaagaaacattactactcctgtcctcaacacgggtgtagatggaaccagaggcacgagaagtttcaaccgttgaaatctgtgatttgcgccaagaatcattacaagaggagtcattgtcccaaaatgtatatgtgcaggagatgtagtgtgaagcatttctcggttctgtctgatcttaggacacacgagaagcattgtggggatataaagtgggtttgctcttgtgggactaaattttctaggaaagacaagctgatgagccacgtttctttgtttttgggccacgtaccggcacatgggtcgtccaagccgccgacaatcaccctaaagtaa

SEQ ID NO: 30604 - protein, 235 aa, Arabidopsis thaliana
  misc_feature (1)..(235): Ceres Seq. ID no. 4964246
MVLEFSRQETDPGHDFVQESTNLFGVQERGQISFPDQNLDWYNTETINPKKDKHRSKPSSGSYDILELDVADLLAKYTHYCQICGKGFKRDANLRMHMRAHGDEYKTREALISPTSQDKKGGYSLKKHYYSCPQHGCRWNQRHEKFQPLKSVICAKNHYKRSHCPKMYMCRRCSVKHFSVLSDLRTHEKHCGDIKWVCSCGTKFSRKDKLMSHVSLFLGHVPAHGSSKPPTITLK

SEQ ID NO: 30605 - protein, 140 aa, Arabidopsis thaliana
  misc_feature (1)..(140): Ceres Seq. ID no. 4964247
MHMRAHGDEYKTREALISPTSQDKKGGYSLKKHYYSCPQHGCRWNQRHEKFQPLKSVICAKNHYKRSHCPKMYMCRRCSVKHFSVLSDLRTHEKHCGDIKWVCSCGTKFSRKDKLMSHVSLFLGHVPAHGSSKPPTITLK

SEQ ID NO: 30606 - protein, 138 aa, Arabidopsis thaliana
  misc_feature (1)..(138): Ceres Seq. ID no. 4964248
MRAHGDEYKTREALISPTSQDKKGGYSLKKHYYSCPQHGCRWNQRHEKFQPLKSVICAKNHYKRSHCPKMYMCRRCSVKHFSVLSDLRTHEKHCGDIKWVCSCGTKFSRKDKLMSHVSLFLGHVPAHGSSKPPTITLK

SEQ ID NO: 30607 - DNA, 1112 bp, Arabidopsis thaliana
  misc_feature (1)..(1112): Ceres Seq. ID no. 4964291
atcagtttgctttcacagtggagtcggtgctctctttttttttcttctctctttcttttcacctctcgccggatcccggcgatcttataggaggcaaatctatcagtatcgttattctaggatctctaacaaacaatgaatcgccaccacgatcccaatcctttcgatgaggacgaagaaatcgtcaatcctttttcgaaaggtggtggaagggttcctgctgcatctaggccagttgaatatggtcaaagccttgatgctactgttgatattccattggataatatgaatgactcttcacagaaacagagaaagcttgctgactgggaagctgagctcaggaagaaagaaatggatataaagcgaagagaggaagctattgctaaatttggtgtgcagatagatgataaaaactggccaccgtttttcccaatcatacaccatgacattgctaaagagataccagttcatgcacaaaagctgcagtatctggctttcgctagttggttaggtatcgttctgtgtctggtattcaatgtcattgcaacgatggtctgctggattaaaggcggaggtgttaaaatctttttcctggccacaatatatgcattgatcggatgtccactctcttatgtactatggtacaggccactctaccgagccatgaggactgacagtgctttgaagtttggttggtttttcttcacctacttgattcacattggcttctgcatcgttgctgccatcgcccctccaatctttttccatggaaaatcattaacgggtgtgcttgcagcaattgatgtcatctcagacagtttattagctgggatcttctactttatcggattcggtctcttctgcttggagtcactgctgagtctatgggttcttcagaaaatttacctctactttaggggaaacaagtgaaaaggagataaagaggaagatgatggtaattttcccttacgatataaggtctgaaatatgtgtatctcctatgaatgtaattaccattttaccgtttgatgcgttgtgttgattgaggtaaattctttagttactatagtagcaagagagagtggttgttcggccatttctttatgtttttt

SEQ ID NO: 30608 - protein, 264 aa, Arabidopsis thaliana
  misc_feature (1)..(264): Ceres Seq. ID no. 4964292
MNRHHDPNPFDEDEEIVNPFSKGGGRVPAASRPVEYGQSLDATVDIPLDNMNDSSQKQRKLADWEAELRKKEMDIKRREEAIAKFGVQIDDKNWPPFFPIIHHDIAKEIPVHAQKLQYLAFASWLGIVLCLVFNVIATMVCWIKGGGVKIFFLATIYALIGCPLSYVLWYRPLYRAMRTDSALKFGWFFFTYLIHIGFCIVAAIAPPIFFHGKSLTGVLAAIDVISDSLLAGIFYFIGFGLFCLESLLSLWVLQKIYLYFRGNK

SEQ ID NO: 30609 - protein, 214 aa, Arabidopsis thaliana
  misc_feature (1)..(214): Ceres Seq. ID no. 4964293
MNDSSQKQRKLADWEAELRKKEMDIKRREEAIAKFGVQIDDKNWPPFFPIIHHDIAKEIPVHAQKLQYLAFASWLGIVLCLVFNVIATMVCWIKGGGVKIFFLATIYALIGCPLSYVLWYRPLYRAMRTDSALKFGWFFFTYLIHIGFCIVAAIAPPIFFHGKSLTGVLAAIDVISDSLLAGIFYFIGFGLFCLESLLSLWVLQKIYLYFRGNK

SEQ ID NO: 30610 - protein, 192 aa, Arabidopsis thaliana
  misc_feature (1)..(192): Ceres Seq. ID no. 4964294
MDIKRREEAIAKFGVQIDDKNWPPFFPIIHHDIAKEIPVHAQKLQYLAFASWLGIVLCLVFNVIATMVCWIKGGGVKIFFLATIYALIGCPLSYVLWYRPLYRAMRTDSALKFGWFFFTYLIHIGFCIVAAIAPPIFFHGKSLTGVLAAIDVISDSLLAGIFYFIGFGLFCLESLLSLWVLQKIYLYFRGNK

SEQ ID NO: 30611 - DNA, 1180 bp, Arabidopsis thaliana
  misc_feature (1)..(1180): Ceres Seq. ID no. 4964369
aaaccagaattattaaatttgatttcagtggatataaatttctctcaagaaaacgacattaacgaaggagagccaaagcttcgtcgttgatcattcctccgtagttgcggaattgaacccaacttaggaatcaaatgcccaagatctgctgctctcgttccgctacacaagttgtggtagcacaaaaatcaaactcgggtaaaggaagaaacggtgaaggaggaatcaagtatggatttagtttgataaaagggaaatctaaccattcaatggaggattatcatgttgctaagtttaccaatttcaatggcaatgaattggggctttttgcaatctttgatggtcataaaggtgatcatgttgctgcttatctgcagaaacatctcttctctaatatccttaaagatggagagttcttggttgatcctcgaagagcaattgcgaaagcttatgagaatacagatcaaaagattttagcagataatagaacggatttagagagtggtggttcgactgctgtgactgcgattttgatcaatgggaaagctttgtggatagctaatgttggtgattcacgagctattgtttctagtcgaggtaaagcaaaacagatgagtgttgatcatgatcctgatgatgatactgagaggagtatgattgagagtaaaggtggatttgtgaccaacagaccgtgatgttcctcgagtgaacggtttgttagcggtctctcgtgtctttggagataaaaaccttaaagcatatttgaactcagagcctgagattaaggacgtaaccattgatagtcacacagattttcttattctggctagtgacggtatttcgaaggtgatgtcaaaccaagaagcagttgatgtagctaagaagttgaaagatccaaaggaagcggcgaggcaagtagttgctgaagcattgaaaagaaacagcaaggatgacatatcttgcattgttgtccggtttagatgataaccaagaagactcagcttatattggatttggagcttcctttgcttcaccatgattcttttggggtccggtttagtttgattctgggtcttggttacttgtgcatttttaagaacatgagtttgaataggactattatatattactagtttgacaaaccagatattttatcatataaattacatgaaaagaatag

SEQ ID NO: 30612 - protein, 186 aa, Arabidopsis thaliana
  misc_feature (1)..(186): Ceres Seq. ID no. 4964370
MPKICCSRSATQVVVAQKSNSGKGRNGEGGIKYGFSLIKGKSNHSMEDYHVAKFTNFNGNELGLFAIFDGHKGDHVAAYLQKHLFSNILKDGEFLVDPRRAIAKAYENTDQKILADNRTDLESGGSTAVTAILINGKALWIANVGDSRAIVSSRGKAKQMSVDHDPDDDTERSMIESKGGFVTNRP

SEQ ID NO: 30613 - protein, 141 aa, Arabidopsis thaliana
  misc_feature (1)..(141): Ceres Seq. ID no. 4964371
MEDYHVAKFTNFNGNELGLFAIFDGHKGDHVAAYLQKHLFSNILKDGEFLVDPRRAIAKAYENTDQKILADNRTDLESGGSTAVTAILINGKALWIANVGDSRAIVSSRGKAKQMSVDHDPDDDTERSMIESKGGFVTNRP

SEQ ID NO: 30614 - DNA, 1928 bp, Arabidopsis thaliana
  misc_feature (1)..(1928): Ceres Seq. ID no. 4964561
gattgattccaatcttctttcattttcttcttcttcttcttctggggaaggggcaggttaaaattatgccatctattcaaatcgtgcctatcctcagatcttaactcttttctctacgagattcggcatctgggttttattcttcttgagcaaaatgcaatcggataatggaaagcttttcatcggtgggatatcttgggacaccaatgaggaacgtctcaaggagtatttcagcagttttggagaagtgatcgaagctgtcatcttgaaagatcgtaccactggtcgtgctcgtggtttcggttttgttgtttttgctgatcctgctgttgctgagattgttatcaccgaaaaacataatattgatggcagattggttgaagccaagaaagctgttcccagagatgaccaaaacatggtaaatagaagcaacagcagtagcatccaaggttctcccggtggtccaggtcgcacaaggaagatatttgttggaggattaccttcttcggttacagagagtgatttcaagacgtattttgagcagtttggtacaactacggatgtggttgtcatgtatgatcacaacacacaaaggcctagaggtttcgggtttataacctacgattccgaggaggcggttgaaaaggtattgctcaagacattccatgaactaaatggtaaaatggttgaggttaagcgagctgttccaaaggagttatctccaggtccaagtcgcagtcctcttggtgcaggttacagctatggagttaatagggtcaataacctccttaatgggtatgctcaagggtttaatcccgctgcagttggaggctacggacttaggatggatggtcggttcagtccggttggtgctggaagaagcgggtttgcaaattacagttctggatacgggatgaatgtgaactttgatcagggattgcccacagggttcacgggaggtacaaattacaatggaaatgttgactatggccgaggaatgagcccgtactacattggtaacacaaacaggtttggtcctgcggttggctatgaagggggcaacggaggaggaaactcatccttcttcagttcggttacacggaacttatggggaaacaatggtggtcttaactataacaacaataatacaaactcaaactccaatacatatatgggaggatcatcaagtgggaacaacacacttagtggtccatttggaaattcaggagtcaattggggtgctcctggaggaggaaacaatgctgtgagtaacgagaatgtgaagtttggttatggaggaaacggtgaatctggttttgggttgggaacaggtggttatgcagcaagaaacccaggggctaacaaggcagcaccatcctcttcattctcttctgcctcagcaaccaacaacacgggttatgatacagcaggacttgcagagttttacgggaatggtgcagtttatagtgaccctacatggagatcaccaactcctgagacagaagggcctgctccttttagctatgggattggaggaggggttccttcttcagatgtttcagctagaagttcatctccaggttatgttggcagttacagtgtgaacaagagacaaccaaacagaggcgagccatcacggtgaacgatctgtgtcttttggcgaatcttttagattatcttcttttcccttcatacaaagccagtgaggacgaaacttgatcatatcatcacctagagctaaccagagaatcccgcagacttttctgtcatggtttggttttctaaattcattgttcctcctaggcttttttctgctttctttttttttctatttttgttttcttttcttctttcaatgagggacagaagaaactgtatcagtctccggcgaggcggtaatacataaggagagttcaaaacaaaaaccc

SEQ ID NO: 30615 - protein, 495 aa, Arabidopsis thaliana
  misc_feature (1)..(495): Ceres Seq. ID no. 4964562
MQSDNGKLFIGGISWDTNEERLKEYFSSFGEVIEAVILKDRTTGRARGFGFVVFADPAVAEIVITEKHNIDGRLVEAKKAVPRDDQNMVNRSNSSSIQGSPGGPGRTRKIFVGGLPSSVTESDFKTYFEQFGTTTDVVVMYDHNTQRPRGFGFITYDSEEAVEKVLLKTFHELNGKMVEVKRAVPKELSPGPSRSPLGAGYSYGVNRVNNLLNGYAQGFNPAAVGGYGLRMDGRFSPVGAGRSGFANYSSGYGMNVNFDQGLPTGFTGGTNYNGNVDYGRGMSPYYIGNTNRFGPAVGYEGGNGGGNSSFFSSVTRNLWGNNGGLNYNNNNTNSNSNTYMGGSSSGNNTLSGPFGNSGVNWGAPGGGNNAVSNENVKFGYGGNGESGFGLGTGGYAARNPGANKAAPSSSFSSASATNNTGYDTAGLAEFYGNGAVYSDPTWRSPTPETEGPAPFSYGIGGGVPSSDVSARSSSPGYVGSYSVNKRQPNRGEPSR

SEQ ID NO: 30616 - protein, 408 aa, Arabidopsis thaliana
  misc_feature (1)..(408): Ceres Seq. ID no. 4964563
MVNRSNSSSIQGSPGGPGRTRKIFVGGLPSSVTESDFKTYFEQFGTTTDVVVMYDHNTQRPRGFGFITYDSEEAVEKVLLKTFHELNGKMVEVKRAVPKELSPGPSRSPLGAGYSYGVNRVNNLLNGYAQGFNPAAVGGYGLRMDGRFSPVGAGRSGFANYSSGYGMNVNFDQGLPTGFTGGTNYNGNVDYGRGMSPYYIGNTNRFGPAVGYEGGNGGGNSSFFSSVTRNLWGNNGGLNYNNNNTNSNSNTYMGGSSSGNNTLSGPFGNSGVNWGAPGGGNNAVSNENVKFGYGGNGESGFGLGTGGYAARNPGANKAAPSSSFSSASATNNTGYDTAGLAEFYGNGAVYSDPTWRSPTPETEGPAPFSYGIGGGVPSSDVSARSSSPGYVGSYSVNKRQPNRGEPSR

SEQ ID NO: 30617 - protein, 356 aa, Arabidopsis thaliana
  misc_feature (1)..(356): Ceres Seq. ID no. 4964564
MYDHNTQRPRGFGFITYDSEEAVEKVLLKTFHELNGKMVEVKRAVPKELSPGPSRSPLGAGYSYGVNRVNNLLNGYAQGFNPAAVGGYGLRMDGRFSPVGAGRSGFANYSSGYGMNVNFDQGLPTGFTGGTNYNGNVDYGRGMSPYYIGNTNRFGPAVGYEGGNGGGNSSFFSSVTRNLWGNNGGLNYNNNNTNSNSNTYMGGSSSGNNTLSGPFGNSGVNWGAPGGGNNAVSNENVKFGYGGNGESGFGLGTGGYAARNPGANKAAPSSSFSSASATNNTGYDTAGLAEFYGNGAVYSDPTWRSPTPETEGPAPFSYGIGGGVPSSDVSARSSSPGYVGSYSVNKRQPNRGEPSR

SEQ ID NO: 30618 - DNA, 1498 bp, Arabidopsis thaliana
  misc_feature (1)..(1498): Ceres Seq. ID no. 4964597
gattgtctctctcccggagatctctctttctcttcttctccatccttcttctctcggcgcgcgcttcatccccaccaccttcgaattcgtgccctttgagggaagctgctaggatgggtgtgaagcaggctctaaggagcattgatgcgtttccaagagcagaggatcatttgcttcagaagacacaatctggcgctgttgtatctattgttggacttcttataatggctactttgttcttacacgagctgagttattatcttaacacacttacagtgcaccaggatgtcagtggacttaaagcgtggagaaactcttccaattcatgtaaatatgacgtttccatctttaccttgtgatgtactgagcgtagatgctatcgacatgtcagggaagcatgaagtggatcttgatacaaacatttggaagctccgtctcaacagtcatggtcatatcataggcacagaatatatatctgatcttgttgaaaaggggcatgagcatggccactcacctcacaagcatgatggcaaagaagaacacaagaatgagactgaaaccgaagcattgaatattcttggctttgaccaagctgctgagactatgattaaaaaagtgaagcaagcattggcagatggagaaggatgtcgggtttatggtgtcctagatgtacaacgggttgccggaaacttccatatttcagttcatgggctgaacatctatgttgctcagatgatatttggcgggtccaaaaacgtaaacgtgagccatatgattcacgatctatcatttgggccgaaataccccggaattcacaacccacttgatgacaccaaccgaatactccatgacaccagtggaacattcaaatactatattaagattgttcccacagaatatagatatctttcaaaagacgtactgtcaacaaatcagtactctgtaactgaatatttcacgccaatgactgaattcgaccgtacatggccagctgtttacttcttatatgatctttcacctatcactgtgaccatcaaggaagaacgccgtagttttctccacttaatcactcgtctttgcgctgtattaggcggtacatttgctttgacaggaatgttagatcgttggatgttccgctttattgaatctttcaacaagaagccgagtactagagcgtaaactagctgaaacagagacaaaacaatgagaaacaaaaaaaaccaaaggaaggaagaagaatctctcaaatcccaaaacttgtatctgccttcttcagacaacaacacccaccagagattccaggattgatgattacattactcagaaactctagaatccatggatatagtttttttttgagtctctcttatgtattactctgattatctctggttaaactagtagagttaatttgtaatttttattcaccttgcttcctgggattttaacatttttgcatcttttcacttgtctcagtaaaaaaacaaaattatactgt

SEQ ID NO: 30619 - protein, 297 aa, Arabidopsis thaliana
  misc_feature (1)..(297): Ceres Seq. ID no. 4964598
MSVDLKRGETLPIHVNMTFPSLPCDVLSVDAIDMSGKHEVDLDTNIWKLRLNSHGHIIGTEYISDLVEKGHEHGHSPHKHDGKEEHKNETETEALNILGFDQAAETMIKKVKQALADGEGCRVYGVLDVQRVAGNFHISVHGLNIYVAQMIFGGSKNVNVSHMIHDLSFGPKYPGIHNPLDDTNRILHDTSGTFKYYIKIVPTEYRYLSKDVLSTNQYSVTEYFTPMTEFDRTWPAVYFLYDLSPITVTIKEERRSFLHLITRLCAVLGGTFALTGMLDRWMFRFIESFNKKPSTRA

SEQ ID NO: 30620 - protein, 281 aa, Arabidopsis thaliana
  misc_feature (1)..(281): Ceres Seq. ID no. 4964599
MTFPSLPCDVLSVDAIDMSGKHEVDLDTNIWKLRLNSHGHIIGTEYISDLVEKGHEHGHSPHKHDGKEEHKNETETEALNILGFDQAAETMIKKVKQALADGEGCRVYGVLDVQRVAGNFHISVHGLNIYVAQMIFGGSKNVNVSHMIHDLSFGPKYPGIHNPLDDTNRILHDTSGTFKYYIKIVPTEYRYLSKDVLSTNQYSVTEYFTPMTEFDRTWPAVYFLYDLSPITVTIKEERRSFLHLITRLCAVLGGTFALTGMLDRWMFRFIESFNKKPSTRA

SEQ ID NO: 30621 - protein, 264 aa, Arabidopsis thaliana
  misc_feature (1)..(264): Ceres Seq. ID no. 4964600
MSGKHEVDLDTNIWKLRLNSHGHIIGTEYISDLVEKGHEHGHSPHKHDGKEEHKNETETEALNILGFDQAAETMIKKVKQALADGEGCRVYGVLDVQRVAGNFHISVHGLNIYVAQMIFGGSKNVNVSHMIHDLSFGPKYPGIHNPLDDTNRILHDTSGTFKYYIKIVPTEYRYLSKDVLSTNQYSVTEYFTPMTEFDRTWPAVYFLYDLSPITVTIKEERRSFLHLITRLCAVLGGTFALTGMLDRWMFRFIESFNKKPSTRA

SEQ ID NO: 30622 - DNA, 1167 bp, Arabidopsis thaliana
  misc_feature (1)..(1167): Ceres Seq. ID no. 4965295
atgaattgtctgttcttgttcatgtccaagaaaccaaaatccagaggaaatatggagaaagagaaaaaaaacataagaggaagagagttcttgcaaaagtcagctccagaattaacgacgagaaagacaactttgtcgttcaatctcccaacaccaagatctctgccatctccaacgagtatcaaagacttgtacacagacagagaacaaaatcaaaatcaaaacctgagggttttttctttcaaggaactgagtgacgccacttgtgagtttagcaggaagctaaagatcggagaaggtggctttggtagtgtctataaagccaccattaacaatcccaccgtaggagattctcattcttctccacttaccgtagccgttaagaaactcaatagacaaagtctacagggtcacaagcaatggctagcagaggttcactttttgggagtggtgaatcaccctaacgttgtgaggctcttagggtattgctcagaggacagagagagacttttggtttacgagttgatgtctaatcgcagcttggaggatcatctcttcactctaagaaccttaacgttgtcgtggaaacaaaggctcgagatcatgcttggtgcagctcaaggattggcttatttgcacgaaatccaggtaatatacagagacttcaaatcatcaaatgtgctattaaatgaagaattccatccgaaattatccgattttggtctcgctagagaaggtcccgaaggagacaatactcacgttacaaccgcaagagttggaacagacggctatgccgctcccgagtatgtaataaccggtcacctcaagacacattgcgatgtatatagctttggagttgttttgtacgaaattatcactggtcgtcgcacattggaacgaatgaaacctttagctgaacaaaagcttctagaatgggtcaaaaaatatcctattaatagcaaaagattcaaaatgatcgttgactccaagctatgcaataagtatccaattgctatggtcaggagagtggctaaattggctgatcattgtgtgaacaagatcgataaagaaagacctaccatggcctttgtcgtcgaaagtcttacgaatatcattgaggaatcaaattctgaagatatgggaagttctgttggcattagaggctag

SEQ ID NO: 30623 - protein, 388 aa, Arabidopsis thaliana
  misc_feature (1)..(388): Ceres Seq. ID no. 4965296
MNCLFLFMSKKPKSRGNMEKEKKNIRGREFLQKSAPELTTRKTTLSFNLPTPRSLPSPTSIKDLYTDREQNQNQNLRVFSFKELSDATCEFSRKLKIGEGGFGSVYKATINNPTVGDSHSSPLTVAVKKLNRQSLQGHKQWLAEVHFLGVVNHPNVVRLLGYCSEDRERLLVYELMSNRSLEDHLFTLRTLTLSWKQRLEIMLGAAQGLAYLHEIQVIYRDFKSSNVLLNEEFHPKLSDFGLAREGPEGDNTHVTTARVGTDGYAAPEYVITGHLKTHCDVYSFGVVLYEIITGRRTLERMKPLAEQKLLEWVKKYPINSKRFKMIVDSKLCNKYPIAMVRRVAKLADHCVNKIDKERPTMAFVVESLTNIIEESNSEDMGSSVGIRG

SEQ ID NO: 30624 - protein, 381 aa, Arabidopsis thaliana
  misc_feature (1)..(381): Ceres Seq. ID no. 4965297
MSKKPKSRGNMEKEKKNIRGREFLQKSAPELTTRKTTLSFNLPTPRSLPSPTSIKDLYTDREQNQNQNLRVFSFKELSDATCEFSRKLKIGEGGFGSVYKATINNPTVGDSHSSPLTVAVKKLNRQSLQGHKQWLAEVHFLGVVNHPNVVRLLGYCSEDRERLLVYELMSNRSLEDHLFTLRTLTLSWKQRLEIMLGAAQGLAYLHEIQVIYRDFKSSNVLLNEEFHPKLSDFGLAREGPEGDNTHVTTARVGTDGYAAPEYVITGHLKTHCDVYSFGVVLYEIITGRRTLERMKPLAEQKLLEWVKKYPINSKRFKMIVDSKLCNKYPIAMVRRVAKLADHCVNKIDKERPTMAFVVESLTNIIEESNSEDMGSSVGIRG

SEQ ID NO: 30625 - protein, 371 aa, Arabidopsis thaliana; identical to SEQ ID NO: 27428
  misc_feature (1)..(371): Ceres Seq. ID no. 4965298

SEQ ID NO: 30626 - DNA, 2529 bp, Arabidopsis thaliana
  misc_feature (1)..(2529): Ceres Seq. ID no. 4965644
atgtcggagaacgaaatcgtccctgacgagtttcgttgcaaccgctctgatggtaagcaatggcggtgcaagagacgagctttagaggggaaaaagatgtgtgagagtcatcactcgcagcaaagcctaaagcgaagtaagcagaaagttgcagagtcttctaagcttgtcagatcaagaagaggaggaggagatgaagtggcgtcttcagagatcgagccaaacgaaagcagaattaggtctaagagattggggaaatcgaagaggaagagagtgatgggtgaagcagaggctatggatgaagcagtgaagaagatgaagttgaagagaggagatttgcagttggatttgataaggatggtgttgaagagagaagttgagaagaggaagagattaccaaatagtaataataagaagaagagtaatggagggtttagtgaatttgttggagaagagttaacgagggttcttcctaatggtattatggcaatttctccaccttctcctactactagtaatgtgtcttctccttgtgatgttaaagttggggaagagccaatttcgatgattaaaaggaggtttaggtctaagaacattgaacctttgccaattgggaaaatgcaggtggttcctttcaagggtgatttggttaatggaaggaaggaaaagaagatgaggtgtcattggtgtggaaccagaggatttggggatttgattagttgtttgagttgtgaaagagagttcttttgcatagattgtatcgagaaaaggaacaagggatcgaaagaagaagttgagaaaaaatgtcctgtatgccgtgggtcatgtaggtgcaaagtttgctcagtcactaattctggagtcactgaatgtaaggattctcagagtgtcaggagtgatattgacagggttttgcatctacattatgcggtgtgcatgctacttccagtactaaaagaaatcaatgcggaacacaaagtggaggtggaaaatgacgcagaaaagaaagagggaaatccagctgaaccacaaatccatagctctgaattaacctctgacgatcgacagccctgtagcaatggtcgtgactttgccgtagtggatttgcaaagaatgtgcacacgcagttcctctgttctcaggctaaattctgaccaagatcagagtcaagagagcttatctagaaaggttggatcggttaaatgctcgaatggtataaaatctccaaaagtgttgctggattttcatcaaaacaatctggaacattttcagacacactggagtaaaggccatcctgtaatagttcgtagtgtgataaagagtggttcaagcctgaattgggatccagtagccttgttctgtcactatcttatgaacagaaacaacaaaaccggtaatactactgattgtatggattggtttgaggtagaaattggtgtcaagcaattttttttggggtctttgagaggaaaggctgagactaatacttgtcaagaaaggctgaagctggagggatggctttcatcttcattgtttaaagaacagttcccaaatcattacgctgaaatactgaatattttaccaatctcccattacatggatccaaagcgcggtctactaaatattgcagccaacctacctgacactgtacaaccacccgattttggcccatgcctcaatatttcatacaggagtggtgaagaatatgcacagcctgattctgtgaagaagttaggttttgaaacttgtgacatggttgatatcttgttatatgtcacagaaacacctgtatccacaaaccagatttgtaggataagaaagctaatgaaaaacatcggaagagtaagatctaaaaatccggcaaaggggagggaaagcagatttgataagggaaagaaacgagataggttggatgactattccagttctgattcagaatcttcacaacactgtttaggcgctaaatgcagaggcagtgagtttgagggagaggaaagagaaagttgcaactactcttgtgaagaagagagcctaagcaacacttatggtgcccagtgggatgtattccaaaaacaagatgtttctaaacttcttgagtatattaagaaccactctctggagctagaatccatggattccagcaaaaaaaaggtgagtcatccattacttgagcagagttactatcttgatgagtatcacaaagcaaggcttaaggaagaatttgacgttgaaccatggagttttgatcaatgtgttggggaagcagtcatcctccctgctggatgtccataccaaattagaaagaataagtcttgtgtaaatgcggttctgaagtttctgtcacctgagcacgttagcgaatctattaaacgagtgaaggagctcaatcaacttcctcagagcgtcaaatcgaaagcaaataagattgaggtgaagaaaatggcgattcataaaatcagcgaagctgtaaaggaaattcgggaactcacatcttcggattcaactggtgcattgagattatataactag

SEQ ID NO: 30627 - protein, 842 aa, Arabidopsis thaliana
  misc_feature (1)..(842): Ceres Seq. ID no. 4965645
MSENEIVPDEFRCNRSDGKQWRCKRRALEGKKMCESHHSQQSLKRSKQKVAESSKLVRSRRGGGDEVASSEIEPNESRIRSKRLGKSKRKRVMGEAEAMDEAVKKMKLKRGDLQLDLIRMVLKREVEKRKRLPNSNNKKKSNGGFSEFVGEELTRVLPNGIMAISPPSPTTSNVSSPCDVKVGEEPISMIKRRFRSKNIEPLPIGKMQVVPFKGDLVNGRKEKKMRCHWCGTRGFGDLISCLSCEREFFCIDCIEKRNKGSKEEVEKKCPVCRGSCRCKVCSVTNSGVTECKDSQSVRSDIDRVLHLHYAVCMLLPVLKEINAEHKVEVENDAEKKEGNPAEPQIHSSELTSDDRQPCSNGRDFAVVDLQRMCTRSSSVLRLNSDQDQSQESLSRKVGSVKCSNGIKSPKVLLDFHQNNLEHFQTHWSKGHPVIVRSVIKSGSSLNWDPVALFCHYLMNRNNKTGNTTDCMDWFEVEIGVKQFFLGSLRGKAETNTCQERLKLEGWLSSSLFKEQFPNHYAEILNILPISHYMDPKRGLLNIAANLPDTVQPPDFGPCLNISYRSGEEYAQPDSVKKLGFETCDMVDILLYVTETPVSTNQICRIRKLMKNIGRVRSKNPAKGRESRFDKGKKRDRLDDYSSSDSESSQHCLGAKCRGSEFEGEERESCNYSCEEESLSNTYGAQWDVFQKQDVSKLLEYIKNHSLELESMDSSKKKVSHPLLEQSYYLDEYHKARLKEEFDVEPWSFDQCVGEAVILPAGCPYQIRKNKSCVNAVLKFLSPEHVSESIKRVKELNQLPQSVKSKANKIEVKKMAIHKISEAVKEIRELTSSDSTGALRLYN

SEQ ID NO: 30628 - protein, 810 aa, Arabidopsis thaliana
  misc_feature (1)..(810): Ceres Seq. ID no. 4965646
MCESHHSQQSLKRSKQKVAESSKLVRSRRGGGDEVASSEIEPNESRIRSKRLGKSKRKRVMGEAEAMDEAVKKMKLKRGDLQLDLIRMVLKREVEKRKRLPNSNNKKKSNGGFSEFVGEELTRVLPNGIMAISPPSPTTSNVSSPCDVKVGEEPISMIKRRFRSKNIEPLPIGKMQVVPFKGDLVNGRKEKKMRCHWCGTRGFGDLISCLSCEREFFCIDCIEKRNKGSKEEVEKKCPVCRGSCRCKVCSVTNSGVTECKDSQSVRSDIDRVLHLHYAVCMLLPVLKEINAEHKVEVENDAEKKEGNPAEPQIHSSELTSDDRQPCSNGRDFAVVDLQRMCTRSSSVLRLNSDQDQSQESLSRKVGSVKCSNGIKSPKVLLDFHQNNLEHFQTHWSKGHPVIVRSVIKSGSSLNWDPVALFCHYLMNRNNKTGNTTDCMDWFEVEIGVKQFFLGSLRGKAETNTCQERLKLEGWLSSSLFKEQFPNHYAEILNILPISHYMDPKRGLLNIAANLPDTVQPPDFGPCLNISYRSGEEYAQPDSVKKLGFETCDMVDILLYVTETPVSTNQICRIRKLMKNIGRVRSKNPAKGRESRFDKGKKRDRLDDYSSSDSESSQHCLGAKCRGSEFEGEERESCNYSCEEESLSNTYGAQWDVFQKQDVSKLLEYIKNHSLELESMDSSKKKVSHPLLEQSYYLDEYHKARLKEEFDVEPWSFDQCVGEAVILPAGCPYQIRKNKSCVNAVLKFLSPEHVSESIKRVKELNQLPQSVKSKANKIEVKKMAIHKISEAVKEIRELTSSDSTGALRLYN

SEQ ID NO: 30629 - protein, 750 aa, Arabidopsis thaliana
  misc_feature (1)..(750): Ceres Seq. ID no. 4965647
MGEAEAMDEAVKKMKLKRGDLQLDLIRMVLKREVEKRKRLPNSNNKKKSNGGFSEFVGEELTRVLPNGIMAISPPSPTTSNVSSPCDVKVGEEPISMIKRRFRSKNIEPLPIGKMQVVPFKGDLVNGRKEKKMRCHWCGTRGFGDLISCLSCEREFFCIDCIEKRNKGSKEEVEKKCPVCRGSCRCKVCSVTNSGVTECKDSQSVRSDIDRVLHLHYAVCMLLPVLKEINAEHKVEVENDAEKKEGNPAEPQIHSSELTSDDRQPCSNGRDFAVVDLQRMCTRSSSVLRLNSDQDQSQESLSRKVGSVKCSNGIKSPKVLLDFHQNNLEHFQTHWSKGHPVIVRSVIKSGSSLNWDPVALFCHYLMNRNNKTGNTTDCMDWFEVEIGVKQFFLGSLRGKAETNTCQERLKLEGWLSSSLFKEQFPNHYAEILNILPISHYMDPKRGLLNIAANLPDTVQPPDFGPCLNISYRSGEEYAQPDSVKKLGFETCDMVDILLYVTETPVSTNQICRIRKLMKNIGRVRSKNPAKGRESRFDKGKKRDRLDDYSSSDSESSQHCLGAKCRGSEFEGEERESCNYSCEEESLSNTYGAQWDVFQKQDVSKLLEYIKNHSLELESMDSSKKKVSHPLLEQSYYLDEYHKARLKEEFDVEPWSFDQCVGEAVILPAGCPYQIRKNKSCVNAVLKFLSPEHVSESIKRVKELNQLPQSVKSKANKIEVKKMAIHKISEAVKEIRELTSSDSTGALRLYN

SEQ ID NO: 30630 - DNA, 1053 bp, Arabidopsis thaliana
  misc_feature (1)..(1053): Ceres Seq. ID no. 4965813
atggtaatggaaacagagtcaaagttccatgttttagctgttgatgatagtctttttgatcggaaaatgattgagagattgcttcaaaagtcttcatgtcaagtaactacagttgattcaggctctaaagctctggaatttctgggtttaagagtagatgacaacgacccaaatgcactctctacatcgccacaaattcatcaggaagttgaaataaatctaataattacagattactgtatgcctggcatgactggttatgatttgctcaagaaagttaaggaatcagcggcgtttagaagtatacctgtagttataatgtcatctgagaacgttcctgcaagaatctccagatgtttggaagaaggagctgaagagtttttcttgaaaccagtgaagttagctgatcttaccaagttgaaacctcatatgatgaaaacgaagttgaagaaagaaagtgagaaaccagttgccatagaagagattgtggtgtctaaaccggagatagaagaagaagaagaagagtcatcagtgattgaaatcttgcctctccaccaagaaattgaatccgaacaacttgaaccaatgttgagtagtaataagagaaaagcaatggaagaagtggtttctactgatcgatcacgtcctaaatacaatgatatcacaacctcgaatctctcagtagaagatctgctaactcttgcatctgaagcaaacaacaacggactgcaaggaggactaacgcaacccgagaagccactacaagacctatatggagaatgccaacagaatctctcagtagaagatctgctaactcttgaatatgaagcaaacaacaacggactgctaggagtaataccgcagcaacatcgttatcatcaggaaaaagagacaatgcagacacaaggagatccactaaatcgaatacctattcaatcagaagcttcaaaccattcagatagtggtgatagcacactaacaatggctcaaaaccaggatggtctcggacacagtagttgttttattctctgtcaatttacttctctcccctag

SEQ ID NO: 30631 - protein, 350 aa, Arabidopsis thaliana
  misc_feature (1)..(350): Ceres Seq. ID no. 4965814
MVMETESKFHVLAVDDSLFDRKMIERLLQKSSCQVTTVDSGSKALEFLGLRVDDNDPNALSTSPQIHQEVEINLIITDYCMPGMTGYDLLKKVKESAAFRSIPVVIMSSENVPARISRCLEEGAEEFFLKPVKLADLTKLKPHMMKTKLKKESEKPVAIEEIVVSKPEIEEEEEESSVIEILPLHQEIESEQLEPMLSSNKRKAMEEVVSTDRSRPKYNDITTSNLSVEDLLTLASEANNNGLQGGLTQPEKPLQDLYGECQQNLSVEDLLTLEYEANNNGLLGVIPQQHRYHQEKETMQTQGDPLNRIPIQSEASNHSDSGDSTLTMAQNQDGLGHSSCFILCQFTSLP

SEQ ID NO: 30632 - protein, 348 aa, Arabidopsis thaliana
  misc_feature (1)..(348): Ceres Seq. ID no. 4965815
METESKFHVLAVDDSLFDRKMIERLLQKSSCQVTTVDSGSKALEFLGLRVDDNDPNALSTSPQIHQEVEINLIITDYCMPGMTGYDLLKKVKESAAFRSIPVVIMSSENVPARISRCLEEGAEEFFLKPVKLADLTKLKPHMMKTKLKKESEKPVAIEEIVVSKPEIEEEEEESSVIEILPLHQEIESEQLEPMLSSNKRKAMEEVVSTDRSRPKYNDITTSNLSVEDLLTLASEANNNGLQGGLTQPEKPLQDLYGECQQNLSVEDLLTLEYEANNNGLLGVIPQQHRYHQEKETMQTQGDPLNRIPIQSEASNHSDSGDSTLTMAQNQDGLGHSSCFILCQFTSLP

SEQ ID NO: 30633 - protein, 328 aa, Arabidopsis thaliana
  misc_feature (1)..(328): Ceres Seq. ID no. 4965816
MIERLLQKSSCQVTTVDSGSKALEFLGLRVDDNDPNALSTSPQIHQEVEINLIITDYCMPGMTGYDLLKKVKESAAFRSIPVVIMSSENVPARISRCLEEGAEEFFLKPVKLADLTKLKPHMMKTKLKKESEKPVAIEEIVVSKPEIEEEEEESSVIEILPLHQEIESEQLEPMLSSNKRKAMEEVVSTDRSRPKYNDITTSNLSVEDLLTLASEANNNGLQGGLTQPEKPLQDLYGECQQNLSVEDLLTLEYEANNNGLLGVIPQQHRYHQEKETMQTQGDPLNRIPIQSEASNHSDSGDSTLTMAQNQDGLGHSSCFILCQFTSLP

SEQ ID NO: 30634 - DNA, 858 bp, Arabidopsis thaliana
  misc_feature (1)..(858): Ceres Seq. ID no. 4965975
atgtcagaccaagaggctcctctgcgtaatggagtagaacacaagattttcgaagtacttccgtttgtggatgatgattacggtggagtcatcgtggagatgaaaactcctatggatactaagaatttcgttgcagcgcttagagattcattcgagcagtggcgcttacagggtaaaaagggagtctggttgaacttgcctctctcacacgtaaacctcgtggaacccgcggttaaggaaggtttccggtatcaccatgctgagccaacttacctgatgctagtttattggattccggaagccgagagtactattcctttgaatgcttcccatcgtgttcgtgtaggtgctgttgtcttgaaccataacaaagaggaaaaatacggttcattatgcggatcaggtatctggaagatcccaacaggagttgttgacgagggtgaggagattttcgccgcagccattagagaagtaaaagaagaaacaggcgtaagaagatccatatatcttaatatcgacactgagtttttggagattctagctttctgccaaacccacgagtcattttttgcaaagtcagatttattcttcgtttgtctcttgagacctacctccttcgatattcaaaaacaggacttagagatcgaagcagctcaatggatgcggttcgaggactctgcctctcaacctatcacacacaagaacgatctcttcaaagatattcaccacatttgctcaatgaaaatggagaagagctatagtggtttttcaaaaaaacctattacaactttctttgacgacaagttaggttatctctacttgaataaacaagaagatatggaacaacctatttcttaa

SEQ ID NO: 30635 - protein, 285 aa, Arabidopsis thaliana
  misc_feature (1)..(285): Ceres Seq. ID no. 4965976
MSDQEAPLRNGVEHKIFEVLPFVDDDYGGVIVEMKTPMDTKNFVAALRDSFEQWRLQGKKGVWLNLPLSHVNLVEPAVKEGFRYHHAEPTYLMLVYWIPEAESTIPLNASHRVRVGAVVLNHNKEEKYGSLCGSGIWKIPTGVVDEGEEIFAAAIREVKEETGVRRSIYLNIDTEFLEILAFCQTHESFFAKSDLFFVCLLRPTSFDIQKQDLEIEAAQWMRFEDSASQPITHKNDLFKDIHHICSMKMEKSYSGFSKKPITTFFDDKLGYLYLNKQEDMEQPIS

SEQ ID NO: 30636 - protein, 252 aa, Arabidopsis thaliana
  misc_feature (1)..(252): Ceres Seq. ID no. 4965977
MKTPMDTKNFVAALRDSFEQWRLQGKKGVWLNLPLSHVNLVEPAVKEGFRYHHAEPTYLMLVYWIPEAESTIPLNASHRVRVGAVVLNHNKEEKYGSLCGSGIWKIPTGVVDEGEEIFAAAIREVKEETGVRRSIYLNIDTEFLEILAFCQTHESFFAKSDLFFVCLLRPTSFDIQKQDLEIEAAQWMRFEDSASQPITHKNDLFKDIHHICSMKMEKSYSGFSKKPITTFFDDKLGYLYLNKQEDMEQPIS

SEQ ID NO: 30637 - protein, 248 aa, Arabidopsis thaliana
  misc_feature (1)..(248): Ceres Seq. ID no. 4965978
MDTKNFVAALRDSFEQWRLQGKKGVWLNLPLSHVNLVEPAVKEGFRYHHAEPTYLMLVYWIPEAESTIPLNASHRVRVGAVVLNHNKEEKYGSLCGSGIWKIPTGVVDEGEEIFAAAIREVKEETGVRRSIYLNIDTEFLEILAFCQTHESFFAKSDLFFVCLLRPTSFDIQKQDLEIEAAQWMRFEDSASQPITHKNDLFKDIHHICSMKMEKSYSGFSKKPITTFFDDKLGYLYLNKQEDMEQPIS

SEQ ID NO: 30638 - DNA, 1389 bp, Arabidopsis thaliana
  misc_feature (1)..(1389): Ceres Seq. ID no. 4966077
atggcagatttcaaaattcttttgcttatactcatccttatatctctctttgaacttgatctacttcattttcaccatgacttcttctctccttttccggtcaagatcggtttactcctgatatccatcttcttctatgcctactcaaccacccggtctaaaccggtttacctagtggatttctcatgtcaccaacccacggattcttgcaaaatctcatccgaaacgttcttcaacatggccaaaggcgctcaactctacaccgatgaaacaatccaattcatgacgaggatattaaaccggtccggtttaggagacgatacgtactccccacgttgcatgttaacctctccaccaactccatcaatgtacgaggcgagacatgaatccgaattagttatcttcggagctcttaactcactattcaagaaaaccggaatcgaaccgagagaagtcggaatcttcattgtaaactgcagcttgtttaaccctaacccatctctctcgtccatgatcgtaaaccggtacaagcttaaaaccgacgtcaaaacttacaatctctccggtatgggatgcagcgccggcgcaatctccgtcgacctcgccacaaatctactaaaggcaaaccctaatacctacgcagttattgttagtacggagaacatgaccctaagcatgtatcgaggcaacgaccggtcaatgttagtccctaactgtctattccgagtaggtggcgctgcggttatgctctcaaaccggagtcaagaccgagtccggtctaagtacgaattgactcatattgtaaggactcacaaaggctctagcgataaacactacacttgtgctgaacaaaaagaagatagtaaaggtatcgttggagtcgcactctctaaagaactaacggttgttgctggtgactcgttaaagacgaatctaacagcacttggtccgcttgtgttgcctttatctgaaaaactccggtttatcctctttttggtaaagagtaagcttttccggttaaaggttagtccatatgttccggattttaaactatgtttcaagcatttctgtattcacgctggtggtagagcgttacttgacgcggttgaaaaaggtcttggacttagtgagtttgatcttgagccgtctcggatgactttgcaccgctttggaaacacttcaagctcgtcgctgtggtacgagctggcttacgtggaggctaaatgtcgggtcaaacgaggagatagggtttggcagttggcgtttgggtcgggttttaaatgtaatagtattgtgtggagagcgttgagaacgattccggctaacgagtcattggtgggtaacccgtggggtgactcggttcataagtatccagttcacgtgacctaa

SEQ ID NO: 30639 - protein, 462 aa, Arabidopsis thaliana
  misc_feature (1)..(462): Ceres Seq. ID no. 4966078
MADFKILLLILILISLFELDLLHFHHDFFSPFPVKIGLLLISIFFYAYSTTRSKPVYLVDFSCHQPTDSCKISSETFFNMAKGAQLYTDETIQFMTRILNRSGLGDDTYSPRCMLTSPPTPSMYEARHESELVIFGALNSLFKKTGIEPREVGIFIVNCSLFNPNPSLSSMIVNRYKLKTDVKTYNLSGMGCSAGAISVDLATNLLKANPNTYAVIVSTENMTLSMYRGNDRSMLVPNCLFRVGGAAVMLSNRSQDRVRSKYELTHIVRTHKGSSDKHYTCAEQKEDSKGIVGVALSKELTVVAGDSLKTNLTALGPLVLPLSEKLRFILFLVKSKLFRLKVSPYVPDFKLCFKHFCIHAGGRALLDAVEKGLGLSEFDLEPSRMTLHRFGNTSSSSLWYELAYVEAKCRVKRGDRVWQLAFGSGFKCNSIVWRALRTIPANESLVGNPWGDSVHKYPVHVT

SEQ ID NO: 30640 - protein, 383 aa, Arabidopsis thaliana
  misc_feature (1)..(383): Ceres Seq. ID no. 4966079
MAKGAQLYTDETIQFMTRILNRSGLGDDTYSPRCMLTSPPTPSMYEARHESELVIFGALNSLFKKTGIEPREVGIFIVNCSLFNPNPSLSSMIVNRYKLKTDVKTYNLSGMGCSAGAISVDLATNLLKANPNTYAVIVSTENMTLSMYRGNDRSMLVPNCLFRVGGAAVMLSNRSQDRVRSKYELTHIVRTHKGSSDKHYTCAEQKEDSKGIVGVALSKELTVVAGDSLKTNLTALGPLVLPLSEKLRFILFLVKSKLFRLKVSPYVPDFKLCFKHFCIHAGGRALLDAVEKGLGLSEFDLEPSRMTLHRFGNTSSSSLWYELAYVEAKCRVKRGDRVWQLAFGSGFKCNSIVWRALRTIPANESLVGNPWGDSVHKYPVHVT

SEQ ID NO: 30641 - protein, 368 aa, Arabidopsis thaliana
  misc_feature (1)..(368): Ceres Seq. ID no. 4966080
MTRILNRSGLGDDTYSPRCMLTSPPTPSMYEARHESELVIFGALNSLFKKTGIEPREVGIFIVNCSLFNPNPSLSSMIVNRYKLKTDVKTYNLSGMGCSAGAISVDLATNLLKANPNTYAVIVSTENMTLSMYRGNDRSMLVPNCLFRVGGAAVMLSNRSQDRVRSKYELTHIVRTHKGSSDKHYTCAEQKEDSKGIVGVALSKELTVVAGDSLKTNLTALGPLVLPLSEKLRFILFLVKSKLFRLKVSPYVPDFKLCFKHFCIHAGGRALLDAVEKGLGLSEFDLEPSRMTLHRFGNTSSSSLWYELAYVEAKCRVKRGDRVWQLAFGSGFKCNSIVWRALRTIPANESLVGNPWGDSVHKYPVHVT

SEQ ID NO: 30642 - DNA, 1710 bp, Arabidopsis thaliana
  misc_feature (1)..(1710): Ceres Seq. ID no. 4966813
atggctgtcgtcgtcactaacctaggaagctgtctgaagatttcttatgtcatctttgccttttgttctgctttctttctcggtgctatcaaaggtttgatcgtaggtccaattgctggattaacattaatagttgggaatgttggagtgattctttgtttgttccctgcacatgttacttggactatttacgctgttgcaaagacaaatagatttgacattcctctgaaggtagcaatcttagtggcacttcctgcattgtttgggatatggttaggtctaagtctagcaattagtgttcttgttggtgttggctatggattcttcactccttggatctctgcttttgaagcctttagacaagacactgaatccaacaagttcttccactgtcttgtggatggaacttggggaaccatcaaagggagttgcattgtggttactgattttgcagatttttgttaccattcttatccactttacttaaaggagttacgcgaatccccggtttcagatgagcttcaaactcttaggttgattcatgttccaggatgcatcattgttgggattctaggattagtcattgatatccctcttttcactgcaatcgcggttattaaaagcccttaccttcttctcaaaggctggtaccgactagctcaagacgcgattaatcgagaaggaccatttcttgaaatagcttgtataccagttgctggtttgacagtactgttatggcctatagttgtcattggttttattttggtgaccatcttctccagcatctttgtaggactatatggagcagttgttgtatttcaggaaaggtcattcagaagaggagtctcttatgtgattgcagtagttggagaatttgatgagtacacaaatgattggctttaccttagagaaggaaccatcttcccaaagccaagatatcggatgggaagaggatcgttttcaagtgaagtatctgtgatcgttcacccttcagatgtaacaagagtcaatagttctggttctgtcgatgctccagcgatgctagtaccgagcctagttcactctgtatctgttagagaagcaatacaagaagtgagaatggttcagatttgggagcatatgatggggtggtttgagatgcaaggcaaagagctactagatgcagaagtgttaacaccaactgatctctatgagtctttaaagggcagacacggaaacgaatcatcgattatcaatgtcgggcttccttcttacgctttgttgcatacattgcttagctctataaaagctggtgttcatggtgtgcttttgcttgatggctcggaagtgacacatttgaatagaccacaagacaagttcttggactgggtctttaatccaataatggtattgaaagatcagattcgagctcttaaacttggagaaagtgaagttaaatacttagagaaagttgttctctttggaaaccatgaacaaaggatggaagcttgggataatcacagtaacccgcctcaagaaaaccttcgaactgctcaaatccaaggaatcagcagaaggatgatgggaatggtacggagcgtatcgaagcttccgacttatagaagaaggttcagacaagtggttaaggctctaattacttattattcagagaaacaaggcttaaatcgaaccggttccatgagctctggagatttcattgaagagggttaa

SEQ ID NO: 30643 - protein, 569 aa, Arabidopsis thaliana
  misc_feature (1)..(569): Ceres Seq. ID no. 4966814
MAVVVTNLGSCLKISYVIFAFCSAFFLGAIKGLIVGPIAGLTLIVGNVGVILCLFPAHVTWTIYAVAKTNRFDIPLKVAILVALPALFGIWLGLSLAISVLVGVGYGFFTPWISAFEAFRQDTESNKFFHCLVDGTWGTIKGSCIVVTDFADFCYHSYPLYLKELRESPVSDELQTLRLIHVPGCIIVGILGLVIDIPLFTAIAVIKSPYLLLKGWYRLAQDAINREGPFLEIACIPVAGLTVLLWPIVVIGFILVTIFSSIFVGLYGAVVVFQERSFRRGVSYVIAVVGEFDEYTNDWLYLREGTIFPKPRYRMGRGSFSSEVSVIVHPSDVTRVNSSGSVDAPAMLVPSLVHSVSVREAIQEVRMVQIWEHMMGWFEMQGKELLDAEVLTPTDLYESLKGRHGNESSIINVGLPSYALLHTLLSSIKAGVHGVLLLDGSEVTHLNRPQDKFLDWVFNPIMVLKDQIRALKLGESEVKYLEKVVLFGNHEQRMEAWDNHSNPPQENLRTAQIQGISRRMMGMVRSVSKLPTYRRRFRQVVKALITYYSEKQGLNRTGSMSSGDFIEEG

SEQ ID NO: 30644 - DNA, 2652 bp, Arabidopsis thaliana
  misc_feature (1)..(2652): Ceres Seq. ID no. 4967008
atgtttcatcgttcgctcacgaagcaaggacttgataatgatgtctccactataactaagcttgtagcacggagttgtgaattgggtactcgtgaaagtttgagctttgctaaagaagtgtttgagaacagtgaatcgtatggaacttgtttcatgtacaattctttgattcgaggatatgcatcttctgggttatgcaacgaagctatattgttatttcttcgaatgatgaattctgggatttctccagataagtacacgtttccttttggattgagtgcgtgtgcgaaaagcagagcgaaaggtaatgggattcagattcatgggttgattgtgaagatgggttatgcgaaagatttgtttgtgcagaactcgctggttcatttttacgccgagtgtggagagcttgatagtgcacgtaaggtgtttgatgaaatgtctgagagaaatgttgtttcttggacgagtatgatttgtggttacgcgaggcgggattttgctaaagacgctgttgatttgttttttcggatggtgagagatgaagaggtgactcctaattcggttacaatggtgtgtgtgatatcggcttgtgctaagctagaggatcttgagacgggcgagaaggtttatgcttttatccgtaattctggtattgaagttaatgatcttatggttagtgcactggttgatatgtacatgaaatgcaatgccattgatgtagcaaaacggctttttgatgaatatggtgctagtaatttggatttgtgcaatgcaatggcatcaaattatgtacggcaagggttaacgagggaggctttaggtgtttttaatctgatgatggactctggtgttagacctgataggatttcgatgttgagtgcgatttcatcttgttcacaattgagaaatatcttgtggggaaagagctgtcatgggtatgtattgaggaatgggtttgagagttgggataatatatgcaatgcgttgattgatatgtacatgaaatgtcataggcaagatactgcgtttaggatctttgatcggatgtcgaacaagacagtggtgacgtggaactcgattgttgctggctatgtagagaatggtgaggtggatgcagcctgggaaacatttgaaaccatgcctgagaaaaacattgtttcttggaatacgattatcagcggtctggtgcaaggaagtttgtttgaggaagcgattgaagttttctgttctatgcaaagccaagagggtgtcaatgcggatggtgtgacaatgatgagtattgcatctgcttgtgggcacttgggagctcttgatctagctaaatggatatattactacattgagaagaacggaattcagcttgatgtcagacttggtacaaccttagtagatatgttttctaggtgtggggatcctgaaagtgctatgtcaatttttaatagtttgacaaacagagatgtctcagcttggacagcggctataggagcaatggctatggcaggaaacgctgagcgagcaattgagcttttcgatgatatgattgaacaagggttgaaaccagatggggttgcgtttgttggagcactgacagcttgcagccatggtggattggtccaacagggtaaggaaattttctattcgatgttgaaacttcatggagtttctccagaagatgtgcactatggatgtatggttgatctgcttggtcgagcaggattgttagaggaagctgtgcaactcattgaggacatgcctatggagccaaacgatgtgatttggaactctcttttagctgcttgtcgtgttcagggaaatgtggagatggcagcttatgcagccgagaagatacaagtcttggctccagagagaactgggagttatgttcttctgtcaaatgtttatgcatcagctggaagatggaacgacatggcgaaagtgagactgagtatgaaggagaaagggttacgtaaaccgccagggactagttcaatacagattcgaggtaaaacccatgagttcacatcaggggacgagtcacaccctgaaatgccaaacatagaagcaatgctagatgaagttagtcaaagagcgagtcacttaggccatgtacctgatcttagtaatgttcttatggatgttgatgagaaagagaagatctttatgcttagcagacacagcgagaaacttgcaatggcctatggactcattagctcaaacaaaggcacaacaatccgaatagtcaagaacctaagagtatgctctgattgtcattcatttgcaaaatttgcatccaaagtatacaacagagaaatcattctaagagacaataaccggtttcattacatccgtcaagggaagtgttcttgcggtgacttctgtttgacggatgacgatctcgaagttctcaaaggttgtttagatctaggctttggtttcaactacgacgagatccctgcgctctgcaagactttacctgctttagagctttgctattcaatgagccaaaaaaatttagacgataagcatacaccatcactccaattgccaattggaagatctctagtcccgtcgtgtgataatccggatgatgtgaaagctagactcaaatgctgggcacaagccgttgcctgtactgtccaattgtgcagctga

SEQ ID NO: 30645 - protein, 883 aa, Arabidopsis thaliana
  misc_feature (1)..(883): Ceres Seq. ID no. 4967009
MFHRSLTKQGLDNDVSTITKLVARSCELGTRESLSFAKEVFENSESYGTCFMYNSLIRGYASSGLCNEAILLFLRMMNSGISPDKYTFPFGLSACAKSRAKGNGIQIHGLIVKMGYAKDLFVQNSLVHFYAECGELDSARKVFDEMSERNVVSWTSMICGYARRDFAKDAVDLFFRMVRDEEVTPNSVTMVCVISACAKLEDLETGEKVYAFIRNSGIEVNDLMVSALVDMYMKCNAIDVAKRLFDEYGASNLDLCNAMASNYVRQGLTREALGVFNLMMDSGVRPDRISMLSAISSCSQLRNILWGKSCHGYVLRNGFESWDNICNALIDMYMKCHRQDTAFRIFDRMSNKTVVTWNSIVAGYVENGEVDAAWETFETMPEKNIVSWNTIISGLVQGSLFEEAIEVFCSMQSQEGVNADGVTMMSIASACGHLGALDLAKWIYYYIEKNGIQLDVRLGTTLVDMFSRCGDPESAMSIFNSLTNRDVSAWTAAIGAMAMAGNAERAIELFDDMIEQGLKPDGVAFVGALTACSHGGLVQQGKEIFYSMLKLHGVSPEDVHYGCMVDLLGRAGLLEEAVQLIEDMPMEPNDVIWNSLLAACRVQGNVEMAAYAAEKIQVLAPERTGSYVLLSNVYASAGRWNDMAKVRLSMKEKGLRKPPGTSSIQIRGKTHEFTSGDESHPEMPNIEAMLDEVSQRASHLGHVPDLSNVLMDVDEKEKIFMLSRHSEKLAMAYGLISSNKGTTIRIVKNLRVCSDCHSFAKFASKVYNREIILRDNNRFHYIRQGKCSCGDFCLTDDDLEVLKGCLDLGFGFNYDEIPALCKTLPALELCYSMSQKNLDDKHTPSLQLPIGRSLVPSCDNPDDVKARLKCWAQAVACTVQLCS

SEQ ID NO: 30646 - protein, 832 aa, Arabidopsis thaliana
  misc_feature (1)..(832): Ceres Seq. ID no. 4967010
MYNSLIRGYASSGLCNEAILLFLRMMNSGISPDKYTFPFGLSACAKSRAKGNGIQIHGLIVKMGYAKDLFVQNSLVHFYAECGELDSARKVFDEMSERNVVSWTSMICGYARRDFAKDAVDLFFRMVRDEEVTPNSVTMVCVISACAKLEDLETGEKVYAFIRNSGIEVNDLMVSALVDMYMKCNAIDVAKRLFDEYGASNLDLCNAMASNYVRQGLTREALGVFNLMMDSGVRPDRISMLSAISSCSQLRNILWGKSCHGYVLRNGFESWDNICNALIDMYMKCHRQDTAFRIFDRMSNKTVVTWNSIVAGYVENGEVDAAWETFETMPEKNIVSWNTIISGLVQGSLFEEAIEVFCSMQSQEGVNADGVTMMSIASACGHLGALDLAKWIYYYIEKNGIQLDVRLGTTLVDMFSRCGDPESAMSIFNSLTNRDVSAWTAAIGAMAMAGNAERAIELFDDMIEQGLKPDGVAFVGALTACSHGGLVQQGKEIFYSMLKLHGVSPEDVHYGCMVDLLGRAGLLEEAVQLIEDMPMEPNDVIWNSLLAACRVQGNVEMAAYAAEKIQVLAPERTGSYVLLSNVYASAGRWNDMAKVRLSMKEKGLRKPPGTSSIQIRGKTHEFTSGDESHPEMPNIEAMLDEVSQRASHLGHVPDLSNVLMDVDEKEKIFMLSRHSEKLAMAYGLISSNKGTTIRIVKNLRVCSDCHSFAKFASKVYNREIILRDNNRFHYIRQGKCSCGDFCLTDDDLEVLKGCLDLGFGFNYDEIPALCKTLPALELCYSMSQKNLDDKHTPSLQLPIGRSLVPSCDNPDDVKARLKCWAQAVACTVQLCS

SEQ ID NO: 30647 - protein, 808 aa, Arabidopsis thaliana
  misc_feature (1)..(808): Ceres Seq. ID no. 4967011
MMNSGISPDKYTFPFGLSACAKSRAKGNGIQIHGLIVKMGYAKDLFVQNSLVHFYAECGELDSARKVFDEMSERNVVSWTSMICGYARRDFAKDAVDLFFRMVRDEEVTPNSVTMVCVISACAKLEDLETGEKVYAFIRNSGIEVNDLMVSALVDMYMKCNAIDVAKRLFDEYGASNLDLCNAMASNYVRQGLTREALGVFNLMMDSGVRPDRISMLSAISSCSQLRNILWGKSCHGYVLRNGFESWDNICNALIDMYMKCHRQDTAFRIFDRMSNKTVVTWNSIVAGYVENGEVDAAWETFETMPEKNIVSWNTIISGLVQGSLFEEAIEVFCSMQSQEGVNADGVTMMSIASACGHLGALDLAKWIYYYIEKNGIQLDVRLGTTLVDMFSRCGDPESAMSIFNSLTNRDVSAWTAAIGAMAMAGNAERAIELFDDMIEQGLKPDGVAFVGALTACSHGGLVQQGKEIFYSMLKLHGVSPEDVHYGCMVDLLGRAGLLEEAVQLIEDMPMEPNDVIWNSLLAACRVQGNVEMAAYAAEKIQVLAPERTGSYVLLSNVYASAGRWNDMAKVRLSMKEKGLRKPPGTSSIQIRGKTHEFTSGDESHPEMPNIEAMLDEVSQRASHLGHVPDLSNVLMDVDEKEKIFMLSRHSEKLAMAYGLISSNKGTTIRIVKNLRVCSDCHSFAKFASKVYNREIILRDNNRFHYIRQGKCSCGDFCLTDDDLEVLKGCLDLGFGFNYDEIPALCKTLPALELCYSMSQKNLDDKHTPSLQLPIGRSLVPSCDNPDDVKARLKCWAQAVACTVQLCS

SEQ ID NO: 30648 - DNA, 2271 bp, Arabidopsis thaliana
  misc_feature (1)..(2271): Ceres Seq. ID no. 4968051
atgtggaggttaaagttatcggaaggagacgaagagagcgtgaatcaacatgttggaagacagttttgggaatatgataaccaatttggaacctctgaagagagacatcacattaaccatcttcgtagcaactttactctcaatcggttttcttctaagcatagttctgatcttctctaccgttttcagtgttggaaagagaaaggaaaaggaatggagagacttccacaagtgaaagtaaaagagggggaagaaagattgataaatgaagaagtggtgaatgttacattaagaagaagtttgagattctactcaatacttcaatcacaagatggtttttggcctggtgattatggtggccctttgtttctcttgcctgctctggtgatcggcttatatgtgacggaagttttggatggaactttaactgcgcaacatcaaatcgagattcgtcgttatctctataaccatcagaacaaggatggaggatggggactacacgtagaagggaatagcaccatgttttgtacagtgctctcatacgtagcactgagactaatgggggaagaattagacggtggagatggagccatggaatcagctagaagttggattcaccaccacggtggtgccacttttattccctcctggggcaagttctggctctccgttcttggagcttatgagtggagtgggaacaatcctttacctccagagctatggctccttccatatagtcttccttttcatccgggccgaatgtggtgccattgtaggatggtttatcttccaatgtcatatctatatggaagaagatttgtttgtcgtactaatggaactattttatcgcttcgacgagagctctacactattccttatcaccatatcgattgggacaccgcccgtaatcaatgtgccaaggaggacttgtactatccacatccaaagattcaagacgtcctttggagttgtctgaataaatttggagagcctcttcttgaaagatggccattgaataacctcagaaaccatgctcttcagacagtaatgcaacacattcactatgaagaccaaaacagccactatatttgtatcggtcctgtcaacaaagtcttgaatatgctttgttgttgggtcgagtcctcgaattccgaggcatttaaatctcacctctcgcggattaaagactatttgtgggtggctgaggatggaatgaaaatgcagggatacaacggatctcagctgtgggacgtgactttagcggtccaagcaatcttggcgacgaatttggttgatgactatggtttgatgcttaagaaagcccataactacatcaagaacactcaaataaggaaagacacaagtggagatccggggttgtggtaccgacacccgtgcaagggaggatggggtttctccactggagacaatccatggcctgtctctgattgtactgctgaagccttgaaggcggcgttgctattgtcacaaatgccggttaatttagttggagaacccatgcctgaagagcatttagttgatgctgtaaactttatcttatcattacagaacaagaatgggggatttgcgtcatatgagctaactagatcatatcccgagctagaggttatcaacccatcagagacttttggggatatcatcatagattatcaatacgtagaatgcacgtcagctgccatccaaggtctcgtgttattcacaacgttaaattcgagctacaagaggaaggagatagtaggaagcatcaacaaagcagttgagtttattgaaaaaacacaacttcctgatggttcatggtatggctcgtggggagtgtgtttcacctatgcaacatggtttggtattaaaggcatgttggcttcaggcaaaacatatgagagcagtctttgtattagaaaagcttgtggtttcttgctctccaaacaactttgttgtggtggatggggagagagctacctttcttgccaaaacaaagtatacaccaatcttcctgggaataaatcgcatattgtgaacacatcatgggcactcttggctctcattgaagcgggacaagctagtagagatccgatgccattgcatcgcggggcaaaatcgctgatcaactcgcagatggaagatggagattacccacaacaagagatactaggagtctttaatcggaattgtatgatcagttactcagcttatagaaacatattccccatttgggctcttggagaataccgcaaactcatgttgtctttgtga

SEQ ID NO: 30649 - protein, 756 aa, Arabidopsis thaliana
  misc_feature (1)..(756): Ceres Seq. ID no. 4968052
MWRLKLSEGDEESVNQHVGRQFWEYDNQFGTSEERHHINHLRSNFTLNRFSSKHSSDLLYRFQCWKEKGKGMERLPQVKVKEGEERLINEEVVNVTLRRSLRFYSILQSQDGFWPGDYGGPLFLLPALVIGLYVTEVLDGTLTAQHQIEIRRYLYNHQNKDGGWGLHVEGNSTMFCTVLSYVALRLMGEELDGGDGAMESARSWIHHHGGATFIPSWGKFWLSVLGAYEWSGNNPLPPELWLLPYSLPFHPGRMWCHCRMVYLPMSYLYGRRFVCRTNGTILSLRRELYTIPYHHIDWDTARNQCAKEDLYYPHPKIQDVLWSCLNKFGEPLLERWPLNNLRNHALQTVMQHIHYEDQNSHYICIGPVNKVLNMLCCWVESSNSEAFKSHLSRIKDYLWVAEDGMKMQGYNGSQLWDVTLAVQAILATNLVDDYGLMLKKAHNYIKNTQIRKDTSGDPGLWYRHPCKGGWGFSTGDNPWPVSDCTAEALKAALLLSQMPVNLVGEPMPEEHLVDAVNFILSLQNKNGGFASYELTRSYPELEVINPSETFGDIIIDYQYVECTSAAIQGLVLFTTLNSSYKRKEIVGSINKAVEFIEKTQLPDGSWYGSWGVCFTYATWFGIKGMLASGKTYESSLCIRKACGFLLSKQLCCGGWGESYLSCQNKVYTNLPGNKSHIVNTSWALLALIEAGQASRDPMPLHRGAKSLINSQMEDGDYPQQEILGVFNRNCMISYSAYRNIFPIWALGEYRKLMLSL

SEQ ID NO: 30650 - protein, 685 aa, Arabidopsis thaliana
  misc_feature (1)..(685): Ceres Seq. ID no. 4968053
MERLPQVKVKEGEERLINEEVVNVTLRRSLRFYSILQSQDGFWPGDYGGPLFLLPALVIGLYVTEVLDGTLTAQHQIEIRRYLYNHQNKDGGWGLHVEGNSTMFCTVLSYVALRLMGEELDGGDGAMESARSWIHHHGGATFIPSWGKFWLSVLGAYEWSGNNPLPPELWLLPYSLPFHPGRMWCHCRMVYLPMSYLYGRRFVCRTNGTILSLRRELYTIPYHHIDWDTARNQCAKEDLYYPHPKIQDVLWSCLNKFGEPLLERWPLNNLRNHALQTVMQHIHYEDQNSHYICIGPVNKVLNMLCCWVESSNSEAFKSHLSRIKDYLWVAEDGMKMQGYNGSQLWDVTLAVQAILATNLVDDYGLMLKKAHNYIKNTQIRKDTSGDPGLWYRHPCKGGWGFSTGDNPWPVSDCTAEALKAALLLSQMPVNLVGEPMPEEHLVDAVNFILSLQNKNGGFASYELTRSYPELEVINPSETFGDIIIDYQYVECTSAAIQGLVLFTTLNSSYKRKEIVGSINKAVEFIEKTQLPDGSWYGSWGVCFTYATWFGIKGMLASGKTYESSLCIRKACGFLLSKQLCCGGWGESYLSCQNKVYTNLPGNKSHIVNTSWALLALIEAGQASRDPMPLHRGAKSLINSQMEDGDYPQQEILGVFNRNCMISYSAYRNIFPIWALGEYRKLMLSL

SEQ ID NO: 30651 - protein, 583 aa, Arabidopsis thaliana
  misc_feature (1)..(583): Ceres Seq. ID no. 4968054
MFCTVLSYVALRLMGEELDGGDGAMESARSWIHHHGGATFIPSWGKFWLSVLGAYEWSGNNPLPPELWLLPYSLPFHPGRMWCHCRMVYLPMSYLYGRRFVCRTNGTILSLRRELYTIPYHHIDWDTARNQCAKEDLYYPHPKIQDVLWSCLNKFGEPLLERWPLNNLRNHALQTVMQHIHYEDQNSHYICIGPVNKVLNMLCCWVESSNSEAFKSHLSRIKDYLWVAEDGMKMQGYNGSQLWDVTLAVQAILATNLVDDYGLMLKKAHNYIKNTQIRKDTSGDPGLWYRHPCKGGWGFSTGDNPWPVSDCTAEALKAALLLSQMPVNLVGEPMPEEHLVDAVNFILSLQNKNGGFASYELTRSYPELEVINPSETFGDIIIDYQYVECTSAAIQGLVLFTTLNSSYKRKEIVGSINKAVEFIEKTQLPDGSWYGSWGVCFTYATWFGIKGMLASGKTYESSLCIRKACGFLLSKQLCCGGWGESYLSCQNKVYTNLPGNKSHIVNTSWALLALIEAGQASRDPMPLHRGAKSLINSQMEDGDYPQQEILGVFNRNCMISYSAYRNIFPIWALGEYRKLMLSL

SEQ ID NO: 30652 - DNA, 3603 bp, Arabidopsis thaliana
  misc_feature (1)..(3603): Ceres Seq. ID no. 4968107
atgaaacgcatcaatgtcgatctccatcttctccattttccgaaattcagaaaatttcaatcacgaaaagtatcttcgtccctacccaaattggaactcgatcagaaatcaccacaggagacagttttcttacttggtcaggtacttgacacttacccagatatcagaacacttagaacagtccactcaagaatcattttggaagatctacgttgtaattcttctttgggtgttaaacttatgagagcttatgcttctctaaaagatgtagcgtcagcacgcaaggtgttcgacgaaattcctgagagaaacgtaattatcattaatgttatgattagaagctatgtgaataatgggttttacggtgaaggtgttaaagtgtttgggacgatgtgtggttgtaatgttagacctgatcattatactttcccgtgtgttctaaaggcgtgttcttgctctgggactattgtcattgggaggaaaattcatgggtctgctacaaaagttgggctctcttcgactttgtttgttgggaatggtttagtttctatgtatggaaagtgtggatttttatctgaagcaaggcttgtacttgacgagatgtctaggagagatgtggtgtcttggaactcgttggttgttgggtatgcgcaaaatcagagatttgatgatgctttggaggtttgtagggaaatggagtctgtgaagataagccatgatgctggtacgatggctagtctgttaccagcagtgagtaacactacaactgaaaacgttatgtatgttaaagatatgttttttaaaatggggaaaaagagtttggtttcatggaatgtgatgatcggtgtgtatatgaaaaatgcgatgcctgttgaagctgtggaattgtattcccgaatggaggctgatgggtttgaacctgatgcagtctcaatcacaagtgtattacctgcttgtggagatacctctgctctgtctcttggtaagaaaatccatggatacattgagaggaagaagctgataccaaatctgttgttagagaatgcactgatcgacatgtatgcaaaatgcggatgtttagagaaagctagagatgtgtttgagaacatgaagtcacgtgatgttgtgtcttggacagctatgatttcagcttatggattcagcggacgaggctgtgacgcagtggcattgttttcgaaattgcaagattcgggtctcgtccctgattcaattgcgtttgtcacaacgcttgctgcttgtagccatgcggggttactagaagaaggtaggagttgtttcaaactcatgacagatcattacaagatcactcctaggttagagcatttggcttgtatggtggatcttcttggccgagccgggaaagtgaaagaagcttacagatttatacaagatatgtcaatggaaccaaacgagagagtttggggagcattattaggagcttgcagggtgcattctgatacagacatcggtctactagcagctgataaacttttccagttagcacccgagcaatcgggttactacgtattgctttctaacatatacgcaaaggctggaagatgggaagaagtgactaacatcagaaacataatgaagagcaaagggttaaagaagaatcccggagcaagcaatgttgaggtcaacagaataattcatacattcttagtaggcgacaggtcacacccgcaatccgatgagatatacagagagctggatgttctagtaaagaaaatgaaagagttaggttatgttcctgattcagagtcagcgcttcacgatgtggaagaggaagataaagagacgcatttagctgttcacagtgagaaattagccattgtgtttgctctgatgaacactaaggaggaagaagaagacagtaataataccataagaataacgaagaatcttaggatatgtggagactgtcatgttgcagctaagcttatctcacagataacttctcgagagataatcatcagagacactaatagatttcatgtgttccggttcggtgtttgctcttgtgcttctgagctcagagatagagagagcgagaggttagagataacagtagttttaccgatgattgagtcggttatggccgttcgtctctccaccggattttgctcgtcgacggcgttactccagtatcgtacagcaccgagctcggaggagggaggaaactgcttccattatgcgtcccgccgcgtttttcagcctcaacgtatccaccatattgatgggagtgggtttctgaagtacaacagtgactatataacaagaaaacacctacggaagaatcgaactcaagccacagctgagtatgtagattcagcttcagatccagaaaagcaaactggcaagtcaaggtatcatccttcagaagaaatcagagcctctttgccacagaatgatggagattccaggctttcacctgcagaaactactagaaccatcattgaggtgaacaataaaggaaccctgatgcttacaggttctattggtgatggagttcatgagaatattctctggccagatataccttatataacagatcaaaatggaaatttatactttcaagtaaaggaggatgaggacgtcatgcagtccgttacttctgaaaataattatgtgcaagttatagttggttttgatacgatggagatgatcaaggaaatggagctgatgggactttctgatagtgactttgaaactgaagatgatgaaagtggagatgatgacagtgaggatacaggagaagacgaagatgaggaggaatgggttgctattttagaggatgaagatgaagacgatgatgatgatgatgatgatgatgaggatgatgatgattctgattctgatgaatcgctgggagactgggcaaatttggaaacaatgaggagttgtcatcccatgttttttgcaaagagaatgactgaggttgcttcaaatgatcctgttgattggatggatcagccgtctgctggccttgctatccagggacttttgagtcatatcttagtggaagattattcagatatccaaaagaaacttgctgatagcaattctacaactaacggaaacaaggatgcagaaaacttagtggacaagcttgaagacaatagtaaggcaggtggtgacgaatctgagatagattcatcacaggatgaaaaagcaagaaatgtggtggcgttttacaagctggagatgataagaattcagcttatcacagcacaaggggatcagactgaagttgaggtggaagatgtcagaaaagcacaacctgatgctattgctcatgcatcagctgaaatcataagccgtttagaagaatctggtgataaaataactgaagcactcaaatctctgtgttggagacataacagtattcaagcagaggaagtgaagctgattgggatagattccctaggttttgacctcaggctttgcgcaggagcaaagattgagtcattgcgatttgcattctcgacaagggcaacatcagaagaaaacgcagagggacaaataagaaaactattattcccgaaaacgaaccagtcgacacaaccaaaaccaaaatga

SEQ ID NO: 30653 - protein, 1200 aa, Arabidopsis thaliana
  misc_feature (1)..(1200): Ceres Seq. ID no. 4968108
MKRINVDLHLLHFPKFRKFQSRKVSSSLPKLELDQKSPQETVFLLGQVLDTYPDIRTLRTVHSRIILEDLRCNSSLGVKLMRAYASLKDVASARKVFDEIPERNVIIINVMIRSYVNNGFYGEGVKVFGTMCGCNVRPDHYTFPCVLKACSCSGTIVIGRKIHGSATKVGLSSTLFVGNGLVSMYGKCGFLSEARLVLDEMSRRDVVSWNSLVVGYAQNQRFDDALEVCREMESVKISHDAGTMASLLPAVSNTTTENVMYVKDMFFKMGKKSLVSWNVMIGVYMKNAMPVEAVELYSRMEADGFEPDAVSITSVLPACGDTSALSLGKKIHGYIERKKLIPNLLLENALIDMYAKCGCLEKARDVFENMKSRDVVSWTAMISAYGFSGRGCDAVALFSKLQDSGLVPDSIAFVTTLAACSHAGLLEEGRSCFKLMTDHYKITPRLEHLACMVDLLGRAGKVKEAYRFIQDMSMEPNERVWGALLGACRVHSDTDIGLLAADKLFQLAPEQSGYYVLLSNIYAKAGRWEEVTNIRNIMKSKGLKKNPGASNVEVNRIIHTFLVGDRSHPQSDEIYRELDVLVKKMKELGYVPDSESALHDVEEEDKETHLAVHSEKLAIVFALMNTKEEEEDSNNTIRITKNLRICGDCHVAAKLISQITSREIIIRDTNRFHVFRFGVCSCASELRDRESERLEITVVLPMIESVMAVRLSTGFCSSTALLQYRTAPSSEEGGNCFHYASRRVFQPQRIHHIDGSGFLKYNSDYITRKHLRKNRTQATAEYVDSASDPEKQTGKSRYHPSEEIRASLPQNDGDSRLSPAETTRTIIEVNNKGTLMLTGSIGDGVHENILWPDIPYITDQNGNLYFQVKEDEDVMQSVTSENNYVQVIVGFDTMEMIKEMELMGLSDSDFETEDDESGDDDSEDTGEDEDEEEWVAILEDEDEDDDDDDDDDEDDDDSDSDESLGDWANLETMRSCHPMFFAKRMTEVASNDPVDWMDQPSAGLAIQGLLSHILVEDYSDIQKKLADSNSTTNGNKDAENLVDKLEDNSKAGGDESEIDSSQDEKARNVVAFYKLEMIRIQLITAQGDQTEVEVEDVRKAQPDAIAHASAEIISRLEESGDKITEALKSLCWRHNSIQAEEVKLIGIDSLGFDLRLCAGAKIESLRFAFSTRATSEENAEGQIRKLLFPKTNQSTQPKPK

SEQ ID NO: 30654 - protein, 1120 aa, Arabidopsis thaliana
  misc_feature (1)..(1120): Ceres Seq. ID no. 4968109
MRAYASLKDVASARKVFDEIPERNVIIINVMIRSYVNNGFYGEGVKVFGTMCGCNVRPDHYTFPCVLKACSCSGTIVIGRKIHGSATKVGLSSTLFVGNGLVSMYGKCGFLSEARLVLDEMSRRDVVSWNSLVVGYAQNQRFDDALEVCREMESVKISHDAGTMASLLPAVSNTTTENVMYVKDMFFKMGKKSLVSWNVMIGVYMKNAMPVEAVELYSRMEADGFEPDAVSITSVLPACGDTSALSLGKKIHGYIERKKLIPNLLLENALIDMYAKCGCLEKARDVFENMKSRDVVSWTAMISAYGFSGRGCDAVALFSKLQDSGLVPDSIAFVTTLAACSHAGLLEEGRSCFKLMTDHYKITPRLEHLACMVDLLGRAGKVKEAYRFIQDMSMEPNERVWGALLGACRVHSDTDIGLLAADKLFQLAPEQSGYYVLLSNIYAKAGRWEEVTNIRNIMKSKGLKKNPGASNVEVNRIIHTFLVGDRSHPQSDEIYRELDVLVKKMKELGYVPDSESALHDVEEEDKETHLAVHSEKLAIVFALMNTKEEEEDSNNTIRITKNLRICGDCHVAAKLISQITSREIIIRDTNRFHVFRFGVCSCASELRDRESERLEITVVLPMIESVMAVRLSTGFCSSTALLQYRTAPSSEEGGNCFHYASRRVFQPQRIHHIDGSGFLKYNSDYITRKHLRKNRTQATAEYVDSASDPEKQTGKSRYHPSEEIRASLPQNDGDSRLSPAETTRTIIEVNNKGTLMLTGSIGDGVHENILWPDIPYITDQNGNLYFQVKEDEDVMQSVTSENNYVQVIVGFDTMEMIKEMELMGLSDSDFETEDDESGDDDSEDTGEDEDEEEWVAILEDEDEDDDDDDDDDEDDDDSDSDESLGDWANLETMRSCHPMFFAKRMTEVASNDPVDWMDQPSAGLAIQGLLSHILVEDYSDIQKKLADSNSTTNGNKDAENLVDKLEDNSKAGGDESEIDSSQDEKARNVVAFYKLEMIRIQLITAQGDQTEVEVEDVRKAQPDAIAHASAEIISRLEESGDKITEALKSLCWRHNSIQAEEVKLIGIDSLGFDLRLCAGAKIESLRFAFSTRATSEENAEGQIRKLLFPKTNQSTQPKPK

SEQ ID NO: 30655 - protein, 1090 aa, Arabidopsis thaliana
  misc_feature (1)..(1090): Ceres Seq. ID no. 4968110
MIRSYVNNGFYGEGVKVFGTMCGCNVRPDHYTFPCVLKACSCSGTIVIGRKIHGSATKVGLSSTLFVGNGLVSMYGKCGFLSEARLVLDEMSRRDVVSWNSLVVGYAQNQRFDDALEVCREMESVKISHDAGTMASLLPAVSNTTTENVMYVKDMFFKMGKKSLVSWNVMIGVYMKNAMPVEAVELYSRMEADGFEPDAVSITSVLPACGDTSALSLGKKIHGYIERKKLIPNLLLENALIDMYAKCGCLEKARDVFENMKSRDVVSWTAMISAYGFSGRGCDAVALFSKLQDSGLVPDSIAFVTTLAACSHAGLLEEGRSCFKLMTDHYKITPRLEHLACMVDLLGRAGKVKEAYRFIQDMSMEPNERVWGALLGACRVHSDTDIGLLAADKLFQLAPEQSGYYVLLSNIYAKAGRWEEVTNIRNIMKSKGLKKNPGASNVEVNRIIHTFLVGDRSHPQSDEIYRELDVLVKKMKELGYVPDSESALHDVEEEDKETHLAVHSEKLAIVFALMNTKEEEEDSNNTIRITKNLRICGDCHVAAKLISQITSREIIIRDTNRFHVFRFGVCSCASELRDRESERLEITVVLPMIESVMAVRLSTGFCSSTALLQYRTAPSSEEGGNCFHYASRRVFQPQRIHHIDGSGFLKYNSDYITRKHLRKNRTQATAEYVDSASDPEKQTGKSRYHPSEEIRASLPQNDGDSRLSPAETTRTIIEVNNKGTLMLTGSIGDGVHENILWPDIPYITDQNGNLYFQVKEDEDVMQSVTSENNYVQVIVGFDTMEMIKEMELMGLSDSDFETEDDESGDDDSEDTGEDEDEEEWVAILEDEDEDDDDDDDDDEDDDDSDSDESLGDWANLETMRSCHPMFFAKRMTEVASNDPVDWMDQPSAGLAIQGLLSHILVEDYSDIQKKLADSNSTTNGNKDAENLVDKLEDNSKAGGDESEIDSSQDEKARNVVAFYKLEMIRIQLITAQGDQTEVEVEDVRKAQPDAIAHASAEIISRLEESGDKITEALKSLCWRHNSIQAEEVKLIGIDSLGFDLRLCAGAKIESLRFAFSTRATSEENAEGQIRKLLFPKTNQSTQPKPK

SEQ ID NO: 30656 - DNA, 930 bp, Arabidopsis thaliana
  misc_feature (1)..(930): Ceres Seq. ID no. 4968183
atggaagatctatggaagagagcgaaatcgtttgcagaagaagcagcgaagaaatcacaaaccataacactacaatcatcttcaacaacattcgtcaatctcgtcaccgaaaccgctaaaaaatccaaagagttcgctctcgaagcttctaagaaagctgattcgatcaatgtctccgagttcgtcgccgagacggcgaagaagtcaaaggaattcgctgctgaggtttcaacgaaagcggatcagctcaaagtcgtagcattgaaacaagctgatcagatccagaatataaaatcgattgccgacattatacctggaggattaggaggatcaggatctggtggtggtggttctgagatttctgaatctgagcttgttagttttggtattactgatgatttgagagagtttgttaaaggtttgacatctgctacgttccaggcttttcctgaacaagatgaatcgtcggaagtttctgatttggaaacaagtgcgtcgaatgttcggaaggatctttctgagtggcaggagagacatgccactcttgttcttggttctgtcaagcaaatttcgaagttgagatatgaactatgcccacgagttatgaaagaaaggaggttctggaggatatactttaccttagtgagcactcatgttgcaccatatgaaaggaagtacatggaggaacttaggaacaaagcagagagtaaagatgaagaagctaagaagagtccagggcttggaaggacagaatcagctgaaaagaacagaatatctactgcatcgtctgagcaagatctcgatacattcctgctgggagatctagaagacagtgacgaagctcctgatgatggtgatggtgatgatggaggaagcctgggtgatgatgactttgacaagattggcaactctgtaagtgaaaacgtttga

SEQ ID NO: 30657 - protein, 309 aa, Arabidopsis thaliana
  misc_feature (1)..(309): Ceres Seq. ID no. 4968184
MEDLWKRAKSFAEEAAKKSQTITLQSSSTTFVNLVTETAKKSKEFALEASKKADSINVSEFVAETAKKSKEFAAEVSTKADQLKVVALKQADQIQNIKSIADIIPGGLGGSGSGGGGSEISESELVSFGITDDLREFVKGLTSATFQAFPEQDESSEVSDLETSASNVRKDLSEWQERHATLVLGSVKQISKLRYELCPRVMKERRFWRIYFTLVSTHVAPYERKYMEELRNKAESKDEEAKKSPGLGRTESAEKNRISTASSEQDLDTFLLGDLEDSDEAPDDGDGDDGGSLGDDDFDKIGNSVSENV

SEQ ID NO: 30658 - DNA, 603 bp, Arabidopsis thaliana
  misc_feature (1)..(603): Ceres Seq. ID no. 4968265
atgagctccttcaatggaaacagcaacatcgacaacctcctaatccaaaccctacttggacgtctccaaattcgtccccctaactctcatttcctctctcaatccctagacgacctcctcttcaaatccgacgacagcgacggcgatgatgacggagaaggtcagaccagtctcgacagagaagaagctaggcttgagaaagagctaatccgagtcatcgtctctggtcgaagcgattctctcaagccgaattcaggtcaagccgtgacagtcaacgaacaccacatctgcgttgggtttcatgaggatgaggaatcggattatcgtgtttgggagtggcatggtcatatcatgttgtttgatgaagagaatgggtacacgcctgagtatatctacgggaattacttcgagaggttgcctgtgaagcttcctaataaccgccgtgtggagaaggagaagaagaaggagatgaaagaagaggaggtggagaatttggggcttagagagttgatcgatggtggtgacgctgctcctggtaggattcttcataggaacaacatcaacatcggttcctcaagtttctttttcgttgcaagacaataa

SEQ ID NO: 30659 - protein, 200 aa, Arabidopsis thaliana
  misc_feature (1)..(200): Ceres Seq. ID no. 4968266
MSSFNGNSNIDNLLIQTLLGRLQIRPPNSHFLSQSLDDLLFKSDDSDGDDDGEGQTSLDREEARLEKELIRVIVSGRSDSLKPNSGQAVTVNEHHICVGFHEDEESDYRVWEWHGHIMLFDEENGYTPEYIYGNYFERLPVKLPNNRRVEKEKKKEMKEEEVENLGLRELIDGGDAAPGRILHRNNINIGSSSFFFVARQ

SEQ ID NO: 30660 - DNA, 1809 bp, Arabidopsis thaliana
  misc_feature (1)..(1809): Ceres Seq. ID no. 4968288
atggagcacaacaaggttgatacagaacctcaagattcatatgatgatcaacaaaaatgggttctcgattcttcgaccgatagtagaggagagattccgcttcgggctcaaaccggagcttggagagctgcactcttcatcattggtatcgaattcagcgagaggctaagttactttgggatctccacgaacttagtggtctacttgactaccattcttcaccaagatctcaagatggctgtaaaaaatacgaactactggtctggtgtcactactttgatgcctcttcttggaggcttcgtcgcagatgcttatctcggccgttatggaactgtcctacttgcaaccaccatttaccttatgggcttgattctgttaacattgtcttggtttataccgggattgaaagcatgtcatgaagacatgtgtgttgagccaaggaaagcccacgagatagccttcttcattgcaatctacttgatctccataggcactggaggtcataagccatcccttgagagctttggagctgaccaattcgaagatggccatccggaagaacgaaaaatgaaaatgtcttactttaactggtggaatgctggtctatgcgctggtattttaaccgcggtgactgtaattgtctatatcgaagaccggattggttggggtgtggctagcatcatactcacaatagttatggctacttcgttttttatcttccgtatcggcaaaccgttttaccgttatagagcaccttctggtagcccattgaccccaatgttgcaagtctttgtcgccgccattgccaaaagaaatcttccttgtcccagtgattcttctcttcttcatgagttaactaatgaagagtatactaaaggccggcttctttccagctcaaagaatcttaaatttctagacaaagcagcagttattgaggaccgaaacgagaacactaaagccgagaagcagagtccatggcgactcgcaacggttacgaaagtggaagaagttaagctactcatcaacatgattccaatctggttctttacattagcctttggagtatgcgccactcaaagctcaacactctttatcaaacaagccataataatggaccgacacatcacagggacaagcttcatagttcctccagcttcattgttctctctcatagctctctccataatcatcaccgtaacaatctacgagaaactcctcgttcctcttttgagacgtgccacaggaaacgaaagaggcattagcattctacaaagaatcggggtcggtatggttttctccttattcgctatgatcattgctgctctgattgagaagaaaagattagattatgctaaggaacaccacatgaataagaccatgaccttgagtgctatatggttagctcctcaattcctagtcttaggagttgcggatgcttttacccttgtcggtcttcaagaatatttctacgaccaagtcccagattctatgagaagcttaggcatagcgttttacctcagcgtgcttggagcggctagctttgtcaacaatcttttgataacggttagtgatcatttagccgaggaaatttccgggaagggctggtttgggaaagaccttaatagcagccgcttggaccgcttttactggatgctagccgccttgaccgctgcaaatatatgctgctttgtgatcgtggccatgagatacacttacaagactgtgcagccgagtctggctgttgttgctgacggcggtgatgacgttgagacagccacggggacgaataacacgtccaagtttacgtaa

SEQ ID NO: 30661 - protein, 602 aa, Arabidopsis thaliana
  misc_feature (1)..(602): Ceres Seq. ID no. 4968289
MEHNKVDTEPQDSYDDQQKWVLDSSTDSRGEIPLRAQTGAWRAALFIIGIEFSERLSYFGISTNLVVYLTTILHQDLKMAVKNTNYWSGVTTLMPLLGGFVADAYLGRYGTVLLATTIYLMGLILLTLSWFIPGLKACHEDMCVEPRKAHEIAFFIAIYLISIGTGGHKPSLESFGADQFEDGHPEERKMKMSYFNWWNAGLCAGILTAVTVIVYIEDRIGWGVASIILTIVMATSFFIFRIGKPFYRYRAPSGSPLTPMLQVFVAAIAKRNLPCPSDSSLLHELTNEEYTKGRLLSSSKNLKFLDKAAVIEDRNENTKAEKQSPWRLATVTKVEEVKLLINMIPIWFFTLAFGVCATQSSTLFIKQAIIMDRHITGTSFIVPPASLFSLIALSIIITVTIYEKLLVPLLRRATGNERGISILQRIGVGMVFSLFAMIIAALIEKKRLDYAKEHHMNKTMTLSAIWLAPQFLVLGVADAFTLVGLQEYFYDQVPDSMRSLGIAFYLSVLGAASFVNNLLITVSDHLAEEISGKGWFGKDLNSSRLDRFYWMLAALTAANICCFVIVAMRYTYKTVQPSLAVVADGGDDVETATGTNNTSKFT

SEQ ID NO: 30662 - protein, 524 aa, Arabidopsis thaliana
  misc_feature (1)..(524): Ceres Seq. ID no. 4968290
MAVKNTNYWSGVTTLMPLLGGFVADAYLGRYGTVLLATTIYLMGLILLTLSWFIPGLKACHEDMCVEPRKAHEIAFFIAIYLISIGTGGHKPSLESFGADQFEDGHPEERKMKMSYFNWWNAGLCAGILTAVTVIVYIEDRIGWGVASIILTIVMATSFFIFRIGKPFYRYRAPSGSPLTPMLQVFVAAIAKRNLPCPSDSSLLHELTNEEYTKGRLLSSSKNLKFLDKAAVIEDRNENTKAEKQSPWRLATVTKVEEVKLLINMIPIWFFTLAFGVCATQSSTLFIKQAIIMDRHITGTSFIVPPASLFSLIALSIIITVTIYEKLLVPLLRRATGNERGISILQRIGVGMVFSLFAMIIAALIEKKRLDYAKEHHMNKTMTLSAIWLAPQFLVLGVADAFTLVGLQEYFYDQVPDSMRSLGIAFYLSVLGAASFVNNLLITVSDHLAEEISGKGWFGKDLNSSRLDRFYWMLAALTAANICCFVIVAMRYTYKTVQPSLAVVADGGDDVETATGTNNTSKFT

SEQ ID NO: 30663 - protein, 509 aa, Arabidopsis thaliana
  misc_feature (1)..(509): Ceres Seq. ID no. 4968291
MPLLGGFVADAYLGRYGTVLLATTIYLMGLILLTLSWFIPGLKACHEDMCVEPRKAHEIAFFIAIYLISIGTGGHKPSLESFGADQFEDGHPEERKMKMSYFNWWNAGLCAGILTAVTVIVYIEDRIGWGVASIILTIVMATSFFIFRIGKPFYRYRAPSGSPLTPMLQVFVAAIAKRNLPCPSDSSLLHELTNEEYTKGRLLSSSKNLKFLDKAAVIEDRNENTKAEKQSPWRLATVTKVEEVKLLINMIPIWFFTLAFGVCATQSSTLFIKQAIIMDRHITGTSFIVPPASLFSLIALSIIITVTIYEKLLVPLLRRATGNERGISILQRIGVGMVFSLFAMIIAALIEKKRLDYAKEHHMNKTMTLSAIWLAPQFLVLGVADAFTLVGLQEYFYDQVPDSMRSLGIAFYLSVLGAASFVNNLLITVSDHLAEEISGKGWFGKDLNSSRLDRFYWMLAALTAANICCFVIVAMRYTYKTVQPSLAVVADGGDDVETATGTNNTSKFT

SEQ ID NO: 30664 - DNA, 1344 bp, Arabidopsis thaliana
  misc_feature (1)..(1344): Ceres Seq. ID no. 4968870
atggaggaaacgctaaatcagttcgtcatggaaggcgtacctgtcaaaaaacacgacctcattcgctacgcaaaggatcttcgcaagtttcgtcaacctcaacgcgctctcgagatctttgagtggatggaaagaaaggaaatagcgtttactggcagcgatcacgcgattcgtttgaatctaattgcaaagagtaaaggcttagaggcggctgagacctacttcaacagtttagacgattctattaagaatcagtccacttatggttccttattgaactgttactgtgtggaaaaggaggaagttaaagcaaaggctcattttgaaaatatggttgatctcaatcatgtgagtaattctttgccgtttaataacctgatggctatgtatatggggctaggtcaaccagagaaggtgcctgcattggttgttgcgatgaaagagaagagtattactccttgtgatattacttactccatgtggatacaaagctgtggaagtttaaaggatttagatggagtagagaaggttcttgatgaaatgaaagcagaaggtgaaggtattttctcttggaatacatttgctaatcttgcagcaatttatattaaagtcggtctctacggtaaagcagaagaggcgttgaaatctctggagaacaatatgaatcctgacgtacgtgattgttatcattttctcattaacttgtatactggaattgcaaatgcttctgaggtttatcgagtttgggatttgcttaagaaaagataccctaatgtcaacaattcaagctatcttacaatgcttcgagcactgagtaaactcgatgacattgatggagtcaagaaagtctttgcagaatgggaatcgacatgctggacttacgatatgcggatggcgaatgtagcgattagcagctacttaaagcagaacatgtacgaagaagctgaggctgttttcaacggcgccatgaaaaagtgtaaaggtcaattctcaaaggcaaggcagcttttgatgatgcacctgttgaagaacgatcaggcagatttggctctgaagcattttgaagcggcggttttggatcaagacaagaactggacttggagctcagagctgatcagttcgttctttcttcactttgaggaagccaaagacgttgatggagcagaagaattctgcaaaaccttgacgaaatggagtcccctcagttctgaaacttacactcttcttatgaagacttacctcgctgcagggaaagcttgtccggatatgaaaaagagattggaagaacaagggatcctggtagacgaagagcaagaatgtttgcttagcaagatttgcccttga

SEQ ID NO: 30665 - protein, 447 aa, Arabidopsis thaliana
  misc_feature (1)..(447): Ceres Seq. ID no. 4968871
MEETLNQFVMEGVPVKKHDLIRYAKDLRKFRQPQRALEIFEWMERKEIAFTGSDHAIRLNLIAKSKGLEAAETYFNSLDDSIKNQSTYGSLLNCYCVEKEEVKAKAHFENMVDLNHVSNSLPFNNLMAMYMGLGQPEKVPALVVAMKEKSITPCDITYSMWIQSCGSLKDLDGVEKVLDEMKAEGEGIFSWNTFANLAAIYIKVGLYGKAEEALKSLENNMNPDVRDCYHFLINLYTGIANASEVYRVWDLLKKRYPNVNNSSYLTMLRALSKLDDIDGVKKVFAEWESTCWTYDMRMANVAISSYLKQNMYEEAEAVFNGAMKKCKGQFSKARQLLMMHLLKNDQADLALKHFEAAVLDQDKNWTWSSELISSFFLHFEEAKDVDGAEEFCKTLTKWSPLSSETYTLLMKTYLAAGKACPDMKKRLEEQGILVDEEQECLLSKICP

SEQ ID NO: 30666 - protein, 438 aa, Arabidopsis thaliana
  misc_feature (1)..(438): Ceres Seq. ID no. 4968872
MEGVPVKKHDLIRYAKDLRKFRQPQRALEIFEWMERKEIAFTGSDHAIRLNLIAKSKGLEAAETYFNSLDDSIKNQSTYGSLLNCYCVEKEEVKAKAHFENMVDLNHVSNSLPFNNLMAMYMGLGQPEKVPALVVAMKEKSITPCDITYSMWIQSCGSLKDLDGVEKVLDEMKAEGEGIFSWNTFANLAAIYIKVGLYGKAEEALKSLENNMNPDVRDCYHFLINLYTGIANASEVYRVWDLLKKRYPNVNNSSYLTMLRALSKLDDIDGVKKVFAEWESTCWTYDMRMANVAISSYLKQNMYEEAEAVFNGAMKKCKGQFSKARQLLMMHLLKNDQADLALKHFEAAVLDQDKNWTWSSELISSFFLHFEEAKDVDGAEEFCKTLTKWSPLSSETYTLLMKTYLAAGKACPDMKKRLEEQGILVDEEQECLLSKICP

SEQ ID NO: 30667 - protein, 405 aa, Arabidopsis thaliana
  misc_feature (1)..(405): Ceres Seq. ID no. 4968873
MERKEIAFTGSDHAIRLNLIAKSKGLEAAETYFNSLDDSIKNQSTYGSLLNCYCVEKEEVKAKAHFENMVDLNHVSNSLPFNNLMAMYMGLGQPEKVPALVVAMKEKSITPCDITYSMWIQSCGSLKDLDGVEKVLDEMKAEGEGIFSWNTFANLAAIYIKVGLYGKAEEALKSLENNMNPDVRDCYHFLINLYTGIANASEVYRVWDLLKKRYPNVNNSSYLTMLRALSKLDDIDGVKKVFAEWESTCWTYDMRMANVAISSYLKQNMYEEAEAVFNGAMKKCKGQFSKARQLLMMHLLKNDQADLALKHFEAAVLDQDKNWTWSSELISSFFLHFEEAKDVDGAEEFCKTLTKWSPLSSETYTLLMKTYLAAGKACPDMKKRLEEQGILVDEEQECLLSKICP

SEQ ID NO: 30668 - DNA, 594 bp, Arabidopsis thaliana
  misc_feature (1)..(594): Ceres Seq. ID no. 4969987
atgaccgttaagcttcctcagataatgaaaatcgtggacaacaagagtgtaaaaggcctaagtgttgtagcatttgagcttgaagtgattggttacacaatctcacttgcttactgtcttaacaaagaccttcctttttcagcttttggtgaattagcttttcttttgatccaagctttaatcttggtggcttgtatctactatttctcacaacctctctctgtaacaacttgggtcaaagcaattctttattttgctatagcaccaactgtgtttgctggtaagattgatccttttctttttgaagctctttatgcttctaagcatttgatatttctctctgcaagaatccctcagatttggaagaacttcagaaacaaaagcactggacaacttagtttcttgacttgtctcatgaactttggtggagctttggcgagagttttcaccagcattcaagagaaggctccacttagcatgcttttgggtattgttctttctatcttcaccaatggaatcattatgagtcagattcttttgtatagaagcaaaggaaacgaagataagctagtgaaaagtaaaaagatttcatga

SEQ ID NO: 30669 - protein, 197 aa, Arabidopsis thaliana; identical to SEQ ID NO: 27998
  misc_feature (1)..(197): Ceres Seq. ID no. 4969988

SEQ ID NO: 30670 - protein, 189 aa, Arabidopsis thaliana; identical to SEQ ID NO: 27999
  misc_feature (1)..(189): Ceres Seq. ID no. 4969989

SEQ ID NO: 30671 - DNA, 578 bp, Arabidopsis thaliana
  misc_feature (1)..(578): Ceres Seq. ID no. 4970127
attattgttattttctaaatttggctctgctcaaagacaacggaactctctgcttttcttctttctagagatcttttcttgaggtaataatttaaagatgggagatgaagatttaatagaattgaagttcagactcgcagatggtaccgacattggtccaagcaaatatagtcaattcatgactgttgcatctctcaaggagaaaatcattgctcaatggcctaaagacaaagaaaacgcaccaaagatgataaatgaggttaagctcatcaatggtgggaagatacttgagaacaacaaaacactttctgaagcaaggtccttaataactattggtgaacttcctggaattgtaactacaatgcatgttgttcttcgtcctcctctctttgagaagaaaaaagagaaactgcagaatgatcctccaaggaagagtcactgtgtatgctgcattttgtagctccacttagagatttttgatcctttatacaatttattccattggaaaaaactttccatatcttaaagtcttcaacatggatcttcattaccagaatgattttggtttttcttccttc

SEQ ID NO: 30672 - protein, 120 aa, Arabidopsis thaliana
  misc_feature (1)..(120): Ceres Seq. ID no. 4970128
MGDEDLIELKFRLADGTDIGPSKYSQFMTVASLKEKIIAQWPKDKENAPKMINEVKLINGGKILENNKTLSEARSLITIGELPGIVTTMHVVLRPPLFEKKKEKLQNDPPRKSHCVCCIL

SEQ ID NO: 30673 - protein, 93 aa, Arabidopsis thaliana
  misc_feature (1)..(93): Ceres Seq. ID no. 4970129
MTVASLKEKIIAQWPKDKENAPKMINEVKLINGGKILENNKTLSEARSLITIGELPGIVTTMHVVLRPPLFEKKKEKLQNDPPRKSHCVCCIL

SEQ ID NO: 30674 - protein, 70 aa, Arabidopsis thaliana
  misc_feature (1)..(70): Ceres Seq. ID no. 4970130
MINEVKLINGGKILENNKTLSEARSLITIGELPGIVTTMHVVLRPPLFEKKKEKLQNDPPRKSHCVCCIL

SEQ ID NO: 30675 - DNA, 1159 bp, Arabidopsis thaliana
  misc_feature (1)..(1159): Ceres Seq. ID no. 4970150
aaaaaatcaaaaacagaaagaagcagagagacgatggcgagcaaagacgaattttcccgagatctcactgcgattcgctgcgccagagctacgatgcttctctattcacttgcatcatctcgcacaatcgattccgccggcgagaagcaggagaaaggagaaacgcgaagagagatagaggatctgaggagaaagcttaccatggtgaagataaagatgaatcggattaagctttgcggattgatggaactgcttcttctcgtctttttgaacattcttagctccacttgagagactaaagcttgaatatacagttcgtggtgaacagaggaacttgttggtggttgctaagtcaattgcaactacacagggcttgactggattctggaaaggtaatttgctcaatgttcttcgaactgctcctttcaaagccgtcaatttttgtgcctatgatacctatagaaagcaattgcttaaaatcgctgggaatcaagaagcaaccaactttgaaagattcgttgctggtgccgctgctgggattactgctactgtgctctgcttgccactcgacactatacgaaccaaactagtggctcggggtggagaagccttggggggaatcggaggagcttttcggtatatgatccaaacagaagggttgttctccctctacaagggtctagtgccgtccatagcaagcatggctctgtccggtgcagttttctatggcgtttacgacatccttaagtcatcgtttctgcatacaccagaaggccggaaaagactgatagacatgaagcagcagggacaagaactcaatgctctagacaggctcgagttaggacccatcagaactctcatgtacggtgctatagcaggtgcttgtactgaagtagccacttatcctttcgaagtagtgagacgacagcttcagatgcagatgggtaaaaacaagctcaatgctttagctatgggattcaatatcattgaaagaggagggatcccagctttatacgctggacttttacctagcttgctccaggtattgccttcggcttcaataagttactttgtctacgagtgtatgaagatagtacttaaagtagaataacaagattatgatattggaagagtactagagcttaaagaatcatccatt

SEQ ID NO: 30676 - protein, 156 aa, Arabidopsis thaliana
  misc_feature (1)..(156): Ceres Seq. ID no. 4970151
MIQTEGLFSLYKGLVPSIASMALSGAVFYGVYDILKSSFLHTPEGRKRLIDMKQQGQELNALDRLELGPIRTLMYGAIAGACTEVATYPFEVVRRQLQMQMGKNKLNALAMGFNIIERGGIPALYAGLLPSLLQVLPSASISYFVYECMKIVLKVE

SEQ ID NO: 30677 - protein, 136 aa, Arabidopsis thaliana
  misc_feature (1)..(136): Ceres Seq. ID no. 4970152
MALSGAVFYGVYDILKSSFLHTPEGRKRLIDMKQQGQELNALDRLELGPIRTLMYGAIAGACTEVATYPFEVVRRQLQMQMGKNKLNALAMGFNIIERGGIPALYAGLLPSLLQVLPSASISYFVYECMKIVLKVE

SEQ ID NO: 30678 - protein, 105 aa, Arabidopsis thaliana
  misc_feature (1)..(105): Ceres Seq. ID no. 4970153
MKQQGQELNALDRLELGPIRTLMYGAIAGACTEVATYPFEVVRRQLQMQMGKNKLNALAMGFNIIERGGIPALYAGLLPSLLQVLPSASISYFVYECMKIVLKVE

SEQ ID NO: 30679 - DNA, 696 bp, Arabidopsis thaliana
  misc_feature (1)..(696): Ceres Seq. ID no. 4970209
aaggaacctcgtgtggtcatcgtcttcgtacctttctgctttctacgccgtcaaaatctaactgctcgacagtgaccatgcaaagctcaatgacaatggaactacgaccatcaggtgattccggttcatctgacgtcgatgctgagatcagcgatggcttttcaccgctcgatacttctcacagagacgtcgctgatgaaggttcgttgctgagaagagcagagatgtatcaagactacatgaagcaagtaccaatcccgacgaatcgtggctcgttgattccgttcacaagctgggttggattaagcatttcaatgaaacagctttatggtcagcctctacattacctcacgaatgttctcttacaacgatgggatcaatcacgattcggtactgattctgaagaacagaggttggattctatcattcatcctactaaagctgaagctactatctggcttgttgaagagattcatcgactcactccttctcatcttcacatggctcttctttggagatctgatcctatgtatcactctttcattgacccaatctttcctgagaaatgaacaagttcttgaattgtgatgaaccatccttttttgtatctacttttgcttttagaaaccttgttcaagcattgaagcttatatgtataattgcagggtcttattcaataaaatgtgaatcttcctt

SEQ ID NO: 30680 - protein, 188 aa, Arabidopsis thaliana
  misc_feature (1)..(188): Ceres Seq. ID no. 4970210
GTSCGHRLRTFLLSTPSKSNCSTVTMQSSMTMELRPSGDSGSSDVDAEISDGFSPLDTSHRDVADEGSLLRRAEMYQDYMKQVPIPTNRGSLIPFTSWVGLSISMKQLYGQPLHYLTNVLLQRWDQSRFGTDSEEQRLDSIIHPTKAEATIWLVEEIHRLTPSHLHMALLWRSDPMYHSFIDPIFPEK

SEQ ID NO: 30681 - protein, 163 aa, Arabidopsis thaliana
  misc_feature (1)..(163): Ceres Seq. ID no. 4970211
MQSSMTMELRPSGDSGSSDVDAEISDGFSPLDTSHRDVADEGSLLRRAEMYQDYMKQVPIPTNRGSLIPFTSWVGLSISMKQLYGQPLHYLTNVLLQRWDQSRFGTDSEEQRLDSIIHPTKAEATIWLVEEIHRLTPSHLHMALLWRSDPMYHSFIDPIFPEK

SEQ ID NO: 30682 - protein, 159 aa, Arabidopsis thaliana
  misc_feature (1)..(159): Ceres Seq. ID no. 4970212
MTMELRPSGDSGSSDVDAEISDGFSPLDTSHRDVADEGSLLRRAEMYQDYMKQVPIPTNRGSLIPFTSWVGLSISMKQLYGQPLHYLTNVLLQRWDQSRFGTDSEEQRLDSIIHPTKAEATIWLVEEIHRLTPSHLHMALLWRSDPMYHSFIDPIFPEK

SEQ ID NO: 30683 - DNA, 996 bp, Arabidopsis thaliana
  misc_feature (1)..(996): Ceres Seq. ID no. 4970350
acaaataacaacaacaatttcgccggcgtcgtcgtcgtcgtctctccatcaccgtctctgctgcattgattcgcagcactgagtcctaaatttccagtgtaaaaaaaatcagaaaatggacaacttggaagatttgaagattgtggcagagcagtggtctaaacaaggacttgaatttgttcaaaaaataccaccacctcagctttatactgccattggtgttctcttattagctaccatttggctcttatctattcgtttgtttagacgtacaaaatccaatactgtactcctctctgggctaagtggaagtggcaaaacagttctcttctatcaactacgagatggatcttcccatcagggtgctgtaacgtcaatggaaccgaacgaaggcacctttgtgcttcacaatgaaaacaacactaagaaaggaaaagtaaagcctgttcatcttattgatgttcctggacactctcggcttatatctaagctagaagaatacttgcctcgagccgccgctgttgtgtttgtagtagatgcattggagttcctcccaaatatccgggcagcttcagagtacctttacgacattctgaccaatgctagcgttattaagaataagaccccggttctgctttgctgtaacaagacagataaagtaactgcacacaccaaagagttcatccgcaagcagatggagaaagaaatagataaacttagggtttcgaggagcgcaatatcaacagctgatatagcgaatgacttcactcttgggattgaaggagaagtgttttccttttcgcattgccataacaaagtcacggtcgctgaggcgtctggactaacaggagaaacagatcaggtacaagagttcatcagagaacacgtaaagccatgaggattgtgtaagcatctcagagaatgtacttaaatgtcttttcatttgtttgtaaatgaaattataatttgagaacttagatgatattcgttggaagg

SEQ ID NO: 30684 - protein, 260 aa, Arabidopsis thaliana
  misc_feature (1)..(260): Ceres Seq. ID no. 4970351
MDNLEDLKIVAEQWSKQGLEFVQKIPPPQLYTAIGVLLLATIWLLSIRLFRRTKSNTVLLSGLSGSGKTVLFYQLRDGSSHQGAVTSMEPNEGTFVLHNENNTKKGKVKPVHLIDVPGHSRLISKLEEYLPRAAAVVFVVDALEFLPNIRAASEYLYDILTNASVIKNKTPVLLCCNKTDKVTAHTKEFIRKQMEKEIDKLRVSRSAISTADIANDFTLGIEGEVFSFSHCHNKVTVAEASGLTGETDQVQEFIREHVKP

SEQ ID NO: 30685 - protein, 173 aa, Arabidopsis thaliana
  misc_feature (1)..(173): Ceres Seq. ID no. 4970352
MEPNEGTFVLHNENNTKKGKVKPVHLIDVPGHSRLISKLEEYLPRAAAVVFVVDALEFLPNIRAASEYLYDILTNASVIKNKTPVLLCCNKTDKVTAHTKEFIRKQMEKEIDKLRVSRSAISTADIANDFTLGIEGEVFSFSHCHNKVTVAEASGLTGETDQVQEFIREHVKP

SEQ ID NO: 30686 - DNA, 1130 bp, Arabidopsis thaliana
  misc_feature (1)..(1130): Ceres Seq. ID no. 4970520
acaaacctcctccgtctttcgtaaaaggttctcgagatctaagtctcacttctaaagctctgacaatggcggacgaaatcggattcttccaactcaacaccggagcaaagatcccatcggttggtctcgggacatggcaagctgctcctggcgtcgttggagacgccgtcgccgccgctgtgaagattggatatcagcatattgattgtgcttcaagatatggcaatgaaattgagattgggaaagttctgaagaagttgtttgatgatggcgtagtgaagcgtgagaagctgttcatcacatcaaaaatctggttgactgatcttgaccctccggatgtacaggacgcattgaacagaactcttcaggatctgcagcttgattatgttgatttgtatctcatgcactggcctgttcggttgaagaaaggtactgttgactttaagcctgagaacattatgcctatcgatattccgagcacatggaaagcaatggaagcactggttgattcaggcaaggcaagagccattggcgtaagtaatttctctacaaagaaactctcagatcttgtggaggctgctcgtgttcctcccgctgtaaaccaggtggaatgtcatccttcatggcaacaacataagctacatgagttttgcaagtccaaagggatccacctctcaggatattcgccattgggatctcctggaacaacgtgggtgaaggccgatgttttaaagagtccggttattgaaatgattgctaaagaaatcgggaagtctcccgcacaaaccgcgcttcgatggggacttcaaatgggtcatagtatacttcccaaaagcacaaatgaaggaagaatcagagagaactttgatgtcttgggatggtctattccaaaagaaatgtttgacaagttttccaagatagagcaggctaggttagtccaaggcacgtcgtttgttcatgagacgttgagtccttataaaacacttgaagagctttgggatggtgagatctgaatcaaaagatgtcttttgttgaattttaaagttgaaaaagaacaaagttccactgctttaagctttgatcgagaatgtgtaaacgattcaattttcaataaaagtaggattttgcag

SEQ ID NO: 30687 - protein, 336 aa, Arabidopsis thaliana
  misc_feature (1)..(336): Ceres Seq. ID no. 4970521
KPPPSFVKGSRDLSLTSKALTMADEIGFFQLNTGAKIPSVGLGTWQAAPGVVGDAVAAAVKIGYQHIDCASRYGNEIEIGKVLKKLFDDGVVKREKLFITSKIWLTDLDPPDVQDALNRTLQDLQLDYVDLYLMHWPVRLKKGTVDFKPENIMPIDIPSTWKAMEALVDSGKARAIGVSNFSTKKLSDLVEAARVPPAVNQVECHPSWQQHKLHEFCKSKGIHLSGYSPLGSPGTTWVKADVLKSPVIEMIAKEIGKSPAQTALRWGLQMGHSILPKSTNEGRIRENFDVLGWSIPKEMFDKFSKIEQARLVQGTSFVHETLSPYKTLEELWDGEI

SEQ ID NO: 30688 - protein, 315 aa, Arabidopsis thaliana
  misc_feature (1)..(315): Ceres Seq. ID no. 4970522
MADEIGFFQLNTGAKIPSVGLGTWQAAPGVVGDAVAAAVKIGYQHIDCASRYGNEIEIGKVLKKLFDDGVVKREKLFITSKIWLTDLDPPDVQDALNRTLQDLQLDYVDLYLMHWPVRLKKGTVDFKPENIMPIDIPSTWKAMEALVDSGKARAIGVSNFSTKKLSDLVEAARVPPAVNQVECHPSWQQHKLHEFCKSKGIHLSGYSPLGSPGTTWVKADVLKSPVIEMIAKEIGKSPAQTALRWGLQMGHSILPKSTNEGRIRENFDVLGWSIPKEMFDKFSKIEQARLVQGTSFVHETLSPYKTLEELWDGEI

SEQ ID NO: 30689 - protein, 203 aa, Arabidopsis thaliana
  misc_feature (1)..(203): Ceres Seq. ID no. 4970523
MHWPVRLKKGTVDFKPENIMPIDIPSTWKAMEALVDSGKARAIGVSNFSTKKLSDLVEAARVPPAVNQVECHPSWQQHKLHEFCKSKGIHLSGYSPLGSPGTTWVKADVLKSPVIEMIAKEIGKSPAQTALRWGLQMGHSILPKSTNEGRIRENFDVLGWSIPKEMFDKFSKIEQARLVQGTSFVHETLSPYKTLEELWDGEI

SEQ ID NO: 30690 - DNA, 651 bp, Arabidopsis thaliana
  misc_feature (1)..(651): Ceres Seq. ID no. 4970620
atatttgaagttcgtggattttgaaggatttgattggtttccatgatctagagttttgagaatggcgatggtatcaggaagacgatctactctaaaccccgacgcacctctttttattccggcagctgtacgacaagtggaagatttctcaccggagtggtggcaattggtgacaacttcgacttggtaccctgattactggatcagtcagcagcagcaaggcgcggatggtttctatgacaacggagagaatgagaatggtggaggtcatatcgatgtagctgatcttcttccagaatcatttgattttgatgatatggaagatttctttgacactgatgctgctgagtttgatcaaggattcgatggaagaatgtattaccaagcaccttccgaatttggctttggaaagaatggtgagatggttaagaaatcaagtggaaacaggagcccgagatcgattgtggaaccagctaagtatgcggaaaagccagcgaaatggggaaaccagagggttgctgctgctccgagaaacatccaccagcctcgctgaagagatatgttgttaactagtcagagaagtcagagcagttcggtctgtgtatctttagccaccactgtacctttgtaatttttagtatttgcttccac

SEQ ID NO: 30691 - protein, 163 aa, Arabidopsis thaliana
  misc_feature (1)..(163): Ceres Seq. ID no. 4970621
MAMVSGRRSTLNPDAPLFIPAAVRQVEDFSPEWWQLVTTSTWYPDYWISQQQQGADGFYDNGENENGGGHIDVADLLPESFDFDDMEDFFDTDAAEFDQGFDGRMYYQAPSEFGFGKNGEMVKKSSGNRSPRSIVEPAKYAEKPAKWGNQRVAAAPRNIHQPR

SEQ ID NO: 30692 - protein, 161 aa, Arabidopsis thaliana
  misc_feature (1)..(161): Ceres Seq. ID no. 4970622
MVSGRRSTLNPDAPLFIPAAVRQVEDFSPEWWQLVTTSTWYPDYWISQQQQGADGFYDNGENENGGGHIDVADLLPESFDFDDMEDFFDTDAAEFDQGFDGRMYYQAPSEFGFGKNGEMVKKSSGNRSPRSIVEPAKYAEKPAKWGNQRVAAAPRNIHQPR

SEQ ID NO: 30693 - protein, 85 aa, Arabidopsis thaliana
  misc_feature (1)..(85): Ceres Seq. ID no. 4970623
MIWKISLTLMLLSLIKDSMEECITKHLPNLALERMVRWLRNQVETGARDRLWNQLSMRKSQRNGETRGLLLLRETSTSLAEEICC

SEQ ID NO: 30694 - DNA, 1041 bp, Arabidopsis thaliana
  misc_feature (1)..(1041): Ceres Seq. ID no. 4970938
ttttacgtttcttgatcatcttattgaactgggtttgatctaaagttgtattgatgggttctgaaggaccaacgggtgtgacgattcatatcacagggttcaagaagttccatggagtagctgagaatcctacagagaaaatggctaacaatttgaaagaatatttggctaagaattgtgtttcgaaagatgtgaatcttggaagttgtactgtgcttgagactgctggtcaaggagctcttgcttctctctatcagttgctacaatccgcggttaacacaaaagagtcagagtcgttgaccggaaaaaccatatgggttcactttggagttaatagtggcgctacaaaatttgcaattgagcaacaagctgtgaatgaagcgacttttcgttgtcctgatgaattgggttggaaacctcagaatttgccaattgttccctctgatggtccaatctcaactgtaagaaagactaatcttcctgttgaagagataacaaaggcgttggagaagaatggctttgaagtgataacatcagatgatgcaggtcgatttgtgtgtaactatgtctattaccattctctgagatttgcagagcagaataagaccagatcactctttgttcacgttcctcttttcgttgccgtggatgaagaaacccaaatgagattcactgtttctctgctggaggtactcgcttctatttgcaagtaatgttatcccaaatgtggctattcttattcatgaaatgtgcatcatggaccgattgtctccccacgggaaaaattcgcttatcaataaatggaatataagttcacttctctactatctcctcttcatatatgcatcattgcattcaagtttcataaactagattcattttcttcttcaaaagtggtatcaaatgaaaaatgatatatgcctacttgccagtggtgccaatgcaatgagatttggaaatatgcaatctttctgctcaaagtactaatcattttgaggaaaattcaatgtatgaatctgatttaagggtcttcttctgttt

SEQ ID NO: 30695 - protein, 219 aa, Arabidopsis thaliana
  misc_feature (1)..(219): Ceres Seq. ID no. 4970939
MGSEGPTGVTIHITGFKKFHGVAENPTEKMANNLKEYLAKNCVSKDVNLGSCTVLETAGQGALASLYQLLQSAVNTKESESLTGKTIWVHFGVNSGATKFAIEQQAVNEATFRCPDELGWKPQNLPIVPSDGPISTVRKTNLPVEEITKALEKNGFEVITSDDAGRFVCNYVYYHSLRFAEQNKTRSLFVHVPLFVAVDEETQMRFTVSLLEVLASICK

SEQ ID NO: 30696 - protein, 190 aa, Arabidopsis thaliana
  misc_feature (1)..(190): Ceres Seq. ID no. 4970940
MANNLKEYLAKNCVSKDVNLGSCTVLETAGQGALASLYQLLQSAVNTKESESLTGKTIWVHFGVNSGATKFAIEQQAVNEATFRCPDELGWKPQNLPIVPSDGPISTVRKTNLPVEEITKALEKNGFEVITSDDAGRFVCNYVYYHSLRFAEQNKTRSLFVHVPLFVAVDEETQMRFTVSLLEVLASICK

SEQ ID NO: 30697 - DNA, 1215 bp, Arabidopsis thaliana
  misc_feature (1)..(1215): Ceres Seq. ID no. 4971093
aaaaaggaacaaaacaaaaataaagcgcgaaattagttttcaccggcgagattttttatcctctctacgagataacacttagaagaagaggcagttaaaacagagagacgacgtcgtgttatttttccaaattccggtgatctgagaatgacgtcggggactagaacgccgacttggaaagagagagagaacaacaaacggcgagagcggcgaagacgagcgattgcggctaagatcttcgcaggactaaggattcatggaaacttcaagctccctaaacactgcgacaacaatgaagtcctcaaagctttatgcaatgaagctggttggactgtagaagacgacggaactacttaccgcaagggatgcaaaccaatggatcgaatggacctcatgaatggttctacttcagctagtccatgctcatcgtatcaacatagccctcgtgcttcctacaatccaagcccttcgtcttcatcattcccgagtcctacaaacccatttggtgatgctaactcactaatcccatggctcaagaacctctcttcaaactcaccttccaagcttcccttcttccatggaaattcaataagcgctcccgtgactccgccattggctcgaagccctactcgtgatcaagtaaccatccctgactctggatggctctcaggaatgcaaactccgcagagcggaccgtcttctcctactttcagtttagtttcaagaaacccgtttttcgacaaagaggcttttaaaatgggagattgtaattcaccaatgtggactcctggacaaagtggaaactgctctccagctattcctgctggtgttgatcagaactctgatgtgccaatggctgatggaatgacggctgagtttgcgtttggttgtaacgcaatggctgcgaatggaatggtgaagccttgggaaggagaaaggatacatggagaatgtgtttcagatgatttagaacttacacttggaaactcaagaaccagatgatcatttcagagaagaatcaaagtcgtttgctatcattaagtcttcttttttgtctgtcttttttttccagtgtgatgtttaaaggtgactcagaggaaaaaaaggagaatagaaagagaaacaaaaaaagaacattttgagctctgttttcttttttttttttctttttttttttgttggcttttgactaaagttgtagttagaatctatttt

SEQ ID NO: 30698 - protein, 284 aa, Arabidopsis thaliana
  misc_feature (1)..(284): Ceres Seq. ID no. 4971094
MTSGTRTPTWKERENNKRRERRRRAIAAKIFAGLRIHGNFKLPKHCDNNEVLKALCNEAGWTVEDDGTTYRKGCKPMDRMDLMNGSTSASPCSSYQHSPRASYNPSPSSSSFPSPTNPFGDANSLIPWLKNLSSNSPSKLPFFHGNSISAPVTPPLARSPTRDQVTIPDSGWLSGMQTPQSGPSSPTFSLVSRNPFFDKEAFKMGDCNSPMWTPGQSGNCSPAIPAGVDQNSDVPMADGMTAEFAFGCNAMAANGMVKPWEGERIHGECVSDDLELTLGNSRTR

SEQ ID NO: 30699 - protein, 208 aa, Arabidopsis thaliana
  misc_feature (1)..(208): Ceres Seq. ID no. 4971095
MDRMDLMNGSTSASPCSSYQHSPRASYNPSPSSSSFPSPTNPFGDANSLIPWLKNLSSNSPSKLPFFHGNSISAPVTPPLARSPTRDQVTIPDSGWLSGMQTPQSGPSSPTFSLVSRNPFFDKEAFKMGDCNSPMWTPGQSGNCSPAIPAGVDQNSDVPMADGMTAEFAFGCNAMAANGMVKPWEGERIHGECVSDDLELTLGNSRTR

SEQ ID NO: 30700 - protein, 205 aa, Arabidopsis thaliana
  misc_feature (1)..(205): Ceres Seq. ID no. 4971096
MDLMNGSTSASPCSSYQHSPRASYNPSPSSSSFPSPTNPFGDANSLIPWLKNLSSNSPSKLPFFHGNSISAPVTPPLARSPTRDQVTIPDSGWLSGMQTPQSGPSSPTFSLVSRNPFFDKEAFKMGDCNSPMWTPGQSGNCSPAIPAGVDQNSDVPMADGMTAEFAFGCNAMAANGMVKPWEGERIHGECVSDDLELTLGNSRTR

SEQ ID NO: 30701 - DNA, 1104 bp, Arabidopsis thaliana
  misc_feature (1)..(1104): Ceres Seq. ID no. 4971166
aacaaaagacaaaaactttcaattatgtgaagaatcgtacacctttcttatcgtcttctccatcgtttctccctgaagatttgttctactactctttttgggttcagtttcataatttaaacaagatgcagctcaaagtccctgaacatcaggttgcaggacacattgctaaagacgggaagcctggtcctctcgtagatgacaagggtcggttcttcaagccacttcagggcgattctcgtggtgaaatcgaggtaaagttctacgaatctttctcctcaaacacagaggttccagaacacatccatagatatttcccggtgtatcacggcactcaagcagttgaaggttctgatggagcagccatgatggtgttggaaaatcttcttgcagaatacacaaaaccatcagtaatggatgttaagatgggttcgagaacatggtatcctgatgcatctgaagaatacatccaaaaatgtttgaagaaagacacgggtaccacaaccgtgtcatcgggtttcaggatctctggtttcgaagtgtatgatcacaaagaatcgagtttctggaagcccgagaggaagcttcttcgcgggctcgatgtagatggagcgagattgactctgaggaagtttgtatcatctaactcactttcggacactggctcgaaacctgactctgcttttgcctcgagtgtttacggcggttcccacgggatcttaacgcagttgctggaactcaagacctggttcgagaaccaaacgctctaccatttcaactcttgttcgattttaatggtctatgagaatgaatccatcttaaagggaaatgatgatgatgctagaccacaagtcaagctggtggattttgctcatgttcttgatggtaatggtgtcattgaccataacttcttgggtggtctttgctctttcataaacttcattcgtgagattcttcagagcccagatgagtctgcagattcttagatttaagttaatttgtttgttatggctttggctgattccaatttttggatataaacttatgtttccttcacatatgtacttgattacctaaagagcagaatacattcgtactcttttc

SEQ ID NO: 30702 - protein, 327 aa, Arabidopsis thaliana
  misc_feature (1)..(327): Ceres Seq. ID no. 4971167
QKTKTFNYVKNRTPFLSSSPSFLPEDLFYYSFWVQFHNLNKMQLKVPEHQVAGHIAKDGKPGPLVDDKGRFFKPLQGDSRGEIEVKFYESFSSNTEVPEHIHRYFPVYHGTQAVEGSDGAAMMVLENLLAEYTKPSVMDVKMGSRTWYPDASEEYIQKCLKKDTGTTTVSSGFRISGFEVYDHKESSFWKPERKLLRGLDVDGARLTLRKFVSSNSLSDTGSKPDSAFASSVYGGSHGILTQLLELKTWFENQTLYHFNSCSILMVYENESILKGNDDDARPQVKLVDFAHVLDGNGVIDHNFLGGLCSFINFIREILQSPDESADS

SEQ ID NO: 30703 - protein, 286 aa, Arabidopsis thaliana
  misc_feature (1)..(286): Ceres Seq. ID no. 4971168
MQLKVPEHQVAGHIAKDGKPGPLVDDKGRFFKPLQGDSRGEIEVKFYESFSSNTEVPEHIHRYFPVYHGTQAVEGSDGAAMMVLENLLAEYTKPSVMDVKMGSRTWYPDASEEYIQKCLKKDTGTTTVSSGFRISGFEVYDHKESSFWKPERKLLRGLDVDGARLTLRKFVSSNSLSDTGSKPDSAFASSVYGGSHGILTQLLELKTWFENQTLYHFNSCSILMVYENESILKGNDDDARPQVKLVDFAHVLDGNGVIDHNFLGGLCSFINFIREILQSPDESADS

SEQ ID NO: 30704 - protein, 206 aa, Arabidopsis thaliana
  misc_feature (1)..(206): Ceres Seq. ID no. 4971169
MMVLENLLAEYTKPSVMDVKMGSRTWYPDASEEYIQKCLKKDTGTTTVSSGFRISGFEVYDHKESSFWKPERKLLRGLDVDGARLTLRKFVSSNSLSDTGSKPDSAFASSVYGGSHGILTQLLELKTWFENQTLYHFNSCSILMVYENESILKGNDDDARPQVKLVDFAHVLDGNGVIDHNFLGGLCSFINFIREILQSPDESADS

SEQ ID NO: 30705 - DNA, 1192 bp, Arabidopsis thaliana
  misc_feature (1)..(1192): Ceres Seq. ID no. 4971184
aaagaaaaactatttaagaaacatatgttttggatcaagtaagggtttgatcttgtaccggaatcagatggatttgcctcctggttttaggtttcatccaacagacgaagaactcataacccactatctccacaagaaggttcttgaccttggtttctcggctaaagctattggtgaggttgatttgaacaaagctgagccatgggagttgccatataaagcaaaaattggtgagaaagaatggtactttttctgtgtgagggatagaaagtatccgactggtctgaggactaaccgagcaactcaagccggttattggaaggcgacagggaaggataaagagatcttccgaggcaaatcgcttgttggtatgaagaaaacacttgttttctacagaggaagagctcctaaaggccagaaaacaaattgggtgatgcatgagtataggctagatggaaaactctctgctcacaacttgcctaaaaccgctaagaatgaatgggtgatctgcagggtatttcataaaactgctggaggtaagaagatcccgatttcgacgttaatccgaatcggttcttacggaaccgggtctagtttaccacctttaactgattcttcaccatacaacgacaaaaccaagaccgaaccagtttacgtgccctgcttctccaaccaagctgaaactagaggaacaatactcaattgcttcagcaacccttcccttagctccatccaaccagattttctccagatgattccactctaccaacctcaatctctcaacatttccgagagttccaatccggttcttacgcaagaacaatcagttttacaagcgatgatggaaaacaacagaaggcagaacttcaaaacattgagcatctcgcaagaaaccggggtttcgaacaccgataactcatcggtttttgaatttgggaggaagcgatttgatcatcaagaagttccatctccctcttccggtccggttgatcttgaacctttctggaattactgaagattcagaacctgaaaagtctattaatttaggtcacaagtaagaaaatctttgcaaagttttatccttttagcgtggtgtgctaagcttgtatagattattgacactacttcctgtattagtgttttatattattatattcaactaaagttaatattagagaggataaaatgaagc

SEQ ID NO: 30706 - protein, 337 aa, Arabidopsis thaliana
  misc_feature (1)..(337): Ceres Seq. ID no. 4971185
KKNYLRNICFGSSKGLILYRNQMDLPPGFRFHPTDEELITHYLHKKVLDLGFSAKAIGEVDLNKAEPWELPYKAKIGEKEWYFFCVRDRKYPTGLRTNRATQAGYWKATGKDKEIFRGKSLVGMKKTLVFYRGRAPKGQKTNWVMHEYRLDGKLSAHNLPKTAKNEWVICRVFHKTAGGKKIPISTLIRIGSYGTGSSLPPLTDSSPYNDKTKTEPVYVPCFSNQAETRGTILNCFSNPSLSSIQPDFLQMIPLYQPQSLNISESSNPVLTQEQSVLQAMMENNRRQNFKTLSISQETGVSNTDNSSVFEFGRKRFDHQEVPSPSSGPVDLEPFWNY

SEQ ID NO: 30707 - protein, 315 aa, Arabidopsis thaliana
  misc_feature (1)..(315): Ceres Seq. ID no. 4971186
MDLPPGFRFHPTDEELITHYLHKKVLDLGFSAKAIGEVDLNKAEPWELPYKAKIGEKEWYFFCVRDRKYPTGLRTNRATQAGYWKATGKDKEIFRGKSLVGMKKTLVFYRGRAPKGQKTNWVMHEYRLDGKLSAHNLPKTAKNEWVICRVFHKTAGGKKIPISTLIRIGSYGTGSSLPPLTDSSPYNDKTKTEPVYVPCFSNQAETRGTILNCFSNPSLSSIQPDFLQMIPLYQPQSLNISESSNPVLTQEQSVLQAMMENNRRQNFKTLSISQETGVSNTDNSSVFEFGRKRFDHQEVPSPSSGPVDLEPFWNY

SEQ ID NO: 30708 - protein, 214 aa, Arabidopsis thaliana
  misc_feature (1)..(214): Ceres Seq. ID no. 4971187
MKKTLVFYRGRAPKGQKTNWVMHEYRLDGKLSAHNLPKTAKNEWVICRVFHKTAGGKKIPISTLIRIGSYGTGSSLPPLTDSSPYNDKTKTEPVYVPCFSNQAETRGTILNCFSNPSLSSIQPDFLQMIPLYQPQSLNISESSNPVLTQEQSVLQAMMENNRRQNFKTLSISQETGVSNTDNSSVFEFGRKRFDHQEVPSPSSGPVDLEPFWNY

SEQ ID NO: 30709 - DNA, 684 bp, Arabidopsis thaliana
  misc_feature (1)..(684): Ceres Seq. ID no. 4971396
ctccgtcatagaacgcagaactgggtggatcaccgtggtcgtcaaattcctagctcctcgactccaaaaaaaaatcataaacgtattaccgtctcttgttttcctcgtattatatcggtcgaagtctccaatcatcggtctgagtaatctctgacaatggctgcaagagttttggcaagtgtgattgtgatgggctctggaatcatagccagggcttgtactcaggcatatcgtcaggcgcttgcaaatgcatcaaaaaccggggttgcgcatgaagcgacacagactattaagagagggttgactataggtgaagcagaagctagacagattcttggtgtaactgagaaatcatcttgggacgagattcttaagaaatacgacacgttgttcgaacgcaatgcgcagaatggaagcttctatctccaatctaaggtccatagagctaaggaatgcttagagactgcataccagaagagtacaacaacaagcgcatgaacaagcaataaaacaataggagcaaatcaggaacatatcttttgatacaagttatagttttaggacagaagtttgaaattgagtggagatagccgcaaaagttgaaattgagacaaggtcggtgatggccggaatgctgccagtaaccgactcaccggcgttgttaaaagtcttgttattttgttt

SEQ ID NO: 30710 - protein, 113 aa, Arabidopsis thaliana
  misc_feature (1)..(113): Ceres Seq. ID no. 4971397
MAARVLASVIVMGSGIIARACTQAYRQALANASKTGVAHEATQTIKRGLTIGEAEARQILGVTEKSSWDEILKKYDTLFERNAQNGSFYLQSKVHRAKECLETAYQKSTTTSA

SEQ ID NO: 30711 - protein, 102 aa, Arabidopsis thaliana
  misc_feature (1)..(102): Ceres Seq. ID no. 4971398
MGSGIIARACTQAYRQALANASKTGVAHEATQTIKRGLTIGEAEARQILGVTEKSSWDEILKKYDTLFERNAQNGSFYLQSKVHRAKECLETAYQKSTTTSA

SEQ ID NO: 30712 - DNA, 3684 bp, Arabidopsis thaliana
  misc_feature (1)..(3684): Ceres Seq. ID no. 4971431
atgcaaccgtcaaatgatccagcaatcgtggacatggcagcggcggagaaggagaagaagcggccaagtgtatcatttcttaagctcttctcatttgctgatttttacgattgcgttctgatggctcttggatccattggtgcttgcattcacggagcctccgttccagttttcttcatcttctttggcaaactcatcaacatcatcggtcttgcttacctcttcccacaagaagcttctcacaaagtcgccaagtactcgttggattttgtatatctgagtgtggtgatactcttttcatcatggttagaggttgcatgttggatgcatacgggagagagacaagcagcgaagattagaaaagcttatttgcggtcaatgttaagccaagacataagcttattcgacaccgagatttccaccggagaagtcatctccgccatcacctccgagatccttgttgtccaagacgctatctccgagaaggtagggaatttcatgcacttcataagccggttcatagccggttttgcgatcgggttcgcgagcgtatggcaaataagtctcgtcactctctccatagtcccattcattgctctcgccggcggaatttacgcttttgtcagcagcggacttatcgtccgtgtccggaaatcatacgtcaaggccaacgagatcgcagaagaggtgatcgggaatgtgaggaccgtacaagcgtttacgggagaagaaaaggcggtgagttcgtaccaaggagctttgaggaacacttacaattacgggagaaaagccggtttagccaaaggactagggcttggttcgttgcattttgtcctgtttttgtcttgggctttgctcatttggttcacaagcatcgttgttcacaagggaatcgctaatggtggcgaatctttcacgaccatgctcaatgttgtcatcgctggcttgtctcttggtcaggcggctcctgacatttccacattcatgcgagccagtgctgctgcgtatccgatttttcagatgattgaacggaacacggaggataaaacaggtcgtaaactcgggaatgtaaacggagacattctattcaaagacgtgactttcacatacccctctcgccctgatgtggtgatctttgacaagctaaacttcgtgatccctgcggggaaagtcgtggctcttgttggaggaagcgggtctgggaaaagcaccatgatatccttaattgaacgattctacgagcctaccgatggagcggtgatgctggatgggaacgatatcagatacttggatcttaagtggttaagaggtcatattggtttggttaatcaagagcctgtcctgtttgcaaccacgattcgcgagaacattatgtatggtaaagacgatgccacctctgaggaaattaccaatgctgcaaagctctcggaagccatctcattcatcaacaacctaccggaaggattcgaaactcaggtaggtgagagaggaattcagctatctggcgggcagaagcagaggatcagtatttctagggcgatagtgaagaatccatcgatcctcttactcgatgaggcaacaagcgcactagatgcagagtcagagaaaatcgtgcaggaagctttggacagggtgatggttgggagaacaacggtcgtggtggctcatagactctccactgtaagaaacgctgacatcatagccgttgttggaggagggaagatcattgagtccggaagccacgacgaactcatatctaaccctgatggagcttattcttctcttcttcgtatccaagaagctgccagccctaacttgaaccacactccaagcttaccagtcagtacaaaacccttgccggaactaccaatcacggagacgacctcgtccattcatcaatcagtaaaccaaccagatacgaccaaacaggccaaagtaacggtgggacgtctttactctatgatccgtccggattggaaatacggattatgtgggacgttaggttcctttattgcgggatctcaaatgccgcttttcgcgcttggtatcgcacaggctttagtatcttattacatggactgggagacaactcaaaacgaggtcaaaagaatctctatcctcttctgttgtggctccgtcatcactgtcatcgtacataccattgagcataccacctttggtattatgggtgagcgtctcactctccgagtccgacaaaagatgttttcagcgatcttgaggaatgaaatcgggtggtttgataaggttgataacactagttcgatgttggcatcgcggcttgaaagtgatgcgactttgcttagaaccatcgtggtcgatagatcgacaattctacttgagaatttaggtcttgttgtgactgctttcatcatttcttttatactcaactggcgtctcactcttgttgtcttggccacataccccttgattataagcggtcatatcagcgagaaaattttcatgcaaggctatggaggaaacttgagtaaagcgtatttaaaggctaacatgttggctggagagtctattagcaacatccgaaccgtggtcgccttttgtgcagaggagaaggttttagacctttattccaaagagcttctagaaccttcagaacgttctttcaggcgtggacagatggccgggattttgtacggtgtttctcaattcttcatcttctcctcctacggccttgccctctggtacggatcgattttgatggagaaaggattatcaagtttcgaatctgtgatgaaaacattcatggttttgatagtaacggcgttagtgatgggtgaagtgttggctctagccccagatcttcttaaaggaaaccagatggttgtttcggttttcgagctattggatcgaagaacacaggttgttggtgatactggtgaggagctgagtaatgtggaaggcactatagagctcaaaggtgttcatttcagttatccttcacggcctgatgtgactattttcagcgatttcaatctactagttccttctggcaaaagcatggcgcttgtgggacaaagcggatctggaaaaagttcggttctttcgcttgttctccggttctacgatcctacagccggaataatcatgatagacgggcaagacatcaagaaactgaagttgaaatcactgcgaagacacattggtctggttcaacaagaaccggctctgtttgcaacgactatctatgagaacatcttgtatggtaaagaaggagcttctgaatctgaagtcatggaagcagctaagcttgcaaatgctcacagtttcatcagctctctccctgaaggttactcaaccaaagtcggtgaacgtggcattcagatgtcaggcggccagagacagagaattgctatagctagagccgtcctcaagaacccagagattctgcttcttgatgaagccacaagcgccttagatgttgaatcagagcgtgtggtacaacaagcattggatcggctaatgagagaccgaaccacggtggtggtggctcaccggctatcgacgatcaagaactcagatatgataagtgtaatacaagacggtaagatcatagagcaaggcagccacaatatcctcgttgagaacaagaatggtccctactctaaacttatcagtcttcagcagcggcagcgccatcatccttaa

SEQ ID NO: 30713 - protein, 1227 aa, Arabidopsis thaliana
  misc_feature (1)..(1227): Ceres Seq. ID no. 4971432
MQPSNDPAIVDMAAAEKEKKRPSVSFLKLFSFADFYDCVLMALGSIGACIHGASVPVFFIFFGKLINIIGLAYLFPQEASHKVAKYSLDFVYLSVVILFSSWLEVACWMHTGERQAAKIRKAYLRSMLSQDISLFDTEISTGEVISAITSEILVVQDAISEKVGNFMHFISRFIAGFAIGFASVWQISLVTLSIVPFIALAGGIYAFVSSGLIVRVRKSYVKANEIAEEVIGNVRTVQAFTGEEKAVSSYQGALRNTYNYGRKAGLAKGLGLGSLHFVLFLSWALLIWFTSIVVHKGIANGGESFTTMLNVVIAGLSLGQAAPDISTFMRASAAAYPIFQMIERNTEDKTGRKLGNVNGDILFKDVTFTYPSRPDVVIFDKLNFVIPAGKVVALVGGSGSGKSTMISLIERFYEPTDGAVMLDGNDIRYLDLKWLRGHIGLVNQEPVLFATTIRENIMYGKDDATSEEITNAAKLSEAISFINNLPEGFETQVGERGIQLSGGQKQRISISRAIVKNPSILLLDEATSALDAESEKIVQEALDRVMVGRTTVVVAHRLSTVRNADIIAVVGGGKIIESGSHDELISNPDGAYSSLLRIQEAASPNLNHTPSLPVSTKPLPELPITETTSSIHQSVNQPDTTKQAKVTVGRLYSMIRPDWKYGLCGTLGSFIAGSQMPLFALGIAQALVSYYMDWETTQNEVKRISILFCCGSVITVIVHTIEHTTFGIMGERLTLRVRQKMFSAILRNEIGWFDKVDNTSSMLASRLESDATLLRTIVVDRSTILLENLGLVVTAFIISFILNWRLTLVVLATYPLIISGHISEKIFMQGYGGNLSKAYLKANMLAGESISNIRTVVAFCAEEKVLDLYSKELLEPSERSFRRGQMAGILYGVSQFFIFSSYGLALWYGSILMEKGLSSFESVMKTFMVLIVTALVMGEVLALAPDLLKGNQMVVSVFELLDRRTQVVGDTGEELSNVEGTIELKGVHFSYPSRPDVTIFSDFNLLVPSGKSMALVGQSGSGKSSVLSLVLRFYDPTAGIIMIDGQDIKKLKLKSLRRHIGLVQQEPALFATTIYENILYGKEGASESEVMEAAKLANAHSFISSLPEGYSTKVGERGIQMSGGQRQRIAIARAVLKNPEILLLDEATSALDVESERVVQQALDRLMRDRTTVVVAHRLSTIKNSDMISVIQDGKIIEQGSHNILVENKNGPYSKLISLQQRQRHHP

SEQ ID NO: 30714 - protein, 1216 aa, Arabidopsis thaliana
  misc_feature (1)..(1216): Ceres Seq. ID no. 4971433
MAAAEKEKKRPSVSFLKLFSFADFYDCVLMALGSIGACIHGASVPVFFIFFGKLINIIGLAYLFPQEASHKVAKYSLDFVYLSVVILFSSWLEVACWMHTGERQAAKIRKAYLRSMLSQDISLFDTEISTGEVISAITSEILVVQDAISEKVGNFMHFISRFIAGFAIGFASVWQISLVTLSIVPFIALAGGIYAFVSSGLIVRVRKSYVKANEIAEEVIGNVRTVQAFTGEEKAVSSYQGALRNTYNYGRKAGLAKGLGLGSLHFVLFLSWALLIWFTSIVVHKGIANGGESFTTMLNVVIAGLSLGQAAPDISTFMRASAAAYPIFQMIERNTEDKTGRKLGNVNGDILFKDVTFTYPSRPDVVIFDKLNFVIPAGKVVALVGGSGSGKSTMISLIERFYEPTDGAVMLDGNDIRYLDLKWLRGHIGLVNQEPVLFATTIRENIMYGKDDATSEEITNAAKLSEAISFINNLPEGFETQVGERGIQLSGGQKQRISISRAIVKNPSILLLDEATSALDAESEKIVQEALDRVMVGRTTVVVAHRLSTVRNADIIAVVGGGKIIESGSHDELISNPDGAYSSLLRIQEAASPNLNHTPSLPVSTKPLPELPITETTSSIHQSVNQPDTTKQAKVTVGRLYSMIRPDWKYGLCGTLGSFIAGSQMPLFALGIAQALVSYYMDWETTQNEVKRISILFCCGSVITVIVHTIEHTTFGIMGERLTLRVRQKMFSAILRNEIGWFDKVDNTSSMLASRLESDATLLRTIVVDRSTILLENLGLVVTAFIISFILNWRLTLVVLATYPLIISGHISEKIFMQGYGGNLSKAYLKANMLAGESISNIRTVVAFCAEEKVLDLYSKELLEPSERSFRRGQMAGILYGVSQFFIFSSYGLALWYGSILMEKGLSSFESVMKTFMVLIVTALVMGEVLALAPDLLKGNQMVVSVFELLDRRTQVVGDTGEELSNVEGTIELKGVHFSYPSRPDVTIFSDFNLLVPSGKSMALVGQSGSGKSSVLSLVLRFYDPTAGIIMIDGQDIKKLKLKSLRRHIGLVQQEPALFATTIYENILYGKEGASESEVMEAAKLANAHSFISSLPEGYSTKVGERGIQMSGGQRQRIAIARAVLKNPEILLLDEATSALDVESERVVQQALDRLMRDRTTVVVAHRLSTIKNSDMISVIQDGKIIEQGSHNILVENKNGPYSKLISLQQRQRHHP

SEQ ID NO: 30715 - protein, 1187 aa, Arabidopsis thaliana
  misc_feature (1)..(1187): Ceres Seq. ID no. 4971434
MALGSIGACIHGASVPVFFIFFGKLINIIGLAYLFPQEASHKVAKYSLDFVYLSVVILFSSWLEVACWMHTGERQAAKIRKAYLRSMLSQDISLFDTEISTGEVISAITSEILVVQDAISEKVGNFMHFISRFIAGFAIGFASVWQISLVTLSIVPFIALAGGIYAFVSSGLIVRVRKSYVKANEIAEEVIGNVRTVQAFTGEEKAVSSYQGALRNTYNYGRKAGLAKGLGLGSLHFVLFLSWALLIWFTSIVVHKGIANGGESFTTMLNVVIAGLSLGQAAPDISTFMRASAAAYPIFQMIERNTEDKTGRKLGNVNGDILFKDVTFTYPSRPDVVIFDKLNFVIPAGKVVALVGGSGSGKSTMISLIERFYEPTDGAVMLDGNDIRYLDLKWLRGHIGLVNQEPVLFATTIRENIMYGKDDATSEEITNAAKLSEAISFINNLPEGFETQVGERGIQLSGGQKQRISISRAIVKNPSILLLDEATSALDAESEKIVQEALDRVMVGRTTVVVAHRLSTVRNADIIAVVGGGKIIESGSHDELISNPDGAYSSLLRIQEAASPNLNHTPSLPVSTKPLPELPITETTSSIHQSVNQPDTTKQAKVTVGRLYSMIRPDWKYGLCGTLGSFIAGSQMPLFALGIAQALVSYYMDWETTQNEVKRISILFCCGSVITVIVHTIEHTTFGIMGERLTLRVRQKMFSAILRNEIGWFDKVDNTSSMLASRLESDATLLRTIVVDRSTILLENLGLVVTAFIISFILNWRLTLVVLATYPLIISGHISEKIFMQGYGGNLSKAYLKANMLAGESISNIRTVVAFCAEEKVLDLYSKELLEPSERSFRRGQMAGILYGVSQFFIFSSYGLALWYGSILMEKGLSSFESVMKTFMVLIVTALVMGEVLALAPDLLKGNQMVVSVFELLDRRTQVVGDTGEELSNVEGTIELKGVHFSYPSRPDVTIFSDFNLLVPSGKSMALVGQSGSGKSSVLSLVLRFYDPTAGIIMIDGQDIKKLKLKSLRRHIGLVQQEPALFATTIYENILYGKEGASESEVMEAAKLANAHSFISSLPEGYSTKVGERGIQMSGGQRQRIAIARAVLKNPEILLLDEATSALDVESERVVQQALDRLMRDRTTVVVAHRLSTIKNSDMISVIQDGKIIEQGSHNILVENKNGPYSKLISLQQRQRHHP

SEQ ID NO: 30716 - DNA, 2718 bp, Arabidopsis thaliana
  misc_feature (1)..(2718): Ceres Seq. ID no. 4971613
atggtcatagatgataaacttcctccattttcatgggaaagaaagttgaacagtcaagcaaagactccttctgagttcaaattgagtaaacgagatcacatgcatctggcttcgatcttcgatatcttcagaaaacaccatattacgggagatcacggtgtccctttaggaggaattggttcaggaagcattggaaggagttacaagggtgagtttcagcagttcaagctgttcccaaaaatttgtgaggaagctccaatcctcacaaaccaattctctgcttttgtttctcgtcctggaggtgtgaaacactcaactgttctatgtccatcaaagccacaagttgtcaaagacaatggaggctatttatgccaaggccaagctccaaatatgggaattgagtcttgggactggaacatgacaggggaaaaatctacttaccatgctctttatccgaggtcttggaccgtctatgatggtgaacctgaccctgaactcagaatagtttcacgtcaagtctctccctttatacctcataattacgaggaaagcagtcttccggtttcggttttcaacttcacggtgactaatactggagcagaaccagcaattgtaactttgctctttacttgggagaattctgtgggaggtgcttctggactaactggacaacactttaactcaactatgaagacagcaaatggacacccacctgttagctacgcaattgcggcaaaagaaacagaggatgttcgtgtctcctcatgtccttgtttcattgtttctggcactactcctaatcaaatcacagcaggagatatgtgggatgagattaaaaagaatgcatcattcgacaagttaaccagcaatgcatgctctccttcgaaacctggaacttccattggagcagccatagcagcaaaggtgaaagttccaccgggatgtgaccgcacagtcacattttccctctcttgggattgtcccgaggctagattcgacgagaagacttaccatagacgatacacaagattctatggtagtttaggaaatgctgcggtagcaatggctcacgacgctcttctcaactttcctgaatgggaaactcagattgaagagtggcaagctcctgttcttgctgacacaacacttcctgagtggtatagagtaaccctcttcaatgaactatactatttcaactcaggaggaacaatgtggaccgatggtttacctccaaagcaaagcttagatagtataggaagaagaaagatctctctcggtttatcaaccatagacaaaaatgatcaagaccagaacaacgtagccttagacatcctgggaagaatcgatgcggtctgctcacagattcacgctcctttaacctcaaatgctgcgctcggaaacactatgattcagaacaccacagagaacattggacagttcctttacctagaaggagttcaatatctaatgtacaatacttatgatgttcatttctactcctcttttgcattgctcatgctttttccaaaaattgagctaagtatccagagagatttcgcggctgcggttctgatgcatgattctagcaagaaacaggtcatgagctctggcgaatttgttaccagaaaagttctaggagctgttcctcatgatattggtttgaacgatccttggtttgaacttaatgcttataacttgttcaacacggataggtggaaagacttgaactccaagtttgttcttcaagtttacagagatgtggttgcaactggtgacttaaactttgcgaaagcggtttggccgtcggtttacactgcaatcgcctacttggaccagtttgataaagacggagacgggatgattgaaaacgaagggtttccagatcagacttatgacgcgtggtcttgctcaggagttagtgcttattgcgggggtctttgggtcgcggctcttcaggccggatctgcgttggcccgtgaaattggggacaatggggctgcagtttacttcaacgctaagtatgagaaagctagaagcgtttacgagaagctttggaacggttcttatttcaattacgataacagtcgaagcggctcgagctcgtcgatcttggctgatcagatggctggacaatggtatgcgagagcttgtggactgaagccgatagcgaaagaagaatggataaagaaagcgttggagacggtctacgacttcaatgtgatgagagtgagagatggaacacgtggtgctgtgaacgggatgttacctgatggacgagtagacacaagcacgatggtgtcgagggaggtttgggctgggacaacatactcggtcgcggcttgtatgattcaagaagggcttgcggataaaggttttaggacagcaagtggaatctatgaggccgcttggtccgaccgtggtctaggctgcgcatttcagacaccagaggcatggaccacgaacgatgaatataggtcactttgctacatgaggcctttagctatatggggtatacaatgggcacacacaatgccaaaacctaacagagaacaagaagtatcgctcaggccacaagaggaagatgcaacgtctgtgttgtttcaacaacacgctgggtttatcaaagtggctcactatctgaaaaacactaagggaaaggaccatagaaaccgcctccagactgcgtatgagacattcctcaagacgattcgcctatag

SEQ ID NO: 30717 - protein, 905 aa, Arabidopsis thaliana
  misc_feature (1)..(905): Ceres Seq. ID no. 4971614
MVIDDKLPPFSWERKLNSQAKTPSEFKLSKRDHMHLASIFDIFRKHHITGDHGVPLGGIGSGSIGRSYKGEFQQFKLFPKICEEAPILTNQFSAFVSRPGGVKHSTVLCPSKPQVVKDNGGYLCQGQAPNMGIESWDWNMTGEKSTYHALYPRSWTVYDGEPDPELRIVSRQVSPFIPHNYEESSLPVSVFNFTVTNTGAEPAIVTLLFTWENSVGGASGLTGQHFNSTMKTANGHPPVSYAIAAKETEDVRVSSCPCFIVSGTTPNQITAGDMWDEIKKNASFDKLTSNACSPSKPGTSIGAAIAAKVKVPPGCDRTVTFSLSWDCPEARFDEKTYHRRYTRFYGSLGNAAVAMAHDALLNFPEWETQIEEWQAPVLADTTLPEWYRVTLFNELYYFNSGGTMWTDGLPPKQSLDSIGRRKISLGLSTIDKNDQDQNNVALDILGRIDAVCSQIHAPLTSNAALGNTMIQNTTENIGQFLYLEGVQYLMYNTYDVHFYSSFALLMLFPKIELSIQRDFAAAVLMHDSSKKQVMSSGEFVTRKVLGAVPHDIGLNDPWFELNAYNLFNTDRWKDLNSKFVLQVYRDVVATGDLNFAKAVWPSVYTAIAYLDQFDKDGDGMIENEGFPDQTYDAWSCSGVSAYCGGLWVAALQAGSALAREIGDNGAAVYFNAKYEKARSVYEKLWNGSYFNYDNSRSGSSSSILADQMAGQWYARACGLKPIAKEEWIKKALETVYDFNVMRVRDGTRGAVNGMLPDGRVDTSTMVSREVWAGTTYSVAACMIQEGLADKGFRTASGIYEAAWSDRGLGCAFQTPEAWTTNDEYRSLCYMRPLAIWGIQWAHTMPKPNREQEVSLRPQEEDATSVLFQQHAGFIKVAHYLKNTKGKDHRNRLQTAYETFLKTIRL

SEQ ID NO: 30718 - protein, 872 aa, Arabidopsis thaliana
  misc_feature (1)..(872): Ceres Seq. ID no. 4971615
MHLASIFDIFRKHHITGDHGVPLGGIGSGSIGRSYKGEFQQFKLFPKICEEAPILTNQFSAFVSRPGGVKHSTVLCPSKPQVVKDNGGYLCQGQAPNMGIESWDWNMTGEKSTYHALYPRSWTVYDGEPDPELRIVSRQVSPFIPHNYEESSLPVSVFNFTVTNTGAEPAIVTLLFTWENSVGGASGLTGQHFNSTMKTANGHPPVSYAIAAKETEDVRVSSCPCFIVSGTTPNQITAGDMWDEIKKNASFDKLTSNACSPSKPGTSIGAAIAAKVKVPPGCDRTVTFSLSWDCPEARFDEKTYHRRYTRFYGSLGNAAVAMAHDALLNFPEWETQIEEWQAPVLADTTLPEWYRVTLFNELYYFNSGGTMWTDGLPPKQSLDSIGRRKISLGLSTIDKNDQDQNNVALDILGRIDAVCSQIHAPLTSNAALGNTMIQNTTENIGQFLYLEGVQYLMYNTYDVHFYSSFALLMLFPKIELSIQRDFAAAVLMHDSSKKQVMSSGEFVTRKVLGAVPHDIGLNDPWFELNAYNLFNTDRWKDLNSKFVLQVYRDVVATGDLNFAKAVWPSVYTAIAYLDQFDKDGDGMIENEGFPDQTYDAWSCSGVSAYCGGLWVAALQAGSALAREIGDNGAAVYFNAKYEKARSVYEKLWNGSYFNYDNSRSGSSSSILADQMAGQWYARACGLKPIAKEEWIKKALETVYDFNVMRVRDGTRGAVNGMLPDGRVDTSTMVSREVWAGTTYSVAACMIQEGLADKGFRTASGIYEAAWSDRGLGCAFQTPEAWTTNDEYRSLCYMRPLAIWGIQWAHTMPKPNREQEVSLRPQEEDATSVLFQQHAGFIKVAHYLKNTKGKDHRNRLQTAYETFLKTIRL

SEQ ID NO: 30719 - protein, 775 aa, Arabidopsis thaliana
  misc_feature (1)..(775): Ceres Seq. ID no. 4971616
MGIESWDWNMTGEKSTYHALYPRSWTVYDGEPDPELRIVSRQVSPFIPHNYEESSLPVSVFNFTVTNTGAEPAIVTLLFTWENSVGGASGLTGQHFNSTMKTANGHPPVSYAIAAKETEDVRVSSCPCFIVSGTTPNQITAGDMWDEIKKNASFDKLTSNACSPSKPGTSIGAAIAAKVKVPPGCDRTVTFSLSWDCPEARFDEKTYHRRYTRFYGSLGNAAVAMAHDALLNFPEWETQIEEWQAPVLADTTLPEWYRVTLFNELYYFNSGGTMWTDGLPPKQSLDSIGRRKISLGLSTIDKNDQDQNNVALDILGRIDAVCSQIHAPLTSNAALGNTMIQNTTENIGQFLYLEGVQYLMYNTYDVHFYSSFALLMLFPKIELSIQRDFAAAVLMHDSSKKQVMSSGEFVTRKVLGAVPHDIGLNDPWFELNAYNLFNTDRWKDLNSKFVLQVYRDVVATGDLNFAKAVWPSVYTAIAYLDQFDKDGDGMIENEGFPDQTYDAWSCSGVSAYCGGLWVAALQAGSALAREIGDNGAAVYFNAKYEKARSVYEKLWNGSYFNYDNSRSGSSSSILADQMAGQWYARACGLKPIAKEEWIKKALETVYDFNVMRVRDGTRGAVNGMLPDGRVDTSTMVSREVWAGTTYSVAACMIQEGLADKGFRTASGIYEAAWSDRGLGCAFQTPEAWTTNDEYRSLCYMRPLAIWGIQWAHTMPKPNREQEVSLRPQEEDATSVLFQQHAGFIKVAHYLKNTKGKDHRNRLQTAYETFLKTIRL

SEQ ID NO: 30720 - DNA, 771 bp, Arabidopsis thaliana
  misc_feature (1)..(771): Ceres Seq. ID no. 4971811
atgggcataaacgcgagccatgtaccggaaacttgctaccatcattgtaaccagacgttcgagagtagtcgccaatgctttaaatggtgtcaagaattagctcgtaaagatgagtacaagatttatgggtacccttactcaaccaacacaaggcgtgtcctcgccgttcttcatgagaaaggtctctcttacgatcccatcaccgtcaacttgatagccggtgaccagaagaagccgagttttctcgctatcaatccatttggtcaagtcccagttttcctagacgggggtcttaagttgactgaatctcgagctatatctgaatacatagcgactgtccataaatcaagaggcacacaacttctgaattacaaaagctacaaaacaatgggaacacaaagaatgtggatggctatcgaatcttttgagtttgatccactcacatcaacactgacctgggaacaatccatcaagcctatgtacggtctaaagacggactataaggttgtgaatgaaaccgaggcgaagctagagaaggttctagatatatacgaagaacgactcaaaaattctagcttcttggctagtaacagcttcacaatggctgatctttatcaccttcctaatatacaataccttatggacacacatacaaagagaatgtttgtaaaccggccaagcgtgcgccggtgggtggctgagatcacagctagaccggcttggaagagggcatgtgatgtgaaggcttggtaccataagaagaagaattaa

SEQ ID NO: 30721 - protein, 256 aa, Arabidopsis thaliana
  misc_feature (1)..(256): Ceres Seq. ID no. 4971812
MGINASHVPETCYHHCNQTFESSRQCFKWCQELARKDEYKIYGYPYSTNTRRVLAVLHEKGLSYDPITVNLIAGDQKKPSFLAINPFGQVPVFLDGGLKLTESRAISEYIATVHKSRGTQLLNYKSYKTMGTQRMWMAIESFEFDPLTSTLTWEQSIKPMYGLKTDYKVVNETEAKLEKVLDIYEERLKNSSFLASNSFTMADLYHLPNIQYLMDTHTKRMFVNRPSVRRWVAEITARPAWKRACDVKAWYHKKKN

SEQ ID NO: 30722 - DNA, 3723 bp, Arabidopsis thaliana
  misc_feature (1)..(3723): Ceres Seq. ID no. 4971813
atggttgatacgagacgtagctcttctgcttccaagcgtttttgtgctgcaacaagttcatcctcacgtcctaccaaacgatccaaggcggcggcggaaccggcatcgtcttcgtcggcgagtgaggtgccgattgataatcaagcaccggtttcggatcctggatcaatatctggagacccggaacttagaacttctgatccgcagagtaacgatgcggagaggccagttactaccaccgatgtgccggcgatggagaccgacacaaatccagaacttgaaggcttggtgacgcctacacctgcaggtgaagtggtggtggaagctgagaaatcgaaatcctcaaagaagcggattgctaaggctccttgggccaagcttctttctcagtttcctcagaaccctcatcttgtcatgagaggctctgtgtttactgttggacggcgagcctgcgatttatgtatcagagatcattctatgcccaatgttctatgtgaactaaggcagtctgagcacggaggtccatcagttgcatcgctggagataatagggaatggagtacttgttcaggtcaatggcaagatttaccaaaggagtacttgtgttcatctacggggtggcgatgaaattatcttcaccacccctgggaaacatgcttatgtatccttttacaagttctttgaaaatgttcagatatttcagcctcttaaagatgaaaatctagctgctccagacagaacttcttccttgagcctttttgaagcgcagagtgcccctctgaaagggcttcacgttgagacaagagcaagagactcttcatctgttgatggaactgcctctttattggcgtctatatcaaagttacaaaatgtcccttttctaccacctactgctaaaagtgtcaaaaggcagcaaaattcagaggtccctgtgttaccttctagctgcgatgattttattctggatgttgacttgaacgatgctgatagtaataatgatcatgctgctattgcttcaatggagaaaactgttgcttcgacttcttgtgctgccaacgatgaccatgatgcagatgggaatggaatggatccttttcaagaacctgaggctggaaatattcctgatcctgcttatgaaattagaccaattttgagtttacttggggatccttctgaatttgatttaaggggtagcatttccaaaatactggtggatgaacgaagggaagtgagggaaatgccgaaagaatatgaacgtccatcagcttcggtattaactagacgtcaagcgcataaggatagtctgcgaggaggaatactcaatcctcaggacatagaagtttcttttgagaacttcccatatttcttaagtggcacaactaaggatgttttgatgatatccacatatgcccatataaagtatggaaaggaatatgcagagtatgcatcagatttgccaacagcgtgtccccgctctgagatatatcaggaaatgttagcaaaagcgcttgcgaaacaatgtggggccaaattgatgattgttgactctctcttgttacctgggggttcaacacccaaggaagcagatactaccaaagaaagttctaggcgtgaaagactgtccgtgcttgctaaacgagctgtacaagctgcacaagctgctgttttgcagcataagaaaccaatttcaagtgtagaggctggtataacaggtggatcaacattgagctctcaggctgttcggaggcaagaagtatcaactgcaacctctaaaagttacaccttcaaagcaggtgatcgagtaaggtttttaggcccttcaacttcttctcttgcttctctccgagctccacctaggggaccggcaacaggttttcaaggaaaagtactccttgcgtttgaaggcaatggatcttcaaaaatcggggttagatttgatagatcgataccagatggcaatgatcttggtggtctatgcgaagaagaccatgcgagttctcttcggttagaaagttcttccagtgacgatgctgataaacttgccattaatgaaatctttgaggtagcttttaatgaaagtgaaagagggtcattgatattgttcctcaaagacattgagaaatctgtgtcggggaacactgatgtgtatataactttgaagagcaagcttgagaatttaccggagaatattgttgtcatagcttcgcaaacccagttggacaaccgaaaggaaaaatcccaccctggaggtttcttgttcacaaagtttggcagcaaccagacagcactgctggaccttgcatttccggatacttttggtggtagactgcaggataggaacacagaaatgcctaaagcagtgaaacaaatcactaggctatttccaaacaaagtgaccatccaattacctgaggatgaagcttcgctggtcgactggaaggataaacttgaacgtgatactgagatcctgaaggctcaagctaatattacaagcatccgtgcggtccttagcaaaaatcagctagtctgccctgacattgaaatcttgtgcatcaaagatcaaacccttccttctgatagtgtggagaaagtggttggctttgctttcaatcaccatcttatgaactgctcagaacctacagtcaaggacaacaagcttatcatctcggcagaaagcatcacatatggcctgcagctgttgcatgagattcaaaacgaaaacaagagcacaaagaaatctctgaaagatgttgttacagagaatgaattcgagaaaaaactactatcagacgtcattcctccaagtgatatcggtgtttctttcagtgatattggggctttggaaaatgtgaaagataccttgaaggagttggtgatgcttcctcttcaaagacccgaattgtttggcaaaggtcaacttacaaagcctacaaagggtatactattgtttggaccgcctggtacggggaagacaatgctggcaaaagctgtagcaaccgaggctggggcaaactttatcaatatttcaatgtccagcattacttcaaagggagagaagtacgttaaagctgttttctctttagcaagtaagatagctccaagcgtcatttttgttgatgaggttgatagcatgctgggaagacgtgagaatccaggagaacatgaagctatgcgtaagatgaagaacgaattcatgataaactgggacggcttacgcacaaaggataaagaaagggttttagtattggctgctaccaacagaccatttgaccttgacgaagcagtaattagacggcttccccgaaggttgatggttaatctgccggattcagcaaacagatcgaagatcttgagcgtgattttggcgaaagaagagatggcagaagacgtagacttagaagcaatagcaaatatgacagatgggtactcagggagtgacttaaagaatctttgcgtgaccgcggcacatcttcctatccgagagattcttgaaaaagaaaagaaggagagaagtgtggctcaagccgaaaaccgagcaatgccacagctatatagcagtacagacgttagacccttgaacatgaatgatttcaaaaccgcacatgatcaggtatgtgcgagtgtggcgtctgattcatcgaacatgaatgagctccagcaatggaacgagctctatggagaaggaggctcgaggaagaagacatcactgagttacttcatgtaa

SEQ ID NO: 30723 - protein, 1240 aa, Arabidopsis thaliana
  misc_feature (1)..(1240): Ceres Seq. ID no. 4971814
MVDTRRSSSASKRFCAATSSSSRPTKRSKAAAEPASSSSASEVPIDNQAPVSDPGSISGDPELRTSDPQSNDAERPVTTTDVPAMETDTNPELEGLVTPTPAGEVVVEAEKSKSSKKRIAKAPWAKLLSQFPQNPHLVMRGSVFTVGRRACDLCIRDHSMPNVLCELRQSEHGGPSVASLEIIGNGVLVQVNGKIYQRSTCVHLRGGDEIIFTTPGKHAYVSFYKFFENVQIFQPLKDENLAAPDRTSSLSLFEAQSAPLKGLHVETRARDSSSVDGTASLLASISKLQNVPFLPPTAKSVKRQQNSEVPVLPSSCDDFILDVDLNDADSNNDHAAIASMEKTVASTSCAANDDHDADGNGMDPFQEPEAGNIPDPAYEIRPILSLLGDPSEFDLRGSISKILVDERREVREMPKEYERPSASVLTRRQAHKDSLRGGILNPQDIEVSFENFPYFLSGTTKDVLMISTYAHIKYGKEYAEYASDLPTACPRSEIYQEMLAKALAKQCGAKLMIVDSLLLPGGSTPKEADTTKESSRRERLSVLAKRAVQAAQAAVLQHKKPISSVEAGITGGSTLSSQAVRRQEVSTATSKSYTFKAGDRVRFLGPSTSSLASLRAPPRGPATGFQGKVLLAFEGNGSSKIGVRFDRSIPDGNDLGGLCEEDHASSLRLESSSSDDADKLAINEIFEVAFNESERGSLILFLKDIEKSVSGNTDVYITLKSKLENLPENIVVIASQTQLDNRKEKSHPGGFLFTKFGSNQTALLDLAFPDTFGGRLQDRNTEMPKAVKQITRLFPNKVTIQLPEDEASLVDWKDKLERDTEILKAQANITSIRAVLSKNQLVCPDIEILCIKDQTLPSDSVEKVVGFAFNHHLMNCSEPTVKDNKLIISAESITYGLQLLHEIQNENKSTKKSLKDVVTENEFEKKLLSDVIPPSDIGVSFSDIGALENVKDTLKELVMLPLQRPELFGKGQLTKPTKGILLFGPPGTGKTMLAKAVATEAGANFINISMSSITSKGEKYVKAVFSLASKIAPSVIFVDEVDSMLGRRENPGEHEAMRKMKNEFMINWDGLRTKDKERVLVLAATNRPFDLDEAVIRRLPRRLMVNLPDSANRSKILSVILAKEEMAEDVDLEAIANMTDGYSGSDLKNLCVTAAHLPIREILEKEKKERSVAQAENRAMPQLYSSTDVRPLNMNDFKTAHDQVCASVASDSSNMNELQQWNELYGEGGSRKKTSLSYFM

SEQ ID NO: 30724 - protein, 1156 aa, Arabidopsis thaliana
  misc_feature (1)..(1156): Ceres Seq. ID no. 4971815
METDTNPELEGLVTPTPAGEVVVEAEKSKSSKKRIAKAPWAKLLSQFPQNPHLVMRGSVFTVGRRACDLCIRDHSMPNVLCELRQSEHGGPSVASLEIIGNGVLVQVNGKIYQRSTCVHLRGGDEIIFTTPGKHAYVSFYKFFENVQIFQPLKDENLAAPDRTSSLSLFEAQSAPLKGLHVETRARDSSSVDGTASLLASISKLQNVPFLPPTAKSVKRQQNSEVPVLPSSCDDFILDVDLNDADSNNDHAAIASMEKTVASTSCAANDDHDADGNGMDPFQEPEAGNIPDPAYEIRPILSLLGDPSEFDLRGSISKILVDERREVREMPKEYERPSASVLTRRQAHKDSLRGGILNPQDIEVSFENFPYFLSGTTKDVLMISTYAHIKYGKEYAEYASDLPTACPRSEIYQEMLAKALAKQCGAKLMIVDSLLLPGGSTPKEADTTKESSRRERLSVLAKRAVQAAQAAVLQHKKPISSVEAGITGGSTLSSQAVRRQEVSTATSKSYTFKAGDRVRFLGPSTSSLASLRAPPRGPATGFQGKVLLAFEGNGSSKIGVRFDRSIPDGNDLGGLCEEDHASSLRLESSSSDDADKLAINEIFEVAFNESERGSLILFLKDIEKSVSGNTDVYITLKSKLENLPENIVVIASQTQLDNRKEKSHPGGFLFTKFGSNQTALLDLAFPDTFGGRLQDRNTEMPKAVKQITRLFPNKVTIQLPEDEASLVDWKDKLERDTEILKAQANITSIRAVLSKNQLVCPDIEILCIKDQTLPSDSVEKVVGFAFNHHLMNCSEPTVKDNKLIISAESITYGLQLLHEIQNENKSTKKSLKDVVTENEFEKKLLSDVIPPSDIGVSFSDIGALENVKDTLKELVMLPLQRPELFGKGQLTKPTKGILLFGPPGTGKTMLAKAVATEAGANFINISMSSITSKGEKYVKAVFSLASKIAPSVIFVDEVDSMLGRRENPGEHEAMRKMKNEFMINWDGLRTKDKERVLVLAATNRPFDLDEAVIRRLPRRLMVNLPDSANRSKILSVILAKEEMAEDVDLEAIANMTDGYSGSDLKNLCVTAAHLPIREILEKEKKERSVAQAENRAMPQLYSSTDVRPLNMNDFKTAHDQVCASVASDSSNMNELQQWNELYGEGGSRKKTSLSYFM

SEQ ID NO: 30725 - protein, 1102 aa, Arabidopsis thaliana
  misc_feature (1)..(1102): Ceres Seq. ID no. 4971816
MRGSVFTVGRRACDLCIRDHSMPNVLCELRQSEHGGPSVASLEIIGNGVLVQVNGKIYQRSTCVHLRGGDEIIFTTPGKHAYVSFYKFFENVQIFQPLKDENLAAPDRTSSLSLFEAQSAPLKGLHVETRARDSSSVDGTASLLASISKLQNVPFLPPTAKSVKRQQNSEVPVLPSSCDDFILDVDLNDADSNNDHAAIASMEKTVASTSCAANDDHDADGNGMDPFQEPEAGNIPDPAYEIRPILSLLGDPSEFDLRGSISKILVDERREVREMPKEYERPSASVLTRRQAHKDSLRGGILNPQDIEVSFENFPYFLSGTTKDVLMISTYAHIKYGKEYAEYASDLPTACPRSEIYQEMLAKALAKQCGAKLMIVDSLLLPGGSTPKEADTTKESSRRERLSVLAKRAVQAAQAAVLQHKKPISSVEAGITGGSTLSSQAVRRQEVSTATSKSYTFKAGDRVRFLGPSTSSLASLRAPPRGPATGFQGKVLLAFEGNGSSKIGVRFDRSIPDGNDLGGLCEEDHASSLRLESSSSDDADKLAINEIFEVAFNESERGSLILFLKDIEKSVSGNTDVYITLKSKLENLPENIVVIASQTQLDNRKEKSHPGGFLFTKFGSNQTALLDLAFPDTFGGRLQDRNTEMPKAVKQITRLFPNKVTIQLPEDEASLVDWKDKLERDTEILKAQANITSIRAVLSKNQLVCPDIEILCIKDQTLPSDSVEKVVGFAFNHHLMNCSEPTVKDNKLIISAESITYGLQLLHEIQNENKSTKKSLKDVVTENEFEKKLLSDVIPPSDIGVSFSDIGALENVKDTLKELVMLPLQRPELFGKGQLTKPTKGILLFGPPGTGKTMLAKAVATEAGANFINISMSSITSKGEKYVKAVFSLASKIAPSVIFVDEVDSMLGRRENPGEHEAMRKMKNEFMINWDGLRTKDKERVLVLAATNRPFDLDEAVIRRLPRRLMVNLPDSANRSKILSVILAKEEMAEDVDLEAIANMTDGYSGSDLKNLCVTAAHLPIREILEKEKKERSVAQAENRAMPQLYSSTDVRPLNMNDFKTAHDQVCASVASDSSNMNELQQWNELYGEGGSRKKTSLSYFM

SEQ ID NO: 30726 - DNA, 648 bp, Arabidopsis thaliana
  misc_feature (1)..(648): Ceres Seq. ID no. 4971861
atggaagacgatatgtggtgcgttagctcatctggttcttctagaagctatcgatcggaaactgctgctaagtatcaatcagggccttatcaagatttggaagagtttgaagaagttgacgacgatatagcagtggagtatccatgcccgttttgcgcaagtgattatgatttagttgaattgtgtcaccatatcgacgaagaacatcgtcatgaagctaacaatgggatatgtcctgtatgtagcaaaagggtgaagatgcatatggtggatcatataacatcacatcatagagataaggaaatgtcttacagggaagatccatatttatctgataaatatcttcaacctcatcttgatgagttgccaccatctatgaatcatcatcagcatccctctaaacatgtttccgatcaatttttatcgttcatcaacaattctgcattaccaaatcagaccaagcttgtgctgcctgattcaagtgtagaagacaagaatccgattaaggattcgtcagcagcaaaagagggtacatcgtcgtgtcctttatcggatagtgataaattggagaaggcaaagaagtgtgagtttgtacagggactgttgtcatcagccatgtttgatgatgaatgtgactcttctgagtaa

SEQ ID NO: 30727 - protein, 215 aa, Arabidopsis thaliana
  misc_feature (1)..(215): Ceres Seq. ID no. 4971862
MEDDMWCVSSSGSSRSYRSETAAKYQSGPYQDLEEFEEVDDDIAVEYPCPFCASDYDLVELCHHIDEEHRHEANNGICPVCSKRVKMHMVDHITSHHRDKEMSYREDPYLSDKYLQPHLDELPPSMNHHQHPSKHVSDQFLSFINNSALPNQTKLVLPDSSVEDKNPIKDSSAAKEGTSSCPLSDSDKLEKAKKCEFVQGLLSSAMFDDECDSSE

SEQ ID NO: 30728 - protein, 211 aa, Arabidopsis thaliana
  misc_feature (1)..(211): Ceres Seq. ID no. 4971863
MWCVSSSGSSRSYRSETAAKYQSGPYQDLEEFEEVDDDIAVEYPCPFCASDYDLVELCHHIDEEHRHEANNGICPVCSKRVKMHMVDHITSHHRDKEMSYREDPYLSDKYLQPHLDELPPSMNHHQHPSKHVSDQFLSFINNSALPNQTKLVLPDSSVEDKNPIKDSSAAKEGTSSCPLSDSDKLEKAKKCEFVQGLLSSAMFDDECDSSE

SEQ ID NO: 30729 - protein, 129 aa, Arabidopsis thaliana
  misc_feature (1)..(129): Ceres Seq. ID no. 4971864
MHMVDHITSHHRDKEMSYREDPYLSDKYLQPHLDELPPSMNHHQHPSKHVSDQFLSFINNSALPNQTKLVLPDSSVEDKNPIKDSSAAKEGTSSCPLSDSDKLEKAKKCEFVQGLLSSAMFDDECDSSE

SEQ ID NO: 30730 - DNA, 579 bp, Arabidopsis thaliana
  misc_feature (1)..(579): Ceres Seq. ID no. 4971900
atggaagacgatatgtggtgcgttagctcatctggttcttctagaagctatcgatcggaaactgctgctaagtatcaatcagggccttatcaagatttggaagagtttgaagaagttgacgacgatatagcagtggagtatccatgcccgttttgcgcaagtgattatgatttagttgaattgtgtcaccatatcgacgaagaacatcgtcatgaagctaacaatgggaaggaaatgtcttacagggaagatccatatttatctgataaatatcttcaacctcatcttgatgagttgccaccatctatgaatcatcatcagcatccctctaaacatgtttccgatcaatttttatcgttcatcaacaattctgcattaccaaatcagaccaagcttgtgctgcctgattcaagtgtagaagacaagaatccgattaaggattcgtcagcagcaaaagagggtacatcgtcgtgtcctttatcggatagtgataaattggagaaggcaaagaagtgtgagtttgtacagggactgttgtcatcagccatgtttgatgatgaatgtgactcttctgagtaa

SEQ ID NO: 30731 - protein, 192 aa, Arabidopsis thaliana
  misc_feature (1)..(192): Ceres Seq. ID no. 4971901
MEDDMWCVSSSGSSRSYRSETAAKYQSGPYQDLEEFEEVDDDIAVEYPCPFCASDYDLVELCHHIDEEHRHEANNGKEMSYREDPYLSDKYLQPHLDELPPSMNHHQHPSKHVSDQFLSFINNSALPNQTKLVLPDSSVEDKNPIKDSSAAKEGTSSCPLSDSDKLEKAKKCEFVQGLLSSAMFDDECDSSE

SEQ ID NO: 30732 - protein, 188 aa, Arabidopsis thaliana
  misc_feature (1)..(188): Ceres Seq. ID no. 4971902
MWCVSSSGSSRSYRSETAAKYQSGPYQDLEEFEEVDDDIAVEYPCPFCASDYDLVELCHHIDEEHRHEANNGKEMSYREDPYLSDKYLQPHLDELPPSMNHHQHPSKHVSDQFLSFINNSALPNQTKLVLPDSSVEDKNPIKDSSAAKEGTSSCPLSDSDKLEKAKKCEFVQGLLSSAMFDDECDSSE

SEQ ID NO: 30733 - protein, 114 aa, Arabidopsis thaliana
  misc_feature (1)..(114): Ceres Seq. ID no. 4971903
MSYREDPYLSDKYLQPHLDELPPSMNHHQHPSKHVSDQFLSFINNSALPNQTKLVLPDSSVEDKNPIKDSSAAKEGTSSCPLSDSDKLEKAKKCEFVQGLLSSAMFDDECDSSE

SEQ ID NO: 30734 - DNA, 2706 bp, Arabidopsis thaliana
  misc_feature (1)..(2706): Ceres Seq. ID no. 4971924
atgattattgttggtgttcttttagttagtttcacacttttaagtcacatgaatcagttcttacatctttttgaaagtccaacctttgagatatatccggaactggggcgtgactcacagttaatgactgatccacttggttttcaatacttacacagcatttatacattttcactaaatccttgctctgaaacaaacacaaatatgaaggttgtcttcgttatcttctttttcttcctcttccaattttgtatctctgtggatacaattatgagaagacagtccttgagagatggtgaggttatactctccgcagggaagagattcgcgtttggattcttcagtcttggggattcagagctccggtatgttgggatttggtatgctcaaatctctcaacagactattgtttgggttgcaaacagagaccatcctattaatgacacctctgggatggtaaagttcagcaacagaggcaatctctctgtctatgcatctgacaatgaaacagagcttatctggtcaacaaatgtttcagatagtatgttggaaccaactttagttgctacactctctgatttaggcaaccttgttctgtttgatccagtcacagggagaagtttctgggagagctttgatcaccctacagacacgtttcttccgtttatgagattgggattcacacgaaaagacggtttggatcgctctctaacatcatggaagtctcatggtgaccctggttctggagacttaatactgcggatggaacgtagagggtttccacagttgattctgtacaaaggtgtaaccccatggtggcgtatggggtcatggaccgggcataggtggagcggggtgcctgaaatgccaatagggtacatcttcaataactcatttgtgaataatgaggacgaagtatccttcacttacggtgtgacagatgcttcggtcataacaagaaccatggtgaacgagactggaaccatgcaccggtttacatggattgcgagggacaagagatggaatgatttctggtcagttcctaaagagcagtgcgataactacgctcattgtggccctaacggttactgtgattcccctagctcaaaaacgtttgagtgcacatgcctacctggttttgagcccaagtttccccggcattggttcttgagggactcttctggcgggtgtacaaagaaaaagagagcttcaatatgcagtgagaaagacgggtttgtgaagttaaagcgcatgaagattcccgacacatcagatgcaagtgtggatatgaacataacattgaaggagtgcaaacagaggtgcttgaagaactgctcttgtgtcgcttacgcaagtgcttaccacgagagtaaaagaggagcaataggatgcttgaaatggcatggtggtatgttggatgcaaggacatacttgaactcgggacaagatttctacatacgtgtagacaaggaagacgcggtggaacagaaatggcttatcagggaagaggagagtccttctgattcttatcagtttgattgcagccgtaatgttactaactgtcattttgttctgtgttgtaagggagcgacgaatgcagagtcaaacaggcatagaagctcttcggcaaacttcgccccggtcccttttgattttgacgaatcatttagatttgaacaagacaaggcgagaaaccgggagttacctttatttgatcttaacacgatcgttgcagcaacaaataacttctcttcccaaaacaagcttggagcaggtggtttcggacctgtttataagggcgtgttacaaaaccgtatggagatagcggtgaagaggttgtcgagaaactcgggacaaggaatggaagagttcaagaacgaggtcaagctgatatcaaagttgcagcatcgaaatctcgtgaggatcttaggatgttgcgttgaattggaagagaagatgttggtatacgagtatttaccaaacaagagcctagactatttcatattccatgaagagcagagagcagagttggattggccaaaaagaatggagatagtccgagggattgctcgtggaatcttatatcttcatcaagattcaagactgagaatcatccacagagatctcaaggccagcaatatacttcttgacagtgaaatgatcccaaagatttcagatttcggcatggctagaatctttgggggcaaccaaatggaaggatgcacaagtagggtcgtcggaacattcggatatatggcaccggagtatgcaatggagggacagttctccattaaatccgacgtctatagctttggagtattgatgttagagatcataaccggaaagaaaaacagtgctttccacgaggaatcatctaacttagtcggacatatttgggatctatgggaaaacggtgaagcaacagagatcatagacaatttaatggaccaagagacttatgatgagagagaagtgatgaagtgcatacaaattgggttgctctgtgtgcaagaaaacgcttcggacagagtagacatgtcctctgttgtcatcatgttgggtcataacgccactaatcttccgaatccaaagcatcctgcgtttacttccgcgagaaggagaggcggtgaaaatggtgcttgtcttaagggacaaaccggtatttctgttaatgacgttaccttcagcgacattcaaggtcgttaa

SEQ ID NO: 30735 - protein, 901 aa, Arabidopsis thaliana
  misc_feature (1)..(901): Ceres Seq. ID no. 4971925
MIIVGVLLVSFTLLSHMNQFLHLFESPTFEIYPELGRDSQLMTDPLGFQYLHSIYTFSLNPCSETNTNMKVVFVIFFFFLFQFCISVDTIMRRQSLRDGEVILSAGKRFAFGFFSLGDSELRYVGIWYAQISQQTIVWVANRDHPINDTSGMVKFSNRGNLSVYASDNETELIWSTNVSDSMLEPTLVATLSDLGNLVLFDPVTGRSFWESFDHPTDTFLPFMRLGFTRKDGLDRSLTSWKSHGDPGSGDLILRMERRGFPQLILYKGVTPWWRMGSWTGHRWSGVPEMPIGYIFNNSFVNNEDEVSFTYGVTDASVITRTMVNETGTMHRFTWIARDKRWNDFWSVPKEQCDNYAHCGPNGYCDSPSSKTFECTCLPGFEPKFPRHWFLRDSSGGCTKKKRASICSEKDGFVKLKRMKIPDTSDASVDMNITLKECKQRCLKNCSCVAYASAYHESKRGAIGCLKWHGGMLDARTYLNSGQDFYIRVDKEDAVEQKWLIREEESPSDSYQFDCSRNVTNCHFVLCCKGATNAESNRHRSSSANFAPVPFDFDESFRFEQDKARNRELPLFDLNTIVAATNNFSSQNKLGAGGFGPVYKGVLQNRMEIAVKRLSRNSGQGMEEFKNEVKLISKLQHRNLVRILGCCVELEEKMLVYEYLPNKSLDYFIFHEEQRAELDWPKRMEIVRGIARGILYLHQDSRLRIIHRDLKASNILLDSEMIPKISDFGMARIFGGNQMEGCTSRVVGTFGYMAPEYAMEGQFSIKSDVYSFGVLMLEIITGKKNSAFHEESSNLVGHIWDLWENGEATEIIDNLMDQETYDEREVMKCIQIGLLCVQENASDRVDMSSVVIMLGHNATNLPNPKHPAFTSARRRGGENGACLKGQTGISVNDVTFSDIQGR

SEQ ID NO: 30736 - protein, 885 aa, Arabidopsis thaliana
  misc_feature (1)..(885): Ceres Seq. ID no. 4971926
MNQFLHLFESPTFEIYPELGRDSQLMTDPLGFQYLHSIYTFSLNPCSETNTNMKVVFVIFFFFLFQFCISVDTIMRRQSLRDGEVILSAGKRFAFGFFSLGDSELRYVGIWYAQISQQTIVWVANRDHPINDTSGMVKFSNRGNLSVYASDNETELIWSTNVSDSMLEPTLVATLSDLGNLVLFDPVTGRSFWESFDHPTDTFLPFMRLGFTRKDGLDRSLTSWKSHGDPGSGDLILRMERRGFPQLILYKGVTPWWRMGSWTGHRWSGVPEMPIGYIFNNSFVNNEDEVSFTYGVTDASVITRTMVNETGTMHRFTWIARDKRWNDFWSVPKEQCDNYAHCGPNGYCDSPSSKTFECTCLPGFEPKFPRHWFLRDSSGGCTKKKRASICSEKDGFVKLKRMKIPDTSDASVDMNITLKECKQRCLKNCSCVAYASAYHESKRGAIGCLKWHGGMLDARTYLNSGQDFYIRVDKEDAVEQKWLIREEESPSDSYQFDCSRNVTNCHFVLCCKGATNAESNRHRSSSANFAPVPFDFDESFRFEQDKARNRELPLFDLNTIVAATNNFSSQNKLGAGGFGPVYKGVLQNRMEIAVKRLSRNSGQGMEEFKNEVKLISKLQHRNLVRILGCCVELEEKMLVYEYLPNKSLDYFIFHEEQRAELDWPKRMEIVRGIARGILYLHQDSRLRIIHRDLKASNILLDSEMIPKISDFGMARIFGGNQMEGCTSRVVGTFGYMAPEYAMEGQFSIKSDVYSFGVLMLEIITGKKNSAFHEESSNLVGHIWDLWENGEATEIIDNLMDQETYDEREVMKCIQIGLLCVQENASDRVDMSSVVIMLGHNATNLPNPKHPAFTSARRRGGENGACLKGQTGISVNDVTFSDIQGR

SEQ ID NO: 30737 - protein, 860 aa, Arabidopsis thaliana
  misc_feature (1)..(860): Ceres Seq. ID no. 4971927
MTDPLGFQYLHSIYTFSLNPCSETNTNMKVVFVIFFFFLFQFCISVDTIMRRQSLRDGEVILSAGKRFAFGFFSLGDSELRYVGIWYAQISQQTIVWVANRDHPINDTSGMVKFSNRGNLSVYASDNETELIWSTNVSDSMLEPTLVATLSDLGNLVLFDPVTGRSFWESFDHPTDTFLPFMRLGFTRKDGLDRSLTSWKSHGDPGSGDLILRMERRGFPQLILYKGVTPWWRMGSWTGHRWSGVPEMPIGYIFNNSFVNNEDEVSFTYGVTDASVITRTMVNETGTMHRFTWIARDKRWNDFWSVPKEQCDNYAHCGPNGYCDSPSSKTFECTCLPGFEPKFPRHWFLRDSSGGCTKKKRASICSEKDGFVKLKRMKIPDTSDASVDMNITLKECKQRCLKNCSCVAYASAYHESKRGAIGCLKWHGGMLDARTYLNSGQDFYIRVDKEDAVEQKWLIREEESPSDSYQFDCSRNVTNCHFVLCCKGATNAESNRHRSSSANFAPVPFDFDESFRFEQDKARNRELPLFDLNTIVAATNNFSSQNKLGAGGFGPVYKGVLQNRMEIAVKRLSRNSGQGMEEFKNEVKLISKLQHRNLVRILGCCVELEEKMLVYEYLPNKSLDYFIFHEEQRAELDWPKRMEIVRGIARGILYLHQDSRLRIIHRDLKASNILLDSEMIPKISDFGMARIFGGNQMEGCTSRVVGTFGYMAPEYAMEGQFSIKSDVYSFGVLMLEIITGKKNSAFHEESSNLVGHIWDLWENGEATEIIDNLMDQETYDEREVMKCIQIGLLCVQENASDRVDMSSVVIMLGHNATNLPNPKHPAFTSARRRGGENGACLKGQTGISVNDVTFSDIQGR

SEQ ID NO: 30738 - DNA, 2523 bp, Arabidopsis thaliana
  misc_feature (1)..(2523): Ceres Seq. ID no. 4971928
atggtggtttcagtgaccatacgtcgtcgttttgttcttcttctacttgcatgcacttgtttgttgtctcggagactctgttttggtgaggacagaatcactttctcaagtcctatcaaagactcagagtcagagacccttctatgcaaaagtggtattttcaggtttggtttcttcactcctgttaattccactactcggttacgttatgttgggatttggtacgaaaagattccaatccaaactgtggtttgggttgctaacaaagactctcccatcaacgacacttccggtgttatctcgatctatcaagatggaaatctcgcggttaccgatggtcgaaatcgccttgtatggtcgacgaatgtctcagtaccagtagctccaaatgctacttgggttcagcttatggattctgggaatcttatgttacaagacaacagaaacaatggtgagattctttgggagagtttcaagcatccttatgattctttcatgccaagaatgactcttggcaccgacggtagaactggaggtaacctaaagcttacttcttggacaagccacgatgatccttcaacaggaaactacacagctggtattgctcctttcacgtttcctgagcttcttatctggaagaacaatgtcccaacgtggcgtagcggaccgtggaacggtcaggttttcatcggtttaccgaatatggattcacttctgtttcttgatgggtttaatcttaacagtgataatcaaggaacgatctcaatgtcttatgctaatgattcgttcatgtatcactttaacttggatcctgaaggaattatttatcagaaagattggagtacttctatgagaacttggaggataggtgtaaagtttccatacacagactgtgatgcatacggtagatgtggtcgattcgggagctgccatgccggggaaaacccgccttgtaaatgtgttaaagggtttgttccaaagaataacacagagtggaatggtggtaattggagtaatggatgtatgagaaaagctccattgcagtgtgaaagacagagaaatgtaagtaatggtggtggtggaggaaaagcagatggttttttgaaactgcagaagatgaaagtaccaatctctgcggaacggtctgaagctagtgaacaagtttgtcctaaagtatgcttagataactgttcttgcacagcttatgcatatgatagaggaattggatgcatgctttggagtggtgatttagttgatatgcaatcatttttgggaagtggcattgatctttttattcgtgttgctcattcagaactcaaaacacatagcaatctagcagttatgatcgcagcacctgtgataggcgttatgttaattgctgcggtctgcgttcttttagcatgccggaaatacaaaaagcgtccagcgaaagatagaagtgcagagctaatgtttaagagaatggaagcacttacaagtgataatgagtctgcttctaaccaaatcaagctcaaggagcttccactctttgagtttcaagtgttagctacatcaactgatagcttctctctaagaaacaagctcgggcaaggcgggtttggtcctgtttacaagggaaaattacctgaaggacaagaaattgcagtgaagaggctctcacggaaatcaggtcaaggactagaggaacttatgaacgaagtggttgtgatatctaagttgcaacatcggaatctagtgaagttacttggatgttgtattgaaggtgaagaaagaatgttagtatatgaatatatgccaaagaaaagcttggatgcatatctttttgacccaatgaagcaaaagattcttgattggaagactcggttcaacataatggaaggaatttgcagaggtcttttgtaccttcacagagattcaagactaaagatcatacacagagatttaaaagccagcaacattttgttagatgagaatctaaaccccaagatatctgattttggacttgcaagaattttccgagcgaatgaagatgaagctaacacaagaagggttgttggaacatacggctatatgtcaccggagtatgcaatggaaggtttcttttcagaaaaatcagatgttttcagcttgggggttatatttctcgagatcataagtgggagaagaaactctagttctcacaaggaagagaataatctcaaccttttggcttatgcttggaagctgtggaacgacggtgaggctgcttctctagcagatccagccgtctttgataagtgtttcgagaaagagatagagaaatgtgttcatattggactgttatgtgtgcaagaagttgcaaacgatagaccaaatgtttcaaacgtgatatggatgctaactaccgagaacatgagcctcgccgatccgaagcagccagcgtttatagtaagaagaggagcttctgaggctgaatcttctgaccagagtagtcaaaaggtatctatcaatgatgtgagcctcacagctgtaacaggacgttaa

SEQ ID NO: 30739 - protein, 840 aa, Arabidopsis thaliana
  misc_feature (1)..(840): Ceres Seq. ID no. 4971929
MVVSVTIRRRFVLLLLACTCLLSRRLCFGEDRITFSSPIKDSESETLLCKSGIFRFGFFTPVNSTTRLRYVGIWYEKIPIQTVVWVANKDSPINDTSGVISIYQDGNLAVTDGRNRLVWSTNVSVPVAPNATWVQLMDSGNLMLQDNRNNGEILWESFKHPYDSFMPRMTLGTDGRTGGNLKLTSWTSHDDPSTGNYTAGIAPFTFPELLIWKNNVPTWRSGPWNGQVFIGLPNMDSLLFLDGFNLNSDNQGTISMSYANDSFMYHFNLDPEGIIYQKDWSTSMRTWRIGVKFPYTDCDAYGRCGRFGSCHAGENPPCKCVKGFVPKNNTEWNGGNWSNGCMRKAPLQCERQRNVSNGGGGGKADGFLKLQKMKVPISAERSEASEQVCPKVCLDNCSCTAYAYDRGIGCMLWSGDLVDMQSFLGSGIDLFIRVAHSELKTHSNLAVMIAAPVIGVMLIAAVCVLLACRKYKKRPAKDRSAELMFKRMEALTSDNESASNQIKLKELPLFEFQVLATSTDSFSLRNKLGQGGFGPVYKGKLPEGQEIAVKRLSRKSGQGLEELMNEVVVISKLQHRNLVKLLGCCIEGEERMLVYEYMPKKSLDAYLFDPMKQKILDWKTRFNIMEGICRGLLYLHRDSRLKIIHRDLKASNILLDENLNPKISDFGLARIFRANEDEANTRRVVGTYGYMSPEYAMEGFFSEKSDVFSLGVIFLEIISGRRNSSSHKEENNLNLLAYAWKLWNDGEAASLADPAVFDKCFEKEIEKCVHIGLLCVQEVANDRPNVSNVIWMLTTENMSLADPKQPAFIVRRGASEAESSDQSSQKVSINDVSLTAVTGR

SEQ ID NO: 30740 - protein, 704 aa, Arabidopsis thaliana
  misc_feature (1)..(704): Ceres Seq. ID no. 4971930
MDSGNLMLQDNRNNGEILWESFKHPYDSFMPRMTLGTDGRTGGNLKLTSWTSHDDPSTGNYTAGIAPFTFPELLIWKNNVPTWRSGPWNGQVFIGLPNMDSLLFLDGFNLNSDNQGTISMSYANDSFMYHFNLDPEGIIYQKDWSTSMRTWRIGVKFPYTDCDAYGRCGRFGSCHAGENPPCKCVKGFVPKNNTEWNGGNWSNGCMRKAPLQCERQRNVSNGGGGGKADGFLKLQKMKVPISAERSEASEQVCPKVCLDNCSCTAYAYDRGIGCMLWSGDLVDMQSFLGSGIDLFIRVAHSELKTHSNLAVMIAAPVIGVMLIAAVCVLLACRKYKKRPAKDRSAELMFKRMEALTSDNESASNQIKLKELPLFEFQVLATSTDSFSLRNKLGQGGFGPVYKGKLPEGQEIAVKRLSRKSGQGLEELMNEVVVISKLQHRNLVKLLGCCIEGEERMLVYEYMPKKSLDAYLFDPMKQKILDWKTRFNIMEGICRGLLYLHRDSRLKIIHRDLKASNILLDENLNPKISDFGLARIFRANEDEANTRRVVGTYGYMSPEYAMEGFFSEKSDVFSLGVIFLEIISGRRNSSSHKEENNLNLLAYAWKLWNDGEAASLADPAVFDKCFEKEIEKCVHIGLLCVQEVANDRPNVSNVIWMLTTENMSLADPKQPAFIVRRGASEAESSDQSSQKVSINDVSLTAVTGR

SEQ ID NO: 30741 - protein, 698 aa, Arabidopsis thaliana
  misc_feature (1)..(698): Ceres Seq. ID no. 4971931
MLQDNRNNGEILWESFKHPYDSFMPRMTLGTDGRTGGNLKLTSWTSHDDPSTGNYTAGIAPFTFPELLIWKNNVPTWRSGPWNGQVFIGLPNMDSLLFLDGFNLNSDNQGTISMSYANDSFMYHFNLDPEGIIYQKDWSTSMRTWRIGVKFPYTDCDAYGRCGRFGSCHAGENPPCKCVKGFVPKNNTEWNGGNWSNGCMRKAPLQCERQRNVSNGGGGGKADGFLKLQKMKVPISAERSEASEQVCPKVCLDNCSCTAYAYDRGIGCMLWSGDLVDMQSFLGSGIDLFIRVAHSELKTHSNLAVMIAAPVIGVMLIAAVCVLLACRKYKKRPAKDRSAELMFKRMEALTSDNESASNQIKLKELPLFEFQVLATSTDSFSLRNKLGQGGFGPVYKGKLPEGQEIAVKRLSRKSGQGLEELMNEVVVISKLQHRNLVKLLGCCIEGEERMLVYEYMPKKSLDAYLFDPMKQKILDWKTRFNIMEGICRGLLYLHRDSRLKIIHRDLKASNILLDENLNPKISDFGLARIFRANEDEANTRRVVGTYGYMSPEYAMEGFFSEKSDVFSLGVIFLEIISGRRNSSSHKEENNLNLLAYAWKLWNDGEAASLADPAVFDKCFEKEIEKCVHIGLLCVQEVANDRPNVSNVIWMLTTENMSLADPKQPAFIVRRGASEAESSDQSSQKVSINDVSLTAVTGR

SEQ ID NO: 30742 - DNA, 4908 bp, Arabidopsis thaliana
  misc_feature (1)..(4908): Ceres Seq. ID no. 4971932
atgagacttcatgagagctcgagtccttttgtttgtattcttgtactgtcttgcttcttcttgagcgtgtctctggctcaggaaagagctttcttttctggcaagctcaatgattccgagacgattgtctctagctttcggacattcaggttcggtttcttcagccctgttaattccacaagtcgatatgctggtatatggtataacagtgtttctgtacaaactgtgatatgggttgctaacaaagataagccgatcaatgattcctctggagttatttcggtttctcaagatggaaatcttgtagttacggatggacagaggcgtgttctatggtcaactaacgtctctactcaagccagtgccaattctactgtcgctgagcttcttgattccgggaatctggtgctaaaagaggcgagtagtgacgcgtatctttgggagagcttcaagtatcctactgattcttggttgccaaatatgttggttgggacaaacgcaagaattggaggaggaaacgtcacgataacttcttggaaatccccttcggatccttcgcctgggagctacactgctgcactcgttcttgctgcatatccagagctcttcattatgaacaataataataataacagtacggtgtggcgaagtggcccgtggaatggccagatgtttaatggtttaccagatgtttatgcgggtgtttttctttatagattcatagttaatgatgacaccaatggatctgtcaccatgtcatatgctaatgattcaaccttgagatacttctacatggattatagaggatctgtgatccgaagagattggagtgagactaggagaaactggacggtcgggttacaagttccagcaaccgagtgtgacaactacaggcgatgtggcgaattcgctacttgcaatccacggaaaaacccgctttgttcttgcattagagggtttaggccaaggaacctaatagagtggaacaatggaaactggagtggtggatgcacaagaagggttcctttgcagtgtgaaagacagaacaataatgggagtgctgatgggtttttgaggctgcggcgaatgaaactgcctgactttgcaagaagatccgaagcaagcgaaccagaatgcttaaggacttgtttgcagacatgttcttgtatagctgctgctcatggcttaggatatggctgcatgatttggaatggaagcttagttgattcgcaggagttgtctgctagtggattggatctttatatccgtcttgcacattcagaaatcagcggtatttttgttgtggcagcttgtgttcttctggcacgacgaattgtcatgaagaaaagagcgaaaaagaaaggaagagatgcagagcagatttttgagagagtggaagccttagctggtggtaataaaggaaagttgaaagagctaccattgtttgagtttcaagtgctagcagcagcaactaataatttctcgctgagaaataagcttggacaaggtggctttggtcctgtttacaaagggaagttgcaagaggggcaagagattgctgtgaagaggctgtcacgagcatcaggacaagggcttgaggagcttgttaacgaagtggttgtaatttctaagttgcagcatcggaatctggtgaaattacttggttgttgcattgcaggagaagagaggatgttagtctatgagttcatgcccaagaaaagcttagactattatctctttgactcaaggagggcaaaacttcttgattggaagacccggtttaacataatcaatggaatatgtagaggtcttctgtaccttcacagagattctaggctgagaatcattcacagagacctgaaagctagtaacatcttgttagatgagaatctgattccgaaaatatctgatttcgggttggccagaatttttccagggaatgaagatgaagcaaataccagaagggtcgttggaacatatggctatatggcacctgaatatgcaatgggaggactgttttcagagaaatctgacgttttcagcttaggagtgatactcttagagattatcagtggaagaagaaactcaaattcgactcttttagcttatgtatggtcaatctggaacgaaggggagattaatagtctggtagatcctgagatctttgacctactctttgagaaagaaatacacaaatgcattcacattgggcttttgtgtgtgcaagaagctgctaacgataggccaagtgtttctacagtgtgttcgatgctcagcagcgagattgcagatattccagaaccaaaacagcctgcttttatatcaaggaacaatgttccagaagctgagtcctctgagaacagtgaccttaaagactctatcaacaatgtcaccatcaccgatgttacaggactttttcgtcttgagaggctgggactaaaagatatgagacttcatgagagcttgagtcctattgttcatgttctttcactgtcttgcttctttttaagcgtctctctagctcatgaaagagctttattttctggcacgctcaatgattccgagacgatagtctccagcttccgaacgttcaggttcggtttcttcagccctgttaattccaccaaccgatatgctggtatatggtataacagcattcctgtacaaactgtgatatgggttgctaacaaagatacgccgatcaatgactcctctggagtgatttcaatatctgaagatggaaatctggtagttactgatggtcagaggcgtgttttgtggtcaactaacgtttctactcgagccagtgccaattctactgtcgctgagcttttggagtccgggaacctcgtgctaaaagatgccaataccgatgcatatctttgggagagcttcaagtatcctactgattcttggttgccaaatatgttggttgggacaaacgcaagaaccggaggaggaaacatcacaataacttcttggacaaacccttcggatccttcgccggggagctacactgctgcactcgttcttgctccatatccagagctttttattttcaacaataatgacaacaatgctacggtgtggcgcagtggcccttggaacggactgatgtttaacggtttaccagatgtatatccggggctctttctttatagatttaaagttaatgatgacaccaatggttcagccaccatgtcatatgctaatgattcaactttgagacacctctacttggattatagaggatttgctatccggagagattggagtgaggctaggagaaactggacgttagggtcacaagttccggcaaccgagtgtgacatttacagccgatgtggtcaatacactacctgcaatcctcggaaaaacccgcattgttcttgcattaaagggtttaggccaaggaaccttatagagtggaacaatggaaactggagtggtggatgcataagaaagctccctttgcagtgtgaaagacagaacaataaggggagtgctgataggtttttgaagctgcagcgaatgaaaatgcctgactttgcaagaagatccgaagccagcgaaccagaatgctttatgacttgtttgcagtcatgttcttgtatagcttttgctcatggattaggatatggctgcatgatttggaatagaagcttagttgattcacaagtgttgtctgctagtggaatggatctttctatccgtcttgcacattcagaattcaaaacacaggacaggcgacctattttgatcggtacatcattggcaggaggcatttttgttgtggcgacttgtgtccttctggcacgacgtattgtcatgaagaaaagagctaaaaagaaaggaacagatgcagagcaaatttttaagagagtagaagctttagctggtggtagtagagaaaagttgaaagagctacctttgtttgagtttcaagtgttagctactgcaaccgataacttctctcttagcaataagctcggacaaggcggttttggtccggtttacaaggggatgttgctagaaggtcaagagattgctgtgaagagactgtcacaagcatcaggacaagggcttgaggaacttgtcactgaagtggttgtgatttctaagttgcaacatcgaaatctggtgaaattatttggttgctgcattgcaggggaagaaaggatgttagtctatgagttcatgcccaagaaaagcttagacttttatatatttgatccaagggaagcaaaacttcttgactggaacacgcggtttgaaataatcaatggaatatgtagaggtctcctgtaccttcacagagattctaggctgagaatcattcacagagatctgaaagcaagcaacatcttgctagatgagaatctgattccgaaaatatctgattttgggttggccaggatattcccggggaatgaagatgaagcaaacaccagaagggtcgttggaacatatggctatatggcacctgaatatgcaatgggaggactgttttcagagaaatctgatgttttcagcttaggagtgatactcttagagattatcagtggaagaagaaactcacattcaactcttttggctcatgtgtggtcaatctggaacgaaggggagattaatggtatggtagatcctgagatttttgaccaactttttgagaaagaaatacgaaaatgcgttcacattgcgcttttgtgtgtgcaagacgctgctaatgataggccaagtgtttctacagtgtgtatgatgcttagcagtgaggttgcagacattccagaaccgaaacagcctgcttttatgcctagaaacgttggtttagaagctgagttctctgagagcattgctcttaaagcctctatcaacaatgtcaccatcactgatgtctcaggacgttaa

SEQ ID NO: 30743 - protein, 1635 aa, Arabidopsis thaliana
  misc_feature (1)..(1635): Ceres Seq. ID no. 4971933
MRLHESSSPFVCILVLSCFFLSVSLAQERAFFSGKLNDSETIVSSFRTFRFGFFSPVNSTSRYAGIWYNSVSVQTVIWVANKDKPINDSSGVISVSQDGNLVVTDGQRRVLWSTNVSTQASANSTVAELLDSGNLVLKEASSDAYLWESFKYPTDSWLPNMLVGTNARIGGGNVTITSWKSPSDPSPGSYTAALVLAAYPELFIMNNNNNNSTVWRSGPWNGQMFNGLPDVYAGVFLYRFIVNDDTNGSVTMSYANDSTLRYFYMDYRGSVIRRDWSETRRNWTVGLQVPATECDNYRRCGEFATCNPRKNPLCSCIRGFRPRNLIEWNNGNWSGGCTRRVPLQCERQNNNGSADGFLRLRRMKLPDFARRSEASEPECLRTCLQTCSCIAAAHGLGYGCMIWNGSLVDSQELSASGLDLYIRLAHSEISGIFVVAACVLLARRIVMKKRAKKKGRDAEQIFERVEALAGGNKGKLKELPLFEFQVLAAATNNFSLRNKLGQGGFGPVYKGKLQEGQEIAVKRLSRASGQGLEELVNEVVVISKLQHRNLVKLLGCCIAGEERMLVYEFMPKKSLDYYLFDSRRAKLLDWKTRFNIINGICRGLLYLHRDSRLRIIHRDLKASNILLDENLIPKISDFGLARIFPGNEDEANTRRVVGTYGYMAPEYAMGGLFSEKSDVFSLGVILLEIISGRRNSNSTLLAYVWSIWNEGEINSLVDPEIFDLLFEKEIHKCIHIGLLCVQEAANDRPSVSTVCSMLSSEIADIPEPKQPAFISRNNVPEAESSENSDLKDSINNVTITDVTGLFRLERLGLKDMRLHESLSPIVHVLSLSCFFLSVSLAHERALFSGTLNDSETIVSSFRTFRFGFFSPVNSTNRYAGIWYNSIPVQTVIWVANKDTPINDSSGVISISEDGNLVVTDGQRRVLWSTNVSTRASANSTVAELLESGNLVLKDANTDAYLWESFKYPTDSWLPNMLVGTNARTGGGNITITSWTNPSDPSPGSYTAALVLAPYPELFIFNNNDNNATVWRSGPWNGLMFNGLPDVYPGLFLYRFKVNDDTNGSATMSYANDSTLRHLYLDYRGFAIRRDWSEARRNWTLGSQVPATECDIYSRCGQYTTCNPRKNPHCSCIKGFRPRNLIEWNNGNWSGGCIRKLPLQCERQNNKGSADRFLKLQRMKMPDFARRSEASEPECFMTCLQSCSCIAFAHGLGYGCMIWNRSLVDSQVLSASGMDLSIRLAHSEFKTQDRRPILIGTSLAGGIFVVATCVLLARRIVMKKRAKKKGTDAEQIFKRVEALAGGSREKLKELPLFEFQVLATATDNFSLSNKLGQGGFGPVYKGMLLEGQEIAVKRLSQASGQGLEELVTEVVVISKLQHRNLVKLFGCCIAGEERMLVYEFMPKKSLDFYIFDPREAKLLDWNTRFEIINGICRGLLYLHRDSRLRIIHRDLKASNILLDENLIPKISDFGLARIFPGNEDEANTRRVVGTYGYMAPEYAMGGLFSEKSDVFSLGVILLEIISGRRNSHSTLLAHVWSIWNEGEINGMVDPEIFDQLFEKEIRKCVHIALLCVQDAANDRPSVSTVCMMLSSEVADIPEPKQPAFMPRNVGLEAEFSESIALKASINNVTITDVSGR

SEQ ID NO: 30744 - protein, 1475 aa, Arabidopsis thaliana
  misc_feature (1)..(1475): Ceres Seq. ID no. 4971934
MLVGTNARIGGGNVTITSWKSPSDPSPGSYTAALVLAAYPELFIMNNNNNNSTVWRSGPWNGQMFNGLPDVYAGVFLYRFIVNDDTNGSVTMSYANDSTLRYFYMDYRGSVIRRDWSETRRNWTVGLQVPATECDNYRRCGEFATCNPRKNPLCSCIRGFRPRNLIEWNNGNWSGGCTRRVPLQCERQNNNGSADGFLRLRRMKLPDFARRSEASEPECLRTCLQTCSCIAAAHGLGYGCMIWNGSLVDSQELSASGLDLYIRLAHSEISGIFVVAACVLLARRIVMKKRAKKKGRDAEQIFERVEALAGGNKGKLKELPLFEFQVLAAATNNFSLRNKLGQGGFGPVYKGKLQEGQEIAVKRLSRASGQGLEELVNEVVVISKLQHRNLVKLLGCCIAGEERMLVYEFMPKKSLDYYLFDSRRAKLLDWKTRFNIINGICRGLLYLHRDSRLRIIHRDLKASNILLDENLIPKISDFGLARIFPGNEDEANTRRVVGTYGYMAPEYAMGGLFSEKSDVFSLGVILLEIISGRRNSNSTLLAYVWSIWNEGEINSLVDPEIFDLLFEKEIHKCIHIGLLCVQEAANDRPSVSTVCSMLSSEIADIPEPKQPAFISRNNVPEAESSENSDLKDSINNVTITDVTGLFRLERLGLKDMRLHESLSPIVHVLSLSCFFLSVSLAHERALFSGTLNDSETIVSSFRTFRFGFFSPVNSTNRYAGIWYNSIPVQTVIWVANKDTPINDSSGVISISEDGNLVVTDGQRRVLWSTNVSTRASANSTVAELLESGNLVLKDANTDAYLWESFKYPTDSWLPNMLVGTNARTGGGNITITSWTNPSDPSPGSYTAALVLAPYPELFIFNNNDNNATVWRSGPWNGLMFNGLPDVYPGLFLYRFKVNDDTNGSATMSYANDSTLRHLYLDYRGFAIRRDWSEARRNWTLGSQVPATECDIYSRCGQYTTCNPRKNPHCSCIKGFRPRNLIEWNNGNWSGGCIRKLPLQCERQNNKGSADRFLKLQRMKMPDFARRSEASEPECFMTCLQSCSCIAFAHGLGYGCMIWNRSLVDSQVLSASGMDLSIRLAHSEFKTQDRRPILIGTSLAGGIFVVATCVLLARRIVMKKRAKKKGTDAEQIFKRVEALAGGSREKLKELPLFEFQVLATATDNFSLSNKLGQGGFGPVYKGMLLEGQEIAVKRLSQASGQGLEELVTEVVVISKLQHRNLVKLFGCCIAGEERMLVYEFMPKKSLDFYIFDPREAKLLDWNTRFEIINGICRGLLYLHRDSRLRIIHRDLKASNILLDENLIPKISDFGLARIFPGNEDEANTRRVVGTYGYMAPEYAMGGLFSEKSDVFSLGVILLEIISGRRNSHSTLLAHVWSIWNEGEINGMVDPEIFDQLFEKEIRKCVHIALLCVQDAANDRPSVSTVCMMLSSEVADIPEPKQPAFMPRNVGLEAEFSESIALKASINNVTITDVSGR

SEQ ID NO: 30745 - protein, 1431 aa, Arabidopsis thaliana
  misc_feature (1)..(1431): Ceres Seq. ID no. 4971935
MNNNNNNSTVWRSGPWNGQMFNGLPDVYAGVFLYRFIVNDDTNGSVTMSYANDSTLRYFYMDYRGSVIRRDWSETRRNWTVGLQVPATECDNYRRCGEFATCNPRKNPLCSCIRGFRPRNLIEWNNGNWSGGCTRRVPLQCERQNNNGSADGFLRLRRMKLPDFARRSEASEPECLRTCLQTCSCIAAAHGLGYGCMIWNGSLVDSQELSASGLDLYIRLAHSEISGIFVVAACVLLARRIVMKKRAKKKGRDAEQIFERVEALAGGNKGKLKELPLFEFQVLAAATNNFSLRNKLGQGGFGPVYKGKLQEGQEIAVKRLSRASGQGLEELVNEVVVISKLQHRNLVKLLGCCIAGEERMLVYEFMPKKSLDYYLFDSRRAKLLDWKTRFNIINGICRGLLYLHRDSRLRIIHRDLKASNILLDENLIPKISDFGLARIFPGNEDEANTRRVVGTYGYMAPEYAMGGLFSEKSDVFSLGVILLEIISGRRNSNSTLLAYVWSIWNEGEINSLVDPEIFDLLFEKEIHKCIHIGLLCVQEAANDRPSVSTVCSMLSSEIADIPEPKQPAFISRNNVPEAESSENSDLKDSINNVTITDVTGLFRLERLGLKDMRLHESLSPIVHVLSLSCFFLSVSLAHERALFSGTLNDSETIVSSFRTFRFGFFSPVNSTNRYAGIWYNSIPVQTVIWVANKDTPINDSSGVISISEDGNLVVTDGQRRVLWSTNVSTRASANSTVAELLESGNLVLKDANTDAYLWESFKYPTDSWLPNMLVGTNARTGGGNITITSWTNPSDPSPGSYTAALVLAPYPELFIFNNNDNNATVWRSGPWNGLMFNGLPDVYPGLFLYRFKVNDDTNGSATMSYANDSTLRHLYLDYRGFAIRRDWSEARRNWTLGSQVPATECDIYSRCGQYTTCNPRKNPHCSCIKGFRPRNLIEWNNGNWSGGCIRKLPLQCERQNNKGSADRFLKLQRMKMPDFARRSEASEPECFMTCLQSCSCIAFAHGLGYGCMIWNRSLVDSQVLSASGMDLSIRLAHSEFKTQDRRPILIGTSLAGGIFVVATCVLLARRIVMKKRAKKKGTDAEQIFKRVEALAGGSREKLKELPLFEFQVLATATDNFSLSNKLGQGGFGPVYKGMLLEGQEIAVKRLSQASGQGLEELVTEVVVISKLQHRNLVKLFGCCIAGEERMLVYEFMPKKSLDFYIFDPREAKLLDWNTRFEIINGICRGLLYLHRDSRLRIIHRDLKASNILLDENLIPKISDFGLARIFPGNEDEANTRRVVGTYGYMAPEYAMGGLFSEKSDVFSLGVILLEIISGRRNSHSTLLAHVWSIWNEGEINGMVDPEIFDQLFEKEIRKCVHIALLCVQDAANDRPSVSTVCMMLSSEVADIPEPKQPAFMPRNVGLEAEFSESIALKASINNVTITDVSGR

SEQ ID NO: 30746 - DNA, 4671 bp, Arabidopsis thaliana
  misc_feature (1)..(4671): Ceres Seq. ID no. 4972001
atgatgaagaccggtgctgttgtttccaatccacgttcgagggtcaagtgggacgcattcctgagtttccaaagagacacgagccacaatttcacggatcgtctctatgaagcgcttgtcaaggaagagctccgggtttggaacgatgatttggaacgtgtggatcatgatcatgatcatgagctacgtccaagtctcgtggaggctatagaggactcggtggcttttgtcgtcgtcttatcccctaactacgctaactctcacctgcgcctcgaagaattagctaagctctgcgatctaaaatgtttgatggtaccgatcttttataaggttgaaccacgggaagttaaggaacagaacggtcctttcgaaaaggattttgaagagcattccaaaagatttggcgaggagaagatacaacgatggaagggagctatgactacggtcggaaatatctccggattcatttgcgggtatgagatccaattggagatggagactggcgttgttccgaataggctaaagtacagcgtctttctgagcttccgaggattcgacacgcgaaccaacttctgtgagcgtctgtatatcgctctcaacgaaaagcaaaatgtccgagtctttcgcgacaacgagggtatggaaaaaggtgataagatcgatccaagtctcttcgaagccattgaggactcggctgcctccgtcatcatcttatccactaactacgctaactcttcttggtgcctagatgaattagctttgctctgcgatcttagatcgtctctgaaacgtcccatgatacctatcttctatggagtcaatcccgaggatgtccgcaaacagagcggtgagttcaggaaagattttgaagagaaagcgaaaagttttgatgaggagacgattcagcgatggaagcgagctatgaatttagtcggaaatatccctggatatgtttgcacagcaaagactgttggagatgacaatgaaggcataaacagagagaaagtagatgacatgattgatctggtggtgaaaaaggttgtagctgctgtgaggaatagaccagagatagttgcagactacactgttggtctggaatcacctataaaggatttgatgaaactgttcaacactgaatccagttctggcatccaagtcatgggactttatggtatgggcggtattgggaagactacccttgcaaaagccttttataacaagatcattgttaacttcaaccgtcatcgagttttcatcgaaagcgttaggggaaaatcgtcagaccaagatggtttagtcaatctacaaaaaactctcatcaaggaacttttccgtttggtacctgaaatagaggatgttagcataggcctggaaaagataaaagagaatgttcatgagaagaagattattgtggttttggatgatgttgatcacatagaccaggttaatgcgctggttggtgaaacaagctggtatggtgaaggaagtcttatagtcatcactaccagagattctgagattctgagtaagctctcagtgaaccaacagtatgaggtcaagtgcttgactgaaccgcaggcgttgaagctctttagtttttattcactacgaaaagagaaaccaccaacacagggtttattggagttgtccaagaagattgccgaggtgacgggactgttgccactggctgttaaagtgtttggttctcatttttatgacaaggacgaaaacgaatggcaagttgaactagagaagctgaaaacccaacaagacaaacttcacggtgttctggctctgagtttcaaatctttagacgaagaagaaaagaagatattcctcgacattgcatgtctctttctcaaaatggatataacaaaagaagaagttgtcgacatactgaaaggatgtgggttaaacgccgaggctgctctccgtgttcttatacagaaatctctccttacaatcttgacagacgacactctgtggatgcatgatcagatcagagacatgggtaggcagatggttcataaagaaagcagcgatgatcctgagatgcggagtagactctgggatcgtggtgaaataatgaacgtattggactatatgaagggaacatcatccattcgaggaatcgtactagactttaataagaagtttgcgagggaccatactgcagatgaaattttctcgagtaatctacgcaacaatccgggtatctactctgtattcaattacctgaagaataagttagtaagatttccagcagaggaaaagccaaaaaggtctgaaatcaccattcccgtagaatcttttgcaccaatgaagaagttgagacttcttcagattaataacgtggaactggaaggagatcttaaacttctcccatctgaactcaagtggatacagtggaaaggtttcccattagaaaatctccctccggatattctttctaggcaacttggtgttcttgatctttcagagagtggagtaagacgagtcaagactttgccccgcaaaaggggggatgagaacttgaaagttgtaaatttgcgtggttgccacggcttagaagccattcctgatttatcaaaccataatgcactagaaaagcttgttcttgagcgatgcaaccttctggtgaaggttcctagatcagttggtaatctgggaaaattgcttcagctggaccttagaaggtgctcaagtctttctgaatttcttggggatgtttctggactgaagtgtcttgaaaaatttttcctctctggctgttcaaatctgagtgtgttaccagaaaacattggttccatgccatgtttgaaagagcttcttcttgatggaactgcgataagtaacttaccgtactctatttttcgcctccaaaagcttgaaaagcttagtctaatgggttgcaggtctattgaagagctaccttcgtgtgtaggatatttgacatcgctcgaagatttatatcttgatgatactgcattgcgaaaccttcctagttctattggagatctaaaaaatctccagaagctgcatctgatgcgctgcacgtccctttctacgattcctgagactataaataagctcatgtcattgaaggaattattcatcaatggaagcgcggtggaggagctacctatagaaaccggctcactcctatgtttgactgacctctctgcaggagattgcaaatttctgaaacaggttccgagttcaattggtggattaaattctcttctccaacttcagttggatagcaccccaattgaagctctaccagaagagattggagacttgcactttattcgacaacttgacttgagaaactgcaaatctctgaaggctctgcctaaaacaatcggaaagatggacacactctatagcttaaaccttgtaggctctaacattgaggaactgccggaagaatttggcaagctggaaaacctagttgaactgcgaatgaacaactgtaaaatgctcaaacggcttcctaaatcgtttggagacttgaaatctcttcaccgtctgtacatgcaggaaactttggtcgcggagttgccagaaagtttcggaaacctctcaaatttaatggtactggaaatgctgaagaagcctctttttagaatttctgagagtaatgttccaggtacaagcgaagaacctcgttttgtagaagtaccaaactctttctcaaagctcttgaagcttgaggaactagatgcttgcagctggagaatatcgggtaaaatccctgatgatcttgagaagctttcgtgtttgatgaaactgaatctggggaataattattttcatagtcttccgtctagcctcgtaaagttatcaaatctccaagaactttcattacgtgactgccgagagctcaagcgtcttccccctcttccatgtaaactggagcagctaaacctagcaaactgtttctcattggagagtgtatccgacctttcagagttaacgatcttgacggatctcaatctcacaaactgtgcgaaagtggttgatattccaggcctagagcacttgacggctctgaaaagattatacatgaccggatgtaactccaactactcccttgcagtaaagaaaagactttccaaggcttctttgaagatgatgcggaatctgagcttgcctggaaacagggtcccggactggttctcgcaaggccctgtcacattctcagctcaaccgaacagagagctcagaggtgtaatcattgctgttgttgtggctcttaatgatgaaaccgaagatgacgactatcagctgcctgatgtgatggaggttcaagcccaaattcataaacttgatcatcacaaatgcaccaacacattgcatctctccggagtgcctagaacaaataacgatcagcttcacatctgccgatactcagcttttcacccactggttacgatgttgaaagacgggtacaccatacaggtgatcaaacgaaacccaccaatcaaacaaggcgttgagctaaagatgcatggcattcatctcgtttacgagggggatgatgatttggaaggcagagaaaatacattacccgaggctcaacaaaccgtttctcagaaacttgccaattttttcagctcgtttgaagaaggtgaagccagcgcaaaaggtgattccactgttgcatga

SEQ ID NO: 30747 - protein, 1556 aa, Arabidopsis thaliana
  misc_feature (1)..(1556): Ceres Seq. ID no. 4972002
MMKTGAVVSNPRSRVKWDAFLSFQRDTSHNFTDRLYEALVKEELRVWNDDLERVDHDHDHELRPSLVEAIEDSVAFVVVLSPNYANSHLRLEELAKLCDLKCLMVPIFYKVEPREVKEQNGPFEKDFEEHSKRFGEEKIQRWKGAMTTVGNISGFICGYEIQLEMETGVVPNRLKYSVFLSFRGFDTRTNFCERLYIALNEKQNVRVFRDNEGMEKGDKIDPSLFEAIEDSAASVIILSTNYANSSWCLDELALLCDLRSSLKRPMIPIFYGVNPEDVRKQSGEFRKDFEEKAKSFDEETIQRWKRAMNLVGNIPGYVCTAKTVGDDNEGINREKVDDMIDLVVKKVVAAVRNRPEIVADYTVGLESPIKDLMKLFNTESSSGIQVMGLYGMGGIGKTTLAKAFYNKIIVNFNRHRVFIESVRGKSSDQDGLVNLQKTLIKELFRLVPEIEDVSIGLEKIKENVHEKKIIVVLDDVDHIDQVNALVGETSWYGEGSLIVITTRDSEILSKLSVNQQYEVKCLTEPQALKLFSFYSLRKEKPPTQGLLELSKKIAEVTGLLPLAVKVFGSHFYDKDENEWQVELEKLKTQQDKLHGVLALSFKSLDEEEKKIFLDIACLFLKMDITKEEVVDILKGCGLNAEAALRVLIQKSLLTILTDDTLWMHDQIRDMGRQMVHKESSDDPEMRSRLWDRGEIMNVLDYMKGTSSIRGIVLDFNKKFARDHTADEIFSSNLRNNPGIYSVFNYLKNKLVRFPAEEKPKRSEITIPVESFAPMKKLRLLQINNVELEGDLKLLPSELKWIQWKGFPLENLPPDILSRQLGVLDLSESGVRRVKTLPRKRGDENLKVVNLRGCHGLEAIPDLSNHNALEKLVLERCNLLVKVPRSVGNLGKLLQLDLRRCSSLSEFLGDVSGLKCLEKFFLSGCSNLSVLPENIGSMPCLKELLLDGTAISNLPYSIFRLQKLEKLSLMGCRSIEELPSCVGYLTSLEDLYLDDTALRNLPSSIGDLKNLQKLHLMRCTSLSTIPETINKLMSLKELFINGSAVEELPIETGSLLCLTDLSAGDCKFLKQVPSSIGGLNSLLQLQLDSTPIEALPEEIGDLHFIRQLDLRNCKSLKALPKTIGKMDTLYSLNLVGSNIEELPEEFGKLENLVELRMNNCKMLKRLPKSFGDLKSLHRLYMQETLVAELPESFGNLSNLMVLEMLKKPLFRISESNVPGTSEEPRFVEVPNSFSKLLKLEELDACSWRISGKIPDDLEKLSCLMKLNLGNNYFHSLPSSLVKLSNLQELSLRDCRELKRLPPLPCKLEQLNLANCFSLESVSDLSELTILTDLNLTNCAKVVDIPGLEHLTALKRLYMTGCNSNYSLAVKKRLSKASLKMMRNLSLPGNRVPDWFSQGPVTFSAQPNRELRGVIIAVVVALNDETEDDDYQLPDVMEVQAQIHKLDHHKCTNTLHLSGVPRTNNDQLHICRYSAFHPLVTMLKDGYTIQVIKRNPPIKQGVELKMHGIHLVYEGDDDLEGRENTLPEAQQTVSQKLANFFSSFEEGEASAKGDSTVA

SEQ ID NO: 30748 - protein, 1555 aa, Arabidopsis thaliana
  misc_feature (1)..(1555): Ceres Seq. ID no. 4972003
MKTGAVVSNPRSRVKWDAFLSFQRDTSHNFTDRLYEALVKEELRVWNDDLERVDHDHDHELRPSLVEAIEDSVAFVVVLSPNYANSHLRLEELAKLCDLKCLMVPIFYKVEPREVKEQNGPFEKDFEEHSKRFGEEKIQRWKGAMTTVGNISGFICGYEIQLEMETGVVPNRLKYSVFLSFRGFDTRTNFCERLYIALNEKQNVRVFRDNEGMEKGDKIDPSLFEAIEDSAASVIILSTNYANSSWCLDELALLCDLRSSLKRPMIPIFYGVNPEDVRKQSGEFRKDFEEKAKSFDEETIQRWKRAMNLVGNIPGYVCTAKTVGDDNEGINREKVDDMIDLVVKKVVAAVRNRPEIVADYTVGLESPIKDLMKLFNTESSSGIQVMGLYGMGGIGKTTLAKAFYNKIIVNFNRHRVFIESVRGKSSDQDGLVNLQKTLIKELFRLVPEIEDVSIGLEKIKENVHEKKIIVVLDDVDHIDQVNALVGETSWYGEGSLIVITTRDSEILSKLSVNQQYEVKCLTEPQALKLFSFYSLRKEKPPTQGLLELSKKIAEVTGLLPLAVKVFGSHFYDKDENEWQVELEKLKTQQDKLHGVLALSFKSLDEEEKKIFLDIACLFLKMDITKEEVVDILKGCGLNAEAALRVLIQKSLLTILTDDTLWMHDQIRDMGRQMVHKESSDDPEMRSRLWDRGEIMNVLDYMKGTSSIRGIVLDFNKKFARDHTADEIFSSNLRNNPGIYSVFNYLKNKLVRFPAEEKPKRSEITIPVESFAPMKKLRLLQINNVELEGDLKLLPSELKWIQWKGFPLENLPPDILSRQLGVLDLSESGVRRVKTLPRKRGDENLKVVNLRGCHGLEAIPDLSNHNALEKLVLERCNLLVKVPRSVGNLGKLLQLDLRRCSSLSEFLGDVSGLKCLEKFFLSGCSNLSVLPENIGSMPCLKELLLDGTAISNLPYSIFRLQKLEKLSLMGCRSIEELPSCVGYLTSLEDLYLDDTALRNLPSSIGDLKNLQKLHLMRCTSLSTIPETINKLMSLKELFINGSAVEELPIETGSLLCLTDLSAGDCKFLKQVPSSIGGLNSLLQLQLDSTPIEALPEEIGDLHFIRQLDLRNCKSLKALPKTIGKMDTLYSLNLVGSNIEELPEEFGKLENLVELRMNNCKMLKRLPKSFGDLKSLHRLYMQETLVAELPESFGNLSNLMVLEMLKKPLFRISESNVPGTSEEPRFVEVPNSFSKLLKLEELDACSWRISGKIPDDLEKLSCLMKLNLGNNYFHSLPSSLVKLSNLQELSLRDCRELKRLPPLPCKLEQLNLANCFSLESVSDLSELTILTDLNLTNCAKVVDIPGLEHLTALKRLYMTGCNSNYSLAVKKRLSKASLKMMRNLSLPGNRVPDWFSQGPVTFSAQPNRELRGVIIAVVVALNDETEDDDYQLPDVMEVQAQIHKLDHHKCTNTLHLSGVPRTNNDQLHICRYSAFHPLVTMLKDGYTIQVIKRNPPIKQGVELKMHGIHLVYEGDDDLEGRENTLPEAQQTVSQKLANFFSSFEEGEASAKGDSTVA

SEQ ID NO: 30749 - protein, 1453 aa, Arabidopsis thaliana
  misc_feature (1)..(1453): Ceres Seq. ID no. 4972004
MVPIFYKVEPREVKEQNGPFEKDFEEHSKRFGEEKIQRWKGAMTTVGNISGFICGYEIQLEMETGVVPNRLKYSVFLSFRGFDTRTNFCERLYIALNEKQNVRVFRDNEGMEKGDKIDPSLFEAIEDSAASVIILSTNYANSSWCLDELALLCDLRSSLKRPMIPIFYGVNPEDVRKQSGEFRKDFEEKAKSFDEETIQRWKRAMNLVGNIPGYVCTAKTVGDDNEGINREKVDDMIDLVVKKVVAAVRNRPEIVADYTVGLESPIKDLMKLFNTESSSGIQVMGLYGMGGIGKTTLAKAFYNKIIVNFNRHRVFIESVRGKSSDQDGLVNLQKTLIKELFRLVPEIEDVSIGLEKIKENVHEKKIIVVLDDVDHIDQVNALVGETSWYGEGSLIVITTRDSEILSKLSVNQQYEVKCLTEPQALKLFSFYSLRKEKPPTQGLLELSKKIAEVTGLLPLAVKVFGSHFYDKDENEWQVELEKLKTQQDKLHGVLALSFKSLDEEEKKIFLDIACLFLKMDITKEEVVDILKGCGLNAEAALRVLIQKSLLTILTDDTLWMHDQIRDMGRQMVHKESSDDPEMRSRLWDRGEIMNVLDYMKGTSSIRGIVLDFNKKFARDHTADEIFSSNLRNNPGIYSVFNYLKNKLVRFPAEEKPKRSEITIPVESFAPMKKLRLLQINNVELEGDLKLLPSELKWIQWKGFPLENLPPDILSRQLGVLDLSESGVRRVKTLPRKRGDENLKVVNLRGCHGLEAIPDLSNHNALEKLVLERCNLLVKVPRSVGNLGKLLQLDLRRCSSLSEFLGDVSGLKCLEKFFLSGCSNLSVLPENIGSMPCLKELLLDGTAISNLPYSIFRLQKLEKLSLMGCRSIEELPSCVGYLTSLEDLYLDDTALRNLPSSIGDLKNLQKLHLMRCTSLSTIPETINKLMSLKELFINGSAVEELPIETGSLLCLTDLSAGDCKFLKQVPSSIGGLNSLLQLQLDSTPIEALPEEIGDLHFIRQLDLRNCKSLKALPKTIGKMDTLYSLNLVGSNIEELPEEFGKLENLVELRMNNCKMLKRLPKSFGDLKSLHRLYMQETLVAELPESFGNLSNLMVLEMLKKPLFRISESNVPGTSEEPRFVEVPNSFSKLLKLEELDACSWRISGKIPDDLEKLSCLMKLNLGNNYFHSLPSSLVKLSNLQELSLRDCRELKRLPPLPCKLEQLNLANCFSLESVSDLSELTILTDLNLTNCAKVVDIPGLEHLTALKRLYMTGCNSNYSLAVKKRLSKASLKMMRNLSLPGNRVPDWFSQGPVTFSAQPNRELRGVIIAVVVALNDETEDDDYQLPDVMEVQAQIHKLDHHKCTNTLHLSGVPRTNNDQLHICRYSAFHPLVTMLKDGYTIQVIKRNPPIKQGVELKMHGIHLVYEGDDDLEGRENTLPEAQQTVSQKLANFFSSFEEGEASAKGDSTVA

SEQ ID NO: 30750 - DNA, 1629 bp, Arabidopsis thaliana
  misc_feature (1)..(1629): Ceres Seq. ID no. 4972070
atgagtcacgatagaagtgttaacgtttcgcatgatgctgtgattgctaaacccgagcgtggcactatgcttcagagcttctcacctaggagccatggttctaaaggatattctctacctcaagattcagaagaaaatagaggatcagtcggccaaagtgctggtcagagtagcactagtgtcgttgatcaggtccggtcgccagctgatgatgctggtgtcacttcttcatccaccatatgtccagctcctgtttgtaggcaattttggaaagctggaagctataatgatgaattgagttcaaagtctcagcagccaaatggaaaaaattatcttcatgtgcaccctatgttccttcactccaatgctacctcacataaatgggcttttggagctgttgcagaattgcttgacaatgctgttgatgagatgatggtggtgggatggatcctcaggcaatgcggcattgtatgggttttggattctcagataaaaagtcggattcagccattggaagattttgatgatgttggaccacatgggacaaaggttatcatctataatatgtggctcaacagtgatgctaaattggaattagactttgattcggttgcagaggatattctcattgaaggaagcataaaaaaaactggatctaagattgtgaatgatcatattgccagccggttttcttactctcttcgtgtttacctatctatattatacttgcggattcctgagactttcaagataattttgcgtggtaaggttgtcgaacatcataacgttgctgatgatctcatgcatccgcagtacatcttgtataagcctcaggctgctggatctgaagaggctttagttgtaacgacgattggatttctgaaagaagctcccaaagtaaatcttcacgggttctgcgtttatcacaaaaaccgccttattatgccattttggcaggtcataaattattcaagcagtcgaggaagaggggttgttggtgttctagaagctaattttgttgagccaacccataacaagcaggattttgagaaaactgttcttcttcagaagcttgaaaaccgtttaaaggaaatgacggtggagtattggagctgccattgtgtgttgattgggtatcaagtaaataagaagcctcgtcttcagatacctcaaaaagttcaacctgccggtagacaagcattaagtcctcctccaggcttccaagcagtttttccacaaggaaatacaacatctctccctagagtttcaactcagccagtgctgttggagaagaggaaagaacatcctgattctgttgcaagtgcagcgttaaaaagaaaggttgggaatgatgactttactgtcccggggcatattcgggttgaacagtttattcatggatcagcaagtcagtcacaagatattgaaactgtcaagttgatggaagaaaacaagaagctccgagcaaaatgtttggaccgcaaggtgcgaagtcagaaccttgaagtcaaggccatgaatcttaggagtgagctcgagaactataaaagtgagtatgaaaggttaatggtagagctacaagctttggatttggtgaaagacgagcacagaagaaatgtaaatacgtag

SEQ ID NO: 30751 - protein, 542 aa, Arabidopsis thaliana
  misc_feature (1)..(542): Ceres Seq. ID no. 4972071
MSHDRSVNVSHDAVIAKPERGTMLQSFSPRSHGSKGYSLPQDSEENRGSVGQSAGQSSTSVVDQVRSPADDAGVTSSSTICPAPVCRQFWKAGSYNDELSSKSQQPNGKNYLHVHPMFLHSNATSHKWAFGAVAELLDNAVDEMMVVGWILRQCGIVWVLDSQIKSRIQPLEDFDDVGPHGTKVIIYNMWLNSDAKLELDFDSVAEDILIEGSIKKTGSKIVNDHIASRFSYSLRVYLSILYLRIPETFKIILRGKVVEHHNVADDLMHPQYILYKPQAAGSEEALVVTTIGFLKEAPKVNLHGFCVYHKNRLIMPFWQVINYSSSRGRGVVGVLEANFVEPTHNKQDFEKTVLLQKLENRLKEMTVEYWSCHCVLIGYQVNKKPRLQIPQKVQPAGRQALSPPPGFQAVFPQGNTTSLPRVSTQPVLLEKRKEHPDSVASAALKRKVGNDDFTVPGHIRVEQFIHGSASQSQDIETVKLMEENKKLRAKCLDRKVRSQNLEVKAMNLRSELENYKSEYERLMVELQALDLVKDEHRRNVNT

SEQ ID NO: 30752 - protein, 520 aa, Arabidopsis thaliana
  misc_feature (1)..(520): Ceres Seq. ID no. 4972072
MLQSFSPRSHGSKGYSLPQDSEENRGSVGQSAGQSSTSVVDQVRSPADDAGVTSSSTICPAPVCRQFWKAGSYNDELSSKSQQPNGKNYLHVHPMFLHSNATSHKWAFGAVAELLDNAVDEMMVVGWILRQCGIVWVLDSQIKSRIQPLEDFDDVGPHGTKVIIYNMWLNSDAKLELDFDSVAEDILIEGSIKKTGSKIVNDHIASRFSYSLRVYLSILYLRIPETFKIILRGKVVEHHNVADDLMHPQYILYKPQAAGSEEALVVTTIGFLKEAPKVNLHGFCVYHKNRLIMPFWQVINYSSSRGRGVVGVLEANFVEPTHNKQDFEKTVLLQKLENRLKEMTVEYWSCHCVLIGYQVNKKPRLQIPQKVQPAGRQALSPPPGFQAVFPQGNTTSLPRVSTQPVLLEKRKEHPDSVASAALKRKVGNDDFTVPGHIRVEQFIHGSASQSQDIETVKLMEENKKLRAKCLDRKVRSQNLEVKAMNLRSELENYKSEYERLMVELQALDLVKDEHRRNVNT

SEQ ID NO: 30753 - protein, 426 aa, Arabidopsis thaliana
  misc_feature (1)..(426): Ceres Seq. ID no. 4972073
MFLHSNATSHKWAFGAVAELLDNAVDEMMVVGWILRQCGIVWVLDSQIKSRIQPLEDFDDVGPHGTKVIIYNMWLNSDAKLELDFDSVAEDILIEGSIKKTGSKIVNDHIASRFSYSLRVYLSILYLRIPETFKIILRGKVVEHHNVADDLMHPQYILYKPQAAGSEEALVVTTIGFLKEAPKVNLHGFCVYHKNRLIMPFWQVINYSSSRGRGVVGVLEANFVEPTHNKQDFEKTVLLQKLENRLKEMTVEYWSCHCVLIGYQVNKKPRLQIPQKVQPAGRQALSPPPGFQAVFPQGNTTSLPRVSTQPVLLEKRKEHPDSVASAALKRKVGNDDFTVPGHIRVEQFIHGSASQSQDIETVKLMEENKKLRAKCLDRKVRSQNLEVKAMNLRSELENYKSEYERLMVELQALDLVKDEHRRNVNT

SEQ ID NO: 30754 - DNA, 2781 bp, Arabidopsis thaliana
  misc_feature (1)..(2781): Ceres Seq. ID no. 4972094
atgaagttatcgcctctgagtttctctacgagttcgagtttcagtcacgccgatggaatcgacgacggtgttgagttaatatcatctccatttgccggcggcgcaatgctgccggtttttctcaacgatttgagtcgtaacagtggagaatccggaagcggtagtagctgggaaagagagctcgtggaggttacgttagagctcgacgtcggcgatgactccatactcgtctgcggaatgtctgaggcggcgtctgttgattctcgggcgagatcggtggatttggtaaccgcgaggttatcgaggaatttatcgaatgcgtctacgagaatccgccagaaactagggaagttactgaggtcggaatcgtggaaaacgacgacgtcttctaccgccggcgagagagatagagatcttgaacgtcagacggcggtgactttggggattctgacggcgagggataaacggaaagaagacgcgaaactacagcgatcaacgtcgagtgcgcaaagagcgttaaaaggattacagtttataaataaaaccacgagaggaaatagctgcgtctgcgattgggattgcgattgcgatcagatgtggaaaaaagttgaaaagcgattcgaatcgctttctaaaaatggattactcgcccgagacgattttggcgagtgcgttgggatggtggattcgaaggactttgcggtgagtgtattcgacgcgttggctaggagaagaagacagaaactggagaagataacgaaagatgaacttcatgatttctggttacagatttctgaccaaagcttcgacgcacgtcttcaaattttcttcgacatggctgatagtaacgaagacgggaagatcactagagaagaaatcaaagaacttctaatgctaagtgcatcagcaaacaagttagcaaaactcaaggaacaagctgaagagtacgcatctctgatcatggaagagcttgatcctgagaattttggatacattgagttatggcaactcgagacactcttacttcagagagacgcatacatgaattacagtagaccacttagcacaacaagcggtggagtaaataactggcaaagaagctgggttcttttagtgtgggtcatgcttatggccatcctctttgtctggaagtttctagagtacagagaaaaagctgcgtttaaggtcatggggtattgtttaaccactgctaaaggagctgcagagactcttaagctcaacatggctctggttttattacctgtctgtagaaacacattgacttggctaagatctacacgcgctcgagcttgtgttccttttgatgacaacatcaatttccataagattattgcttgtgccatagcgattgggatacttgttcatgctggtactcatttggcgtgtgatttcccccggattataaactcgagtccagaacaatttgtcttgatcgcttctgccttcaatggtactaagcctacattcaaagacctgatgacaggtgcagaaggaatcaccgggatctcgatggtgatcttgacaaccattgcattcacattagcatcaactcatttcaggagaaaccgtgtgaggcttccggcaccacttgatcggttgactggctttaacgcattctggtacactcatcaccttctagtggttgtctacatcatgctcattgtccacgggaccttcctgttctttgctgataagtggtatcagaaaacgacttggatgtacatctcggttcctttggtgctctacgtggcagaacgaagtctgcgagcttgtaggtcaaagcattactctgtcaaaatcctcaaggtttccatgctacctggagaagtactcagcttaatcatgtcaaagcctcctggattcaagtacaagagcggtcagtacatattcttgcagtgtccaactatctctcgatttgaatggcacccattttctattacctctgcaccaggagatgaccaacttagtgttcacatccgaacactcggagactggacagaggagctacgacgagttctaactgtgggcaaagatctttcaacatgcgtgattgggcgttcaaaattctctgcctattgcaatattgatatgataaaccgaccaaaattactagtagacggtccatatggagctccagcacaggactacagaagctatgatgtcttgctcctcattggactgggaataggagctactcctttcataagcatcctgaaggatctgctgaacaattcaagagacgaacaaacagacaatgaattcagcagatcggatttcagctggaatagctgtacatcttcatataccacagcaaccccaacttcaacacatggagggaaaaagaaagcagtgaaggctcacttttactgggtcacaagggagccaggatccgttgaatggtttagaggagtaatggaggaaatatcagacatggactgcagaggccagattgagttgcacaactaccttacaagcgtatatgatgaaggtgatgcaagatcaaccctgataaaaatggtccaggctttgaaccatgccaaacatggagttgatattctatccggaacacgggtgagaacacattttgcaaggcccaactggaaggaagtcttcagtagcatagcaagaaagcatccaaattcgacagtcggagtgttttactgcggcatacaaaccgtggcaaaggagttgaagaagcaagcacaagacatgagtcaaaaaacaaccacacggttcgagttccataaggagcatttctaa

SEQ ID NO: 30755 - protein, 926 aa, Arabidopsis thaliana
  misc_feature (1)..(926): Ceres Seq. ID no. 4972095
MKLSPLSFSTSSSFSHADGIDDGVELISSPFAGGAMLPVFLNDLSRNSGESGSGSSWERELVEVTLELDVGDDSILVCGMSEAASVDSRARSVDLVTARLSRNLSNASTRIRQKLGKLLRSESWKTTTSSTAGERDRDLERQTAVTLGILTARDKRKEDAKLQRSTSSAQRALKGLQFINKTTRGNSCVCDWDCDCDQMWKKVEKRFESLSKNGLLARDDFGECVGMVDSKDFAVSVFDALARRRRQKLEKITKDELHDFWLQISDQSFDARLQIFFDMADSNEDGKITREEIKELLMLSASANKLAKLKEQAEEYASLIMEELDPENFGYIELWQLETLLLQRDAYMNYSRPLSTTSGGVNNWQRSWVLLVWVMLMAILFVWKFLEYREKAAFKVMGYCLTTAKGAAETLKLNMALVLLPVCRNTLTWLRSTRARACVPFDDNINFHKIIACAIAIGILVHAGTHLACDFPRIINSSPEQFVLIASAFNGTKPTFKDLMTGAEGITGISMVILTTIAFTLASTHFRRNRVRLPAPLDRLTGFNAFWYTHHLLVVVYIMLIVHGTFLFFADKWYQKTTWMYISVPLVLYVAERSLRACRSKHYSVKILKVSMLPGEVLSLIMSKPPGFKYKSGQYIFLQCPTISRFEWHPFSITSAPGDDQLSVHIRTLGDWTEELRRVLTVGKDLSTCVIGRSKFSAYCNIDMINRPKLLVDGPYGAPAQDYRSYDVLLLIGLGIGATPFISILKDLLNNSRDEQTDNEFSRSDFSWNSCTSSYTTATPTSTHGGKKKAVKAHFYWVTREPGSVEWFRGVMEEISDMDCRGQIELHNYLTSVYDEGDARSTLIKMVQALNHAKHGVDILSGTRVRTHFARPNWKEVFSSIARKHPNSTVGVFYCGIQTVAKELKKQAQDMSQKTTTRFEFHKEHF

SEQ ID NO: 30756 - protein, 891 aa, Arabidopsis thaliana
  misc_feature (1)..(891): Ceres Seq. ID no. 4972096
MLPVFLNDLSRNSGESGSGSSWERELVEVTLELDVGDDSILVCGMSEAASVDSRARSVDLVTARLSRNLSNASTRIRQKLGKLLRSESWKTTTSSTAGERDRDLERQTAVTLGILTARDKRKEDAKLQRSTSSAQRALKGLQFINKTTRGNSCVCDWDCDCDQMWKKVEKRFESLSKNGLLARDDFGECVGMVDSKDFAVSVFDALARRRRQKLEKITKDELHDFWLQISDQSFDARLQIFFDMADSNEDGKITREEIKELLMLSASANKLAKLKEQAEEYASLIMEELDPENFGYIELWQLETLLLQRDAYMNYSRPLSTTSGGVNNWQRSWVLLVWVMLMAILFVWKFLEYREKAAFKVMGYCLTTAKGAAETLKLNMALVLLPVCRNTLTWLRSTRARACVPFDDNINFHKIIACAIAIGILVHAGTHLACDFPRIINSSPEQFVLIASAFNGTKPTFKDLMTGAEGITGISMVILTTIAFTLASTHFRRNRVRLPAPLDRLTGFNAFWYTHHLLVVVYIMLIVHGTFLFFADKWYQKTTWMYISVPLVLYVAERSLRACRSKHYSVKILKVSMLPGEVLSLIMSKPPGFKYKSGQYIFLQCPTISRFEWHPFSITSAPGDDQLSVHIRTLGDWTEELRRVLTVGKDLSTCVIGRSKFSAYCNIDMINRPKLLVDGPYGAPAQDYRSYDVLLLIGLGIGATPFISILKDLLNNSRDEQTDNEFSRSDFSWNSCTSSYTTATPTSTHGGKKKAVKAHFYWVTREPGSVEWFRGVMEEISDMDCRGQIELHNYLTSVYDEGDARSTLIKMVQALNHAKHGVDILSGTRVRTHFARPNWKEVFSSIARKHPNSTVGVFYCGIQTVAKELKKQAQDMSQKTTTRFEFHKEHF

SEQ ID NO: 30757 - protein, 847 aa, Arabidopsis thaliana
  misc_feature (1)..(847): Ceres Seq. ID no. 4972097
MSEAASVDSRARSVDLVTARLSRNLSNASTRIRQKLGKLLRSESWKTTTSSTAGERDRDLERQTAVTLGILTARDKRKEDAKLQRSTSSAQRALKGLQFINKTTRGNSCVCDWDCDCDQMWKKVEKRFESLSKNGLLARDDFGECVGMVDSKDFAVSVFDALARRRRQKLEKITKDELHDFWLQISDQSFDARLQIFFDMADSNEDGKITREEIKELLMLSASANKLAKLKEQAEEYASLIMEELDPENFGYIELWQLETLLLQRDAYMNYSRPLSTTSGGVNNWQRSWVLLVWVMLMAILFVWKFLEYREKAAFKVMGYCLTTAKGAAETLKLNMALVLLPVCRNTLTWLRSTRARACVPFDDNINFHKIIACAIAIGILVHAGTHLACDFPRIINSSPEQFVLIASAFNGTKPTFKDLMTGAEGITGISMVILTTIAFTLASTHFRRNRVRLPAPLDRLTGFNAFWYTHHLLVVVYIMLIVHGTFLFFADKWYQKTTWMYISVPLVLYVAERSLRACRSKHYSVKILKVSMLPGEVLSLIMSKPPGFKYKSGQYIFLQCPTISRFEWHPFSITSAPGDDQLSVHIRTLGDWTEELRRVLTVGKDLSTCVIGRSKFSAYCNIDMINRPKLLVDGPYGAPAQDYRSYDVLLLIGLGIGATPFISILKDLLNNSRDEQTDNEFSRSDFSWNSCTSSYTTATPTSTHGGKKKAVKAHFYWVTREPGSVEWFRGVMEEISDMDCRGQIELHNYLTSVYDEGDARSTLIKMVQALNHAKHGVDILSGTRVRTHFARPNWKEVFSSIARKHPNSTVGVFYCGIQTVAKELKKQAQDMSQKTTTRFEFHKEHF

SEQ ID NO: 30758 - DNA, 1497 bp, Arabidopsis thaliana
  misc_feature (1)..(1497): Ceres Seq. ID no. 4972102
atggcttctaactatgataagcttacttcttcgagagtagccatcatcggtgctggtgttagcggattagcagccgctaagaacttagttcatcacaacccgaccgtattcgaagcctcggattcagtcggaggtgtttggaggagctgcacttacgagacgactaaattacaatcggctcgagtcgattacgagttctccgactttccatggcccaataatagagatgacacaactttcccaccttaccttgagatattagattacttggaatcttatgccaaacattttgatcttctcaaattcatgaagtttggctctaaggtcatcgaagtaaggttcatcggtgatggcgaaactcctcagatggttgaccttggtgcttacggcaacttgttgcccggaaaacctgtatgggaattcgtggttgtgtgtaccgggaaatacggcgacgttccaagaataccagcttttccggcaaagaaagggccggagatgtttcaaggaaaagtaatgcattcgatggattactgcaagttagagaaagaagaagcttctactctcctcagtggcaaaaaagtagccgtcatcggcttcaagaaatccgccattgatttggctttagagtctgctttagctaatcaaggggaaggaggaaaagcttgcacaatggtggtgagaacaactcattgggggatcccacattattgggtgtggggcttaccattcttcttgttctactcttcgagagcttctcagttcctccatgataggcctaaccaaagcttccttagaactctcttttgcctcctcttctctcttctgctacctcttgagaaatatggtctaaaaccaaaccattctttcgaggaagactatgcttcttgtcaaatggcgatcataccggagaatttctttgaggaagcggataaagggatgatccggtttaagaaatcatcaaaatggtggttttatgaagaagggattgtgtttgaagatgggacgacattagaagctgatgttgtgatacttgctactggttatgatggcaagaagaagctcaaagctattgttcctgaacctttccgaacttggcttgagtttccaagcggtgtcatgcctttatacaggggaacaatccatccattgataccaaacatgggtttcgtaggatacgtccaaagcagctcgaacttacacacatcagagctacgttcaatgtggctaagccggctagtggatgagaaattcagattaccaagcaaagagaagatgttggatcaattcttaaaagaaatggaagtgacgagaaactcaagcagattctacaaacgtcattgcatttccacgttcagcatccaacatgctgatgatatgtgcaacgacatgggactcaatccttggcgtaaatccaacttcctccttgaagcttttagtccttatggttctcaagattaccgactcggtcaagaagaaaaagaagatatgactgcttaa

SEQ ID NO: 30759 - protein, 498 aa, Arabidopsis thaliana
  misc_feature (1)..(498): Ceres Seq. ID no. 4972103
MASNYDKLTSSRVAIIGAGVSGLAAAKNLVHHNPTVFEASDSVGGVWRSCTYETTKLQSARVDYEFSDFPWPNNRDDTTFPPYLEILDYLESYAKHFDLLKFMKFGSKVIEVRFIGDGETPQMVDLGAYGNLLPGKPVWEFVVVCTGKYGDVPRIPAFPAKKGPEMFQGKVMHSMDYCKLEKEEASTLLSGKKVAVIGFKKSAIDLALESALANQGEGGKACTMVVRTTHWGIPHYWVWGLPFFLFYSSRASQFLHDRPNQSFLRTLFCLLFSLLLPLEKYGLKPNHSFEEDYASCQMAIIPENFFEEADKGMIRFKKSSKWWFYEEGIVFEDGTTLEADVVILATGYDGKKKLKAIVPEPFRTWLEFPSGVMPLYRGTIHPLIPNMGFVGYVQSSSNLHTSELRSMWLSRLVDEKFRLPSKEKMLDQFLKEMEVTRNSSRFYKRHCISTFSIQHADDMCNDMGLNPWRKSNFLLEAFSPYGSQDYRLGQEEKEDMTA

SEQ ID NO: 30760 - protein, 396 aa, Arabidopsis thaliana
  misc_feature (1)..(396): Ceres Seq. ID no. 4972104
MKFGSKVIEVRFIGDGETPQMVDLGAYGNLLPGKPVWEFVVVCTGKYGDVPRIPAFPAKKGPEMFQGKVMHSMDYCKLEKEEASTLLSGKKVAVIGFKKSAIDLALESALANQGEGGKACTMVVRTTHWGIPHYWVWGLPFFLFYSSRASQFLHDRPNQSFLRTLFCLLFSLLLPLEKYGLKPNHSFEEDYASCQMAIIPENFFEEADKGMIRFKKSSKWWFYEEGIVFEDGTTLEADVVILATGYDGKKKLKAIVPEPFRTWLEFPSGVMPLYRGTIHPLIPNMGFVGYVQSSSNLHTSELRSMWLSRLVDEKFRLPSKEKMLDQFLKEMEVTRNSSRFYKRHCISTFSIQHADDMCNDMGLNPWRKSNFLLEAFSPYGSQDYRLGQEEKEDMTA

SEQ ID NO: 30761 - protein, 376 aa, Arabidopsis thaliana
  misc_feature (1)..(376): Ceres Seq. ID no. 4972105
MVDLGAYGNLLPGKPVWEFVVVCTGKYGDVPRIPAFPAKKGPEMFQGKVMHSMDYCKLEKEEASTLLSGKKVAVIGFKKSAIDLALESALANQGEGGKACTMVVRTTHWGIPHYWVWGLPFFLFYSSRASQFLHDRPNQSFLRTLFCLLFSLLLPLEKYGLKPNHSFEEDYASCQMAIIPENFFEEADKGMIRFKKSSKWWFYEEGIVFEDGTTLEADVVILATGYDGKKKLKAIVPEPFRTWLEFPSGVMPLYRGTIHPLIPNMGFVGYVQSSSNLHTSELRSMWLSRLVDEKFRLPSKEKMLDQFLKEMEVTRNSSRFYKRHCISTFSIQHADDMCNDMGLNPWRKSNFLLEAFSPYGSQDYRLGQEEKEDMTA

SEQ ID NO: 30762 - DNA, 1371 bp, Arabidopsis thaliana
  misc_feature (1)..(1371): Ceres Seq. ID no. 4972157
atggggctggttgtggaatcatgtgggcctcgttttaggaaaatatggcttgagatggtccatcgaactctggaaagagcaggtcctgcttttatcaaatggggtcaatgggcagccacgcgacctgatctattccccaaggatttgtgttcacagctctcaaagcttcacagtaatgctcctgagcatagcttcgcctacactaagaaaactatcgagaaggcatttggtcgtaaactttctgagatatttgaggagtttgatgaggtgccagtggcatctgggagtattgcccaagtacatagagcttctttaaggtttcagtatccaggacaaaagtccaagtcttcgctggttgcggttaaagttagacatccgggtgttggtgaatcgattaggagagattttgtgataattaatttggtggcaaagatatcgactttaattccagctttgaaatggttgagattggacgagagtgtgcaacagtttggtgtcttcatgttgtctcaagttgatctcgcgagggaagcttcacatttgagtcggttcatatataacttccgtagatggaaggatgtctctttccctaaacctgtgtatcctcttgtacatcctgctgttttggtggagacatatgagcatggagaaagtgtggcacgttatgttgatggaatggaaggacatgaatggattaagactagattggctcacatcgggacccatgccctcttgaagatgctcttggttgataactttattcacgctgacatgcatccgggaaatatccttgtccggaaaaaggcttcccgtggaggccttttcaaaacgaagaagcctcacattgttttccttgatgtgggaatgactgcagaacttgcaaagaatgaccgagagaacttacttgactttttcaaggcggttgcgcgtagagatggccggactgctgctgaacgaacacttaaattatcaagaaagcagaattgtcccaatccagaggcttttatcgaggaagtagaggaagcattcaaattctggggaacccctgagggagatttagtacatccagcagattgtatgcacgaattacttgagaaagtaagacgtcatagagtaaatattgatgggaatgtgtgcactgttatggtgacaacattagttctcgagaaagctaagcttattatagaaccagagcttaaagctgtagccattaaaactgtttttagcttagagaatggtttctatagccttggttggcaacggaaacttgacccaggatatgatgtgatgcacacgttgcaaacaatggtgttgaaaaccgactgggctaagtctctttcttatacggtggatggtctgatggcgccgtag

SEQ ID NO: 30763 - protein, 456 aa, Arabidopsis thaliana
  misc_feature (1)..(456): Ceres Seq. ID no. 4972158
MGLVVESCGPRFRKIWLEMVHRTLERAGPAFIKWGQWAATRPDLFPKDLCSQLSKLHSNAPEHSFAYTKKTIEKAFGRKLSEIFEEFDEVPVASGSIAQVHRASLRFQYPGQKSKSSLVAVKVRHPGVGESIRRDFVIINLVAKISTLIPALKWLRLDESVQQFGVFMLSQVDLAREASHLSRFIYNFRRWKDVSFPKPVYPLVHPAVLVETYEHGESVARYVDGMEGHEWIKTRLAHIGTHALLKMLLVDNFIHADMHPGNILVRKKASRGGLFKTKKPHIVFLDVGMTAELAKNDRENLLDFFKAVARRDGRTAAERTLKLSRKQNCPNPEAFIEEVEEAFKFWGTPEGDLVHPADCMHELLEKVRRHRVNIDGNVCTVMVTTLVLEKAKLIIEPELKAVAIKTVFSLENGFYSLGWQRKLDPGYDVMHTLQTMVLKTDWAKSLSYTVDGLMAP

SEQ ID NO: 30764 - protein, 438 aa, Arabidopsis thaliana
  misc_feature (1)..(438): Ceres Seq. ID no. 4972159
MVHRTLERAGPAFIKWGQWAATRPDLFPKDLCSQLSKLHSNAPEHSFAYTKKTIEKAFGRKLSEIFEEFDEVPVASGSIAQVHRASLRFQYPGQKSKSSLVAVKVRHPGVGESIRRDFVIINLVAKISTLIPALKWLRLDESVQQFGVFMLSQVDLAREASHLSRFIYNFRRWKDVSFPKPVYPLVHPAVLVETYEHGESVARYVDGMEGHEWIKTRLAHIGTHALLKMLLVDNFIHADMHPGNILVRKKASRGGLFKTKKPHIVFLDVGMTAELAKNDRENLLDFFKAVARRDGRTAAERTLKLSRKQNCPNPEAFIEEVEEAFKFWGTPEGDLVHPADCMHELLEKVRRHRVNIDGNVCTVMVTTLVLEKAKLIIEPELKAVAIKTVFSLENGFYSLGWQRKLDPGYDVMHTLQTMVLKTDWAKSLSYTVDGLMAP

SEQ ID NO: 30765 - protein, 289 aa, Arabidopsis thaliana
  misc_feature (1)..(289): Ceres Seq. ID no. 4972160
MLSQVDLAREASHLSRFIYNFRRWKDVSFPKPVYPLVHPAVLVETYEHGESVARYVDGMEGHEWIKTRLAHIGTHALLKMLLVDNFIHADMHPGNILVRKKASRGGLFKTKKPHIVFLDVGMTAELAKNDRENLLDFFKAVARRDGRTAAERTLKLSRKQNCPNPEAFIEEVEEAFKFWGTPEGDLVHPADCMHELLEKVRRHRVNIDGNVCTVMVTTLVLEKAKLIIEPELKAVAIKTVFSLENGFYSLGWQRKLDPGYDVMHTLQTMVLKTDWAKSLSYTVDGLMAP

SEQ ID NO: 30766 - DNA, 2523 bp, Arabidopsis thaliana
  misc_feature (1)..(2523): Ceres Seq. ID no. 4972161
atgaagttcttctttatctttttcattttcttgttctccttcttgattcaatcttgttactctgacaacacaatcttgagaagtcagtctttgaaagatggtgatgttatatactctgaaggaaagagatttgcttttggattcttcagcttggggaattcaaagctcaggtatgttgggatttggtatgctcaagtctctgagcagactattgtatgggttgcaaatagagatcatcctattaatgacacatctggtctgataaagttcagtaccagagggaatctttgtgtgtatgcatctggcaatggaacagagcctatttggtctactgatgttattgatatgatccaagaacctgctttagttgcgaagctatctgatttaggcaaccttgttctacttgatcctgtcacagggaaaagtttctgggagagctttaatcatcctacaaacactttgcttccctttatgaagtttggattcactcgtcaaagcggtgtggatcgtattatgacgtcttggagatctcctggtgacccgggttctggaaacattacataccggatagaacgtagagggtttccgcagatgatgatgtacaagggtctgactctttggtggcgtactgggtcatggacagggcaaagatggagtggtgtgcctgaaatgacaaacaagtttatcttcaatatctcgtttgtgaataatccagatgaagtatcaatcacttatggagtgttagatgcttcggttacaacaagaatggtgctaaacgagacaggaactctgcaacggtttcgctggaacgggagagataagaaatggatcgggttctggtcagctcccgaagataagtgtgacatctacaaccactgtggctttaacggttactgtgattccaccagtacagagaagtttgagtgctcttgcttaccggggtacgagcctaagacacctcgagattggttcttgagagatgcttcggatgggtgcacgaggataaaagcagattcgatatgtaatgggaaagaagggtttgcaaagttgaagcgagtgaagattcccaatacatcagctgttaatgtggatatgaacataacactgaaggaatgtgaacagaggtgcttgaagaactgctcatgtgttgcttatgcgagtgcttaccacgagagtcaagatggagctaaagggtgcttgacatggcacggcaatatgttggatactaggacatacttgagctcaggacaggatttctatttacgcgtagataagtcagacgcggtggaatggaaatggcgcatcggggaagaagagacttgttttaattctcatcagtttgattgcagtcgtgatgttactactgatcagttttcactgttatttaaggaagcgaagacaacgaacacgcttagaaaagctccatcaagcttcgctccgagctcttttgatcttgaagactcattcatacttgaagagcttgaggacaaatcaagaagccgggagttgcctctctttgagcttagcacgattgctacagcaacgaataattttgcttttcaaaacaagcttggagcaggtggttttggacctgtttataaaggtgtgttacaaaatggtatggaaatagcagtgaagaggttgtcaaaaagctcaggtcaaggaatggaagagttcaagaacgaggtcaagttgatatcgaagctgcagcatcgaaatctcgtgaggatcttaggatgttgtgttgaatttgaagagaagatgttggtatacgagtatttaccaaacaagagcctagactatttcatattccatgaagagcaaagagcagagttggattggccaaaaagaatggggataatccgcgggattggtcgtggaatcttataccttcatcaagattcaaggctgaggatcatccacagagaccttaaggccagcaatgtacttcttgacaatgaaatgataccgaagattgcggatttcggcctggctagaatcttcggaggcaaccaaatcgaaggaagcacaaatcgagtcgtcggaacatatggatacatgtcaccagagtatgcaatggacggccagttctctattaaatccgatgtatacagctttggagtattgatcttagagatcataaccggaaagagaaacagtgctttttatgaggaatctttgaatctagtcaaacatatttgggatcgatgggaaaatggtgaagctatagagatcatagacaaattaatgggtgaagagacgtatgatgagggcgaagtaatgaagtgcttacacattgggttactttgcgtgcaagaaaactcttcagacagaccagacatgtcctctgttgtcttcatgttaggtcataacgccattgatcttccatctccgaagcatcctgcatttacggcgggaaggaggagaaacaccaaaactggcggcagctcagataattggcccagcggagaaaccagcagtactattaacgacgttactctcaccgatgttcaaggtcgttaa

SEQ ID NO: 30767 - protein, 840 aa, Arabidopsis thaliana
  misc_feature (1)..(840): Ceres Seq. ID no. 4972162
MKFFFIFFIFLFSFLIQSCYSDNTILRSQSLKDGDVIYSEGKRFAFGFFSLGNSKLRYVGIWYAQVSEQTIVWVANRDHPINDTSGLIKFSTRGNLCVYASGNGTEPIWSTDVIDMIQEPALVAKLSDLGNLVLLDPVTGKSFWESFNHPTNTLLPFMKFGFTRQSGVDRIMTSWRSPGDPGSGNITYRIERRGFPQMMMYKGLTLWWRTGSWTGQRWSGVPEMTNKFIFNISFVNNPDEVSITYGVLDASVTTRMVLNETGTLQRFRWNGRDKKWIGFWSAPEDKCDIYNHCGFNGYCDSTSTEKFECSCLPGYEPKTPRDWFLRDASDGCTRIKADSICNGKEGFAKLKRVKIPNTSAVNVDMNITLKECEQRCLKNCSCVAYASAYHESQDGAKGCLTWHGNMLDTRTYLSSGQDFYLRVDKSDAVEWKWRIGEEETCFNSHQFDCSRDVTTDQFSLLFKEAKTTNTLRKAPSSFAPSSFDLEDSFILEELEDKSRSRELPLFELSTIATATNNFAFQNKLGAGGFGPVYKGVLQNGMEIAVKRLSKSSGQGMEEFKNEVKLISKLQHRNLVRILGCCVEFEEKMLVYEYLPNKSLDYFIFHEEQRAELDWPKRMGIIRGIGRGILYLHQDSRLRIIHRDLKASNVLLDNEMIPKIADFGLARIFGGNQIEGSTNRVVGTYGYMSPEYAMDGQFSIKSDVYSFGVLILEIITGKRNSAFYEESLNLVKHIWDRWENGEAIEIIDKLMGEETYDEGEVMKCLHIGLLCVQENSSDRPDMSSVVFMLGHNAIDLPSPKHPAFTAGRRRNTKTGGSSDNWPSGETSSTINDVTLTDVQGR

SEQ ID NO: 30768 - protein, 725 aa, Arabidopsis thaliana
  misc_feature (1)..(725): Ceres Seq. ID no. 4972163
MIQEPALVAKLSDLGNLVLLDPVTGKSFWESFNHPTNTLLPFMKFGFTRQSGVDRIMTSWRSPGDPGSGNITYRIERRGFPQMMMYKGLTLWWRTGSWTGQRWSGVPEMTNKFIFNISFVNNPDEVSITYGVLDASVTTRMVLNETGTLQRFRWNGRDKKWIGFWSAPEDKCDIYNHCGFNGYCDSTSTEKFECSCLPGYEPKTPRDWFLRDASDGCTRIKADSICNGKEGFAKLKRVKIPNTSAVNVDMNITLKECEQRCLKNCSCVAYASAYHESQDGAKGCLTWHGNMLDTRTYLSSGQDFYLRVDKSDAVEWKWRIGEEETCFNSHQFDCSRDVTTDQFSLLFKEAKTTNTLRKAPSSFAPSSFDLEDSFILEELEDKSRSRELPLFELSTIATATNNFAFQNKLGAGGFGPVYKGVLQNGMEIAVKRLSKSSGQGMEEFKNEVKLISKLQHRNLVRILGCCVEFEEKMLVYEYLPNKSLDYFIFHEEQRAELDWPKRMGIIRGIGRGILYLHQDSRLRIIHRDLKASNVLLDNEMIPKIADFGLARIFGGNQIEGSTNRVVGTYGYMSPEYAMDGQFSIKSDVYSFGVLILEIITGKRNSAFYEESLNLVKHIWDRWENGEAIEIIDKLMGEETYDEGEVMKCLHIGLLCVQENSSDRPDMSSVVFMLGHNAIDLPSPKHPAFTAGRRRNTKTGGSSDNWPSGETSSTINDVTLTDVQGR

SEQ ID NO: 30769 - protein, 683 aa, Arabidopsis thaliana
  misc_feature (1)..(683): Ceres Seq. ID no. 4972164
MKFGFTRQSGVDRIMTSWRSPGDPGSGNITYRIERRGFPQMMMYKGLTLWWRTGSWTGQRWSGVPEMTNKFIFNISFVNNPDEVSITYGVLDASVTTRMVLNETGTLQRFRWNGRDKKWIGFWSAPEDKCDIYNHCGFNGYCDSTSTEKFECSCLPGYEPKTPRDWFLRDASDGCTRIKADSICNGKEGFAKLKRVKIPNTSAVNVDMNITLKECEQRCLKNCSCVAYASAYHESQDGAKGCLTWHGNMLDTRTYLSSGQDFYLRVDKSDAVEWKWRIGEEETCFNSHQFDCSRDVTTDQFSLLFKEAKTTNTLRKAPSSFAPSSFDLEDSFILEELEDKSRSRELPLFELSTIATATNNFAFQNKLGAGGFGPVYKGVLQNGMEIAVKRLSKSSGQGMEEFKNEVKLISKLQHRNLVRILGCCVEFEEKMLVYEYLPNKSLDYFIFHEEQRAELDWPKRMGIIRGIGRGILYLHQDSRLRIIHRDLKASNVLLDNEMIPKIADFGLARIFGGNQIEGSTNRVVGTYGYMSPEYAMDGQFSIKSDVYSFGVLILEIITGKRNSAFYEESLNLVKHIWDRWENGEAIEIIDKLMGEETYDEGEVMKCLHIGLLCVQENSSDRPDMSSVVFMLGHNAIDLPSPKHPAFTAGRRRNTKTGGSSDNWPSGETSSTINDVTLTDVQGR

SEQ ID NO: 30770 - DNA, 1704 bp, Arabidopsis thaliana
  misc_feature (1)..(1704): Ceres Seq. ID no. 4972268
atgggtaattgtatcgcctgcgtcaagtttgacccagacaactcaaaaccaaaccagaagaagaaacctccacggggacggcaacgaaacccatacgacgatcccgatggtttaagaactcacgcaccgttacgtgtgattcctatgagccatcaatctcagatcagcgacaagtacatcttaggacgagaactcggtcgcggcgaattcggaatcacgtatctttgtacagatagagagactcgtgaagctttagcttgcaaatcaatctccaagagaaagctccgaaccgccgtcgatgtggaagacgtccgtcgtgaagtcacgatcatgtcaactttaccggaacacccaaacgttgtgaaacttaaagcgacttatgaggataacgagaacgtgcatcttgtgatggagctttgtgaaggaggtgagctttttgatcggattgttgccagaggacattatacagagcgtgcggcggctaccgtcgcgagaacgatcgcggaggttgtgaggatgtgtcatgtcaatggtgttatgcatagagatttgaagcctgagaatttcttgtttgctaacaagaaggagaattctgcacttaaggctattgattttggtttatctgttctctttaaacctggagagaggtttacagagattgttggaagtccttattatatggctccagaagtgttgaagagaaattatggaccagaggttgatgtgtggagtgctggagttatcctctacatcttgctttgtggtgttcctccgttttgggcagagactgaacaaggtgtggctcttgccatcttgaggggagttcttgattttaagagagatccttggtcgcagatatcagagagcgcaaagagccttgtgaagcagatgttggaacctgattcaactaagcgtttgactgctcagcaagttcttggtaataatgctgttcttgtgtcacttatggagaaaatggcatttaaagtgaaaacggtttctgtttccttctttgcagatcacccttggatacagaatgcaaagaaagctccaaatgttcctttaggggatattgttaggtcaaggttgaagcaattctccatgatgaatagattgaaaaagaaagctctgcgtgttatcgccgaacacttgtctattcaagaagttgaagtgatcagaaacatgtttacgctgatggatgatgacaacgacggtaaaatatcatatctagaactcagagctggactccggaaagtcggttcacaactgggtgaaccagagatcaaattgttaatggaagtggcggatgttaatggaaatggatgcttggactatggagagtttgtagcagtgataattcacttgcagaagatggagaatgatgagcatttcagacaagcttttatgttctttgacaaagatggaagtggatacatcgaatcagaagaactacgtgaagctttaaccgacgagttaggtgaaccagacaacagtgttataatcgatataatgcgtgaagtcgacactgacaaggacggaaaaataaactatgatgagtttgtggtgatgatgaaagctggaactgattggagaaaggcatcaagacaatactcaagagagaggtttaaaagcttaagcttaaacttgatgaaagacgggtcaatgcatctacacgacgcactcactggacaatctattgcagtttga

SEQ ID NO: 30771 - protein, 567 aa, Arabidopsis thaliana
  misc_feature (1)..(567): Ceres Seq. ID no. 4972269
MGNCIACVKFDPDNSKPNQKKKPPRGRQRNPYDDPDGLRTHAPLRVIPMSHQSQISDKYILGRELGRGEFGITYLCTDRETREALACKSISKRKLRTAVDVEDVRREVTIMSTLPEHPNVVKLKATYEDNENVHLVMELCEGGELFDRIVARGHYTERAAATVARTIAEVVRMCHVNGVMHRDLKPENFLFANKKENSALKAIDFGLSVLFKPGERFTEIVGSPYYMAPEVLKRNYGPEVDVWSAGVILYILLCGVPPFWAETEQGVALAILRGVLDFKRDPWSQISESAKSLVKQMLEPDSTKRLTAQQVLGNNAVLVSLMEKMAFKVKTVSVSFFADHPWIQNAKKAPNVPLGDIVRSRLKQFSMMNRLKKKALRVIAEHLSIQEVEVIRNMFTLMDDDNDGKISYLELRAGLRKVGSQLGEPEIKLLMEVADVNGNGCLDYGEFVAVIIHLQKMENDEHFRQAFMFFDKDGSGYIESEELREALTDELGEPDNSVIIDIMREVDTDKDGKINYDEFVVMMKAGTDWRKASRQYSRERFKSLSLNLMKDGSMHLHDALTGQSIAV

SEQ ID NO: 30772 - protein, 519 aa, Arabidopsis thaliana
  misc_feature (1)..(519): Ceres Seq. ID no. 4972270
MSHQSQISDKYILGRELGRGEFGITYLCTDRETREALACKSISKRKLRTAVDVEDVRREVTIMSTLPEHPNVVKLKATYEDNENVHLVMELCEGGELFDRIVARGHYTERAAATVARTIAEVVRMCHVNGVMHRDLKPENFLFANKKENSALKAIDFGLSVLFKPGERFTEIVGSPYYMAPEVLKRNYGPEVDVWSAGVILYILLCGVPPFWAETEQGVALAILRGVLDFKRDPWSQISESAKSLVKQMLEPDSTKRLTAQQVLGNNAVLVSLMEKMAFKVKTVSVSFFADHPWIQNAKKAPNVPLGDIVRSRLKQFSMMNRLKKKALRVIAEHLSIQEVEVIRNMFTLMDDDNDGKISYLELRAGLRKVGSQLGEPEIKLLMEVADVNGNGCLDYGEFVAVIIHLQKMENDEHFRQAFMFFDKDGSGYIESEELREALTDELGEPDNSVIIDIMREVDTDKDGKINYDEFVVMMKAGTDWRKASRQYSRERFKSLSLNLMKDGSMHLHDALTGQSIAV

SEQ ID NO: 30773 - protein, 457 aa, Arabidopsis thaliana
  misc_feature (1)..(457): Ceres Seq. ID no. 4972271
MSTLPEHPNVVKLKATYEDNENVHLVMELCEGGELFDRIVARGHYTERAAATVARTIAEVVRMCHVNGVMHRDLKPENFLFANKKENSALKAIDFGLSVLFKPGERFTEIVGSPYYMAPEVLKRNYGPEVDVWSAGVILYILLCGVPPFWAETEQGVALAILRGVLDFKRDPWSQISESAKSLVKQMLEPDSTKRLTAQQVLGNNAVLVSLMEKMAFKVKTVSVSFFADHPWIQNAKKAPNVPLGDIVRSRLKQFSMMNRLKKKALRVIAEHLSIQEVEVIRNMFTLMDDDNDGKISYLELRAGLRKVGSQLGEPEIKLLMEVADVNGNGCLDYGEFVAVIIHLQKMENDEHFRQAFMFFDKDGSGYIESEELREALTDELGEPDNSVIIDIMREVDTDKDGKINYDEFVVMMKAGTDWRKASRQYSRERFKSLSLNLMKDGSMHLHDALTGQSIAV

SEQ ID NO: 30774 - DNA, 1653 bp, Arabidopsis thaliana
  misc_feature (1)..(1653): Ceres Seq. ID no. 4972355
atggcgtatcctgagagatctctcattgttgatcctagaagtggtttctgcaaatcaaactctacattctatagcaagcgccaaccattaagtctcccgccaaatctttcgcgtgacgtcaccacattcatctcctctcagccacaccgtggcaaaaccgcctttatcgacgctgccacaggccagtgcttaaccttctccgatctctggagagccgtcgatcgcgtcgccgactgtctatatcatgaagtcggaatacgaagaggcgacgtcgtcctcatcctttctccaaactccatcttcattcccgttgtttgcctctccgtcatgtctctcggcgccgttttcaccaccgccaacactctcaatacttccggtgaaatctccaaacagattgccgacagtaatccaactctcgtcttcactacgcgccagctggcaccaaaactccccgtcgctatctccgtcgttctcaccgacgacgaagtttaccaggagctcactagcgcaatcagagtcgttgggattttaagcgagatggtgaagaaagaaccgagtgggcaacgagtcagggaccgagtcaaccaggacgacacggcgatgatgctttactcgtcgggaaccacgggaccgagcaaaggagtgatctcgtctcaccggaatttaacagctcacgtggctagattcatatcggataatttgaaacgagacgatattttcatctgtaccgtcccgatgttccacacctacggtttattgaccttcgctatgggcaccgtagcattgggttcaacggtggtgatcctccggagatttcagctccacgatatgatggatgcggtggagaagcaccgagccacagctctggctttggcgccacctgttttggtagctatgattaacgacgcagatctgatcaaggctaagtacgatctgagctcactgaaaacggtgaggtgtggtggagcgccgttgagcaaggaggtgacggaagggtttctagagaaatatccgacggttgatatactgcaggggtatgctttgacggaatccaacggcggaggggctttcacgaattcagcggaggagagccggagatatggcacggcggggacgttgacgtctgatgtggaggcgaggatcgtggatccgaatacgggtcggttcatgggaattaaccaaacgggagagctctggctcaagggcccttctatttctaaaggttattttaaaaaccaagaagctacaaatgaaaccattaatttagagggatggctaaaaactggagatctttgctacatcgatgaagatgggtttctttttgttgtggatcgattgaaagaactgataaaatacaaaggctatcaggtgcctccagctgaactagaagctcttctgattactcatccggacattctcgatgccgccgttattccttttccggacaaagaagcaggacaatatccaatggcttacgtggttcgaaaacacgagagcaatctctctgagaaacaagtcattgacttcatctctaagcaggtagcaccatataagaagataagaaaggtctcatttataaactccataccaaaaactgcatccggtaagacgcttcgcaaggatctaatcaaattggctacttctaaactttga

SEQ ID NO: 30775 - protein, 550 aa, Arabidopsis thaliana
  misc_feature (1)..(550): Ceres Seq. ID no. 4972356
MAYPERSLIVDPRSGFCKSNSTFYSKRQPLSLPPNLSRDVTTFISSQPHRGKTAFIDAATGQCLTFSDLWRAVDRVADCLYHEVGIRRGDVVLILSPNSIFIPVVCLSVMSLGAVFTTANTLNTSGEISKQIADSNPTLVFTTRQLAPKLPVAISVVLTDDEVYQELTSAIRVVGILSEMVKKEPSGQRVRDRVNQDDTAMMLYSSGTTGPSKGVISSHRNLTAHVARFISDNLKRDDIFICTVPMFHTYGLLTFAMGTVALGSTVVILRRFQLHDMMDAVEKHRATALALAPPVLVAMINDADLIKAKYDLSSLKTVRCGGAPLSKEVTEGFLEKYPTVDILQGYALTESNGGGAFTNSAEESRRYGTAGTLTSDVEARIVDPNTGRFMGINQTGELWLKGPSISKGYFKNQEATNETINLEGWLKTGDLCYIDEDGFLFVVDRLKELIKYKGYQVPPAELEALLITHPDILDAAVIPFPDKEAGQYPMAYVVRKHESNLSEKQVIDFISKQVAPYKKIRKVSFINSIPKTASGKTLRKDLIKLATSKL

SEQ ID NO: 30776 - protein, 441 aa, Arabidopsis thaliana
  misc_feature (1)..(441): Ceres Seq. ID no. 4972357
MSLGAVFTTANTLNTSGEISKQIADSNPTLVFTTRQLAPKLPVAISVVLTDDEVYQELTSAIRVVGILSEMVKKEPSGQRVRDRVNQDDTAMMLYSSGTTGPSKGVISSHRNLTAHVARFISDNLKRDDIFICTVPMFHTYGLLTFAMGTVALGSTVVILRRFQLHDMMDAVEKHRATALALAPPVLVAMINDADLIKAKYDLSSLKTVRCGGAPLSKEVTEGFLEKYPTVDILQGYALTESNGGGAFTNSAEESRRYGTAGTLTSDVEARIVDPNTGRFMGINQTGELWLKGPSISKGYFKNQEATNETINLEGWLKTGDLCYIDEDGFLFVVDRLKELIKYKGYQVPPAELEALLITHPDILDAAVIPFPDKEAGQYPMAYVVRKHESNLSEKQVIDFISKQVAPYKKIRKVSFINSIPKTASGKTLRKDLIKLATSKL

SEQ ID NO: 30777 - protein, 371 aa, Arabidopsis thaliana
  misc_feature (1)..(371): Ceres Seq. ID no. 4972358
MVKKEPSGQRVRDRVNQDDTAMMLYSSGTTGPSKGVISSHRNLTAHVARFISDNLKRDDIFICTVPMFHTYGLLTFAMGTVALGSTVVILRRFQLHDMMDAVEKHRATALALAPPVLVAMINDADLIKAKYDLSSLKTVRCGGAPLSKEVTEGFLEKYPTVDILQGYALTESNGGGAFTNSAEESRRYGTAGTLTSDVEARIVDPNTGRFMGINQTGELWLKGPSISKGYFKNQEATNETINLEGWLKTGDLCYIDEDGFLFVVDRLKELIKYKGYQVPPAELEALLITHPDILDAAVIPFPDKEAGQYPMAYVVRKHESNLSEKQVIDFISKQVAPYKKIRKVSFINSIPKTASGKTLRKDLIKLATSKL

SEQ ID NO: 30778 - DNA, 1593 bp, Arabidopsis thaliana
  misc_feature (1)..(1593): Ceres Seq. ID no. 4972359
atggcgtatcctgagagagatctcattgttgatcctagaagcggtttctgcaaatcaaactctacattctatagcaagcgaaacccattatgtctcccgccaaatccgtcgcttgacgtcacaactttcatatcatctcaaccgcaacgcggcaccaccgccttcatcgacgcctccacgggccaccgcttaaccttctccgatctctggagagtcgttgatcgcgtcgctgactgtctatatcatgaagtcggaatacgaagaggcgacgtcgtcctcatcctctctccaaattcaatctacattcccgtcgtttgcctctccgtcatgtctctcggcgccgtcgtcaccaccgccaacactctcaacacctccggcgaaatctccaaacagatcgcccaaagtaatccaactctcgtcttcaccacgagccagctggcacccaaactcgcagccgcaatctccgtcgtcctcaccgacgaagaagacgagaagcgagtggagctcactagtggagtcagagtcgttgggattttgagcgagatgatgaagaaagaaacgagtggtcaacgagtcagagaccgagtcaaccaggacgacacggcgatgatgctttactcgtcgggaaccacagggacgagcaaaggagtgatctcgtctcaccggaatttaacagcttacgttgcgaaatacatcgacgataaatggaaacgagacgagatattcgtatgtaccgtgccgatgttccactccttcgggttattggcgttcgcaatgggctccgtagcatcgggttcaacggtggtgattctccggagattcgggctcgacgatatgatgcaagcggtggagaagtacaaagccacgattctgagtttggctccaccggttttggtagctatgattaacggtgcagatcagctcaaggccaagtacgatttgacctccctgagaaaggttaggtgtggtggagcaccgttgagcaaggaggttatggatagcttcctagagaaatatccaacggttaatatttttcaaggatatgcgttgactgagtcgcacggttcaggagcttcgacggaatctgtggaggagagtctgaaatacggtgcggttgggttgttgtcgtccggtattgaagcgaggattgtggatccggatacgggtcgggtcatgggtgtgaaccaacccggtgagctctggctcaagggtccttctatttctaaagatctctgctatatcgatgaagatgggtttctatttgttgtggatcgactgaaagaattgatcaaatacaaaggctatcaggtgcctccagctgaactagaggctcttttgatcgctcatccacacattcttgatgctgctgttattccgtttccggatagagaagccggacaatatccgatggcttatgtagcccgaaagcccgagagcaatctctccgaaaaagaagttattgacttcatctctaatcaggtggcaccgtataagaaaataagaaaggttgcattcataagttccataccaaagactgcatccggcaaaacacttcgcaaagatctaatcaaactatcaacttccaaactttga

SEQ ID NO: 30779 - protein, 530 aa, Arabidopsis thaliana
  misc_feature (1)..(530): Ceres Seq. ID no. 4972360
MAYPERDLIVDPRSGFCKSNSTFYSKRNPLCLPPNPSLDVTTFISSQPQRGTTAFIDASTGHRLTFSDLWRVVDRVADCLYHEVGIRRGDVVLILSPNSIYIPVVCLSVMSLGAVVTTANTLNTSGEISKQIAQSNPTLVFTTSQLAPKLAAAISVVLTDEEDEKRVELTSGVRVVGILSEMMKKETSGQRVRDRVNQDDTAMMLYSSGTTGTSKGVISSHRNLTAYVAKYIDDKWKRDEIFVCTVPMFHSFGLLAFAMGSVASGSTVVILRRFGLDDMMQAVEKYKATILSLAPPVLVAMINGADQLKAKYDLTSLRKVRCGGAPLSKEVMDSFLEKYPTVNIFQGYALTESHGSGASTESVEESLKYGAVGLLSSGIEARIVDPDTGRVMGVNQPGELWLKGPSISKDLCYIDEDGFLFVVDRLKELIKYKGYQVPPAELEALLIAHPHILDAAVIPFPDREAGQYPMAYVARKPESNLSEKEVIDFISNQVAPYKKIRKVAFISSIPKTASGKTLRKDLIKLSTSKL

SEQ ID NO: 30780 - protein, 421 aa, Arabidopsis thaliana
  misc_feature (1)..(421): Ceres Seq. ID no. 4972361
MSLGAVVTTANTLNTSGEISKQIAQSNPTLVFTTSQLAPKLAAAISVVLTDEEDEKRVELTSGVRVVGILSEMMKKETSGQRVRDRVNQDDTAMMLYSSGTTGTSKGVISSHRNLTAYVAKYIDDKWKRDEIFVCTVPMFHSFGLLAFAMGSVASGSTVVILRRFGLDDMMQAVEKYKATILSLAPPVLVAMINGADQLKAKYDLTSLRKVRCGGAPLSKEVMDSFLEKYPTVNIFQGYALTESHGSGASTESVEESLKYGAVGLLSSGIEARIVDPDTGRVMGVNQPGELWLKGPSISKDLCYIDEDGFLFVVDRLKELIKYKGYQVPPAELEALLIAHPHILDAAVIPFPDREAGQYPMAYVARKPESNLSEKEVIDFISNQVAPYKKIRKVAFISSIPKTASGKTLRKDLIKLSTSKL

SEQ ID NO: 30781 - protein, 349 aa, Arabidopsis thaliana
  misc_feature (1)..(349): Ceres Seq. ID no. 4972362
MMKKETSGQRVRDRVNQDDTAMMLYSSGTTGTSKGVISSHRNLTAYVAKYIDDKWKRDEIFVCTVPMFHSFGLLAFAMGSVASGSTVVILRRFGLDDMMQAVEKYKATILSLAPPVLVAMINGADQLKAKYDLTSLRKVRCGGAPLSKEVMDSFLEKYPTVNIFQGYALTESHGSGASTESVEESLKYGAVGLLSSGIEARIVDPDTGRVMGVNQPGELWLKGPSISKDLCYIDEDGFLFVVDRLKELIKYKGYQVPPAELEALLIAHPHILDAAVIPFPDREAGQYPMAYVARKPESNLSEKEVIDFISNQVAPYKKIRKVAFISSIPKTASGKTLRKDLIKLSTSKL

SEQ ID NO: 30782 - DNA, 5376 bp, Arabidopsis thaliana
  misc_feature (1)..(5376): Ceres Seq. ID no. 4972407
atggcaggggccaacgtagaaacccccccgctgccgggttccagctcgcaaactcccctagccgagcagaacccgccagttcgtcggaatacggaccaggaggaacgacgcgttactgacggaacctatgtcgggcccggaggactactccagaacatcctcgaccacttaagtcgacaggaggccagaacggaagcacgattcgccaccctagccgctgcacaagcacattcgatggacgaaatcaatcgtctacaaaccagccgaacttcagtccataggccagtgtttgaaagcatcgagcatcgtcctcaagtccgtatcgccggtcccaccaacgatgtcgcaagagacgcagaagtcgccgacctcagacgcactatatctgaaatgagctccaagatccaccgcgcaacaagcacggcgcccgagctcgaccgcgttctggaggagactcagcaaaccccctttactcgacgaataactaacgtctcgatcagaggagcccaaaaaatcaagctggaaagttacaacggtagaaacgacccgaaagagttcctaacatcgttcaacgtcgccataaaccgggccgagctcacgatcgacaactttgatgccgggaggtgtcaaatattcatcgaacatctgaccggaccagctcacaactggttttcacgtctaaaacccaattccatcgacagcttccatcagctcacctcgtccttcctcaaacattacgcgcctctaattgaaaatcaaacatcgaacgccgacctatggtccatctctcagggagctaaagaatcacttcgatctttcgttgatcgtttcaaactggtagtcacaaatatcactgtgcccgacgaagctgcaatagttgcgctacgaaatgcagtatggtacgactccagattccgggatgacataacattacacgctccgagcaccctagaggacgccctgcatcgggcatccaggttcatcgaacttgaagaggagaagctcattctggcaagaaaacacaactcgaccaaaacccccgcatgtaaagacgcagtggttattaaggtcggacctgacgactcaaacgagccgcgacagcacctcgatcgcaatcccagtgcgggccgaaaaccaacttcattcttagtaagcaccgaaactcccgacgctaaaccttggaacaaatatattcgcgacgccgattccccagcagcagggccgatgtactgcgaataccacaaaagcagagcgcattcgaccgagaattgccgtttcctgcagggcctcctgatggccaagtataagagcggcggaataacaatcgaatgcgaccgacccccgataaataacaaaaatcaacgacgtaacgaaactacggcccgacaatatttgaacgatcaaaccaaaccaccgaccccagcagaacaagggataattacctcggctgacgatccggcagccaaaagacagcgaaacggaaaggctatcgccgcggaaccagtcgtggttagacaagttcacgtgataatggggggactccagaattgcagcgattcagtgcgctcaattaagcaataccgaaagaaagccgagatggtggtagcttggccctcatccacaagcacgacaagaaatccgaaccaaagcgctccgatctcattcaccgacgtcgacctagaaggtttggataccccgcacaacgacccgctcgttgtcgagttgatcataagcgatagcagagtaacaagggttctgattgacaccgggagctcggtagacttgattttcaaagatgttttaaccgcgatgaacataacggatcgtcagattaagccagtctcaaaacctctcgccggtttcgatggagatttcgtcatgacaataggcacgattaaactaccaatctttgtcggaggattaatcgcctgggtgaagttcgtcgtgattggcaaaccagcggtctacaacgttatcctcggcaccccctggattcaccaaatgcaagccatcccgtccacttatcatcagtgcgttaagttcccaacgcacaacggcatcttcactctccgagcgccgaaggaagccaagaccccgagtaggtcttacgaggagtccgagttgtgccgcaccgagatggtaaacatagatgagtccgacccgacaaggtgcgttggtgttggggcagagatttcaccatcaattcggctcgaactcattgcactacttaaacgaaattccaaaaccttcgcatggagcatcgaagatatgaagggaatcgacccggcaatcaccgcacacgaacttaacgtagatccaactttcaagccggtaaaacagaaacgaaggaaactcggcccggagcgtgcacgagcagtaaatgaagaggtggaaaaactccttaaggcggggcaaatcatcgaggtgaaataccctgaatggctagcaaatcccgtcgtcgtcaaaaagaagaacggaaagtggcgcgtctgtgtcgattataccgacctcaacaaagcctgcccaaaggatagttatccactaccgcacatcgaccggctcgtcgaagcaacttcagggaatggtctcctctccttcatggacgctttctcaggctacaaccagatcctgatgcacaaggacgatcaagaaaagacatcattcgttaccgaccgcggcacgtattgttacaaggtgatgtccttcgggcttaaaaacgccggggcaacataccagcggttcgtcaataaaatgttagccgaccagatcgggagaaccgtcgaggtgtacatcgacgacatgctcgtaaagtcattgaagcccgaagaccatgtcgagcatctgagcaaatgcttcgacgtcctcaatacatacggaatgaagctaaatccaaccaagtgcaccttcggagtaacatcgggagagtttcttgggtatgtcgtcactaaaagaggaatagaagcaaacccaaaacaaattcgcgctatcctcgaactaccatcaccgcggaacgcccgagaagtgcaaaggctcacaggacgaattgccgccctcaatcgattcatctcacgatcaacggacaagtgcctaccattctacaacctgctcaagcgccgggcccaattcgattgggataaggatagcgaggaagctttcgaaaagctaaaggactacctttccacaccaccgatcctggtaaagcccgaagtcggcgaaactttgtatctctatatcgcagtatcggatcacgcagtaagtagcgtactagtacgagaagaccgaggcgagcaaaggccgatcttctatacgagcaaatcactagtcgaagccgaaacacgatacccggtaatagaaaaagccgcgctggcagtcgtcacgtcggcacgaaaactgcgaccatacttccaatcacatacaatagccgtcctgaccgatcaacctctaagagtcgccctacacagcccaagtcagtcaggacggatgacaaagtgggctgtggagttaagcgaatacgacatcgattttcgaccacgccccgcaatgaaatcacaggtcctggctgacttcctcatcgaactaccgttacagtcagcagaacgtgcggtcagtggaaaccgcggtgaagagtggagtctgtacgtggacggttcatcttcagctcgcggatcggggataggaattcgcctcgtctccccaaccgccgaggtgctagaacagtcctttcgtctccgattcgtcgcaacaaacaacgtggccgagtacgaggtcctaattgccgggctccgcctcgccgcggggatgcagataaccacgatccacgcattcaccgactcgcaactcatcgccgggcagctcagtggggagtacgaagcaaagaacgagaaaatggacgcctatctcaagatcgtccaactgatgacgaaagatttcgaaaactttaaactctcaaaaattccccgaggtgacaacgcaccggcagatgcgctcgccgccttagcgttaacttccgactccgacttgcgacgaatcatcccggtggaaagtattgataaaccaagtatcgattcgaccgacgccgtggaaatcgtaaataccatccgaagctcgaacgcccccgacccagcggatccgaccgattggcgagtagaaattcgcgattacctctccgatggaacattgccaagtgataagtggacagcgcggcgtctacgaatcaaagcggccaagtataccctcatgaaggagcatctccttaaggtcagcgcgttcggagcaatgctgaactgcctccacggaaccgagatcaatgaaataatgaaggaaactcacgaaggagcagccggaaaccactccggaggacgagctctcgcacttaagctcaaaaagttaggattttactggccaacaatgatttctgactgcaagaccttcacggccaagtgtgaacaatgtcaaagacacgcgcccaccatccatcaacccacggaactgctacgagccggagtcgcaccatacccctttatgcgatgggcaatggacatcgtcggcccgatgcctgcttcacgacagaaacggttcatccttgtaatgaccgattacttcacgaagtgggtcgaagccgaatcatacgcgacgatccgagccaatgatgtccaaaactttgtctggaaattcatcatctgccggcacggtctcccttatgaaatcataaccgataacggttcgcagttcatctcgctgtctttcgaaaatttctgcgccagctggaaaatacgactcaataagtccacgccacggtacccacaggggaatggccaggccgaggccacaaacaagacaattctctccggtctgaagaaaagactagacgaaaagaaaggagcttgggcagacgagctggatggtgtcctatggtcctaccgaacgacgccccgaagtgcaacggatcaaactccattcgcacacgcatacggaatggaggccatggcccctgccgaggtaggatactccagtcttcgaagatccatgatggtgaaaaaccccgaactcaacgacagaatgatgctcgatcgactcgacgacctggaagaaatacggaacgccgccctctgccgcattcagaactaccaactcgccgccgccaaacactataaccaaaaggtccacaatcgccacttcgacgtcggagatctcgttctccggaaagttttcgaaaatacagccgagatcaacgccggcaaactgggagcgaactgggaaggatcataccaagtatcgaaaatcgtccgacccggagactacgaactcctaacaatgagcggcaccgcggtgcctcgcacctggaactcaatgcacctgaagagatactattactaa

SEQ ID NO: 30783 - protein, 1791 aa, Arabidopsis thaliana
  misc_feature (1)..(1791): Ceres Seq. ID no. 4972408
MAGANVETPPLPGSSSQTPLAEQNPPVRRNTDQEERRVTDGTYVGPGGLLQNILDHLSRQEARTEARFATLAAAQAHSMDEINRLQTSRTSVHRPVFESIEHRPQVRIAGPTNDVARDAEVADLRRTISEMSSKIHRATSTAPELDRVLEETQQTPFTRRITNVSIRGAQKIKLESYNGRNDPKEFLTSFNVAINRAELTIDNFDAGRCQIFIEHLTGPAHNWFSRLKPNSIDSFHQLTSSFLKHYAPLIENQTSNADLWSISQGAKESLRSFVDRFKLVVTNITVPDEAAIVALRNAVWYDSRFRDDITLHAPSTLEDALHRASRFIELEEEKLILARKHNSTKTPACKDAVVIKVGPDDSNEPRQHLDRNPSAGRKPTSFLVSTETPDAKPWNKYIRDADSPAAGPMYCEYHKSRAHSTENCRFLQGLLMAKYKSGGITIECDRPPINNKNQRRNETTARQYLNDQTKPPTPAEQGIITSADDPAAKRQRNGKAIAAEPVVVRQVHVIMGGLQNCSDSVRSIKQYRKKAEMVVAWPSSTSTTRNPNQSAPISFTDVDLEGLDTPHNDPLVVELIISDSRVTRVLIDTGSSVDLIFKDVLTAMNITDRQIKPVSKPLAGFDGDFVMTIGTIKLPIFVGGLIAWVKFVVIGKPAVYNVILGTPWIHQMQAIPSTYHQCVKFPTHNGIFTLRAPKEAKTPSRSYEESELCRTEMVNIDESDPTRCVGVGAEISPSIRLELIALLKRNSKTFAWSIEDMKGIDPAITAHELNVDPTFKPVKQKRRKLGPERARAVNEEVEKLLKAGQIIEVKYPEWLANPVVVKKKNGKWRVCVDYTDLNKACPKDSYPLPHIDRLVEATSGNGLLSFMDAFSGYNQILMHKDDQEKTSFVTDRGTYCYKVMSFGLKNAGATYQRFVNKMLADQIGRTVEVYIDDMLVKSLKPEDHVEHLSKCFDVLNTYGMKLNPTKCTFGVTSGEFLGYVVTKRGIEANPKQIRAILELPSPRNAREVQRLTGRIAALNRFISRSTDKCLPFYNLLKRRAQFDWDKDSEEAFEKLKDYLSTPPILVKPEVGETLYLYIAVSDHAVSSVLVREDRGEQRPIFYTSKSLVEAETRYPVIEKAALAVVTSARKLRPYFQSHTIAVLTDQPLRVALHSPSQSGRMTKWAVELSEYDIDFRPRPAMKSQVLADFLIELPLQSAERAVSGNRGEEWSLYVDGSSSARGSGIGIRLVSPTAEVLEQSFRLRFVATNNVAEYEVLIAGLRLAAGMQITTIHAFTDSQLIAGQLSGEYEAKNEKMDAYLKIVQLMTKDFENFKLSKIPRGDNAPADALAALALTSDSDLRRIIPVESIDKPSIDSTDAVEIVNTIRSSNAPDPADPTDWRVEIRDYLSDGTLPSDKWTARRLRIKAAKYTLMKEHLLKVSAFGAMLNCLHGTEINEIMKETHEGAAGNHSGGRALALKLKKLGFYWPTMISDCKTFTAKCEQCQRHAPTIHQPTELLRAGVAPYPFMRWAMDIVGPMPASRQKRFILVMTDYFTKWVEAESYATIRANDVQNFVWKFIICRHGLPYEIITDNGSQFISLSFENFCASWKIRLNKSTPRYPQGNGQAEATNKTILSGLKKRLDEKKGAWADELDGVLWSYRTTPRSATDQTPFAHAYGMEAMAPAEVGYSSLRRSMMVKNPELNDRMMLDRLDDLEEIRNAALCRIQNYQLAAAKHYNQKVHNRHFDVGDLVLRKVFENTAEINAGKLGANWEGSYQVSKIVRPGDYELLTMSGTAVPRTWNSMHLKRYYY

SEQ ID NO: 30784 - protein, 1713 aa, Arabidopsis thaliana
  misc_feature (1)..(1713): Ceres Seq. ID no. 4972409
MDEINRLQTSRTSVHRPVFESIEHRPQVRIAGPTNDVARDAEVADLRRTISEMSSKIHRATSTAPELDRVLEETQQTPFTRRITNVSIRGAQKIKLESYNGRNDPKEFLTSFNVAINRAELTIDNFDAGRCQIFIEHLTGPAHNWFSRLKPNSIDSFHQLTSSFLKHYAPLIENQTSNADLWSISQGAKESLRSFVDRFKLVVTNITVPDEAAIVALRNAVWYDSRFRDDITLHAPSTLEDALHRASRFIELEEEKLILARKHNSTKTPACKDAVVIKVGPDDSNEPRQHLDRNPSAGRKPTSFLVSTETPDAKPWNKYIRDADSPAAGPMYCEYHKSRAHSTENCRFLQGLLMAKYKSGGITIECDRPPINNKNQRRNETTARQYLNDQTKPPTPAEQGIITSADDPAAKRQRNGKAIAAEPVVVRQVHVIMGGLQNCSDSVRSIKQYRKKAEMVVAWPSSTSTTRNPNQSAPISFTDVDLEGLDTPHNDPLVVELIISDSRVTRVLIDTGSSVDLIFKDVLTAMNITDRQIKPVSKPLAGFDGDFVMTIGTIKLPIFVGGLIAWVKFVVIGKPAVYNVILGTPWIHQMQAIPSTYHQCVKFPTHNGIFTLRAPKEAKTPSRSYEESELCRTEMVNIDESDPTRCVGVGAEISPSIRLELIALLKRNSKTFAWSIEDMKGIDPAITAHELNVDPTFKPVKQKRRKLGPERARAVNEEVEKLLKAGQIIEVKYPEWLANPVVVKKKNGKWRVCVDYTDLNKACPKDSYPLPHIDRLVEATSGNGLLSFMDAFSGYNQILMHKDDQEKTSFVTDRGTYCYKVMSFGLKNAGATYQRFVNKMLADQIGRTVEVYIDDMLVKSLKPEDHVEHLSKCFDVLNTYGMKLNPTKCTFGVTSGEFLGYVVTKRGIEANPKQIRAILELPSPRNAREVQRLTGRIAALNRFISRSTDKCLPFYNLLKRRAQFDWDKDSEEAFEKLKDYLSTPPILVKPEVGETLYLYIAVSDHAVSSVLVREDRGEQRPIFYTSKSLVEAETRYPVIEKAALAVVTSARKLRPYFQSHTIAVLTDQPLRVALHSPSQSGRMTKWAVELSEYDIDFRPRPAMKSQVLADFLIELPLQSAERAVSGNRGEEWSLYVDGSSSARGSGIGIRLVSPTAEVLEQSFRLRFVATNNVAEYEVLIAGLRLAAGMQITTIHAFTDSQLIAGQLSGEYEAKNEKMDAYLKIVQLMTKDFENFKLSKIPRGDNAPADALAALALTSDSDLRRIIPVESIDKPSIDSTDAVEIVNTIRSSNAPDPADPTDWRVEIRDYLSDGTLPSDKWTARRLRIKAAKYTLMKEHLLKVSAFGAMLNCLHGTEINEIMKETHEGAAGNHSGGRALALKLKKLGFYWPTMISDCKTFTAKCEQCQRHAPTIHQPTELLRAGVAPYPFMRWAMDIVGPMPASRQKRFILVMTDYFTKWVEAESYATIRANDVQNFVWKFIICRHGLPYEIITDNGSQFISLSFENFCASWKIRLNKSTPRYPQGNGQAEATNKTILSGLKKRLDEKKGAWADELDGVLWSYRTTPRSATDQTPFAHAYGMEAMAPAEVGYSSLRRSMMVKNPELNDRMMLDRLDDLEEIRNAALCRIQNYQLAAAKHYNQKVHNRHFDVGDLVLRKVFENTAEINAGKLGANWEGSYQVSKIVRPGDYELLTMSGTAVPRTWNSMHLKRYYY

SEQ ID NO: 30785 - protein, 1661 aa, Arabidopsis thaliana
  misc_feature (1)..(1661): Ceres Seq. ID no. 4972410
MSSKIHRATSTAPELDRVLEETQQTPFTRRITNVSIRGAQKIKLESYNGRNDPKEFLTSFNVAINRAELTIDNFDAGRCQIFIEHLTGPAHNWFSRLKPNSIDSFHQLTSSFLKHYAPLIENQTSNADLWSISQGAKESLRSFVDRFKLVVTNITVPDEAAIVALRNAVWYDSRFRDDITLHAPSTLEDALHRASRFIELEEEKLILARKHNSTKTPACKDAVVIKVGPDDSNEPRQHLDRNPSAGRKPTSFLVSTETPDAKPWNKYIRDADSPAAGPMYCEYHKSRAHSTENCRFLQGLLMAKYKSGGITIECDRPPINNKNQRRNETTARQYLNDQTKPPTPAEQGIITSADDPAAKRQRNGKAIAAEPVVVRQVHVIMGGLQNCSDSVRSIKQYRKKAEMVVAWPSSTSTTRNPNQSAPISFTDVDLEGLDTPHNDPLVVELIISDSRVTRVLIDTGSSVDLIFKDVLTAMNITDRQIKPVSKPLAGFDGDFVMTIGTIKLPIFVGGLIAWVKFVVIGKPAVYNVILGTPWIHQMQAIPSTYHQCVKFPTHNGIFTLRAPKEAKTPSRSYEESELCRTEMVNIDESDPTRCVGVGAEISPSIRLELIALLKRNSKTFAWSIEDMKGIDPAITAHELNVDPTFKPVKQKRRKLGPERARAVNEEVEKLLKAGQIIEVKYPEWLANPVVVKKKNGKWRVCVDYTDLNKACPKDSYPLPHIDRLVEATSGNGLLSFMDAFSGYNQILMHKDDQEKTSFVTDRGTYCYKVMSFGLKNAGATYQRFVNKMLADQIGRTVEVYIDDMLVKSLKPEDHVEHLSKCFDVLNTYGMKLNPTKCTFGVTSGEFLGYVVTKRGIEANPKQIRAILELPSPRNAREVQRLTGRIAALNRFISRSTDKCLPFYNLLKRRAQFDWDKDSEEAFEKLKDYLSTPPILVKPEVGETLYLYIAVSDHAVSSVLVREDRGEQRPIFYTSKSLVEAETRYPVIEKAALAVVTSARKLRPYFQSHTIAVLTDQPLRVALHSPSQSGRMTKWAVELSEYDIDFRPRPAMKSQVLADFLIELPLQSAERAVSGNRGEEWSLYVDGSSSARGSGIGIRLVSPTAEVLEQSFRLRFVATNNVAEYEVLIAGLRLAAGMQITTIHAFTDSQLIAGQLSGEYEAKNEKMDAYLKIVQLMTKDFENFKLSKIPRGDNAPADALAALALTSDSDLRRIIPVESIDKPSIDSTDAVEIVNTIRSSNAPDPADPTDWRVEIRDYLSDGTLPSDKWTARRLRIKAAKYTLMKEHLLKVSAFGAMLNCLHGTEINEIMKETHEGAAGNHSGGRALALKLKKLGFYWPTMISDCKTFTAKCEQCQRHAPTIHQPTELLRAGVAPYPFMRWAMDIVGPMPASRQKRFILVMTDYFTKWVEAESYATIRANDVQNFVWKFIICRHGLPYEIITDNGSQFISLSFENFCASWKIRLNKSTPRYPQGNGQAEATNKTILSGLKKRLDEKKGAWADELDGVLWSYRTTPRSATDQTPFAHAYGMEAMAPAEVGYSSLRRSMMVKNPELNDRMMLDRLDDLEEIRNAALCRIQNYQLAAAKHYNQKVHNRHFDVGDLVLRKVFENTAEINAGKLGANWEGSYQVSKIVRPGDYELLTMSGTAVPRTWNSMHLKRYYY

SEQ ID NO: 30786 - DNA, 3867 bp, Arabidopsis thaliana
  misc_feature (1)..(3867): Ceres Seq. ID no. 4972526
atgggttataccttgcaacagatactgaggagcatctgctccaacacggattggaactacgccgtgttctggaaacttaatcaccactcgccaatggttcttactttggaggatgtgtactgtgttaatcatgagcgcggtttgatgccggaaagcttgcatggagggcgccatgctcatgaccctcttgggttagctgtggctaagatgtcatatcatgttcacaacggttgggagagtcaaatttctgctggaattaagacaattcttatagtagctgttggttcttgcggagttgtgcagcttggctctttgtgtaaagttgaagaagacccggctttggtgactcatatcaggcatttatttttggcacttacggatccactagcagaccatgcatcaaatttaatgcaatgtgatattaacagtccatcggatcggccaaaaataccttccaaatgcttacatgaggcatcccctgatttctcaggagaatttgacaaagctatggatatggaagggttaaatattgtatctcaaaacacaagtaatagaagtaacgaccttccatacaatttcactccaacatattttcacatggagaggactgctcaagtaattggtgggcttgaagcagtccaaccttccatgtttggaagcaatgattgtgttacaagtggtttttcagttggtgtggttgatactaaacacaagaatcaagtggatataagtgatatgagtaaggtgatttatgatgaggaaacaggtggataccgatactcaagagaattagatcccaatttccaacactactcgaggaatcatgtgcgtaatagtggaggcacatctgctttagctatggagagtgataggctaaaagcaggttcatcatatccacaacttgattcaactgtacttactgcgttgaaaacagataaagattattctcgtcgaaatgaggttttccaaccatctgagagccaaggaagtatatttgtgaaagatacagaacataggcaggaggaaaaaagtgagtcaagtcagttggatgctttaactgcatctttgtgttctttttctggcagtgagctgttagaggcattagggccagcgttcagtaaaacaagcactgattatggggagctagcaaagtttgaatctgctgcagctataagacgaacaaatgatatgagccatagtcacctgacatttgaatccagctccgagaatcttctagatgccgttgttgctagtatgagtaatggtgatggtaatgtcaggcgtgaaatatcttcaagcaggtcaacacagtcattgcttacaactgctgaaatggcacaggcagaaccttttggtcataataagcaaaatattgttagcacagttgatagtgtgattagccagccgcctctagcagatgggcttatccaacagaatccatcaaatatctgcggagcattttcttccattgggttttcatcaacatgtctcagttcatccagcgaccagtttccgacgtccctggaaattcccaagaagaacaaaaagagagctaaacctggtgaaagttctcggcctcgtccaagggacaggcaacttattcaggatcgtatcaaagaactaagggagcttgtgcctaatggatctaagtgcagtattgattccttgctagagtgcacgatcaagcacatgctcttcctgcagagtgtctctcagcatgctgacaagctcactaaaagtgcaagttcaaagatgcaacacaaggataccggcaccctaggaatatcaagcactgaacaaggttcgagctgggcagtggagattggaggccatctgcaagtgtgctcaatcatggtggagaatctggacaaagaaggagtgatgcttattgagatgctatgcgaagaatgtagccactttctcgagatagcgaacgtgataaggagcttggaactcatcatcctcagaggcaccactgagaaacaaggcgagaaaacatggatatgttttgtagtggagggacaaaacaacaaagtaatgcacaggatggacatcctgtggtctcttgtgcaaatatttcaacccaaggctacaaacagtctgcatctttatcgacaatctcaaattctttacatgaatgctttcgccaatgtgcatagtcttcgggtaccttctcaccatcttcgagatttctcagcgtcactctctctggctcctccaaatttaaagaaaatcatcaagcaatgctcgacgcccaagcttctggagtctgctttagccgccatgatcaagacgagcctaaaccaagactgtcgcttaatgaaccaattcatcactgcctgcacttcctttaaacgtcttgacctcgcagtttccaccatgacccagatgcaggaacctaatgttttcgtctacaacgcgttgtttaaaggcttcgttacttgttctcacccgattcgatctctggaattgtatgttcgtatgctcagggactcggtttctccatcaagctacacgtactcttcactagtaaaggcgtcttctttcgcttctaggtttggggaatcactccaggcgcacatctggaaatttggatttggtttccatgttaaaattcagacgactcttattgatttttattcagccactggtagaatcagggaagccaggaaagtgtttgatgaaatgcctgaaagagatgatattgcttggaccacaatggtttctgcttatcgtcgggttttggatatggactctgcgaattctttagctaaccaaatgtcggagaagaatgaggctacgtcgaactgtttgattaatggatatatgggattaggcaatctggaacaagcagagtcattgtttaatcagatgcctgtgaaggacataatctcatggaccactatgatcaagggttactcgcagaataaaagatatagagaagcaattgcagtgttctacaaaatgatggaggagggcatcattcctgatgaggttactatgtcaactgttatttcagcttgtgcccatctcggcgtgctggaaataggtaaggaggttcatatgtacacgttacagaacggttttgttcttgatgtctacattggttctgcactggtagatatgtattccaaatgtggtagcttagagcgggcgcttctggtgttcttcaatttgcccaaaaagaatctattttgttggaattcgatcattgaaggactggcggctcatggttttgcacaagaagcactgaaaatgtttgccaagatggagatggagtcggtgaaacctaacgcagtcacttttgtgagtgtttttactgcgtgtactcacgcaggtcttgttgacgaaggtcggaggatatatcgcagcatgattgatgactattccattgtctctaatgttgaacattacggaggcatggttcatctattcagcaaagctgggttgatctatgaggctcttgaattgattggaaatatggaatttgaaccaaatgcggttatctggggggccttgcttgatgggtgcagaattcacaagaatctcgtgatagctgaaatagcgtttaacaaactgatggttttggagccgatgaatagtgggtattatttccttttagttagcatgtatgcagaacaaaacaggtggagagatgttgcagagattaggggaaggatgagagagttgggtatagaaaagatatgtcctgggacaagttcgattcggatagataaacgagaccatctgtttgctgcagctgataagtctcactcagcttcagatgaggtttgcttgctgcttgatgagatatatgatcagatgggattagctggatatgtgcaggaaactgagaatgtatattaa

SEQ ID NO: 30787 - protein, 1288 aa, Arabidopsis thaliana
  misc_feature (1)..(1288): Ceres Seq. ID no. 4972527
MGYTLQQILRSICSNTDWNYAVFWKLNHHSPMVLTLEDVYCVNHERGLMPESLHGGRHAHDPLGLAVAKMSYHVHNGWESQISAGIKTILIVAVGSCGVVQLGSLCKVEEDPALVTHIRHLFLALTDPLADHASNLMQCDINSPSDRPKIPSKCLHEASPDFSGEFDKAMDMEGLNIVSQNTSNRSNDLPYNFTPTYFHMERTAQVIGGLEAVQPSMFGSNDCVTSGFSVGVVDTKHKNQVDISDMSKVIYDEETGGYRYSRELDPNFQHYSRNHVRNSGGTSALAMESDRLKAGSSYPQLDSTVLTALKTDKDYSRRNEVFQPSESQGSIFVKDTEHRQEEKSESSQLDALTASLCSFSGSELLEALGPAFSKTSTDYGELAKFESAAAIRRTNDMSHSHLTFESSSENLLDAVVASMSNGDGNVRREISSSRSTQSLLTTAEMAQAEPFGHNKQNIVSTVDSVISQPPLADGLIQQNPSNICGAFSSIGFSSTCLSSSSDQFPTSLEIPKKNKKRAKPGESSRPRPRDRQLIQDRIKELRELVPNGSKCSIDSLLECTIKHMLFLQSVSQHADKLTKSASSKMQHKDTGTLGISSTEQGSSWAVEIGGHLQVCSIMVENLDKEGVMLIEMLCEECSHFLEIANVIRSLELIILRGTTEKQGEKTWICFVVEGQNNKVMHRMDILWSLVQIFQPKATNSLHLYRQSQILYMNAFANVHSLRVPSHHLRDFSASLSLAPPNLKKIIKQCSTPKLLESALAAMIKTSLNQDCRLMNQFITACTSFKRLDLAVSTMTQMQEPNVFVYNALFKGFVTCSHPIRSLELYVRMLRDSVSPSSYTYSSLVKASSFASRFGESLQAHIWKFGFGFHVKIQTTLIDFYSATGRIREARKVFDEMPERDDIAWTTMVSAYRRVLDMDSANSLANQMSEKNEATSNCLINGYMGLGNLEQAESLFNQMPVKDIISWTTMIKGYSQNKRYREAIAVFYKMMEEGIIPDEVTMSTVISACAHLGVLEIGKEVHMYTLQNGFVLDVYIGSALVDMYSKCGSLERALLVFFNLPKKNLFCWNSIIEGLAAHGFAQEALKMFAKMEMESVKPNAVTFVSVFTACTHAGLVDEGRRIYRSMIDDYSIVSNVEHYGGMVHLFSKAGLIYEALELIGNMEFEPNAVIWGALLDGCRIHKNLVIAEIAFNKLMVLEPMNSGYYFLLVSMYAEQNRWRDVAEIRGRMRELGIEKICPGTSSIRIDKRDHLFAAADKSHSASDEVCLLLDEIYDQMGLAGYVQETENVY

SEQ ID NO: 30788 - protein, 1257 aa, Arabidopsis thaliana
  misc_feature (1)..(1257): Ceres Seq. ID no. 4972528
MVLTLEDVYCVNHERGLMPESLHGGRHAHDPLGLAVAKMSYHVHNGWESQISAGIKTILIVAVGSCGVVQLGSLCKVEEDPALVTHIRHLFLALTDPLADHASNLMQCDINSPSDRPKIPSKCLHEASPDFSGEFDKAMDMEGLNIVSQNTSNRSNDLPYNFTPTYFHMERTAQVIGGLEAVQPSMFGSNDCVTSGFSVGVVDTKHKNQVDISDMSKVIYDEETGGYRYSRELDPNFQHYSRNHVRNSGGTSALAMESDRLKAGSSYPQLDSTVLTALKTDKDYSRRNEVFQPSESQGSIFVKDTEHRQEEKSESSQLDALTASLCSFSGSELLEALGPAFSKTSTDYGELAKFESAAAIRRTNDMSHSHLTFESSSENLLDAVVASMSNGDGNVRREISSSRSTQSLLTTAEMAQAEPFGHNKQNIVSTVDSVISQPPLADGLIQQNPSNICGAFSSIGFSSTCLSSSSDQFPTSLEIPKKNKKRAKPGESSRPRPRDRQLIQDRIKELRELVPNGSKCSIDSLLECTIKHMLFLQSVSQHADKLTKSASSKMQHKDTGTLGISSTEQGSSWAVEIGGHLQVCSIMVENLDKEGVMLIEMLCEECSHFLEIANVIRSLELIILRGTTEKQGEKTWICFVVEGQNNKVMHRMDILWSLVQIFQPKATNSLHLYRQSQILYMNAFANVHSLRVPSHHLRDFSASLSLAPPNLKKIIKQCSTPKLLESALAAMIKTSLNQDCRLMNQFITACTSFKRLDLAVSTMTQMQEPNVFVYNALFKGFVTCSHPIRSLELYVRMLRDSVSPSSYTYSSLVKASSFASRFGESLQAHIWKFGFGFHVKIQTTLIDFYSATGRIREARKVFDEMPERDDIAWTTMVSAYRRVLDMDSANSLANQMSEKNEATSNCLINGYMGLGNLEQAESLFNQMPVKDIISWTTMIKGYSQNKRYREAIAVFYKMMEEGIIPDEVTMSTVISACAHLGVLEIGKEVHMYTLQNGFVLDVYIGSALVDMYSKCGSLERALLVFFNLPKKNLFCWNSIIEGLAAHGFAQEALKMFAKMEMESVKPNAVTFVSVFTACTHAGLVDEGRRIYRSMIDDYSIVSNVEHYGGMVHLFSKAGLIYEALELIGNMEFEPNAVIWGALLDGCRIHKNLVIAEIAFNKLMVLEPMNSGYYFLLVSMYAEQNRWRDVAEIRGRMRELGIEKICPGTSSIRIDKRDHLFAAADKSHSASDEVCLLLDEIYDQMGLAGYVQETENVY

SEQ ID NO: 30789 - protein, 1240 aa, Arabidopsis thaliana
  misc_feature (1)..(1240): Ceres Seq. ID no. 4972529
MPESLHGGRHAHDPLGLAVAKMSYHVHNGWESQISAGIKTILIVAVGSCGVVQLGSLCKVEEDPALVTHIRHLFLALTDPLADHASNLMQCDINSPSDRPKIPSKCLHEASPDFSGEFDKAMDMEGLNIVSQNTSNRSNDLPYNFTPTYFHMERTAQVIGGLEAVQPSMFGSNDCVTSGFSVGVVDTKHKNQVDISDMSKVIYDEETGGYRYSRELDPNFQHYSRNHVRNSGGTSALAMESDRLKAGSSYPQLDSTVLTALKTDKDYSRRNEVFQPSESQGSIFVKDTEHRQEEKSESSQLDALTASLCSFSGSELLEALGPAFSKTSTDYGELAKFESAAAIRRTNDMSHSHLTFESSSENLLDAVVASMSNGDGNVRREISSSRSTQSLLTTAEMAQAEPFGHNKQNIVSTVDSVISQPPLADGLIQQNPSNICGAFSSIGFSSTCLSSSSDQFPTSLEIPKKNKKRAKPGESSRPRPRDRQLIQDRIKELRELVPNGSKCSIDSLLECTIKHMLFLQSVSQHADKLTKSASSKMQHKDTGTLGISSTEQGSSWAVEIGGHLQVCSIMVENLDKEGVMLIEMLCEECSHFLEIANVIRSLELIILRGTTEKQGEKTWICFVVEGQNNKVMHRMDILWSLVQIFQPKATNSLHLYRQSQILYMNAFANVHSLRVPSHHLRDFSASLSLAPPNLKKIIKQCSTPKLLESALAAMIKTSLNQDCRLMNQFITACTSFKRLDLAVSTMTQMQEPNVFVYNALFKGFVTCSHPIRSLELYVRMLRDSVSPSSYTYSSLVKASSFASRFGESLQAHIWKFGFGFHVKIQTTLIDFYSATGRIREARKVFDEMPERDDIAWTTMVSAYRRVLDMDSANSLANQMSEKNEATSNCLINGYMGLGNLEQAESLFNQMPVKDIISWTTMIKGYSQNKRYREAIAVFYKMMEEGIIPDEVTMSTVISACAHLGVLEIGKEVHMYTLQNGFVLDVYIGSALVDMYSKCGSLERALLVFFNLPKKNLFCWNSIIEGLAAHGFAQEALKMFAKMEMESVKPNAVTFVSVFTACTHAGLVDEGRRIYRSMIDDYSIVSNVEHYGGMVHLFSKAGLIYEALELIGNMEFEPNAVIWGALLDGCRIHKNLVIAEIAFNKLMVLEPMNSGYYFLLVSMYAEQNRWRDVAEIRGRMRELGIEKICPGTSSIRIDKRDHLFAAADKSHSASDEVCLLLDEIYDQMGLAGYVQETENVY

SEQ ID NO: 30790 - DNA, 1068 bp, Arabidopsis thaliana
  misc_feature (1)..(1068): Ceres Seq. ID no. 4972719
atgactaaatctcatgtcattttctctgcctccatcgctctctttctcctactctccatctcgcatttcccgggagctctctctcaatccaataaagattgccaatcaaaatccaactactcatgtatagacaaaaacaaagcattagatctcaaactcttatcaatcttctcaattctcatcactagtctaatcggtgtttgcctcccgttctttgcccgatcaattcccgctttccaacccgagaaatctcacttcctcatcgtaaaatctttcgcctccggaatcatcctttccactggtttcatgcatgtcttgcctgattctttcgagatgctttcatctccttgtcttaacgataacccctggcacaagtttcctttcgccggctttgtagccatgatgtctgccgtgttcacgctcatggttgactctattaccaccagcgtcttcaccaagtcaggaaggaaagatctacgtgctgacgtagcatccgttgagactcctgaccaagagatagggcacgtacaggttcatggccatgttcatagccatactcttcctcacaatcttcatggagagaatgataaagagcttggttcttatttacagcttctgcggtatcgtattcttgcaatctcgatagtgataggactatcggtaggagacactaacaatacttgcaccatcaaaggactcgtcgctgcgctttgcttccatcaaatgttcgaaggcatgggtctcggcggttgcatccttcaggcggagtacgggtgggttaaaaaggcggtgatggctttcttttttgcggtgacgacgccttttggagtggttctagggatggcactatctaaaacatacaaagagaatagccctgaatcgcttataacagttgggttgctcaacgcttcctcggcaggactactcatctacatggctttagttgaccttctagctgccgattttatgggtcaaaaaatgcaaaggagcatcaagcttcaattaaagtcatatgctgccgttttgcttggtgctggtggcatgtccgtcatggccaagtgggcttga

SEQ ID NO: 30791 - protein, 355 aa, Arabidopsis thaliana
  misc_feature (1)..(355): Ceres Seq. ID no. 4972720
MTKSHVIFSASIALFLLLSISHFPGALSQSNKDCQSKSNYSCIDKNKALDLKLLSIFSILITSLIGVCLPFFARSIPAFQPEKSHFLIVKSFASGIILSTGFMHVLPDSFEMLSSPCLNDNPWHKFPFAGFVAMMSAVFTLMVDSITTSVFTKSGRKDLRADVASVETPDQEIGHVQVHGHVHSHTLPHNLHGENDKELGSYLQLLRYRILAISIVIGLSVGDTNNTCTIKGLVAALCFHQMFEGMGLGGCILQAEYGWVKKAVMAFFFAVTTPFGVVLGMALSKTYKENSPESLITVGLLNASSAGLLIYMALVDLLAADFMGQKMQRSIKLQLKSYAAVLLGAGGMSVMAKWA

SEQ ID NO: 30792 - protein, 253 aa, Arabidopsis thaliana
  misc_feature (1)..(253): Ceres Seq. ID no. 4972721
MHVLPDSFEMLSSPCLNDNPWHKFPFAGFVAMMSAVFTLMVDSITTSVFTKSGRKDLRADVASVETPDQEIGHVQVHGHVHSHTLPHNLHGENDKELGSYLQLLRYRILAISIVIGLSVGDTNNTCTIKGLVAALCFHQMFEGMGLGGCILQAEYGWVKKAVMAFFFAVTTPFGVVLGMALSKTYKENSPESLITVGLLNASSAGLLIYMALVDLLAADFMGQKMQRSIKLQLKSYAAVLLGAGGMSVMAKWA

SEQ ID NO: 30793 - protein, 244 aa, Arabidopsis thaliana
  misc_feature (1)..(244): Ceres Seq. ID no. 4972722
MLSSPCLNDNPWHKFPFAGFVAMMSAVFTLMVDSITTSVFTKSGRKDLRADVASVETPDQEIGHVQVHGHVHSHTLPHNLHGENDKELGSYLQLLRYRILAISIVIGLSVGDTNNTCTIKGLVAALCFHQMFEGMGLGGCILQAEYGWVKKAVMAFFFAVTTPFGVVLGMALSKTYKENSPESLITVGLLNASSAGLLIYMALVDLLAADFMGQKMQRSIKLQLKSYAAVLLGAGGMSVMAKWA

SEQ ID NO: 30794 - DNA, 753 bp, Arabidopsis thaliana
  misc_feature (1)..(753): Ceres Seq. ID no. 4972785
atgaatgttctgggggtttcatctttcaaggcttcttctattattccgtttcttcaagggtcgaaatggattaagaatccaccggtgattgatgacgtggataaaggaggaacagtttgtgatgatgatgatgataaggaatcgaggaatggaggaagtggatgggttaataagcttttgagtgtttgttctgaggatgctaaggctgctttcacggcggttactgtttctatcctttttagatcagctcttgcggagccaaagtcgattccttcaacgtctatgtaccctaccttggacaagggtgatcgcgttatggcggagaaggtctcatactttttcaggaagccagaggtttcagatatagtaatcttcaaggctcctccaattttgctggaatatccggaatatggctacagttccaatgatgtattcataaaaaggatagtggcaagtgaaggtgactgggttgaagttcgtgatgggaagctctttgtgaatgacattgtgcaagaagaagattttgtcttagaaccaatgtcatatgaaatggaaccaatgtttgtccccaaaggttatgtctttgtccttggtgataaccgcaacaaaagctttgactctcataactggggtccacttccaatagagaacatcgttggaagatctgtgttccggtactggccaccgagcaaagtatcagacaccatataccacgaccaagctatcacaaggggacctgttgcagtttcatga

SEQ ID NO: 30795 - protein, 250 aa, Arabidopsis thaliana
  misc_feature (1)..(250): Ceres Seq. ID no. 4972786
MNVLGVSSFKASSIIPFLQGSKWIKNPPVIDDVDKGGTVCDDDDDKESRNGGSGWVNKLLSVCSEDAKAAFTAVTVSILFRSALAEPKSIPSTSMYPTLDKGDRVMAEKVSYFFRKPEVSDIVIFKAPPILLEYPEYGYSSNDVFIKRIVASEGDWVEVRDGKLFVNDIVQEEDFVLEPMSYEMEPMFVPKGYVFVLGDNRNKSFDSHNWGPLPIENIVGRSVFRYWPPSKVSDTIYHDQAITRGPVAVS

SEQ ID NO: 30796 - protein, 156 aa, Arabidopsis thaliana
  misc_feature (1)..(156): Ceres Seq. ID no. 4972787
MYPTLDKGDRVMAEKVSYFFRKPEVSDIVIFKAPPILLEYPEYGYSSNDVFIKRIVASEGDWVEVRDGKLFVNDIVQEEDFVLEPMSYEMEPMFVPKGYVFVLGDNRNKSFDSHNWGPLPIENIVGRSVFRYWPPSKVSDTIYHDQAITRGPVAVS

SEQ ID NO: 30797 - protein, 145 aa, Arabidopsis thaliana
  misc_feature (1)..(145): Ceres Seq. ID no. 4972788
MAEKVSYFFRKPEVSDIVIFKAPPILLEYPEYGYSSNDVFIKRIVASEGDWVEVRDGKLFVNDIVQEEDFVLEPMSYEMEPMFVPKGYVFVLGDNRNKSFDSHNWGPLPIENIVGRSVFRYWPPSKVSDTIYHDQAITRGPVAVS

SEQ ID NO: 30798 - DNA, 2103 bp, Arabidopsis thaliana
  misc_feature (1)..(2103): Ceres Seq. ID no. 4973092
atggcggaggggcaatccccggagaattcaccgccgtcccctacaccaccatctccgtcatcatccgacaatcaacaacaatcctctcctccgccttctgattcctcctctccttcaccaccagctcctcctccgcccgatgattcctcaaatggttcacctcaaccgccttcttcagactcacaatcaccaccatctccgcaaggaaacaataacaatgatggcaacaatggtaataacaacaatgacaacaacaacaacaacaatggtaataacaacaacgacaacaacaatgggaataacaaagacaacaacaacaatggcaataacaacaatggtaataacaacaatggaaatgacaacaatggcaataacaacaatgggaataacaatgacaacaacaaccaaaacaatggcggaggaagcaacaatcgttcacctccgcctccttccagaaactctgaccgtaactctccttccccaccaagagcgctggctcctcctagatcaagcggtggtggttccaactcctccggcaacaatgaaccaaacacggctgctatcgtaggaattgtggctggtgctggattgttgtttcttgttatgatattgttctgcgtctgttgctgtcgtaagaaaaaaaagaagcatcaaatgccctattatgcaggaaacggctacgccaccggcaaaggtgatcaataccaacagcagcaatacaataaccagagcgatcacgtaatgaatctgtctcagcagtatcctggatccaacgggaataataactggatgaattcaccgcctccaccaccaccaggaagctggcaaccatcgccgcctccaccaccaccgccagtctcaggcggtatgaatggaaacagtagcgactttagctcaaactactcaggaccacatggtccgtcggtaccaccacctcacccttcagtggctctaggtttcaacaagagcacattcacctacgacgagctagccgctgcaactcaaggcttctcccaatcaagattgttaggtcaaggcgggttcggatatgttcacaagggaatacttcccaatgggaaagagattgcggtgaagagtctgaaagcgggaagcgggcaaggagagcgcgagtttcaggctgaggttgacatcattagccgagttcatcatcggtttcttgtgtctcttgttggatattgtattgcaggaggacagaggatgttggtttatgagttcttacctaatgacacacttgagttccatctccatggtaaaagtggcaaggttcttgactggcctacaagactcaagattgctttgggatcagctaaaggacttgcttacttacatgaagactgtcatccgagaatcattcatagagacattaaagcttcaaacattcttcttgatgaatcctttgaggctaaggttgcagacttcgggttagcgaagctatctcaagacaatgttacgcatgtctccactcgtatcatgggaactttcgggtacttggctccagagtatgcgtcaagcgggaaactgacagaccgatcagatgttttctcctttggagtgatgcttcttgagctagttaccggacgcagacctgttgatctcactggtgaaatggaagacagtttggtcgattgggcaagacccatatgcttaaacgcagctcaggatggagattacagtgaactagttgatccacgtctcgaaaaccaatacgagcctcatgagatggcacaaatggttgcttgtgccgctgcagccgtcaggcactcagctagacgcaggcctaagatgagccagattgttcgggctctggagggagatgcaacgctagacgatctaagcgaaggagggaaagcgggacaaagctcattcctcgggaggggttcaagctcggactatgactcaagcacttacagtgcggatatgaagaagttcaggaaagtggcattggatagtcatgagtacggtgcaagcagcgagtacgggaacacgagcgaatacgggcttgacccgtcttcctcgagcagcgaggagattcgtagaggaggagctaacaacaacaaaaccactcctagccgagaccattga

SEQ ID NO: 30799 - protein, 700 aa, Arabidopsis thaliana
  misc_feature (1)..(700): Ceres Seq. ID no. 4973093
MAEGQSPENSPPSPTPPSPSSSDNQQQSSPPPSDSSSPSPPAPPPPDDSSNGSPQPPSSDSQSPPSPQGNNNNDGNNGNNNNDNNNNNNGNNNNDNNNGNNKDNNNNGNNNNGNNNNGNDNNGNNNNGNNNDNNNQNNGGGSNNRSPPPPSRNSDRNSPSPPRALAPPRSSGGGSNSSGNNEPNTAAIVGIVAGAGLLFLVMILFCVCCCRKKKKKHQMPYYAGNGYATGKGDQYQQQQYNNQSDHVMNLSQQYPGSNGNNNWMNSPPPPPPGSWQPSPPPPPPPVSGGMNGNSSDFSSNYSGPHGPSVPPPHPSVALGFNKSTFTYDELAAATQGFSQSRLLGQGGFGYVHKGILPNGKEIAVKSLKAGSGQGEREFQAEVDIISRVHHRFLVSLVGYCIAGGQRMLVYEFLPNDTLEFHLHGKSGKVLDWPTRLKIALGSAKGLAYLHEDCHPRIIHRDIKASNILLDESFEAKVADFGLAKLSQDNVTHVSTRIMGTFGYLAPEYASSGKLTDRSDVFSFGVMLLELVTGRRPVDLTGEMEDSLVDWARPICLNAAQDGDYSELVDPRLENQYEPHEMAQMVACAAAAVRHSARRRPKMSQIVRALEGDATLDDLSEGGKAGQSSFLGRGSSSDYDSSTYSADMKKFRKVALDSHEYGASSEYGNTSEYGLDPSSSSSEEIRRGGANNNKTTPSRDH

SEQ ID NO: 30800 - protein, 499 aa, Arabidopsis thaliana
  misc_feature (1)..(499): Ceres Seq. ID no. 4973094
MILFCVCCCRKKKKKHQMPYYAGNGYATGKGDQYQQQQYNNQSDHVMNLSQQYPGSNGNNNWMNSPPPPPPGSWQPSPPPPPPPVSGGMNGNSSDFSSNYSGPHGPSVPPPHPSVALGFNKSTFTYDELAAATQGFSQSRLLGQGGFGYVHKGILPNGKEIAVKSLKAGSGQGEREFQAEVDIISRVHHRFLVSLVGYCIAGGQRMLVYEFLPNDTLEFHLHGKSGKVLDWPTRLKIALGSAKGLAYLHEDCHPRIIHRDIKASNILLDESFEAKVADFGLAKLSQDNVTHVSTRIMGTFGYLAPEYASSGKLTDRSDVFSFGVMLLELVTGRRPVDLTGEMEDSLVDWARPICLNAAQDGDYSELVDPRLENQYEPHEMAQMVACAAAAVRHSARRRPKMSQIVRALEGDATLDDLSEGGKAGQSSFLGRGSSSDYDSSTYSADMKKFRKVALDSHEYGASSEYGNTSEYGLDPSSSSSEEIRRGGANNNKTTPSRDH

SEQ ID NO: 30801 - protein, 482 aa, Arabidopsis thaliana
  misc_feature (1)..(482): Ceres Seq. ID no. 4973095
MPYYAGNGYATGKGDQYQQQQYNNQSDHVMNLSQQYPGSNGNNNWMNSPPPPPPGSWQPSPPPPPPPVSGGMNGNSSDFSSNYSGPHGPSVPPPHPSVALGFNKSTFTYDELAAATQGFSQSRLLGQGGFGYVHKGILPNGKEIAVKSLKAGSGQGEREFQAEVDIISRVHHRFLVSLVGYCIAGGQRMLVYEFLPNDTLEFHLHGKSGKVLDWPTRLKIALGSAKGLAYLHEDCHPRIIHRDIKASNILLDESFEAKVADFGLAKLSQDNVTHVSTRIMGTFGYLAPEYASSGKLTDRSDVFSFGVMLLELVTGRRPVDLTGEMEDSLVDWARPICLNAAQDGDYSELVDPRLENQYEPHEMAQMVACAAAAVRHSARRRPKMSQIVRALEGDATLDDLSEGGKAGQSSFLGRGSSSDYDSSTYSADMKKFRKVALDSHEYGASSEYGNTSEYGLDPSSSSSEEIRRGGANNNKTTPSRDH

SEQ ID NO: 30802 - DNA, 1320 bp, Arabidopsis thaliana
  misc_feature (1)..(1320): Ceres Seq. ID no. 4973202
atgaacctagtccctcctaaggaagaagagaacctcatagtattcaacaaacaacttggagaagatagaagaattgtgatgtcacggagcaatttaaatgagctacttaaggcgcttgaggaaaacgagttattgtgcactgacttgtaccaagtgaacaccgatggcgtgatattgacaaagcaaagagcggagaaagttatcggttgggccagaaaccactatttatcttcttgtcctagcccatcgattaaagagggccgcctgattctcccccgtgaaagcattgagatttcagttaaaaggttaaaggcacaagaagatatttctcgaaagcccacacaaaacttgaagagatttttgtttttgcagaatattgcgaaggatgagtttgaaaccaattttgtctcagccgtggttgctcctggagaaattggggtaaagtttgacgacattggtgctcttgaacatgtgaaaaagacactaaatgagttagttattcttcccatgagaaggccagagcttttcacccgtggaaatctcttgcggccatgtaaaggcatattgctttttggtcctccgggtacgggtaaaacgctgcttgccaaggcgcttgcaacagaagctggggcaaacttcattagcataactggctcaacgcttacctcaaagtggtttggagatgcagagaagctcacgaaggctttgttctcttttgcaagcaaactagcccccgtcattatatttgttgatgaggttgacagtttgttgggtgctcgtggtggtgcttttgagcacgaggcaacacgaagaatgagaaatgagtttatggcagcttgggatggactcagatcaaaagatagccaaaggattctcattctcggtgccaccaaccgaccttttgatcttgatgacgctgtcattcgtaggctaccaagacggatatatgtggatttaccagatgcggaaaaccggttgaagatattgaagatatttctgacaccagaaaatcttgaaactggtttcgagtttgataaacttgcaaaggaaaccgaaggatattcaggaagcgatctaaagaatctatgcatagcagctgcatacagacctgttcaagaattgttacaagaagaaaacaaggactcggtaacaaatgcgtcccctgatctacgaccactgagtttggacgacttcattcaatccaaagctaaggtaagtccgtcagtggcatacgacgcgacgacaatgaacgaattgagaaaatggaacgagcaatacggtgaaggagggacccgaactaagtctcctttcggcttctaa

SEQ ID NO: 30803 - protein, 439 aa, Arabidopsis thaliana
  misc_feature (1)..(439): Ceres Seq. ID no. 4973203
MNLVPPKEEENLIVFNKQLGEDRRIVMSRSNLNELLKALEENELLCTDLYQVNTDGVILTKQRAEKVIGWARNHYLSSCPSPSIKEGRLILPRESIEISVKRLKAQEDISRKPTQNLKRFLFLQNIAKDEFETNFVSAVVAPGEIGVKFDDIGALEHVKKTLNELVILPMRRPELFTRGNLLRPCKGILLFGPPGTGKTLLAKALATEAGANFISITGSTLTSKWFGDAEKLTKALFSFASKLAPVIIFVDEVDSLLGARGGAFEHEATRRMRNEFMAAWDGLRSKDSQRILILGATNRPFDLDDAVIRRLPRRIYVDLPDAENRLKILKIFLTPENLETGFEFDKLAKETEGYSGSDLKNLCIAAAYRPVQELLQEENKDSVTNASPDLRPLSLDDFIQSKAKVSPSVAYDATTMNELRKWNEQYGEGGTRTKSPFGF

SEQ ID NO: 30804 - protein, 413 aa, Arabidopsis thaliana
  misc_feature (1)..(413): Ceres Seq. ID no. 4973204
MSRSNLNELLKALEENELLCTDLYQVNTDGVILTKQRAEKVIGWARNHYLSSCPSPSIKEGRLILPRESIEISVKRLKAQEDISRKPTQNLKRFLFLQNIAKDEFETNFVSAVVAPGEIGVKFDDIGALEHVKKTLNELVILPMRRPELFTRGNLLRPCKGILLFGPPGTGKTLLAKALATEAGANFISITGSTLTSKWFGDAEKLTKALFSFASKLAPVIIFVDEVDSLLGARGGAFEHEATRRMRNEFMAAWDGLRSKDSQRILILGATNRPFDLDDAVIRRLPRRIYVDLPDAENRLKILKIFLTPENLETGFEFDKLAKETEGYSGSDLKNLCIAAAYRPVQELLQEENKDSVTNASPDLRPLSLDDFIQSKAKVSPSVAYDATTMNELRKWNEQYGEGGTRTKSPFGF

SEQ ID NO: 30805 - protein, 270 aa, Arabidopsis thaliana
  misc_feature (1)..(270): Ceres Seq. ID no. 4973205
MRRPELFTRGNLLRPCKGILLFGPPGTGKTLLAKALATEAGANFISITGSTLTSKWFGDAEKLTKALFSFASKLAPVIIFVDEVDSLLGARGGAFEHEATRRMRNEFMAAWDGLRSKDSQRILILGATNRPFDLDDAVIRRLPRRIYVDLPDAENRLKILKIFLTPENLETGFEFDKLAKETEGYSGSDLKNLCIAAAYRPVQELLQEENKDSVTNASPDLRPLSLDDFIQSKAKVSPSVAYDATTMNELRKWNEQYGEGGTRTKSPFGF

SEQ ID NO: 30806 - DNA, 3525 bp, Arabidopsis thaliana
  misc_feature (1)..(3525): Ceres Seq. ID no. 4973361
atggctggagagaggagaaaagggatgaaattcagtaaattatattctttcaagtgttttaaaccattctctagagaagatcattctcagattggttcaagaggttactcaagagttgtgttctgtaatgatcctgataatcctgaagctcttcagcttaattacagaggaaattatgtgtcaaccactaagtatactgctgctaatttcatcccaaagtctttgtttgagcagtttagaagagttgcaaatatatatttcctcgttgttgctttcgtttcttttagtcctttggctccttataccgctcctagcgttcttgcaccgctcttgattgttatcggtgctaccatggttaaagaaggtgttgaagatttgaggagaagaaaacaagatgttgaagctaacaataggaaagttgaagttcttggtaaaaccggaacatttgtcgaaacgaagtggaaaaatctccgtgttggtgatcttgtgaaggttcataaagatgagtacttccctgctgatcttctactgctttcatctagctatgaagatgggatttgttatgttgaaactatgaatcttgatggagagactaacttgaagcttaagcacgcgttggagataacatcggacgaagaatcgatcaagaacttcagaggaatgatcaaatgtgaggatcctaatgagcatctttattcctttgtgggaacactttactttgaaggaaagcaatatcctttatctcctcagcagatactattgagagattccaaactgaaaaatacggattatgtatacggcgtggttgtttttaccggtcatgacactaaagtgatgcagaatgctaccgatcctccttctaagaggagtaagattgagaaaaaaatggatcagattatttacattctcttcagtatcttgattgtgatagcgtttactggatctgtattcttcgggattgcaacgagaagggatatgagtgataatgggaagctaagaagatggtatcttagaccagatcatactactgttttctatgatcctcggagagcggttgctgctgctttctttcatttcttgaccgctttaatgctatacggttacttaataccgatatctttatatgtgtctattgaagttgtgaaggtgttacagagtattttcattaaccaagatcaagaaatgtaccatgaagaaacagataggcctgctcgtgcaagaacgtcgaatcttaatgaagagcttggacaagttgatacaattctctcggataaaacaggtactttgacttgcaactcaatggagtttgtgaaatgttcgattgctggaacagcttatggtcgcggtatgaccgaagtagaagtggctttgagaaagcaaaagggtcttatgactcaagaagaagttggtgataatgaatctttatccattaaggagcaaaaagcggttaaaggttttaacttctgggatgagagaatagttgatggacaatggattaatcaaccaaatgcagaacttattcagaagttctttcgtgtgttggctatttgccacactgctattcctgatgttaacagcgatacaggagagatcacatatgaagctgagtctccggatgaagcggcttttgttatagcttctcgagagcttggatttgaattcttttcaaggtcccaaactagtatttccttgcatgaaatagaccacatgaccgtatatgagcttcttcatgtcctagagttcagcagttcacggaaaagaatgtcggtgattgtccgaaatcccgaaaaccggttgttgttgctttcgaaaggcgcagacagtgtaatgtttaaaagacttgcgaaacatggacggcaaaatgagagagagacaaaggaacatatcaagaagtatgcagaggcgggtttaagaacattagtgattacatatagagaaatcgatgaagacgagtacatagtgtgggaagaggagtttctgaatgccaaaactttggttactgaagatagagatgctttaattgatgcagctgctgataagattgagaaagatttgattcttcttggttctactgcagtggaagacaaactgcagaaaggtgttccagattgtattgagaagttatctcaggctggagtcaagatttgggttttaaccggcgataagacagaaaccgcgataaatatcggatatgcttgtagtctcttaagagaaggcatgaaacagattttggtaactctagattcatctgacattgaagcattggaaaaacaaggagacaaggaggctgttgcaaagttacgagaaggaatgtcacaaactgctgcagtaaccgataattcagctaaagaaaactcggaaatgtttggtttagtgattgatggaaagtctttaacttatgcattggactcaaagctggagaaagagttcttggaacttgcgattcgatgtaattctgttatatgttgtcggtcttcgccaaaacaaaaggcgctcgttacaagattggtaaagaatgggacaggtagaacaacactggccattggagatggcgcaaatgatgttggaatgcttcaagaagccgatattggagttggtataagtggtgctgaaggaatgcaggcggtgatggctagtgattttgcgattgctcagtttcggtttctggaacgtttattacttgttcacggtcattggtgttatagacgaatcacattgatgatatgttacttcttctacaagaacctcgcattcgggttcacgctgttttggtatgaagcttatgcttctttctctggaaaaccggcgtataacgattggtacatgtcgtgctacaacgtcttcttcacttcacttcctgttatcgcccttggagtcttcgatcaagacgtctctgctcgcctttgtctcaagtatccgttgctataccaagaaggagtacaaaacgtattattcagctgggaacggatcctaggatggatgttgaatggagtcataagctcaatgatcattttcttcctcactatcaacacaatggcaactcaagcttttaggaaagatggacaagtagttgattactcggtcctcggagtcacaatgtactcttccgtggtctggactgtgaattgccaaatggcgatttcgataaactacttcacttggatccaacattgcttcatatggggaagcattggggtttggtatttgtttcttgtcatctacggttcccttcctccgacgttttccactaccgcgtttcaggtcttcgtcgagacttcagcaccgagtccgatctattggctcgttcttttccttgtggtgttctctgctctcttgccttatttcacttacagggcgtttcagattaagttcagaccaatgtaccacgatattattgttgaacagaggagaacagaacggacagagaccgcgccaaatgcggttcttggtgagcttccggtgcaagttgagtttactttgcatcatcttagggcaaatttgtctagaagagattcttggaattga

SEQ ID NO: 30807 - protein, 1174 aa, Arabidopsis thaliana
  misc_feature (1)..(1174): Ceres Seq. ID no. 4973362
MAGERRKGMKFSKLYSFKCFKPFSREDHSQIGSRGYSRVVFCNDPDNPEALQLNYRGNYVSTTKYTAANFIPKSLFEQFRRVANIYFLVVAFVSFSPLAPYTAPSVLAPLLIVIGATMVKEGVEDLRRRKQDVEANNRKVEVLGKTGTFVETKWKNLRVGDLVKVHKDEYFPADLLLLSSSYEDGICYVETMNLDGETNLKLKHALEITSDEESIKNFRGMIKCEDPNEHLYSFVGTLYFEGKQYPLSPQQILLRDSKLKNTDYVYGVVVFTGHDTKVMQNATDPPSKRSKIEKKMDQIIYILFSILIVIAFTGSVFFGIATRRDMSDNGKLRRWYLRPDHTTVFYDPRRAVAAAFFHFLTALMLYGYLIPISLYVSIEVVKVLQSIFINQDQEMYHEETDRPARARTSNLNEELGQVDTILSDKTGTLTCNSMEFVKCSIAGTAYGRGMTEVEVALRKQKGLMTQEEVGDNESLSIKEQKAVKGFNFWDERIVDGQWINQPNAELIQKFFRVLAICHTAIPDVNSDTGEITYEAESPDEAAFVIASRELGFEFFSRSQTSISLHEIDHMTVYELLHVLEFSSSRKRMSVIVRNPENRLLLLSKGADSVMFKRLAKHGRQNERETKEHIKKYAEAGLRTLVITYREIDEDEYIVWEEEFLNAKTLVTEDRDALIDAAADKIEKDLILLGSTAVEDKLQKGVPDCIEKLSQAGVKIWVLTGDKTETAINIGYACSLLREGMKQILVTLDSSDIEALEKQGDKEAVAKLREGMSQTAAVTDNSAKENSEMFGLVIDGKSLTYALDSKLEKEFLELAIRCNSVICCRSSPKQKALVTRLVKNGTGRTTLAIGDGANDVGMLQEADIGVGISGAEGMQAVMASDFAIAQFRFLERLLLVHGHWCYRRITLMICYFFYKNLAFGFTLFWYEAYASFSGKPAYNDWYMSCYNVFFTSLPVIALGVFDQDVSARLCLKYPLLYQEGVQNVLFSWERILGWMLNGVISSMIIFFLTINTMATQAFRKDGQVVDYSVLGVTMYSSVVWTVNCQMAISINYFTWIQHCFIWGSIGVWYLFLVIYGSLPPTFSTTAFQVFVETSAPSPIYWLVLFLVVFSALLPYFTYRAFQIKFRPMYHDIIVEQRRTERTETAPNAVLGELPVQVEFTLHHLRANLSRRDSWN

SEQ ID NO: 30808 - protein, 1166 aa, Arabidopsis thaliana
  misc_feature (1)..(1166): Ceres Seq. ID no. 4973363
MKFSKLYSFKCFKPFSREDHSQIGSRGYSRVVFCNDPDNPEALQLNYRGNYVSTTKYTAANFIPKSLFEQFRRVANIYFLVVAFVSFSPLAPYTAPSVLAPLLIVIGATMVKEGVEDLRRRKQDVEANNRKVEVLGKTGTFVETKWKNLRVGDLVKVHKDEYFPADLLLLSSSYEDGICYVETMNLDGETNLKLKHALEITSDEESIKNFRGMIKCEDPNEHLYSFVGTLYFEGKQYPLSPQQILLRDSKLKNTDYVYGVVVFTGHDTKVMQNATDPPSKRSKIEKKMDQIIYILFSILIVIAFTGSVFFGIATRRDMSDNGKLRRWYLRPDHTTVFYDPRRAVAAAFFHFLTALMLYGYLIPISLYVSIEVVKVLQSIFINQDQEMYHEETDRPARARTSNLNEELGQVDTILSDKTGTLTCNSMEFVKCSIAGTAYGRGMTEVEVALRKQKGLMTQEEVGDNESLSIKEQKAVKGFNFWDERIVDGQWINQPNAELIQKFFRVLAICHTAIPDVNSDTGEITYEAESPDEAAFVIASRELGFEFFSRSQTSISLHEIDHMTVYELLHVLEFSSSRKRMSVIVRNPENRLLLLSKGADSVMFKRLAKHGRQNERETKEHIKKYAEAGLRTLVITYREIDEDEYIVWEEEFLNAKTLVTEDRDALIDAAADKIEKDLILLGSTAVEDKLQKGVPDCIEKLSQAGVKIWVLTGDKTETAINIGYACSLLREGMKQILVTLDSSDIEALEKQGDKEAVAKLREGMSQTAAVTDNSAKENSEMFGLVIDGKSLTYALDSKLEKEFLELAIRCNSVICCRSSPKQKALVTRLVKNGTGRTTLAIGDGANDVGMLQEADIGVGISGAEGMQAVMASDFAIAQFRFLERLLLVHGHWCYRRITLMICYFFYKNLAFGFTLFWYEAYASFSGKPAYNDWYMSCYNVFFTSLPVIALGVFDQDVSARLCLKYPLLYQEGVQNVLFSWERILGWMLNGVISSMIIFFLTINTMATQAFRKDGQVVDYSVLGVTMYSSVVWTVNCQMAISINYFTWIQHCFIWGSIGVWYLFLVIYGSLPPTFSTTAFQVFVETSAPSPIYWLVLFLVVFSALLPYFTYRAFQIKFRPMYHDIIVEQRRTERTETAPNAVLGELPVQVEFTLHHLRANLSRRDSWN

SEQ ID NO: 30809 - protein, 1057 aa, Arabidopsis thaliana
  misc_feature (1)..(1057): Ceres Seq. ID no. 4973364
MVKEGVEDLRRRKQDVEANNRKVEVLGKTGTFVETKWKNLRVGDLVKVHKDEYFPADLLLLSSSYEDGICYVETMNLDGETNLKLKHALEITSDEESIKNFRGMIKCEDPNEHLYSFVGTLYFEGKQYPLSPQQILLRDSKLKNTDYVYGVVVFTGHDTKVMQNATDPPSKRSKIEKKMDQIIYILFSILIVIAFTGSVFFGIATRRDMSDNGKLRRWYLRPDHTTVFYDPRRAVAAAFFHFLTALMLYGYLIPISLYVSIEVVKVLQSIFINQDQEMYHEETDRPARARTSNLNEELGQVDTILSDKTGTLTCNSMEFVKCSIAGTAYGRGMTEVEVALRKQKGLMTQEEVGDNESLSIKEQKAVKGFNFWDERIVDGQWINQPNAELIQKFFRVLAICHTAIPDVNSDTGEITYEAESPDEAAFVIASRELGFEFFSRSQTSISLHEIDHMTVYELLHVLEFSSSRKRMSVIVRNPENRLLLLSKGADSVMFKRLAKHGRQNERETKEHIKKYAEAGLRTLVITYREIDEDEYIVWEEEFLNAKTLVTEDRDALIDAAADKIEKDLILLGSTAVEDKLQKGVPDCIEKLSQAGVKIWVLTGDKTETAINIGYACSLLREGMKQILVTLDSSDIEALEKQGDKEAVAKLREGMSQTAAVTDNSAKENSEMFGLVIDGKSLTYALDSKLEKEFLELAIRCNSVICCRSSPKQKALVTRLVKNGTGRTTLAIGDGANDVGMLQEADIGVGISGAEGMQAVMASDFAIAQFRFLERLLLVHGHWCYRRITLMICYFFYKNLAFGFTLFWYEAYASFSGKPAYNDWYMSCYNVFFTSLPVIALGVFDQDVSARLCLKYPLLYQEGVQNVLFSWERILGWMLNGVISSMIIFFLTINTMATQAFRKDGQVVDYSVLGVTMYSSVVWTVNCQMAISINYFTWIQHCFIWGSIGVWYLFLVIYGSLPPTFSTTAFQVFVETSAPSPIYWLVLFLVVFSALLPYFTYRAFQIKFRPMYHDIIVEQRRTERTETAPNAVLGELPVQVEFTLHHLRANLSRRDSWN

SEQ ID NO: 30810 - DNA, 540 bp, Arabidopsis thaliana
  misc_feature (1)..(540): Ceres Seq. ID no. 4973596
atgcaagactcttcctctcacgaatcgcaacgtaacctccggtcaccggtgccggagaaaaccggaaagagttctaagactaaaaatgagcaaaaaggtgtttctaaacaaccaaattttcgtggggtcagaatgagacaatggggaaaatgggtgtctgaaattagagaaccaagaaagaaatcaagaatatggctcggtactttctctacgccggagatggcggcgcgtgcacacgacgtggcggctttagccatcaaaggtggctctgcccaccttaatttcccggagctagcttaccatttgccgagaccggctagcgcggaccctaaagacattcaagaagccgccgccgcagcagctgccgttgactggaaagcaccggagtctccgtctagcaccgtgacgtcatctccagtcgccgacgacgctttctccgatcttcctgatcttttgcttgacgtgaatgatcacaacaaaaacgatggattctgggactcgtttccgtacgaagatcctttcttcttggaaaattactag

SEQ ID NO: 30811 - protein, 179 aa, Arabidopsis thaliana; identical to SEQ ID NO: 28039
  misc_feature (1)..(179): Ceres Seq. ID no. 4973597

SEQ ID NO: 30812 - protein, 135 aa, Arabidopsis thaliana; identical to SEQ ID NO: 28040
  misc_feature (1)..(135): Ceres Seq. ID no. 4973598

SEQ ID NO: 30813 - protein, 106 aa, Arabidopsis thaliana
  misc_feature (1)..(106): Ceres Seq. ID no. 4973599
MAARAHDVAALAIKGGSAHLNFPELAYHLPRPASADPKDIQEAAAAAAAVDWKAPESPSSTVTSSPVADDAFSDLPDLLLDVNDHNKNDGFWDSFPYEDPFFLENY

SEQ ID NO: 30814 - DNA, 2640 bp, Arabidopsis thaliana
  misc_feature (1)..(2640): Ceres Seq. ID no. 4973674
atgctcttttgggttttgctcagtagtttctgtgtgttttgtttctccagtccagatggtttcttgagcttatcatgtggcggctcaagttacaccgctgcttataacatctcatgggtttcagacaacgattatatcgaaacaggtaacactaccacggttacttacgccgaggggaattctacttccagtgttcccatcagattattcccggatcctcaaggtcgccaatgttacaagttacctgtgaggaaagacttgtcttcagttctgattcgtgctacattcgtttatagaaactatgatagccagaatagtcctccagcatttcatgtctctcttggaaggagaatcactagtactgttgatcttagaaccaatgatccttggattgaagagttagtttggccagtcaacaatgattctcttttgctttgcttgcttgcggttaaaggaagaggtattccggttatctcttctctagaagtacggccacttcctttaggttcttacaaatacagcctggagggttcaccagatataattctcaggagaagttaccgaatcaatagcggatacacaaatgggactatccggtatccttcagatccatttgatcgaatatgggatccggatcaaagttattcaccgtttcacgcctcttggagcttcaatggactcacaaaattgaattccttcaatattactgagaatccaccagcttctgttcttaagacagcaagaattcttgctcgcaaagaaagtctttcatatactctttctctacatacaccaggggactactacattatcctctactttgctgggatactctcactctccccttcttttagtgtgacgatcaatgatgaagtcaaacaatctgattacaccgtaactagctcagaagctggtaccttgtactttacgcaaaaaggaatcagtaagttaaacatcaccctcagaaaaatcaagttcaatcctcaagtgagtgctcttgaggtatatgaaatcctccaaatccctcctgaagcttcttctaccacagtttcggcacttaaagtcatagagcaatttaccgggcaagaccttggatggcaagacgacccatgcacaccgcttccttggaaccacatcgaatgtgaaggaaaccgtgttacatcattgttcctttcaaaaatcaacctgaggtccattagtccaacattcggagacttgctcgatctcaaaacactcgacttgcataatacatcacttacaggagcaatacagaatgtaggcagccttaaggatctccagaaactgaatttgagcttcaatcagttagaatcttttggctccgagctggaagatctggttaaccttgaagttctggacctgcaaaacaacagcttacaaggatcagttcctgaaacattaggaaagctgaagaaacttcgtctcctgaatctggaaaacaataacttagtaggtcccttgccacagtctcttaacataacgggtctggaagtcaggataacgggaaatccatgcctttcgttctcttcaatatcatgcaacaatgtgtcttcaacaattgacacaccacaagtcactatccctatcaataagaaacaaagaaaacagaaccgtatagcgatcttgcttggagtttctggtggagccttgtttgccacctttcttgtctttgttttcatgtcgatcttcacgaggagacagagaaacaaagagagagatataaccagagcacaactgaaaatgcagaactggaacgcttcaagaatcttttctcacaaagagatcaagtcagctactagaaatttcaaggaagtgattggtcgtggaagttttggagctgtataccgtggaaaactaccagatggaaaacaagttgcggtcaaagtgcaccttttgtctcagatccgccaccaaaatctagtttcatttgagggcttctgctatgaaccaaaacgtcaaatactggtgtatgagtatctgtctggtggatccttagctgatcacctttacggtccacgtagcaaaaggcattcattgaactgggtttcaagactaaaagttgctgttgatgctgcaaaaggattggactacctgcataatggaagtgagccgagaattatacatcgggatgtaaagagcagtaacatacttttagacaaggatatgaacgcgaaagtttctgattttggcctgtcaaaacaatttacaaaagcagatgcatctcatattactactgttgttaaaggcaccgcaggctaccttgaccccgaatattactctaccctgcagctgacagagaaaagtgatgtctatagctttggtgtggttctgttggagcttatctgtggaagagaacccttaagtcactcaggatcaccagattcgtttaacttggtcttatgggctaggccaaacttacaagcaggagcttttgagattgtggatgatatcttgaaggagacatttgatccagcgagcatgaaaaaagctgcttcgattgctataagatgtgtgggaagagatgcatctggaagaccgtctatcgccgaagttttgactaaactgaaagaagcgtacagtcttcaactctcatatctagctgcttcagcacatacagactga

SEQ ID NO: 30815 - protein, 879 aa, Arabidopsis thaliana
  misc_feature (1)..(879): Ceres Seq. ID no. 4973675
MLFWVLLSSFCVFCFSSPDGFLSLSCGGSSYTAAYNISWVSDNDYIETGNTTTVTYAEGNSTSSVPIRLFPDPQGRQCYKLPVRKDLSSVLIRATFVYRNYDSQNSPPAFHVSLGRRITSTVDLRTNDPWIEELVWPVNNDSLLLCLLAVKGRGIPVISSLEVRPLPLGSYKYSLEGSPDIILRRSYRINSGYTNGTIRYPSDPFDRIWDPDQSYSPFHASWSFNGLTKLNSFNITENPPASVLKTARILARKESLSYTLSLHTPGDYYIILYFAGILSLSPSFSVTINDEVKQSDYTVTSSEAGTLYFTQKGISKLNITLRKIKFNPQVSALEVYEILQIPPEASSTTVSALKVIEQFTGQDLGWQDDPCTPLPWNHIECEGNRVTSLFLSKINLRSISPTFGDLLDLKTLDLHNTSLTGAIQNVGSLKDLQKLNLSFNQLESFGSELEDLVNLEVLDLQNNSLQGSVPETLGKLKKLRLLNLENNNLVGPLPQSLNITGLEVRITGNPCLSFSSISCNNVSSTIDTPQVTIPINKKQRKQNRIAILLGVSGGALFATFLVFVFMSIFTRRQRNKERDITRAQLKMQNWNASRIFSHKEIKSATRNFKEVIGRGSFGAVYRGKLPDGKQVAVKVHLLSQIRHQNLVSFEGFCYEPKRQILVYEYLSGGSLADHLYGPRSKRHSLNWVSRLKVAVDAAKGLDYLHNGSEPRIIHRDVKSSNILLDKDMNAKVSDFGLSKQFTKADASHITTVVKGTAGYLDPEYYSTLQLTEKSDVYSFGVVLLELICGREPLSHSGSPDSFNLVLWARPNLQAGAFEIVDDILKETFDPASMKKAASIAIRCVGRDASGRPSIAEVLTKLKEAYSLQLSYLAASAHTD

SEQ ID NO: 30816 - DNA, 981 bp, Arabidopsis thaliana
  misc_feature (1)..(981): Ceres Seq. ID no. 4973692
atgaacagagacgaaatattgtccaaattcatttcttacagtaacaaacaggaaaaaaagatggagagaagcttgaagaagacgaagaacaattataacaactccataaagagcaatcttatgaaagatgatgaattgtttcatgtgattcacaaagttccctgtggagacactccttatgtcagagccaaacatgctcagttgatagagaagaacccggagatggcaatagtgtggttttggaaagccatcaacactggagacagagtagacagtgccctcaaggacatggctgttgtaatgaaacaacttgaccgttctgaagaagctattgaagctatcaaatctttccgtcctcgttgttccaagaattcccaagattcccttgacaatgtcctcatcgacttatacaagaaatgtgggagaatggaggagcaagttgagttgttgaagaggaaattaaggcagatctatcaaggagaagctttcaatggtaaacctaccaaaaccgctcgctcccacggaaaaaagtttcaagtgactgttcaacaagaaatctcaagattactgggtaacttggggtgggcatatatgcaacaagccaagtacttatcggccgaagcggtatacagaaaagcccagatggttgagccagatgctaacaaatcgtgcaaccttgcgatgtgccttatcaaacaaggcaggtttgaggagggaagattggttcttgacgatgttctcgagtatagggttttgggtgcggatgattgtagaacaaggcaacgggccgaagagcttctgagtgaattagagtcttcgctgccacggatgcgagatgctgagatggaggatgtcttgggaaatatcttagacgatgactttgttcttgggcttgaagagatgacatccactagttttaaatctaagagactcccaatcttcgaacagatctcgtcttttagaaatacattagtttgctag

SEQ ID NO: 30817 - protein, 326 aa, Arabidopsis thaliana
  misc_feature (1)..(326): Ceres Seq. ID no. 4973693
MNRDEILSKFISYSNKQEKKMERSLKKTKNNYNNSIKSNLMKDDELFHVIHKVPCGDTPYVRAKHAQLIEKNPEMAIVWFWKAINTGDRVDSALKDMAVVMKQLDRSEEAIEAIKSFRPRCSKNSQDSLDNVLIDLYKKCGRMEEQVELLKRKLRQIYQGEAFNGKPTKTARSHGKKFQVTVQQEISRLLGNLGWAYMQQAKYLSAEAVYRKAQMVEPDANKSCNLAMCLIKQGRFEEGRLVLDDVLEYRVLGADDCRTRQRAEELLSELESSLPRMRDAEMEDVLGNILDDDFVLGLEEMTSTSFKSKRLPIFEQISSFRNTLVC

SEQ ID NO: 30818 - protein, 306 aa, Arabidopsis thaliana; identical to SEQ ID NO: 28768
  misc_feature (1)..(306): Ceres Seq. ID no. 4973694

SEQ ID NO: 30819 - protein, 286 aa, Arabidopsis thaliana; identical to SEQ ID NO: 28769
  misc_feature (1)..(286): Ceres Seq. ID no. 4973695

SEQ ID NO: 30820 - DNA, 2787 bp, Arabidopsis thaliana
  misc_feature (1)..(2787): Ceres Seq. ID no. 4973903
atgtttgaggaaaagatcatggatattggtgaagatgtaaaacctttaaactcttctgatactaaagttgatccggcagtacctgcatctttgacatggcaaagaaagatagatagtgacgtaaaagctccacgggaattcaatctgagtgttaaagagattttccagctggctcctgttggcattcggttatggtttctttgcagagaagaagctgctaaaggaaggttggccttcatagatccattctccaagcactctgtaacgtcttcccatggtgttccacttggaggtattggagctggaagcataggaaggagttttaaaggtgaattccagagatggcagctattccctccaaaatgtgaagatgaaccagtgttagcaaatcaattctcagcatttgtttcacgtgctaatggtaaaaagtactcgagtgtgttatgtcctaggaacccaaagcttgacaaacaagattcggaatcaggtattggttcttgggactggaatctgaaaggagacaagtctacataccatgctttatatccgaggtcttggacaatgtatgagggtaatatatatgcttttgaatacagcttcacacttgtgaacctgatccagagcttaggattgtttgtcgtcaagtttcaccctttatacctcacaactacaaagaaagcagctttccagtgtctgttttcactttcacaaacagcaaacggattaccatcattgtcatatgcaatttcagctcaggccaccgatggtgttagtgtctcagcttgcccatttttcatagtgtctggaaagcaggatggaatcacagcaaaagatatgtggcaggctgtcaaagagaatggttctttcgatcacttaaaggcttctgaggcgtcaatgcagtcagatcacggttcatccattggggcagcagtagcagcctctgtaacagtcctaccgggagagtcacgcattgtcacattttctctggcttgggactgccctgaagtgcagtttcctagtggtaaaatatattctaggcaacctattaaacagaatcttttcaggcgttacacaaagttttatggcaataatggtgatgctgcagcacaaattgcacatgatgctattcttggacatagtcaatgggagtcctggatagaagattggcaaagaccaatacttgaagacaaaagactgcctgcatggtaccctgtcactctcttcaacgagctttattaccttaattcaggaggaactctttggacagatggatcatccccagtacatagcttggcaggagtcagagaaaagaagttctcacttgataaatcccaactcggtctaaagaacgatatcgatgtaccgcatcagaatgatacagctgtctctgtccttgaaaagatggcttctacgcttgaggaacttcatgcatcaacaacgtcaaactctgcatttggcacaaaattacttgaagaaggagaagagaacattgggcacttcctttacttagaagggattgaatatcgtatgtggaacacttacgatgttcatttctatgcatcttttgcactggtgatgctgtttccaaaactggaacttagtatccaaagagactttgctgctgcagtgatgctacacgatcctactaaagtgaaaactcttagtgagggacaatgggttcagaggaaggttcttggtgcagttcctcatgacttaggcattaatgacccttggtttgaagttaatggatatactcttcacaatacggatcgttggaaagatttgaaccccaaatttgtcctccaggtgtaccgggatgtagttgccacaggcgataagaagtttgcatcagcggtctggccctcagtgtatgttgcaatggcatatatggctcagtttgacaaagatggcgacggaatgattgagaacgaaggatttccagatcagacttacgatacatggtcggcgtctggtgtaagcgcttactgtggtggactttgggtggctgcactgcaagctgcatctgcattggcacgcgtagtgggtgacaagaactctcaggattatttctggtctaagtttcagaaagcaaaagttgtatatgagaagaagttatggaatggatcttactttaactatgataatagtggaagtcagtatagctcaactatccaagctgatcaactagctggtcaatggtacgcgagagcatcagggcttttgcctatagtagatgaagacaaagcaagaactgctttggagaaagtttataactataatgtgatgaagattaaagatgggaaacgtggagctgtaaatgggatgcatcccaatgggaaagttgatacagcgtcaatgcaatcacgagagatatggtccggtgttacatatgcactgtctgcaacaatgatccaagaaggtctagttgaaatggcgtttcagactgcaagtggtatctatgaagctgcctggtctgaaaccggactcgggtattcctttcagacgcctgaatcttggaacacggttgatgagtatagatcattgacttacatgcgtccccttgcaatatgggctatgcaatgggcactgacaaaaaccagtcaaaaacaggaacaacttggtcttgaaccagagcaacaagaaccagaactagagcctagttcttcaatgaaacatgatattgggttttctcgggtttctaggcttctgagcttacctaatgaagcatcagccaaaagcacactccagactttgttcgactatacttgcaggagaatgatgtcatag

SEQ ID NO: 30821 - protein, 928 aa, Arabidopsis thaliana
  misc_feature (1)..(928): Ceres Seq. ID no. 4973904
MFEEKIMDIGEDVKPLNSSDTKVDPAVPASLTWQRKIDSDVKAPREFNLSVKEIFQLAPVGIRLWFLCREEAAKGRLAFIDPFSKHSVTSSHGVPLGGIGAGSIGRSFKGEFQRWQLFPPKCEDEPVLANQFSAFVSRANGKKYSSVLCPRNPKLDKQDSESGIGSWDWNLKGDKSTYHALYPRSWTMYEGNIYAFEYSFTLVNLIQSLGLFVVKFHPLYLTTTKKAAFQCLFSLSQTANGLPSLSYAISAQATDGVSVSACPFFIVSGKQDGITAKDMWQAVKENGSFDHLKASEASMQSDHGSSIGAAVAASVTVLPGESRIVTFSLAWDCPEVQFPSGKIYSRQPIKQNLFRRYTKFYGNNGDAAAQIAHDAILGHSQWESWIEDWQRPILEDKRLPAWYPVTLFNELYYLNSGGTLWTDGSSPVHSLAGVREKKFSLDKSQLGLKNDIDVPHQNDTAVSVLEKMASTLEELHASTTSNSAFGTKLLEEGEENIGHFLYLEGIEYRMWNTYDVHFYASFALVMLFPKLELSIQRDFAAAVMLHDPTKVKTLSEGQWVQRKVLGAVPHDLGINDPWFEVNGYTLHNTDRWKDLNPKFVLQVYRDVVATGDKKFASAVWPSVYVAMAYMAQFDKDGDGMIENEGFPDQTYDTWSASGVSAYCGGLWVAALQAASALARVVGDKNSQDYFWSKFQKAKVVYEKKLWNGSYFNYDNSGSQYSSTIQADQLAGQWYARASGLLPIVDEDKARTALEKVYNYNVMKIKDGKRGAVNGMHPNGKVDTASMQSREIWSGVTYALSATMIQEGLVEMAFQTASGIYEAAWSETGLGYSFQTPESWNTVDEYRSLTYMRPLAIWAMQWALTKTSQKQEQLGLEPEQQEPELEPSSSMKHDIGFSRVSRLLSLPNEASAKSTLQTLFDYTCRRMMS

SEQ ID NO: 30822 - protein, 922 aa, Arabidopsis thaliana
  misc_feature (1)..(922): Ceres Seq. ID no. 4973905
MDIGEDVKPLNSSDTKVDPAVPASLTWQRKIDSDVKAPREFNLSVKEIFQLAPVGIRLWFLCREEAAKGRLAFIDPFSKHSVTSSHGVPLGGIGAGSIGRSFKGEFQRWQLFPPKCEDEPVLANQFSAFVSRANGKKYSSVLCPRNPKLDKQDSESGIGSWDWNLKGDKSTYHALYPRSWTMYEGNIYAFEYSFTLVNLIQSLGLFVVKFHPLYLTTTKKAAFQCLFSLSQTANGLPSLSYAISAQATDGVSVSACPFFIVSGKQDGITAKDMWQAVKENGSFDHLKASEASMQSDHGSSIGAAVAASVTVLPGESRIVTFSLAWDCPEVQFPSGKIYSRQPIKQNLFRRYTKFYGNNGDAAAQIAHDAILGHSQWESWIEDWQRPILEDKRLPAWYPVTLFNELYYLNSGGTLWTDGSSPVHSLAGVREKKFSLDKSQLGLKNDIDVPHQNDTAVSVLEKMASTLEELHASTTSNSAFGTKLLEEGEENIGHFLYLEGIEYRMWNTYDVHFYASFALVMLFPKLELSIQRDFAAAVMLHDPTKVKTLSEGQWVQRKVLGAVPHDLGINDPWFEVNGYTLHNTDRWKDLNPKFVLQVYRDVVATGDKKFASAVWPSVYVAMAYMAQFDKDGDGMIENEGFPDQTYDTWSASGVSAYCGGLWVAALQAASALARVVGDKNSQDYFWSKFQKAKVVYEKKLWNGSYFNYDNSGSQYSSTIQADQLAGQWYARASGLLPIVDEDKARTALEKVYNYNVMKIKDGKRGAVNGMHPNGKVDTASMQSREIWSGVTYALSATMIQEGLVEMAFQTASGIYEAAWSETGLGYSFQTPESWNTVDEYRSLTYMRPLAIWAMQWALTKTSQKQEQLGLEPEQQEPELEPSSSMKHDIGFSRVSRLLSLPNEASAKSTLQTLFDYTCRRMMS

SEQ ID NO: 30823 - protein, 741 aa, Arabidopsis thaliana
  misc_feature (1)..(741): Ceres Seq. ID no. 4973906
MYEGNIYAFEYSFTLVNLIQSLGLFVVKFHPLYLTTTKKAAFQCLFSLSQTANGLPSLSYAISAQATDGVSVSACPFFIVSGKQDGITAKDMWQAVKENGSFDHLKASEASMQSDHGSSIGAAVAASVTVLPGESRIVTFSLAWDCPEVQFPSGKIYSRQPIKQNLFRRYTKFYGNNGDAAAQIAHDAILGHSQWESWIEDWQRPILEDKRLPAWYPVTLFNELYYLNSGGTLWTDGSSPVHSLAGVREKKFSLDKSQLGLKNDIDVPHQNDTAVSVLEKMASTLEELHASTTSNSAFGTKLLEEGEENIGHFLYLEGIEYRMWNTYDVHFYASFALVMLFPKLELSIQRDFAAAVMLHDPTKVKTLSEGQWVQRKVLGAVPHDLGINDPWFEVNGYTLHNTDRWKDLNPKFVLQVYRDVVATGDKKFASAVWPSVYVAMAYMAQFDKDGDGMIENEGFPDQTYDTWSASGVSAYCGGLWVAALQAASALARVVGDKNSQDYFWSKFQKAKVVYEKKLWNGSYFNYDNSGSQYSSTIQADQLAGQWYARASGLLPIVDEDKARTALEKVYNYNVMKIKDGKRGAVNGMHPNGKVDTASMQSREIWSGVTYALSATMIQEGLVEMAFQTASGIYEAAWSETGLGYSFQTPESWNTVDEYRSLTYMRPLAIWAMQWALTKTSQKQEQLGLEPEQQEPELEPSSSMKHDIGFSRVSRLLSLPNEASAKSTLQTLFDYTCRRMMS

SEQ ID NO: 30824 - DNA, 663 bp, Arabidopsis thaliana
  misc_feature (1)..(663): Ceres Seq. ID no. 4973949
atgtctgccatggtctcggccttgacacaggtggtttctgctcgctctcagactgaggctgaaggtgctcactctcagactgaggctgaaggtgctcactcttcttcctcttcggctggacataaaagaggatggcttggaatcgattctgctcctattccctcatcatttgctcgtgtagactcttcacataatccgatcgaggaagcaagggagaaaaaaaggaggtacagaggagtaaggcagagaccatggggcaaatgggcagctgagatacgtgatccacatagagccgctagggtttggctcgggacgtttgatacagcggaggccgcggctagagcctacgacgaggctgcactccggttccgtggaaataaagcaaagctaaatttcccagaggatgtaaggattcttcctcctccccctcctcttcttcgttcaccagctgacacggtggcgaataaagcagaagaggatctgataaattattggagttatacaaagttgttgcaaagttcaggccaacggtcatttctcgagcgaggacaagaagagagtagtaacatatttgaacattcaccaatggaacaacctctgcctccttcaagttctggtccaagttcctctaattttcctgcaccttctctacctaatacatag

SEQ ID NO: 30825 - protein, 220 aa, Arabidopsis thaliana
  misc_feature (1)..(220): Ceres Seq. ID no. 4973950
MSAMVSALTQVVSARSQTEAEGAHSQTEAEGAHSSSSSAGHKRGWLGIDSAPIPSSFARVDSSHNPIEEAREKKRRYRGVRQRPWGKWAAEIRDPHRAARVWLGTFDTAEAAARAYDEAALRFRGNKAKLNFPEDVRILPPPPPLLRSPADTVANKAEEDLINYWSYTKLLQSSGQRSFLERGQEESSNIFEHSPMEQPLPPSSSGPSSSNFPAPSLPNT

SEQ ID NO: 30826 - protein, 217 aa, Arabidopsis thaliana
  misc_feature (1)..(217): Ceres Seq. ID no. 4973951
MVSALTQVVSARSQTEAEGAHSQTEAEGAHSSSSSAGHKRGWLGIDSAPIPSSFARVDSSHNPIEEAREKKRRYRGVRQRPWGKWAAEIRDPHRAARVWLGTFDTAEAAARAYDEAALRFRGNKAKLNFPEDVRILPPPPPLLRSPADTVANKAEEDLINYWSYTKLLQSSGQRSFLERGQEESSNIFEHSPMEQPLPPSSSGPSSSNFPAPSLPNT

SEQ ID NO: 30827 - DNA, 1434 bp, Arabidopsis thaliana
  misc_feature (1)..(1434): Ceres Seq. ID no. 4974020
atgtacatggcaatcatgattatcctcttccttagctccattcttctttctctcctattgctccttagaaaacatttgtcacacttctcctatcccaaccttcctcccggaaataccggccttcccttaatcggagagagtttctccttcctctctgctggccgtcaaggccatccagagaagttcatcactgaccgagttcgtcgtttctcctcctcctcctcatgtgtcttcaagacccacctctttgggtctcccaccgcggtggtgactggtgcatctgggaacaagtttctattcactaacgagaacaagcttgtggtctcgtggtggccagattccgttaataagatcttcccttcttcaatgcagacgagctccaaagaagaagccaggaagctgaggatgcttctttcgcagttcatgaagcccgaggctttgaggaggtatgttggtgttatggatgagattgctcaaagacattttgagacggaatgggccaatcaagatcaagtcattgtcttccctcttaccaaaaagttcacgttttcaatagcatgccgttcgttcctgagcatggaagatcccgcaagagtaaggcaactagaagagcaattcaatacggtagcggtagggatcttctcaatcccaatagacttgccaggaacacggtttaaccgagccatcaaggcgtcgaggttactcagaaaagaggtttccgctatcgtaaggcagaggaaagaagagctcaaagccgggaaagcattagaggagcacgacatattatctcacatgttgatgaatataggagagaccaaagacgaggatttggctgataaaattattggattgttaatcggaggacatgacacagctagtatcgtatgcactttcgttgtcaattatcttgctgaattccctcatgtctaccaacgtgtgctacaagagcaaaaggagatactaaaggagaaaaaagaaaaggaaggattaaggtgggaggacattgagaaaatgagatattcatggaatgttgcatgtgaagtgatgagaattgttcctcctctttctggcacttttcgtgaggccattgatcacttctcttttaagggtttttacattcccaaaggatggaagttatattggagtgccaccgcgacacatatgaatccagactacttcccagaaccagagagatttgagccaaaccgtttcgaaggaagtggtccgaagccttatacctatgttccatttggaggaggaccaagaatgtgtccagggaaagagtatgctcgtctagagattcttatattcatgcacaatcttgttaatagatttaagtgggaaaaagtgtttccaaatgaaaataaaatagttgttgatcccttaccaataccagacaaaggtctccctataagaatttttcctcaatcttga

SEQ ID NO: 30828 - protein, 477 aa, Arabidopsis thaliana
  misc_feature (1)..(477): Ceres Seq. ID no. 4974021
MYMAIMIILFLSSILLSLLLLLRKHLSHFSYPNLPPGNTGLPLIGESFSFLSAGRQGHPEKFITDRVRRFSSSSSCVFKTHLFGSPTAVVTGASGNKFLFTNENKLVVSWWPDSVNKIFPSSMQTSSKEEARKLRMLLSQFMKPEALRRYVGVMDEIAQRHFETEWANQDQVIVFPLTKKFTFSIACRSFLSMEDPARVRQLEEQFNTVAVGIFSIPIDLPGTRFNRAIKASRLLRKEVSAIVRQRKEELKAGKALEEHDILSHMLMNIGETKDEDLADKIIGLLIGGHDTASIVCTFVVNYLAEFPHVYQRVLQEQKEILKEKKEKEGLRWEDIEKMRYSWNVACEVMRIVPPLSGTFREAIDHFSFKGFYIPKGWKLYWSATATHMNPDYFPEPERFEPNRFEGSGPKPYTYVPFGGGPRMCPGKEYARLEILIFMHNLVNRFKWEKVFPNENKIVVDPLPIPDKGLPIRIFPQS

SEQ ID NO: 30829 - protein, 475 aa, Arabidopsis thaliana
  misc_feature (1)..(475): Ceres Seq. ID no. 4974022
MAIMIILFLSSILLSLLLLLRKHLSHFSYPNLPPGNTGLPLIGESFSFLSAGRQGHPEKFITDRVRRFSSSSSCVFKTHLFGSPTAVVTGASGNKFLFTNENKLVVSWWPDSVNKIFPSSMQTSSKEEARKLRMLLSQFMKPEALRRYVGVMDEIAQRHFETEWANQDQVIVFPLTKKFTFSIACRSFLSMEDPARVRQLEEQFNTVAVGIFSIPIDLPGTRFNRAIKASRLLRKEVSAIVRQRKEELKAGKALEEHDILSHMLMNIGETKDEDLADKIIGLLIGGHDTASIVCTFVVNYLAEFPHVYQRVLQEQKEILKEKKEKEGLRWEDIEKMRYSWNVACEVMRIVPPLSGTFREAIDHFSFKGFYIPKGWKLYWSATATHMNPDYFPEPERFEPNRFEGSGPKPYTYVPFGGGPRMCPGKEYARLEILIFMHNLVNRFKWEKVFPNENKIVVDPLPIPDKGLPIRIFPQS

SEQ ID NO: 30830 - protein, 472 aa, Arabidopsis thaliana
  misc_feature (1)..(472): Ceres Seq. ID no. 4974023
MIILFLSSILLSLLLLLRKHLSHFSYPNLPPGNTGLPLIGESFSFLSAGRQGHPEKFITDRVRRFSSSSSCVFKTHLFGSPTAVVTGASGNKFLFTNENKLVVSWWPDSVNKIFPSSMQTSSKEEARKLRMLLSQFMKPEALRRYVGVMDEIAQRHFETEWANQDQVIVFPLTKKFTFSIACRSFLSMEDPARVRQLEEQFNTVAVGIFSIPIDLPGTRFNRAIKASRLLRKEVSAIVRQRKEELKAGKALEEHDILSHMLMNIGETKDEDLADKIIGLLIGGHDTASIVCTFVVNYLAEFPHVYQRVLQEQKEILKEKKEKEGLRWEDIEKMRYSWNVACEVMRIVPPLSGTFREAIDHFSFKGFYIPKGWKLYWSATATHMNPDYFPEPERFEPNRFEGSGPKPYTYVPFGGGPRMCPGKEYARLEILIFMHNLVNRFKWEKVFPNENKIVVDPLPIPDKGLPIRIFPQS

SEQ ID NO: 30831 - DNA, 1317 bp, Arabidopsis thaliana
  misc_feature (1)..(1317): Ceres Seq. ID no. 4974092
atggattcagatgcatgggaaattatccatatacctgaaaagccttcattgtcacctgaccatcagcccactgtgaaggtatatgctagcctaatcaaacccagatttgccaatacgatagtgaggcatttatgtaagattgctcctctagaagatcttcgtcatgttaaaagggtgaagaagaagattctgccagattgcggtgaaactcagttgactgtcatcttatgtctagcacctgagcacaacgatcagttgagtgacatgccacctgatgtgcagagactcgttgatccctatgagttgagtccttttattacacaagtaggttatttttctcttatctcaccactatttgcttcaagggtttttgattcatttagcttccaagtatgcaaatatgctgcggtatccaaagaagagtgggaagaacaaacaatatatgtctttgtttatagtgcaacagtcaatgattttttactttttgcatttggcaatgatagcaatatagatggcatcggtgggttcagcgaggaggaaacacaatcaatctgcaagttcatgagagttgttattgatatggcagtatctggtcatacaccacttgtgaatgctgcagtgatagttgatccttcagttaggcgaataatagctagtgaaactgatcaagtatatgcatcatctgctcctcgtgacatgactagcgcagagaccaggcccttcgaggaaacaggggaaatatgtttaaatgacacacttgaaaaacagaatggttcattgtctgctctttcttgtctgaatccctggcaatggagtttgcagccgcatgacactgaaaattgtagccagtggcatcctcttaggcatgcttccatggttgccattgaatcctcttctgccagagatagaaatctgtttcccaatccatccaagatttttgatcaggatcatgttccgccctcaaatacagattctccggctaaaaagcagaaaacaagcagtcagagtccagacgtccaaaatgacagcagagaagagactgttagagatccttcaatggaaaggccgtacctctgcactggttatgacattttcctcctgttggagccttgtacaattcgtgatatgttcccaaggtgtgctatggcgcttgtgcatcaaagaataaaacggattttctatgcttttccaaacaccacggcaggtggtctcgggagtgttcatagacttcaaggggaaaagagtttgaaccatcattatgcagtgtttagagttttgctgcctgatgacgcacttagacaaatgaccacggtctaa

SEQ ID NO: 30832 - protein, 438 aa, Arabidopsis thaliana
  misc_feature (1)..(438): Ceres Seq. ID no. 4974093
MDSDAWEIIHIPEKPSLSPDHQPTVKVYASLIKPRFANTIVRHLCKIAPLEDLRHVKRVKKKILPDCGETQLTVILCLAPEHNDQLSDMPPDVQRLVDPYELSPFITQVGYFSLISPLFASRVFDSFSFQVCKYAAVSKEEWEEQTIYVFVYSATVNDFLLFAFGNDSNIDGIGGFSEEETQSICKFMRVVIDMAVSGHTPLVNAAVIVDPSVRRIIASETDQVYASSAPRDMTSAETRPFEETGEICLNDTLEKQNGSLSALSCLNPWQWSLQPHDTENCSQWHPLRHASMVAIESSSARDRNLFPNPSKIFDQDHVPPSNTDSPAKKQKTSSQSPDVQNDSREETVRDPSMERPYLCTGYDIFLLLEPCTIRDMFPRCAMALVHQRIKRIFYAFPNTTAGGLGSVHRLQGEKSLNHHYAVFRVLLPDDALRQMTTV

SEQ ID NO: 30833 - protein, 350 aa, Arabidopsis thaliana
  misc_feature (1)..(350): Ceres Seq. ID no. 4974094
MPPDVQRLVDPYELSPFITQVGYFSLISPLFASRVFDSFSFQVCKYAAVSKEEWEEQTIYVFVYSATVNDFLLFAFGNDSNIDGIGGFSEEETQSICKFMRVVIDMAVSGHTPLVNAAVIVDPSVRRIIASETDQVYASSAPRDMTSAETRPFEETGEICLNDTLEKQNGSLSALSCLNPWQWSLQPHDTENCSQWHPLRHASMVAIESSSARDRNLFPNPSKIFDQDHVPPSNTDSPAKKQKTSSQSPDVQNDSREETVRDPSMERPYLCTGYDIFLLLEPCTIRDMFPRCAMALVHQRIKRIFYAFPNTTAGGLGSVHRLQGEKSLNHHYAVFRVLLPDDALRQMTTV

SEQ ID NO: 30834 - protein, 251 aa, Arabidopsis thaliana
  misc_feature (1)..(251): Ceres Seq. ID no. 4974095
MRVVIDMAVSGHTPLVNAAVIVDPSVRRIIASETDQVYASSAPRDMTSAETRPFEETGEICLNDTLEKQNGSLSALSCLNPWQWSLQPHDTENCSQWHPLRHASMVAIESSSARDRNLFPNPSKIFDQDHVPPSNTDSPAKKQKTSSQSPDVQNDSREETVRDPSMERPYLCTGYDIFLLLEPCTIRDMFPRCAMALVHQRIKRIFYAFPNTTAGGLGSVHRLQGEKSLNHHYAVFRVLLPDDALRQMTTV

SEQ ID NO: 30835 - DNA, 1008 bp, Arabidopsis thaliana
  misc_feature (1)..(1008): Ceres Seq. ID no. 4974111
atgaaaatcttgatcttgattctatcctttgtgacactctttgagatttgcgttgtggacgcatgtcgatcatactgtggaaacataaccgttgattatccgtttgggatccgaaacggatgtgggcatccagggtatagagatctattgttttgtatgaacgatgtgttgatgtttcacataagttcaggttcttatagagttttggacatcgattacgcatatcagtccataacactgcatgatcctcacatgtcgaactgcgaaaccatcgtgctcggtggcaaaggcaatggctttgaagctgaggattggagaactccatatttcaatcctacctcagataatgtctttatgttgatcggatgttctcctaaatctcctatatttcaaggcttcccggaaaagaaagtgccgtgccgcaacatctctggaatgagctgcgaagaatacatgtcatgtccagcttgggacatggtcggatacagacaaccgggtatacattccgggtcaggtccacccatgtgttgtggggtcgggttcgaatccgtaaaagcgattaatctaagtaagttggagtgtgaaggatacagtagtgcgtataatctagcacccttgaaacttagaggaccctctgattgggcttatgggatacgtgttaagtatgaactccaaggaagtgatgcgttttgtcgtgcgtgtgttgcaacttctgggacttgtggctatgaacctgctgatggtggagggcttagacatgtttgcatgtgtgacaaccataattccactacaaactgtgattcagttatatcaccaaccggtgcatcatcaagtgttcgaccaaaagctatcggatgtaagtttcaaaatgcatttacgtgtactctagtttttgtacagatttatttgactttaaccgtacctaaattactaccctttttttttgttgcagcactgatcatctacttcatagctatgaacataggctttcagagaagacagcgatga

SEQ ID NO: 30836 - protein, 335 aa, Arabidopsis thaliana
  misc_feature (1)..(335): Ceres Seq. ID no. 4974112
MKILILILSFVTLFEICVVDACRSYCGNITVDYPFGIRNGCGHPGYRDLLFCMNDVLMFHISSGSYRVLDIDYAYQSITLHDPHMSNCETIVLGGKGNGFEAEDWRTPYFNPTSDNVFMLIGCSPKSPIFQGFPEKKVPCRNISGMSCEEYMSCPAWDMVGYRQPGIHSGSGPPMCCGVGFESVKAINLSKLECEGYSSAYNLAPLKLRGPSDWAYGIRVKYELQGSDAFCRACVATSGTCGYEPADGGGLRHVCMCDNHNSTTNCDSVISPTGASSSVRPKAIGCKFQNAFTCTLVFVQIYLTLTVPKLLPFFFVAALIIYFIAMNIGFQRRQR

SEQ ID NO: 30837 - protein, 283 aa, Arabidopsis thaliana
  misc_feature (1)..(283): Ceres Seq. ID no. 4974113
MNDVLMFHISSGSYRVLDIDYAYQSITLHDPHMSNCETIVLGGKGNGFEAEDWRTPYFNPTSDNVFMLIGCSPKSPIFQGFPEKKVPCRNISGMSCEEYMSCPAWDMVGYRQPGIHSGSGPPMCCGVGFESVKAINLSKLECEGYSSAYNLAPLKLRGPSDWAYGIRVKYELQGSDAFCRACVATSGTCGYEPADGGGLRHVCMCDNHNSTTNCDSVISPTGASSSVRPKAIGCKFQNAFTCTLVFVQIYLTLTVPKLLPFFFVAALIIYFIAMNIGFQRRQR

SEQ ID NO: 30838 - protein, 278 aa, Arabidopsis thaliana
  misc_feature (1)..(278): Ceres Seq. ID no. 4974114
MFHISSGSYRVLDIDYAYQSITLHDPHMSNCETIVLGGKGNGFEAEDWRTPYFNPTSDNVFMLIGCSPKSPIFQGFPEKKVPCRNISGMSCEEYMSCPAWDMVGYRQPGIHSGSGPPMCCGVGFESVKAINLSKLECEGYSSAYNLAPLKLRGPSDWAYGIRVKYELQGSDAFCRACVATSGTCGYEPADGGGLRHVCMCDNHNSTTNCDSVISPTGASSSVRPKAIGCKFQNAFTCTLVFVQIYLTLTVPKLLPFFFVAALIIYFIAMNIGFQRRQR

SEQ ID NO: 30839 - DNA, 1029 bp, Arabidopsis thaliana
  misc_feature (1)..(1029): Ceres Seq. ID no. 4974190
atggattcaatcaacaagatcatcaacttcttgtttcctctcttaaccttgtatgcacttcttgtcttctacccaacttaccagaggctcaaatccgccgtctccatctgccggaatctgttctcggaaaatgtcgccggaaaagttgttgtcatcaccggagcagcttctggcatcggcgaggctttagcgtatgagtacgggaagaggggagcgtatttagcacttgttgacataagaggagaacctctcttccatgtagcggctctcgctgagctctatggctcccctgaagtcttgcccttagtagccgatgtttccaaactccaagactgcgagcgttttatccgagccacggttcttcattttggacgattggatcatctagtgacaaatgcaggagttgctccactctatttttttgcagacatcgaagatgtctctaaggcttcgccggctatggacatcaacttttggggatctgtgtattgcacattttttgcttctccatacctaaagaagtttagaggaaggattgtggtgattgcttctggatgtggatacattgcttcacctagactaagcttttactgtgcgagtaaagctgctgtgatcgccttttatgaaacactaagaactgagtttggatcagatattggggttaccattgtagcaccggggatcgtcgattcggaaatgagccgaggcaagttcatgacaaaggacggtaaacttgtcgtcgataaagagctcagagatgtgcaaatgagcgtattgccagtagaatcagccgagaggtgtgcgaaagcaataatgcggagcgtatgtagaggagataggtacttgttggaacccgactggataggttgtgtcatattgttgaaggttttttgttctgaggcaacagagtgggtagcccggtggctgctgatagccagaccaaaatttccaatgatggaggctcttagcaacaagatccttgatgtagcccatgcctttaattctttcttctcttttcctcattattag

SEQ ID NO: 30840 - protein, 342 aa, Arabidopsis thaliana
  misc_feature (1)..(342): Ceres Seq. ID no. 4974191
MDSINKIINFLFPLLTLYALLVFYPTYQRLKSAVSICRNLFSENVAGKVVVITGAASGIGEALAYEYGKRGAYLALVDIRGEPLFHVAALAELYGSPEVLPLVADVSKLQDCERFIRATVLHFGRLDHLVTNAGVAPLYFFADIEDVSKASPAMDINFWGSVYCTFFASPYLKKFRGRIVVIASGCGYIASPRLSFYCASKAAVIAFYETLRTEFGSDIGVTIVAPGIVDSEMSRGKFMTKDGKLVVDKELRDVQMSVLPVESAERCAKAIMRSVCRGDRYLLEPDWIGCVILLKVFCSEATEWVARWLLIARPKFPMMEALSNKILDVAHAFNSFFSFPHY

SEQ ID NO: 30841 - protein, 189 aa, Arabidopsis thaliana
  misc_feature (1)..(189): Ceres Seq. ID no. 4974192
MDINFWGSVYCTFFASPYLKKFRGRIVVIASGCGYIASPRLSFYCASKAAVIAFYETLRTEFGSDIGVTIVAPGIVDSEMSRGKFMTKDGKLVVDKELRDVQMSVLPVESAERCAKAIMRSVCRGDRYLLEPDWIGCVILLKVFCSEATEWVARWLLIARPKFPMMEALSNKILDVAHAFNSFFSFPHY

SEQ ID NO: 30842 - DNA, 1083 bp, Arabidopsis thaliana
  misc_feature (1)..(1083): Ceres Seq. ID no. 4974326
atggcagctccggcgatcctaaacggcggcgatgcgacggagagagaaacacgaatggctcactctgcaatgacattggttcaggtcataaatggaggataccatgtggttacgaaagtagctcttaacgttggtgtaaatcagctcgttttttgtgtctttcgcgatcttcttgctctctccattctcgcacctctcgcttttttccgtgaaaggatatttgggaaccagttactatttcttatgggtttatcttacacgaatccaacttatgctgctgctatacaaccatcaatccctgtctttacatttctcttggctgtcttgatgggtacagaaaaagtgaacttgttgaaagtcgagggccaaacgaaagttggaggtactcttgtttgtgtttcgggtgctatagcgatggctttgtttcgtggtccagccttgtttggaggtaaagatgcagcagattcagtgaaaagtgtaattattgatagaagtcaaccagagcttaatgggtggttagtctctagttttcttggtcttgggtttgatcaatggcacattggagttttatgtttgattggaaactgtatgtgtatggctgcttttctcgctgtccaagcaccggttttgaagaagtatcctgcctacctttcggttgctgcgtattcatacttcttcggtgcatcaataatgatcacaacagctatcttgtttgttagagagcctaaagattggagcttaacacaatctgaggttcttgctgttatattcgcaggagtgtttgcctcagctctaaactatggactcttgacttggtccaataaaattcttggagctgctttggtttccctatacaatcctcttcagcctgcaacatcggcctttttatcgacaattttcctcggcagcccgatctatcttggaagcgttttgggtggaatcctcatcatttgcgggctttatatggttacttgggcatcttacagagagcaacaaacaacatcagctgggaatgagattgcttcttctagtgatgtaagaatctcggaacctttcatttacagagatgagactggtaaataa

SEQ ID NO: 30843 - protein, 360 aa, Arabidopsis thaliana
  misc_feature (1)..(360): Ceres Seq. ID no. 4974327
MAAPAILNGGDATERETRMAHSAMTLVQVINGGYHVVTKVALNVGVNQLVFCVFRDLLALSILAPLAFFRERIFGNQLLFLMGLSYTNPTYAAAIQPSIPVFTFLLAVLMGTEKVNLLKVEGQTKVGGTLVCVSGAIAMALFRGPALFGGKDAADSVKSVIIDRSQPELNGWLVSSFLGLGFDQWHIGVLCLIGNCMCMAAFLAVQAPVLKKYPAYLSVAAYSYFFGASIMITTAILFVREPKDWSLTQSEVLAVIFAGVFASALNYGLLTWSNKILGAALVSLYNPLQPATSAFLSTIFLGSPIYLGSVLGGILIICGLYMVTWASYREQQTTSAGNEIASSSDVRISEPFIYRDETGK

SEQ ID NO: 30844 - protein, 342 aa, Arabidopsis thaliana
  misc_feature (1)..(342): Ceres Seq. ID no. 4974328
MAHSAMTLVQVINGGYHVVTKVALNVGVNQLVFCVFRDLLALSILAPLAFFRERIFGNQLLFLMGLSYTNPTYAAAIQPSIPVFTFLLAVLMGTEKVNLLKVEGQTKVGGTLVCVSGAIAMALFRGPALFGGKDAADSVKSVIIDRSQPELNGWLVSSFLGLGFDQWHIGVLCLIGNCMCMAAFLAVQAPVLKKYPAYLSVAAYSYFFGASIMITTAILFVREPKDWSLTQSEVLAVIFAGVFASALNYGLLTWSNKILGAALVSLYNPLQPATSAFLSTIFLGSPIYLGSVLGGILIICGLYMVTWASYREQQTTSAGNEIASSSDVRISEPFIYRDETGK

SEQ ID NO: 30845 - protein, 337 aa, Arabidopsis thaliana
  misc_feature (1)..(337): Ceres Seq. ID no. 4974329
MTLVQVINGGYHVVTKVALNVGVNQLVFCVFRDLLALSILAPLAFFRERIFGNQLLFLMGLSYTNPTYAAAIQPSIPVFTFLLAVLMGTEKVNLLKVEGQTKVGGTLVCVSGAIAMALFRGPALFGGKDAADSVKSVIIDRSQPELNGWLVSSFLGLGFDQWHIGVLCLIGNCMCMAAFLAVQAPVLKKYPAYLSVAAYSYFFGASIMITTAILFVREPKDWSLTQSEVLAVIFAGVFASALNYGLLTWSNKILGAALVSLYNPLQPATSAFLSTIFLGSPIYLGSVLGGILIICGLYMVTWASYREQQTTSAGNEIASSSDVRISEPFIYRDETGK

SEQ ID NO: 30846 - DNA, 3708 bp, Arabidopsis thaliana
  misc_feature (1)..(3708): Ceres Seq. ID no. 4974461
atggcggttcctgtagaggaagcaatcgcagctctttccacattctccttagaggatgagcaaccagaagtccaaggaccggctgtgatggtttcagctgaaagagcagcaaccgatagtcccatcgaatatagtgacgtcgctgcataccggttgtctctatcagaagacacaaaagctcttaaccagctgaatacacttatacaagaaggaaaagagatggcgtcaattctatacacatatagaagttgtgtcaaagcactgcctcagcttcccgaatctatgaagcatagtcaagcggatttgtatctagaaacatatcaagttttggacttagaaatgagccgtttacgcgaaattcaaagatggcaatcgtcggcttcagctaaattagctgctgacatgcagcggttttccagacctgaacggcggatcaatggtcccacagtcacacatctttggtcaatgctaaagttgcttgacgtcttggttcagctggatcatcttaaaaatgctaaagctagcattcctaatgatttctcttggtataagagaacattcactcaagtcagtgcgcagtggcaagatacagatacaatgagagaagagttagacgacttgcagatcttcctgagcacaagatgggctattttactcaacctgcacgttgagatgttccgtgtaaacaagtatcctttcttccagacatttatcaccatcgtgtggcttgtggaagatattctccaagttctcatagtcttcatcgtggagtctctggagttggattttgcactactttttcctgagcggtatattcttctccgggttctacctgttcttgttgtcttagcaacaccatctgagaaagataccgaggctttatacaagagggtaaaactcaacagattgataaacattttcaagaatgatcctgtcattcctgcgtttccagatctccatctttctcctgctgcaattttgaaagaattgtcggtatactttcaaaagttttcatcacagactcgccttctgactcttccagcacctcatgagctccctccactcaatcacattggagctctccgtgctgagcatgacgatttcacaatccgatttgcttcatccatgaatcagtcaaacgatggagcatatactgaatggtgcagagaggtcaaaggaaacatgtacgatatggttgttgaaggtttccaactgttaagtagatggacagcacgcatttgggagcaatgtgcttggaaattctctcgcccatgtagggatgcaggagagactcctgaagcctccggatcatattctgattacgagaaggtggtgaggttcaattatactgcagaagaaaggaaagccttggtagaacttgttggctatataaagagtgtaggatcgatgctgcagcgctgtgacacattagttgcagatgctttatgggagacaatacatgccgaagttcaagattttgtacagaacacgttagccacaatgttgcgtaccaccttccgaaagaagaaagatctctcaaggattctttctgatatgcggacactttcagctgactggatggcaaataccaggcccgaacatgagatgccatcttcacaacatggaaatgatgaaagcagagggaatttcttttatccgaggcctgttgccccaacagcagcacaggtgcattgcttgcagtttttgatatatgaggttgtctctggtggaaatctgaggaggccagggggattctttggaaataatggctctgagattcctctttgtaagctgactcctcaacttcaatttacgatggctgcagcaagtattggaatattgactgatctggggttcctgtggtttagagaattttacctggagtcttcacgtgttattcagttcccgattgagtgttcactaccatggatgctgatagactacattctggaagcccagaattcaggccttcttgagagtgttctgctaccttttgacatttataatgactcagctcaacaagctctggttgttctgaggcagagattcctctatgatgaaattgaagctgaggtggaccatggttttgatatatttgtttcaaggctctcggagtctatattcacatattacaagagttggtcagcaagtgagcttcttgatccatcatttctctttgccttggacaatggtgaaaagttctccatccagcctgtgaggtttactgcgttatttaagatgacaaaagtaaaggacctatgtgctgtagtggaactggagaagctgatagatatcctaaagcactcgcatgaattgctttcacaagatctttccatagaccctttcagtctcatgttgaatgaaatgcaagaaaacatatctcttgtctcattttcaagtcgacttgctacacagatttggtcagagatgcagagtgatttcctaccaaacttcattctttgcaataccactcagcgatttgtccgttcatcgaaagttcctcctactcagaaaccatcagtgccttctgctaagcctagtttctattgtggcactcaagacttaaatgcagcgcatcaaagttttgcacgattgcatagtggatttttcgggataccacatttattttccatagttaaacttcttgggtccagatcattgccttggctaataagagctttactggaccatatatcaaataagataacaacacttgagccaatgatctctggattgcaagaagcattgcccaagtccattggattgctttcttttgatggtggtgttacaggttgtatgaagcttatacgagagcaactaaactggggcactaagtcagaactcaaatcagaagttctacgaggaataaaggaaattggaagtgtgatatatacaatgggacttctcgatatcgtattggtcagtcctgtagacacaaagcggttcatgcaaacagctccatggttgggattaatcccaggtgctgaaggacagatagttaatgctcaagacggcgaaagccctcttgtcaatctcttaaagtcagcaacttctgcagttgtatcaagtccaggttgtcttaatccagctgcgttctataccatgtccaaacaggcagaagctgcagatcttttgtacaaggcaaacatgaacggtgggagtgttcttgaatacacacttgcattcacaagtgcgtcgctcgacaaatattgcagtaaatggagtgctcctccaaagactggcttcgttgatattacaacttcaaaggatttttaccgtatatacggtggtcttcagattggatatctagaggagataacagctccacagtcagctcaacatgaagtcctcggtgattcaatagcttggggtggttgcaccattatttacttgctcggccagcaacttcactttgagttgtttgatttctcgtaccaagtactcaatgtctctgaggttgaaactgtctctgcttcacatacccataggaatccacaaatccatcagggatgggaaggtttgttggaagggatgaagaaagctcggaggctgaacaaccatgtcttctccatgcttaaagctcgttgtcctctagaagacaaaacggcatgtgccatcaaacagagcggcgcaccgctgccacgtgtcaggtttgagaataccgtgtctgctttcgagactctacctcagaaaggcaccgttggctga

SEQ ID NO: 30847 - protein, 1235 aa, Arabidopsis thaliana
  misc_feature (1)..(1235): Ceres Seq. ID no. 4974462
MAVPVEEAIAALSTFSLEDEQPEVQGPAVMVSAERAATDSPIEYSDVAAYRLSLSEDTKALNQLNTLIQEGKEMASILYTYRSCVKALPQLPESMKHSQADLYLETYQVLDLEMSRLREIQRWQSSASAKLAADMQRFSRPERRINGPTVTHLWSMLKLLDVLVQLDHLKNAKASIPNDFSWYKRTFTQVSAQWQDTDTMREELDDLQIFLSTRWAILLNLHVEMFRVNKYPFFQTFITIVWLVEDILQVLIVFIVESLELDFALLFPERYILLRVLPVLVVLATPSEKDTEALYKRVKLNRLINIFKNDPVIPAFPDLHLSPAAILKELSVYFQKFSSQTRLLTLPAPHELPPLNHIGALRAEHDDFTIRFASSMNQSNDGAYTEWCREVKGNMYDMVVEGFQLLSRWTARIWEQCAWKFSRPCRDAGETPEASGSYSDYEKVVRFNYTAEERKALVELVGYIKSVGSMLQRCDTLVADALWETIHAEVQDFVQNTLATMLRTTFRKKKDLSRILSDMRTLSADWMANTRPEHEMPSSQHGNDESRGNFFYPRPVAPTAAQVHCLQFLIYEVVSGGNLRRPGGFFGNNGSEIPLCKLTPQLQFTMAAASIGILTDLGFLWFREFYLESSRVIQFPIECSLPWMLIDYILEAQNSGLLESVLLPFDIYNDSAQQALVVLRQRFLYDEIEAEVDHGFDIFVSRLSESIFTYYKSWSASELLDPSFLFALDNGEKFSIQPVRFTALFKMTKVKDLCAVVELEKLIDILKHSHELLSQDLSIDPFSLMLNEMQENISLVSFSSRLATQIWSEMQSDFLPNFILCNTTQRFVRSSKVPPTQKPSVPSAKPSFYCGTQDLNAAHQSFARLHSGFFGIPHLFSIVKLLGSRSLPWLIRALLDHISNKITTLEPMISGLQEALPKSIGLLSFDGGVTGCMKLIREQLNWGTKSELKSEVLRGIKEIGSVIYTMGLLDIVLVSPVDTKRFMQTAPWLGLIPGAEGQIVNAQDGESPLVNLLKSATSAVVSSPGCLNPAAFYTMSKQAEAADLLYKANMNGGSVLEYTLAFTSASLDKYCSKWSAPPKTGFVDITTSKDFYRIYGGLQIGYLEEITAPQSAQHEVLGDSIAWGGCTIIYLLGQQLHFELFDFSYQVLNVSEVETVSASHTHRNPQIHQGWEGLLEGMKKARRLNNHVFSMLKARCPLEDKTACAIKQSGAPLPRVRFENTVSAFETLPQKGTVG

SEQ ID NO: 30848 - protein, 1206 aa, Arabidopsis thaliana
  misc_feature (1)..(1206): Ceres Seq. ID no. 4974463
MVSAERAATDSPIEYSDVAAYRLSLSEDTKALNQLNTLIQEGKEMASILYTYRSCVKALPQLPESMKHSQADLYLETYQVLDLEMSRLREIQRWQSSASAKLAADMQRFSRPERRINGPTVTHLWSMLKLLDVLVQLDHLKNAKASIPNDFSWYKRTFTQVSAQWQDTDTMREELDDLQIFLSTRWAILLNLHVEMFRVNKYPFFQTFITIVWLVEDILQVLIVFIVESLELDFALLFPERYILLRVLPVLVVLATPSEKDTEALYKRVKLNRLINIFKNDPVIPAFPDLHLSPAAILKELSVYFQKFSSQTRLLTLPAPHELPPLNHIGALRAEHDDFTIRFASSMNQSNDGAYTEWCREVKGNMYDMVVEGFQLLSRWTARIWEQCAWKFSRPCRDAGETPEASGSYSDYEKVVRFNYTAEERKALVELVGYIKSVGSMLQRCDTLVADALWETIHAEVQDFVQNTLATMLRTTFRKKKDLSRILSDMRTLSADWMANTRPEHEMPSSQHGNDESRGNFFYPRPVAPTAAQVHCLQFLIYEVVSGGNLRRPGGFFGNNGSEIPLCKLTPQLQFTMAAASIGILTDLGFLWFREFYLESSRVIQFPIECSLPWMLIDYILEAQNSGLLESVLLPFDIYNDSAQQALVVLRQRFLYDEIEAEVDHGFDIFVSRLSESIFTYYKSWSASELLDPSFLFALDNGEKFSIQPVRFTALFKMTKVKDLCAVVELEKLIDILKHSHELLSQDLSIDPFSLMLNEMQENISLVSFSSRLATQIWSEMQSDFLPNFILCNTTQRFVRSSKVPPTQKPSVPSAKPSFYCGTQDLNAAHQSFARLHSGFFGIPHLFSIVKLLGSRSLPWLIRALLDHISNKITTLEPMISGLQEALPKSIGLLSFDGGVTGCMKLIREQLNWGTKSELKSEVLRGIKEIGSVIYTMGLLDIVLVSPVDTKRFMQTAPWLGLIPGAEGQIVNAQDGESPLVNLLKSATSAVVSSPGCLNPAAFYTMSKQAEAADLLYKANMNGGSVLEYTLAFTSASLDKYCSKWSAPPKTGFVDITTSKDFYRIYGGLQIGYLEEITAPQSAQHEVLGDSIAWGGCTIIYLLGQQLHFELFDFSYQVLNVSEVETVSASHTHRNPQIHQGWEGLLEGMKKARRLNNHVFSMLKARCPLEDKTACAIKQSGAPLPRVRFENTVSAFETLPQKGTVG

SEQ ID NO: 30849 - protein, 1162 aa, Arabidopsis thaliana
  misc_feature (1)..(1162): Ceres Seq. ID no. 4974464
MASILYTYRSCVKALPQLPESMKHSQADLYLETYQVLDLEMSRLREIQRWQSSASAKLAADMQRFSRPERRINGPTVTHLWSMLKLLDVLVQLDHLKNAKASIPNDFSWYKRTFTQVSAQWQDTDTMREELDDLQIFLSTRWAILLNLHVEMFRVNKYPFFQTFITIVWLVEDILQVLIVFIVESLELDFALLFPERYILLRVLPVLVVLATPSEKDTEALYKRVKLNRLINIFKNDPVIPAFPDLHLSPAAILKELSVYFQKFSSQTRLLTLPAPHELPPLNHIGALRAEHDDFTIRFASSMNQSNDGAYTEWCREVKGNMYDMVVEGFQLLSRWTARIWEQCAWKFSRPCRDAGETPEASGSYSDYEKVVRFNYTAEERKALVELVGYIKSVGSMLQRCDTLVADALWETIHAEVQDFVQNTLATMLRTTFRKKKDLSRILSDMRTLSADWMANTRPEHEMPSSQHGNDESRGNFFYPRPVAPTAAQVHCLQFLIYEVVSGGNLRRPGGFFGNNGSEIPLCKLTPQLQFTMAAASIGILTDLGFLWFREFYLESSRVIQFPIECSLPWMLIDYILEAQNSGLLESVLLPFDIYNDSAQQALVVLRQRFLYDEIEAEVDHGFDIFVSRLSESIFTYYKSWSASELLDPSFLFALDNGEKFSIQPVRFTALFKMTKVKDLCAVVELEKLIDILKHSHELLSQDLSIDPFSLMLNEMQENISLVSFSSRLATQIWSEMQSDFLPNFILCNTTQRFVRSSKVPPTQKPSVPSAKPSFYCGTQDLNAAHQSFARLHSGFFGIPHLFSIVKLLGSRSLPWLIRALLDHISNKITTLEPMISGLQEALPKSIGLLSFDGGVTGCMKLIREQLNWGTKSELKSEVLRGIKEIGSVIYTMGLLDIVLVSPVDTKRFMQTAPWLGLIPGAEGQIVNAQDGESPLVNLLKSATSAVVSSPGCLNPAAFYTMSKQAEAADLLYKANMNGGSVLEYTLAFTSASLDKYCSKWSAPPKTGFVDITTSKDFYRIYGGLQIGYLEEITAPQSAQHEVLGDSIAWGGCTIIYLLGQQLHFELFDFSYQVLNVSEVETVSASHTHRNPQIHQGWEGLLEGMKKARRLNNHVFSMLKARCPLEDKTACAIKQSGAPLPRVRFENTVSAFETLPQKGTVG

SEQ ID NO: 30850 - DNA, 939 bp, Arabidopsis thaliana
  misc_feature (1)..(939): Ceres Seq. ID no. 4974638
atgggaaactgtctaaagcatttcaaacaacaacttccttcaattgctcccaagcctctcattatccctccaatattttcagccagaaaacgagaatctgagagtcttcagattcgcggattgaagaaagcgacaaagaaattcagacaagacagggtcgtagaatgcgaggattactctgttcgaaaattctacaagggctacatagatgaaaccacatttgcaccatcaagagctggaaccggaatcgctgtttctgtcatggaatgtgatagttcacgctctttacaagactggatggcagtagtgaggtctcttggacagttgtctcatcagaatttggtcaatttcttgggttactgttgtgaagacaacaaaccattcttcttggtatttgaatactcgcacaaaggaagtttggacagtcacattttcggaaaagaagaagaggcattgccatgggaaatacgggttaagatagccattggaacagctcaaggtctcgcgtttcttcactcgatcaagaacagccccctaaaccgagaactcaggatgcataacattatgcttgacgaggtgcaatacaatgcaaaaactgttctatctcgaaccaaccaaacgaagcttggtattttggatatgacgaccgatgtttacatttttggtatgatcttgcttgaacttttaatgggttccaaggatagaaaaaagattaaggaagagcaaggcttagtagattactggacctcatctttcttgccagataattataagattgaggaaataatcgatccccgacttgggagcgattattctgcgaatgcggcgacacagatgggcacactcatcaaccgatgcacagcgcataatacaaagaaacggccattgatgcaacaagtattggatggtcttaatcatattgcagagattaaggactaa

SEQ ID NO: 30851 - protein, 312 aa, Arabidopsis thaliana
  misc_feature (1)..(312): Ceres Seq. ID no. 4974639
MGNCLKHFKQQLPSIAPKPLIIPPIFSARKRESESLQIRGLKKATKKFRQDRVVECEDYSVRKFYKGYIDETTFAPSRAGTGIAVSVMECDSSRSLQDWMAVVRSLGQLSHQNLVNFLGYCCEDNKPFFLVFEYSHKGSLDSHIFGKEEEALPWEIRVKIAIGTAQGLAFLHSIKNSPLNRELRMHNIMLDEVQYNAKTVLSRTNQTKLGILDMTTDVYIFGMILLELLMGSKDRKKIKEEQGLVDYWTSSFLPDNYKIEEIIDPRLGSDYSANAATQMGTLINRCTAHNTKKRPLMQQVLDGLNHIAEIKD

SEQ ID NO: 30852 - protein, 225 aa, Arabidopsis thaliana
  misc_feature (1)..(225): Ceres Seq. ID no. 4974640
MECDSSRSLQDWMAVVRSLGQLSHQNLVNFLGYCCEDNKPFFLVFEYSHKGSLDSHIFGKEEEALPWEIRVKIAIGTAQGLAFLHSIKNSPLNRELRMHNIMLDEVQYNAKTVLSRTNQTKLGILDMTTDVYIFGMILLELLMGSKDRKKIKEEQGLVDYWTSSFLPDNYKIEEIIDPRLGSDYSANAATQMGTLINRCTAHNTKKRPLMQQVLDGLNHIAEIKD

SEQ ID NO: 30853 - protein, 213 aa, Arabidopsis thaliana
  misc_feature (1)..(213): Ceres Seq. ID no. 4974641
MAVVRSLGQLSHQNLVNFLGYCCEDNKPFFLVFEYSHKGSLDSHIFGKEEEALPWEIRVKIAIGTAQGLAFLHSIKNSPLNRELRMHNIMLDEVQYNAKTVLSRTNQTKLGILDMTTDVYIFGMILLELLMGSKDRKKIKEEQGLVDYWTSSFLPDNYKIEEIIDPRLGSDYSANAATQMGTLINRCTAHNTKKRPLMQQVLDGLNHIAEIKD

SEQ ID NO: 30854 - DNA, 1281 bp, Arabidopsis thaliana
  misc_feature (1)..(1281): Ceres Seq. ID no. 4974703
atggagtcacgcgtgctgttacgcgccaccgcgaatgtcgttggaattccgaaattgagacgaccaatcggagcgatccaccgtcaattcagcactgcatcgtcttcctcgttctcggttaaaccaatcggaggaatcggagagggagcgaatctgatctccggtcgtcagcttcgtccaattcttcttctcgattcgtcggcgatcaacggaggagagaaaagagaaattctcaaaccggttaaagccgccgctgctgaaggtggagataccgctggggatgctaaagttggattcctcgccaagtatccatggctagtcactggattcttcttcttcatgtggtacttcttgaatgtgattttcaacatccttaacaagaagatctataattacttcccttatccctattttgtatcggtgatacacttgttcgtgggagttgtttactgcttgatcagctggtccgtgggtcttcctaaacgtgccccgattgactcgaacctcctcaaggtattgataccagtcgcagtctgtcacgccttaggccatgtcactagcaatgtctctttcgctgcggttgctgtctccttcactcacaccatcaaagcacttgagccattcttcaatgcggctgcttctcaattcattatgggacaatccatccccataacactatggttgtctctagctcctgttgttcttggtgttgcaatggcttcactaactgagctatcattcaactggctcggtttcatcagtgctatgatatcaaacatttctttcacttaccgaagcatcttctccaagaaagccatgactgatatggacagtacaaatgtctacgcttacatctccatcatcgcactcttcgtctgcattcctcctgccatcatcgttgaaggtcctaaactacttaaccatggtttcgccgacgcgattgctaaagttggaatgactaaattcatctctgatctcttctgggttggaatgttttaccatctctacaatcagctggctaccaataccttggagagggttgcaccgctgactcacgcggttggaaacgttctgaaacgtgtgttcgtgatcggtttctccatcgttatcttcggaaacaagatatcgacacagacaggtataggaacaggaatagccattgctggagttgcaatgtactctatcattaaggccaagatcgaagaagagaaacgggtcagttcattattcgcattagctcaattttcattacatagcttaagaaattttgcttactattaa

SEQ ID NO: 30855 - protein, 426 aa, Arabidopsis thaliana
  misc_feature (1)..(426): Ceres Seq. ID no. 4974704
MESRVLLRATANVVGIPKLRRPIGAIHRQFSTASSSSFSVKPIGGIGEGANLISGRQLRPILLLDSSAINGGEKREILKPVKAAAAEGGDTAGDAKVGFLAKYPWLVTGFFFFMWYFLNVIFNILNKKIYNYFPYPYFVSVIHLFVGVVYCLISWSVGLPKRAPIDSNLLKVLIPVAVCHALGHVTSNVSFAAVAVSFTHTIKALEPFFNAAASQFIMGQSIPITLWLSLAPVVLGVAMASLTELSFNWLGFISAMISNISFTYRSIFSKKAMTDMDSTNVYAYISIIALFVCIPPAIIVEGPKLLNHGFADAIAKVGMTKFISDLFWVGMFYHLYNQLATNTLERVAPLTHAVGNVLKRVFVIGFSIVIFGNKISTQTGIGTGIAIAGVAMYSIIKAKIEEEKRVSSLFALAQFSLHSLRNFAYY

SEQ ID NO: 30856 - protein, 313 aa, Arabidopsis thaliana
  misc_feature (1)..(313): Ceres Seq. ID no. 4974705
MWYFLNVIFNILNKKIYNYFPYPYFVSVIHLFVGVVYCLISWSVGLPKRAPIDSNLLKVLIPVAVCHALGHVTSNVSFAAVAVSFTHTIKALEPFFNAAASQFIMGQSIPITLWLSLAPVVLGVAMASLTELSFNWLGFISAMISNISFTYRSIFSKKAMTDMDSTNVYAYISIIALFVCIPPAIIVEGPKLLNHGFADAIAKVGMTKFISDLFWVGMFYHLYNQLATNTLERVAPLTHAVGNVLKRVFVIGFSIVIFGNKISTQTGIGTGIAIAGVAMYSIIKAKIEEEKRVSSLFALAQFSLHSLRNFAYY

SEQ ID NO: 30857 - DNA, 4167 bp, Arabidopsis thaliana
  misc_feature (1)..(4167): Ceres Seq. ID no. 4974769
atgtccaccgttaatcatcactgcctcctcaattttcctcatatcccaccttcaattcctccgaatcatcgtcccaaacttctttcttctctctccctctatcgaaaaccagaacgcctctttgctctctctgcgtctctgtctctttcaccagcaacaatccatgaatgttcttcttcctcatcttcttcttcttcatcgttcgataaagaagaaacggaagacattgaatctgttattgatgggtttttctatctgcttcgattgtctgctcaataccacgacgtcgaggtaacaaaagctgtgcacgcttcgtttcttaagctcagagaagaaaaaacccgtcttggaaatgcccttatctctacttatctcaaacttggtttccctcgtgaagctattctcgtcttcgtgtctctgtcttcgccaacggtggtttcttacacagctcttatctcgggtttctcaaggttaaaccttgaaattgaggctcttaaggttttcttcaggatgagaaaagcaggtcttgttcagccgaatgagtatacttttgtagcgattttgactgcttgcgtgagagtttcccgattctcgcttgggattcagattcatggattgatagttaaatcagggtttttgaattctgtgtttgttagtaattcgctgatgagtttgtatgataaggattctgggtcttcgtgtgatgatgtgcttaagttgttcgatgaaattcctcagagagatgtggcgtcttggaacactgtggtttcgagtttagtgaaagagggcaagtctcataaagctttcgatttgttttatgagatgaatagagtcgaaggatttggagttgatagttttacgctttcaacgcttttgagctcttgtactgattctagtgtcttattgagaggtagagaactccatggtcgtgcaattaggatagggttgatgcaggagttgagtgtgaacaacgctctgattgggttttattctaaattttgggatatgaaaaaggtagagagtttatacgagatgatgatggcgcaagatgctgttactttcacggagatgatcacagcttacatgtcatttggaatggtggattccgctgttgagatattcgcgaatgtaactgaaaaaaacactattacgtataatgcgctcatggctgggttctgtagaaatggccatggcttgaaggcactaaaattattcactgatatgctgcagagaggtgttgagttgacggattttagtttaacaagcgctgttgatgcttgtggtttagtttcagagaagaaagtaagcgaacagattcacgggttttgtattaagtttggaactgctttcaacccttgtatccagactgcattgcttgatatgtgcacaaggtgtgaaaggatggcagatgctgaggagatgtttgaccaatggccttctaatctcgatagctcgaaagcaacgacgtctataatcggtggttacgctcggaatggcttacctgataaggctgtatcgctattccatcgcactctctgtgaacagaagttgtttttagatgaagtttcgttgactttgattcttgcggtctgcgggacattaggttttcgggaaatgggttatcagatccattgctatgctcttaaagctgggtacttttctgatataagcttgggaaattctttgattagcatgtacgcgaaatgttgtgactcagatgatgccataaagattttcaacactatgcgagaacatgatgttatttcttggaacagcttgatttcttgctacatccttcaaagaaatggtgatgaggcactggctctatggtcgaggatgaatgagaaagagatcaagcctgacataatcaccctcactcttgttatttctgcatttcggtatacagagtcaaataagcttagtagctgccgtgatctgtttctctccatgaagactatctatgacattgaaccaacgactgaacattacactgcattcgtccgtgttcttggtcattggggtcttcttgaagaagcggaagacacaataaactcaatgccggttcagcccgaggtctctgttttgagagctctgcttgatagctgcagaatacattcaaacacaagcgttgcgaaacgagtagcaaagcttatactatctacaaagccagaaaccccgtctgagtacatcctcaaatccaacatctactcagcttccggattctggcatcgctctgaaatgataagagaggaaatgcgggaaagaggttaccggaaacatcctgctaaaagctggataatccatgagaacaaaatacattcctttcacgcgcgtgacacatcccacccgcaagagaaagacatatacaggggattggagatactgataatggaatgtctgaaagttggatacgaaccaaacacagagtatgttcttcaggaggttgatgagtttatgaagaagagtttcttgtttcaccacagcgcgaaactcgcagtgacttatggaattctctcgagcaatactcggggcaagccggttcgggttatgaagaacgtaatgctctgtggtgattgccacgagttcttcaagtatatttcagttgtgatcatgggagatgaagatgttgatgggaagtgtaaaaacatgtctgcatgttcctcaacgacgtcgtattcaactaaactctttctattcatggttcctcttgttgtcatttctggtttcgtctttgtaaatattggtcctaaagattcaacttctttattaacctctctgtccactactacttctcatcttcctcctccgtttctgtctacggctccggcaccggcgccatctcctctgctaccggagatacttccctcgttgccagcatcatctttatcgactaaagtggaatctattcagggtgattataatcgcacaattcaactgaatatgatcaacgttactgcaacgagtaataacgtctcttctacggcatcattggaaccaaagaaaagaagagttcttagcaatttagagaagatagaattcaagctacaaaaagctcgagcctccattaaagccgcttcgatggatgatcccgtggacgacccggactatgttcctcttggtcctatgtattggaacgctaaggtctttcatcggagttacttggagatggagaaacaattcaagatatatgtatacaaagaaggcgagccaccgttgttccatgacggtccatgcaaaagcatctactctatggaaggaagtttcatctatgagatagaaaccgatacacgttttcggaccaataatcccgacaaggctcatgttttttatctaccatttagtgtcgtcaagatggtaagatacgtgtatgaacgaaattcccgcgatttcagccccatccgaaatacagtcaaggattacatcaatcttgtgggtgataaatacccatattggaaccgcagcatcggagccgatcatttcatactttcttgtcacgattggggtcctgaggcaagcttctctcatccacatctaggacataattcgattagagctttgtgcaatgccaacacgtcagagagattcaaaccaagaaaagatgtgtcgataccggagatcaatctaaggacgggatccttaactggattggtcggtggaccgtcaccttccagccgtcccatcctcgccttctttgcagggggtgtacacggaccggtaaggccagtcttgctccagcattgggagaacaaagataatgacattagagtccacaagtatctccctagaggaacgtcttattctgacatgatgcggaacagcaagttctgcatttgtcctagcggttatgaggttgcgagcccgaggatcgtggaggcactctactcgggttgcgtcccggttttgataaactcaggatatgttcctccgttcagcgatgtactgaactggagatcgttctcggtgatcgtttcagtggaagacataccgaatttgaaaacgatattgacatctatatcgccgagacagtacttaaggatgtacagaagagtgttgaaggtaaggagacattttgaggtgaattctccggctaagaggtttgatgtgtttcatatgattcttcattcgatttgggtgaggagattgaatgtgaagattcgtgaagtctaa

SEQ ID NO: 30858 - protein, 1388 aa, Arabidopsis thaliana
  misc_feature (1)..(1388): Ceres Seq. ID no. 4974770
MSTVNHHCLLNFPHIPPSIPPNHRPKLLSSLSLYRKPERLFALSASLSLSPATIHECSSSSSSSSSSFDKEETEDIESVIDGFFYLLRLSAQYHDVEVTKAVHASFLKLREEKTRLGNALISTYLKLGFPREAILVFVSLSSPTVVSYTALISGFSRLNLEIEALKVFFRMRKAGLVQPNEYTFVAILTACVRVSRFSLGIQIHGLIVKSGFLNSVFVSNSLMSLYDKDSGSSCDDVLKLFDEIPQRDVASWNTVVSSLVKEGKSHKAFDLFYEMNRVEGFGVDSFTLSTLLSSCTDSSVLLRGRELHGRAIRIGLMQELSVNNALIGFYSKFWDMKKVESLYEMMMAQDAVTFTEMITAYMSFGMVDSAVEIFANVTEKNTITYNALMAGFCRNGHGLKALKLFTDMLQRGVELTDFSLTSAVDACGLVSEKKVSEQIHGFCIKFGTAFNPCIQTALLDMCTRCERMADAEEMFDQWPSNLDSSKATTSIIGGYARNGLPDKAVSLFHRTLCEQKLFLDEVSLTLILAVCGTLGFREMGYQIHCYALKAGYFSDISLGNSLISMYAKCCDSDDAIKIFNTMREHDVISWNSLISCYILQRNGDEALALWSRMNEKEIKPDIITLTLVISAFRYTESNKLSSCRDLFLSMKTIYDIEPTTEHYTAFVRVLGHWGLLEEAEDTINSMPVQPEVSVLRALLDSCRIHSNTSVAKRVAKLILSTKPETPSEYILKSNIYSASGFWHRSEMIREEMRERGYRKHPAKSWIIHENKIHSFHARDTSHPQEKDIYRGLEILIMECLKVGYEPNTEYVLQEVDEFMKKSFLFHHSAKLAVTYGILSSNTRGKPVRVMKNVMLCGDCHEFFKYISVVIMGDEDVDGKCKNMSACSSTTSYSTKLFLFMVPLVVISGFVFVNIGPKDSTSLLTSLSTTTSHLPPPFLSTAPAPAPSPLLPEILPSLPASSLSTKVESIQGDYNRTIQLNMINVTATSNNVSSTASLEPKKRRVLSNLEKIEFKLQKARASIKAASMDDPVDDPDYVPLGPMYWNAKVFHRSYLEMEKQFKIYVYKEGEPPLFHDGPCKSIYSMEGSFIYEIETDTRFRTNNPDKAHVFYLPFSVVKMVRYVYERNSRDFSPIRNTVKDYINLVGDKYPYWNRSIGADHFILSCHDWGPEASFSHPHLGHNSIRALCNANTSERFKPRKDVSIPEINLRTGSLTGLVGGPSPSSRPILAFFAGGVHGPVRPVLLQHWENKDNDIRVHKYLPRGTSYSDMMRNSKFCICPSGYEVASPRIVEALYSGCVPVLINSGYVPPFSDVLNWRSFSVIVSVEDIPNLKTILTSISPRQYLRMYRRVLKVRRHFEVNSPAKRFDVFHMILHSIWVRRLNVKIREV

SEQ ID NO: 30859 - protein, 1218 aa, Arabidopsis thaliana
  misc_feature (1)..(1218): Ceres Seq. ID no. 4974771
MRKAGLVQPNEYTFVAILTACVRVSRFSLGIQIHGLIVKSGFLNSVFVSNSLMSLYDKDSGSSCDDVLKLFDEIPQRDVASWNTVVSSLVKEGKSHKAFDLFYEMNRVEGFGVDSFTLSTLLSSCTDSSVLLRGRELHGRAIRIGLMQELSVNNALIGFYSKFWDMKKVESLYEMMMAQDAVTFTEMITAYMSFGMVDSAVEIFANVTEKNTITYNALMAGFCRNGHGLKALKLFTDMLQRGVELTDFSLTSAVDACGLVSEKKVSEQIHGFCIKFGTAFNPCIQTALLDMCTRCERMADAEEMFDQWPSNLDSSKATTSIIGGYARNGLPDKAVSLFHRTLCEQKLFLDEVSLTLILAVCGTLGFREMGYQIHCYALKAGYFSDISLGNSLISMYAKCCDSDDAIKIFNTMREHDVISWNSLISCYILQRNGDEALALWSRMNEKEIKPDIITLTLVISAFRYTESNKLSSCRDLFLSMKTIYDIEPTTEHYTAFVRVLGHWGLLEEAEDTINSMPVQPEVSVLRALLDSCRIHSNTSVAKRVAKLILSTKPETPSEYILKSNIYSASGFWHRSEMIREEMRERGYRKHPAKSWIIHENKIHSFHARDTSHPQEKDIYRGLEILIMECLKVGYEPNTEYVLQEVDEFMKKSFLFHHSAKLAVTYGILSSNTRGKPVRVMKNVMLCGDCHEFFKYISVVIMGDEDVDGKCKNMSACSSTTSYSTKLFLFMVPLVVISGFVFVNIGPKDSTSLLTSLSTTTSHLPPPFLSTAPAPAPSPLLPEILPSLPASSLSTKVESIQGDYNRTIQLNMINVTATSNNVSSTASLEPKKRRVLSNLEKIEFKLQKARASIKAASMDDPVDDPDYVPLGPMYWNAKVFHRSYLEMEKQFKIYVYKEGEPPLFHDGPCKSIYSMEGSFIYEIETDTRFRTNNPDKAHVFYLPFSVVKMVRYVYERNSRDFSPIRNTVKDYINLVGDKYPYWNRSIGADHFILSCHDWGPEASFSHPHLGHNSIRALCNANTSERFKPRKDVSIPEINLRTGSLTGLVGGPSPSSRPILAFFAGGVHGPVRPVLLQHWENKDNDIRVHKYLPRGTSYSDMMRNSKFCICPSGYEVASPRIVEALYSGCVPVLINSGYVPPFSDVLNWRSFSVIVSVEDIPNLKTILTSISPRQYLRMYRRVLKVRRHFEVNSPAKRFDVFHMILHSIWVRRLNVKIREV

SEQ ID NO: 30860 - protein, 1166 aa, Arabidopsis thaliana
  misc_feature (1)..(1166): Ceres Seq. ID no. 4974772
MSLYDKDSGSSCDDVLKLFDEIPQRDVASWNTVVSSLVKEGKSHKAFDLFYEMNRVEGFGVDSFTLSTLLSSCTDSSVLLRGRELHGRAIRIGLMQELSVNNALIGFYSKFWDMKKVESLYEMMMAQDAVTFTEMITAYMSFGMVDSAVEIFANVTEKNTITYNALMAGFCRNGHGLKALKLFTDMLQRGVELTDFSLTSAVDACGLVSEKKVSEQIHGFCIKFGTAFNPCIQTALLDMCTRCERMADAEEMFDQWPSNLDSSKATTSIIGGYARNGLPDKAVSLFHRTLCEQKLFLDEVSLTLILAVCGTLGFREMGYQIHCYALKAGYFSDISLGNSLISMYAKCCDSDDAIKIFNTMREHDVISWNSLISCYILQRNGDEALALWSRMNEKEIKPDIITLTLVISAFRYTESNKLSSCRDLFLSMKTIYDIEPTTEHYTAFVRVLGHWGLLEEAEDTINSMPVQPEVSVLRALLDSCRIHSNTSVAKRVAKLILSTKPETPSEYILKSNIYSASGFWHRSEMIREEMRERGYRKHPAKSWIIHENKIHSFHARDTSHPQEKDIYRGLEILIMECLKVGYEPNTEYVLQEVDEFMKKSFLFHHSAKLAVTYGILSSNTRGKPVRVMKNVMLCGDCHEFFKYISVVIMGDEDVDGKCKNMSACSSTTSYSTKLFLFMVPLVVISGFVFVNIGPKDSTSLLTSLSTTTSHLPPPFLSTAPAPAPSPLLPEILPSLPASSLSTKVESIQGDYNRTIQLNMINVTATSNNVSSTASLEPKKRRVLSNLEKIEFKLQKARASIKAASMDDPVDDPDYVPLGPMYWNAKVFHRSYLEMEKQFKIYVYKEGEPPLFHDGPCKSIYSMEGSFIYEIETDTRFRTNNPDKAHVFYLPFSVVKMVRYVYERNSRDFSPIRNTVKDYINLVGDKYPYWNRSIGADHFILSCHDWGPEASFSHPHLGHNSIRALCNANTSERFKPRKDVSIPEINLRTGSLTGLVGGPSPSSRPILAFFAGGVHGPVRPVLLQHWENKDNDIRVHKYLPRGTSYSDMMRNSKFCICPSGYEVASPRIVEALYSGCVPVLINSGYVPPFSDVLNWRSFSVIVSVEDIPNLKTILTSISPRQYLRMYRRVLKVRRHFEVNSPAKRFDVFHMILHSIWVRRLNVKIREV

SEQ ID NO: 30861 - DNA, 3126 bp, Arabidopsis thaliana
  misc_feature (1)..(3126): Ceres Seq. ID no. 4974809
atggtgaagcagctacaagagcaggaggagaacgatcccgtcgagaagacaaagtctctgatctctgctcttaactacctttctcgcgaccttctcttgccttctcacctttacgcttccgtttcttctatttaccatgcctccgtctccgatctctctccttctccgcctcttcgtggaaatagttatactcccaatagaggtgatttgatgagcgagttcgaagatgcacttttgcaacagcgactaaactatgaatcaggctctcgactagccgagttaaaggaaactcggtataagaatcgtatccacaaccgattatctcaacttgaaggattaccttccaatagaggtgaagatttgcaggaaaaatgcttacttgagctttatggtcttaagttacaagaactacaatgcagggttcggggtgaggtgagtgcggaatactggctgcgtttgaattgtgcagatccggagagacaactatatgattggggcatgatgcggttgcctcgccgaatgtatggggttggagattcttttgttatggaagctgatgatcagttcaggaacaagcgtgatgccgagaggttattacggttagaagaagaggagaagaatctgattgaaacgacacagaggaaattctttgcagaagtactcaatgctgttcgtgaattccagttgcaaattcaggcgtctcatagacggtgtaagcaaagaaatgatggtgtccaggcctggcatggaaagcaaaggcaacgtgccacccgagctgaaaaactaaggatcatggcccttaaatctgatgatcaagaggaatacatgaaactagcaaaggaaatccagcgtcagaaagatgccaaactttcagaaaacaccaaattactgaaaggctcagaatctgacttatctgatgttgatgctcctgaggatgtgcttcctgcccaagatattgagatcattgactctgacaataatgatgattctaatgacttactagaaggcgagaggcagtttaacttggctatccattccatacaagagaaggtgacaaagcagccatcccttctacaaggtggggaactaagatcctatcaattagaaggacttcaatggatggtctctctatacaacaatgactataatggcattttagctgatgaaatgggtttaggaaagactatccaaacgattgcactgattgcgtatcttcttgagagtaaagatcttcatgggcctcatctaatattggctccaaaagctgtgctaccaaattgggaaaatgagtttgcattatgggcacccagcatttccgcttttctttacgatggatcaaaggagaaaagaactgaaataagagcaagaatagcaggaggaaaatttaatgtgttgataacccactacgatcttatcatgagagataaagcatttttgaagaaaattgactggaactacatgattgttgatgaaggacatcgtctgaagaaccatgaatgtgctctcgcaaagactctaggaactggctaccggattaagcgcagacttctattaactggaactcccatacagaacagtctgcaagaactatggtcgctgcttaattttcttcttcctcacatctttaactcaattcataatttcgaagaatggtttaatactccattcgcagaatgtggtagtgccagtcttacagatgaagaggagctgttgattattaaccgtctgcatcatgtcataaggccgtttctactgagaaggaaaaaaagtgaggttgagaaattccttcctggaaagacacaagtcatactgaagtgtgatatgtcggcttggcaaaaattgtattacaaacaagttacagacgtaggcagggtcggtcttcattctggcaatgggaaatcaaagagtctgcagaatctgacaatgcaattaagaaagtgttgtaaccatccgtacctattcgttggagcagattataacatgtgtaagaagcctgagattgtgagagcttcaggaaaattcgagttacttgatcgcctccttccaaaactgaagaaagctggacatagaattctgctcttttctcaaatgactcgtctcattgaccttctcgaaatttacttgtcactcaatgactacatgtacctcagacttgacggtagcacaaagacagaccaaagagggattttactgaagcaattcaacgaaccggactctccctactttatgtttcttctgagcacacgtgctggtggtcttggtttgaacttacaaactgcagacactataattatatttgacagtgattggaatccacaaatggaccagcaagcagaggatcgtgctcatcggatagggcagaaaaaggaagtgagagtttttgttttggttagcattggatccattgaagaagtaatattggagcgtgcaaagcaaaagatgggcatcgatgcgaaagtcatacaagcagggctcttcaacacaacttctactgctcaagacaggagagagatgctggaagagatcatgagcaaaggaacaagctcactgggagaagatgtgccaagtgagagagagattaaccggctcgcagctcgaactgaggaagagttttggatgtttgaacaaatggacgaggaaagacgtaaaaaggagaactacaagacacgtctcatggaagagaaggaagttcccgagtgggcttacacttcagagactcaagaagacaagactaacgcgaaaaaccattttggtagcctcacgggtaaacggaaacgaaaagaagcagtgtatagcgactctttaagcgatttgcagtggatgaaagcgatggagagtgaagacgaagatgcttccaaagtctctcagaaacgaaagagaacggacacaaagacaagaatgagtaatgggtcaaaggcagaggctgtgttgagtgaaagcgatgaggaaaaagaagaagaagaagaagaaaggaaggaggagagtgggaaagagagtgaagaagaaaatgagaagccattacatagttggaaaactaataagaagaaacggtcaagataccctgttatgacttcttcacctaattctagaggtaaaggtagctcaaaaggaagtaaacgaaactga

SEQ ID NO: 30862 - protein, 1041 aa, Arabidopsis thaliana
  misc_feature (1)..(1041): Ceres Seq. ID no. 4974810
MVKQLQEQEENDPVEKTKSLISALNYLSRDLLLPSHLYASVSSIYHASVSDLSPSPPLRGNSYTPNRGDLMSEFEDALLQQRLNYESGSRLAELKETRYKNRIHNRLSQLEGLPSNRGEDLQEKCLLELYGLKLQELQCRVRGEVSAEYWLRLNCADPERQLYDWGMMRLPRRMYGVGDSFVMEADDQFRNKRDAERLLRLEEEEKNLIETTQRKFFAEVLNAVREFQLQIQASHRRCKQRNDGVQAWHGKQRQRATRAEKLRIMALKSDDQEEYMKLAKEIQRQKDAKLSENTKLLKGSESDLSDVDAPEDVLPAQDIEIIDSDNNDDSNDLLEGERQFNLAIHSIQEKVTKQPSLLQGGELRSYQLEGLQWMVSLYNNDYNGILADEMGLGKTIQTIALIAYLLESKDLHGPHLILAPKAVLPNWENEFALWAPSISAFLYDGSKEKRTEIRARIAGGKFNVLITHYDLIMRDKAFLKKIDWNYMIVDEGHRLKNHECALAKTLGTGYRIKRRLLLTGTPIQNSLQELWSLLNFLLPHIFNSIHNFEEWFNTPFAECGSASLTDEEELLIINRLHHVIRPFLLRRKKSEVEKFLPGKTQVILKCDMSAWQKLYYKQVTDVGRVGLHSGNGKSKSLQNLTMQLRKCCNHPYLFVGADYNMCKKPEIVRASGKFELLDRLLPKLKKAGHRILLFSQMTRLIDLLEIYLSLNDYMYLRLDGSTKTDQRGILLKQFNEPDSPYFMFLLSTRAGGLGLNLQTADTIIIFDSDWNPQMDQQAEDRAHRIGQKKEVRVFVLVSIGSIEEVILERAKQKMGIDAKVIQAGLFNTTSTAQDRREMLEEIMSKGTSSLGEDVPSEREINRLAARTEEEFWMFEQMDEERRKKENYKTRLMEEKEVPEWAYTSETQEDKTNAKNHFGSLTGKRKRKEAVYSDSLSDLQWMKAMESEDEDASKVSQKRKRTDTKTRMSNGSKAEAVLSESDEEKEEEEEERKEESGKESEEENEKPLHSWKTNKKKRSRYPVMTSSPNSRGKGSSKGSKRN

SEQ ID NO: 30863 - protein, 971 aa, Arabidopsis thaliana
  misc_feature (1)..(971): Ceres Seq. ID no. 4974811
MSEFEDALLQQRLNYESGSRLAELKETRYKNRIHNRLSQLEGLPSNRGEDLQEKCLLELYGLKLQELQCRVRGEVSAEYWLRLNCADPERQLYDWGMMRLPRRMYGVGDSFVMEADDQFRNKRDAERLLRLEEEEKNLIETTQRKFFAEVLNAVREFQLQIQASHRRCKQRNDGVQAWHGKQRQRATRAEKLRIMALKSDDQEEYMKLAKEIQRQKDAKLSENTKLLKGSESDLSDVDAPEDVLPAQDIEIIDSDNNDDSNDLLEGERQFNLAIHSIQEKVTKQPSLLQGGELRSYQLEGLQWMVSLYNNDYNGILADEMGLGKTIQTIALIAYLLESKDLHGPHLILAPKAVLPNWENEFALWAPSISAFLYDGSKEKRTEIRARIAGGKFNVLITHYDLIMRDKAFLKKIDWNYMIVDEGHRLKNHECALAKTLGTGYRIKRRLLLTGTPIQNSLQELWSLLNFLLPHIFNSIHNFEEWFNTPFAECGSASLTDEEELLIINRLHHVIRPFLLRRKKSEVEKFLPGKTQVILKCDMSAWQKLYYKQVTDVGRVGLHSGNGKSKSLQNLTMQLRKCCNHPYLFVGADYNMCKKPEIVRASGKFELLDRLLPKLKKAGHRILLFSQMTRLIDLLEIYLSLNDYMYLRLDGSTKTDQRGILLKQFNEPDSPYFMFLLSTRAGGLGLNLQTADTIIIFDSDWNPQMDQQAEDRAHRIGQKKEVRVFVLVSIGSIEEVILERAKQKMGIDAKVIQAGLFNTTSTAQDRREMLEEIMSKGTSSLGEDVPSEREINRLAARTEEEFWMFEQMDEERRKKENYKTRLMEEKEVPEWAYTSETQEDKTNAKNHFGSLTGKRKRKEAVYSDSLSDLQWMKAMESEDEDASKVSQKRKRTDTKTRMSNGSKAEAVLSESDEEKEEEEEERKEESGKESEEENEKPLHSWKTNKKKRSRYPVMTSSPNSRGKGSSKGSKRN

SEQ ID NO: 30864 - protein, 875 aa, Arabidopsis thaliana
  misc_feature (1)..(875): Ceres Seq. ID no. 4974812
MMRLPRRMYGVGDSFVMEADDQFRNKRDAERLLRLEEEEKNLIETTQRKFFAEVLNAVREFQLQIQASHRRCKQRNDGVQAWHGKQRQRATRAEKLRIMALKSDDQEEYMKLAKEIQRQKDAKLSENTKLLKGSESDLSDVDAPEDVLPAQDIEIIDSDNNDDSNDLLEGERQFNLAIHSIQEKVTKQPSLLQGGELRSYQLEGLQWMVSLYNNDYNGILADEMGLGKTIQTIALIAYLLESKDLHGPHLILAPKAVLPNWENEFALWAPSISAFLYDGSKEKRTEIRARIAGGKFNVLITHYDLIMRDKAFLKKIDWNYMIVDEGHRLKNHECALAKTLGTGYRIKRRLLLTGTPIQNSLQELWSLLNFLLPHIFNSIHNFEEWFNTPFAECGSASLTDEEELLIINRLHHVIRPFLLRRKKSEVEKFLPGKTQVILKCDMSAWQKLYYKQVTDVGRVGLHSGNGKSKSLQNLTMQLRKCCNHPYLFVGADYNMCKKPEIVRASGKFELLDRLLPKLKKAGHRILLFSQMTRLIDLLEIYLSLNDYMYLRLDGSTKTDQRGILLKQFNEPDSPYFMFLLSTRAGGLGLNLQTADTIIIFDSDWNPQMDQQAEDRAHRIGQKKEVRVFVLVSIGSIEEVILERAKQKMGIDAKVIQAGLFNTTSTAQDRREMLEEIMSKGTSSLGEDVPSEREINRLAARTEEEFWMFEQMDEERRKKENYKTRLMEEKEVPEWAYTSETQEDKTNAKNHFGSLTGKRKRKEAVYSDSLSDLQWMKAMESEDEDASKVSQKRKRTDTKTRMSNGSKAEAVLSESDEEKEEEEEERKEESGKESEEENEKPLHSWKTNKKKRSRYPVMTSSPNSRGKGSSKGSKRN

SEQ ID NO: 30865 - DNA, 711 bp, Arabidopsis thaliana
  misc_feature (1)..(711): Ceres Seq. ID no. 4974845
atggcagtccctcttcttgtttctaaagctttggagctgtttttacaagacttgtgtaatcacacgtatgatgtaactctaagccgaggtgctaaaactgtcaacgcctttcatttgaagcagtgtgtgcaagcgactaatgtctttgattttctaagagacactgtcgctaaagttcctgatttgggtggctcagacactgaagaccaatcagctaccaaaagaaggaaagttgttgatggaagtagttgcaacgatgaagatatgataaagaccactcaaatgcatgaggtcaaacatactagctgtggcagaggaaggcgaggtagaggccgcggacgaagtagtggaagaacaggaagtgggctgtctctaaaatttgaagaagatttagaagacggttctcccgaaagcagcaggaccccgtctcccgaaaacgggagcctttctcacgacgatacatcttggaagaaagttgcatcacacaacaatcatcatagtagtaactcagaggtaaaagtaaggaacttcgatcttaatgttgaattagatgagaatggagacaatgctacatggctggaaacacagctagagagaagtccagattacccgttggagattaacgaaatgaaaatagatcctgatgatcaacaacaggctagtgctagtgacgaggaagattatgatgaagaaagcatagaccaagagtga

SEQ ID NO: 30866 - protein, 236 aa, Arabidopsis thaliana
  misc_feature (1)..(236): Ceres Seq. ID no. 4974846
MAVPLLVSKALELFLQDLCNHTYDVTLSRGAKTVNAFHLKQCVQATNVFDFLRDTVAKVPDLGGSDTEDQSATKRRKVVDGSSCNDEDMIKTTQMHEVKHTSCGRGRRGRGRGRSSGRTGSGLSLKFEEDLEDGSPESSRTPSPENGSLSHDDTSWKKVASHNNHHSSNSEVKVRNFDLNVELDENGDNATWLETQLERSPDYPLEINEMKIDPDDQQQASASDEEDYDEESIDQE

SEQ ID NO: 30867 - protein, 148 aa, Arabidopsis thaliana
  misc_feature (1)..(148): Ceres Seq. ID no. 4974847
MIKTTQMHEVKHTSCGRGRRGRGRGRSSGRTGSGLSLKFEEDLEDGSPESSRTPSPENGSLSHDDTSWKKVASHNNHHSSNSEVKVRNFDLNVELDENGDNATWLETQLERSPDYPLEINEMKIDPDDQQQASASDEEDYDEESIDQE

SEQ ID NO: 30868 - protein, 142 aa, Arabidopsis thaliana
  misc_feature (1)..(142): Ceres Seq. ID no. 4974848
MHEVKHTSCGRGRRGRGRGRSSGRTGSGLSLKFEEDLEDGSPESSRTPSPENGSLSHDDTSWKKVASHNNHHSSNSEVKVRNFDLNVELDENGDNATWLETQLERSPDYPLEINEMKIDPDDQQQASASDEEDYDEESIDQE

SEQ ID NO: 30869 - DNA, 1890 bp, Arabidopsis thaliana
  misc_feature (1)..(1890): Ceres Seq. ID no. 4974863
atgatctcttttggttttctgactcgcttgcaactttggagtgtgatatcttcttggtttacaatttgtcattcttttctgttttgtgtcagaaatggatctccggatgttcctaagaaggtgtctcctcgagctgctcggccactgaagatcgcagcgctagagcctgaatcttcttcatctcctatctcagctactaacagaacaccaaaggataagagtccaaacgttctaaatcgtaggtctcctcgaagccctgtctctgagaagaagaggccgagtagaataacggagctagagttgctagtctcgcagcttcaggaggagctaaaaaaggcgaaagatcaaatctcagtgtctgaaacatcaaagaagcaagcagaacaagaagcagaggagtccaggaaacagctccaagaagtttcttctaagcttgaggagagccagaatcagtttgtggaaacttcagccttggaagaagaaaccgataaaaccggttctcttgtttttcaaagtgtatctcaggagtgtgattgggagtttagtgctactgctggtgaaagagcaggattagctgctgttgctcatgagatccgacaactcaagcttcagattgagatggtggcttcttctgaagctggtcatgtgaaacaagctgagttgtataactcagaggttcaacttttgagaggaaacttaatggacacgcttttccacgtcgagaatttcaggaaccaacttaaggactgtgagatatcagaagctgaaaccgaggctttagccactgaaactcttaggcaattggagaatgcgaaaaaggcagtagaagaactgaagtcagatggcacaaaagctgttgagagttacaagaagatggctgtggagcttgaacagtcaaaatcaaggatggtatggcttgaagctcttgtgaataaacttcagaacaatccagcagatttggaaaaccacgaaatcctgcttaaagactatgaaagtttgagacgtggggaatcaaatgagatggatgaagaagtatcttccttaagatgtgaggtagagcgactgagagcagctctagaagcttctgataaaaaagaccaagaaggtaatgtagaggcttcttctcggttacggatacaagctgaactccagtctgaattaaagattgctaaatctgagatagacgagctaaaggcgaggttgatggacaaagaaacagaattacagtttatttcagaggaaagagataactttagcatgaaactgatgaagaaccagaaagaaatagatgttgaagctgagctgaagaaactaagggaggcgatcgagaatttaaaggcggatttgatggataaagaaacagaactccagatcgtttcagatgagaacgagacattgaagtcagatatccacaagagcgagacagatgtacaagacgcgttcctgaagctagggattgcaatggaagaggctgacaagagtagcaagaaagcggttagagtcaccgagcaactagaggctactcaagcttcaaactcagaaatggaaacagaactcaggaagctcaaagttcaatcaaaccaatggagaaaagctgctgaagcagctactgccatgctctctgctggaaacaacgggaaattcgctgagaactataatcaaacgaactccccgtactctgaggatatcgatgatgaactgacaaagaagaaaaatgggaatgtgctcaagaagattggagttttgtggaagaagcctcagaaatatgtctctctcaattcgcttaagaaactaacttttgctttccccaacacggtttctgcttctcaggtatcgtcgacttggagttggattataagagcaactcatgtgacttcggtatcgatgtga

SEQ ID NO: 30870 - protein, 629 aa, Arabidopsis thaliana
  misc_feature (1)..(629): Ceres Seq. ID no. 4974864
MISFGFLTRLQLWSVISSWFTICHSFLFCVRNGSPDVPKKVSPRAARPLKIAALEPESSSSPISATNRTPKDKSPNVLNRRSPRSPVSEKKRPSRITELELLVSQLQEELKKAKDQISVSETSKKQAEQEAEESRKQLQEVSSKLEESQNQFVETSALEEETDKTGSLVFQSVSQECDWEFSATAGERAGLAAVAHEIRQLKLQIEMVASSEAGHVKQAELYNSEVQLLRGNLMDTLFHVENFRNQLKDCEISEAETEALATETLRQLENAKKAVEELKSDGTKAVESYKKMAVELEQSKSRMVWLEALVNKLQNNPADLENHEILLKDYESLRRGESNEMDEEVSSLRCEVERLRAALEASDKKDQEGNVEASSRLRIQAELQSELKIAKSEIDELKARLMDKETELQFISEERDNFSMKLMKNQKEIDVEAELKKLREAIENLKADLMDKETELQIVSDENETLKSDIHKSETDVQDAFLKLGIAMEEADKSSKKAVRVTEQLEATQASNSEMETELRKLKVQSNQWRKAAEAATAMLSAGNNGKFAENYNQTNSPYSEDIDDELTKKKNGNVLKKIGVLWKKPQKYVSLNSLKKLTFAFPNTVSASQVSSTWSWIIRATHVTSVSM

SEQ ID NO: 30871 - protein, 423 aa, Arabidopsis thaliana
  misc_feature (1)..(423): Ceres Seq. ID no. 4974865
MVASSEAGHVKQAELYNSEVQLLRGNLMDTLFHVENFRNQLKDCEISEAETEALATETLRQLENAKKAVEELKSDGTKAVESYKKMAVELEQSKSRMVWLEALVNKLQNNPADLENHEILLKDYESLRRGESNEMDEEVSSLRCEVERLRAALEASDKKDQEGNVEASSRLRIQAELQSELKIAKSEIDELKARLMDKETELQFISEERDNFSMKLMKNQKEIDVEAELKKLREAIENLKADLMDKETELQIVSDENETLKSDIHKSETDVQDAFLKLGIAMEEADKSSKKAVRVTEQLEATQASNSEMETELRKLKVQSNQWRKAAEAATAMLSAGNNGKFAENYNQTNSPYSEDIDDELTKKKNGNVLKKIGVLWKKPQKYVSLNSLKKLTFAFPNTVSASQVSSTWSWIIRATHVTSVSM

SEQ ID NO: 30872 - protein, 396 aa, Arabidopsis thaliana
  misc_feature (1)..(396): Ceres Seq. ID no. 4974866
MDTLFHVENFRNQLKDCEISEAETEALATETLRQLENAKKAVEELKSDGTKAVESYKKMAVELEQSKSRMVWLEALVNKLQNNPADLENHEILLKDYESLRRGESNEMDEEVSSLRCEVERLRAALEASDKKDQEGNVEASSRLRIQAELQSELKIAKSEIDELKARLMDKETELQFISEERDNFSMKLMKNQKEIDVEAELKKLREAIENLKADLMDKETELQIVSDENETLKSDIHKSETDVQDAFLKLGIAMEEADKSSKKAVRVTEQLEATQASNSEMETELRKLKVQSNQWRKAAEAATAMLSAGNNGKFAENYNQTNSPYSEDIDDELTKKKNGNVLKKIGVLWKKPQKYVSLNSLKKLTFAFPNTVSASQVSSTWSWIIRATHVTSVSM

SEQ ID NO: 30873 - DNA, 984 bp, Arabidopsis thaliana
  misc_feature (1)..(984): Ceres Seq. ID no. 4974867
atgagatcgagaagtaaccttataggtctcataaacttcttcactttcctcctgtcgattcctatcctcggcggtggaatatggcttagcagccgagctaactcaaccgattgcctcagattcctccagtggccactcattatcatcggaatatcaatcatggtcatatctttagccggaatcgccggagcttgttaccaaaacaagttcctcatgtggctttaccttttcaccatgttctttgtaatcgctgctcttataggattcacaatcttcgcttacgtagttactgataaaggctcaggccggtttgtgatgaaccgtcggtatcttgattattatctcaatgattattccggttggttaaaggaccgtgtcacagataatggatattggagagatatcggatcgtgtgttagagattctggagtttgtaagaagattggaagagatttaaatggtgttccagaaactgctcatatgttttacttcagaaatctttctcctgttgagtccggatgttgcaagccgccaacagattgtggctatacgtacgtgaacgagacagtgtggattccgggaggagaaatggtgggaccgaacccggactgtatgttgtggaacaatgaccagagactactctgttaccaatgcagctcttgtaaagccggtgttcttggtagcttgaaaaagagttggagaaaagtctcggtgatcaacatcgtggttgtgatcatacttgttatcttctatgtcatcgcgtgtgcggcttaccagaatgttaagaggatgtataatgacgaaccggtcggtgaggctaggatgaccaatctcatcctagtcattttcaaatttaaggagattttggtacagtttttcttcggaattgtgtttttattactctttaatggtttaatggtctgttgttgtaatgataaatttgcttttagtgttttcttctttggatatgttacatatgcatga

SEQ ID NO: 30874 - protein, 327 aa, Arabidopsis thaliana
  misc_feature (1)..(327): Ceres Seq. ID no. 4974868
MRSRSNLIGLINFFTFLLSIPILGGGIWLSSRANSTDCLRFLQWPLIIIGISIMVISLAGIAGACYQNKFLMWLYLFTMFFVIAALIGFTIFAYVVTDKGSGRFVMNRRYLDYYLNDYSGWLKDRVTDNGYWRDIGSCVRDSGVCKKIGRDLNGVPETAHMFYFRNLSPVESGCCKPPTDCGYTYVNETVWIPGGEMVGPNPDCMLWNNDQRLLCYQCSSCKAGVLGSLKKSWRKVSVINIVVVIILVIFYVIACAAYQNVKRMYNDEPVGEARMTNLILVIFKFKEILVQFFFGIVFLLLFNGLMVCCCNDKFAFSVFFFGYVTYA

SEQ ID NO: 30875 - protein, 274 aa, Arabidopsis thaliana
  misc_feature (1)..(274): Ceres Seq. ID no. 4974869
MVISLAGIAGACYQNKFLMWLYLFTMFFVIAALIGFTIFAYVVTDKGSGRFVMNRRYLDYYLNDYSGWLKDRVTDNGYWRDIGSCVRDSGVCKKIGRDLNGVPETAHMFYFRNLSPVESGCCKPPTDCGYTYVNETVWIPGGEMVGPNPDCMLWNNDQRLLCYQCSSCKAGVLGSLKKSWRKVSVINIVVVIILVIFYVIACAAYQNVKRMYNDEPVGEARMTNLILVIFKFKEILVQFFFGIVFLLLFNGLMVCCCNDKFAFSVFFFGYVTYA

SEQ ID NO: 30876 - protein, 256 aa, Arabidopsis thaliana
  misc_feature (1)..(256): Ceres Seq. ID no. 4974870
MWLYLFTMFFVIAALIGFTIFAYVVTDKGSGRFVMNRRYLDYYLNDYSGWLKDRVTDNGYWRDIGSCVRDSGVCKKIGRDLNGVPETAHMFYFRNLSPVESGCCKPPTDCGYTYVNETVWIPGGEMVGPNPDCMLWNNDQRLLCYQCSSCKAGVLGSLKKSWRKVSVINIVVVIILVIFYVIACAAYQNVKRMYNDEPVGEARMTNLILVIFKFKEILVQFFFGIVFLLLFNGLMVCCCNDKFAFSVFFFGYVTYA

SEQ ID NO: 30877 - DNA, 1986 bp, Arabidopsis thaliana
  misc_feature (1)..(1986): Ceres Seq. ID no. 4974959
atgggttcaatgtacagagcatctaaaaccctaaaatcatcgagacaagcattatcaatcttgttcaattcactcaactccaatcgacaaaatccgacatgtatcggattgtaccaagcttacggtttcagctctgattctagacaaagctccaaagaacccaccattgatttgaccaagtttccttcagaaaagattcgaaatttctccatcattgctcatattgatcatgggaaatctactttggctgatcgtcttatggaacttactggcacaatcaagaaaggtcatggtcagcctcagtatctcgacaaattgcagagggagagaggaatcactgtgaaagctcagacggcgaccatgttctatgagaacaaagtagaagatcaagaagcgagtggttatcttctgaacttgattgatacaccgggtcatgttgactttagttatgaggtttctagatctttatcagcttgtcaaggagctcttttagttgttgatgcggctcaaggtgttcaagcacaaacagtggctaatttctacttagcttttgaagctaaccttactattgtacctgtgattaacaagattgatcaaccaactgctgatcctgagcgtgttaaagctcagttgaaatcgatgtttgatcttgatacagaagatgtgcttcttgtgtctgctaaaaccggtttgggtcttgagcatgttcttcctgcggttatagaacggatacctcctcctcctgggattagtgaatcgcctctacggatgcttttgtttgattctttttttaatgagtacaaaggtgtcatttgctatgtttctgttgttgatggaatgttgagtaaaggagataaggtttcgtttgctgcgtcgggtcagtcttatgaagtgttagatgtcgggattatgcatcctgagcttacttctacaggaatgcttcttactggacaagttggttatatagtaaccggtatgcgaaccacgaaagaagcacgtattggagacactatctatagaacgaaaaccactgttgagcctcttccaggtttcaagccggtgaggcatatggtgttttcaggcgtttatcctgctgatggatctgatttcgaagcacttggtcatgccatggagaaactgacatgcaacgatgcaagtgtatcagtggcaaaggaaacaagtacagctcttggaatgggattcagatgtggtttcctcggtttgcttcacatggatgtatttcatcagcggcttgaacaagaatacggtacacaagtaatctccacaatccctactgttccttacacattcgaatactcagatggaagcaagctacaagtgcaaaatccagctgccttaccatcaaaccccaaataccgagtcacagcttcttgggagccaacggtaatcgccacgatcatccttccaagtgagtacgttggagctgttatcaacctctgctctgatcgaagaggtcagcaactagaatacacatttatagatgcacaacgagttttcttaaagtaccagttaccattgagggaaatagtagtggatttctacgatgagttgaaaagcataacatcaggttatgcttcttttgactacgaggatgcggagtaccaagcatctgatctggtgaagctcgatatactcttgaacgggcaagcagttgatgcgttagccactatagttcacaagcagaaagcataccgtgtgggtaaagaactggttgagaagcttaagaactatatagagaggcaaatgtttgaagtaatgatacaagctgctattggttcaaagatcattgcaagagacacaatctcggcgatgagaaagaatgttcttgcaaaatgttatggaggagatataactcggaagaagaagcttctagagaaacagaaagaagggaagaaaagaatgaaacgagttggttctgttgatattccacatgaagcttttcaacaaatactcaaagtctcttag

SEQ ID NO: 30878 - protein, 661 aa, Arabidopsis thaliana
  misc_feature (1)..(661): Ceres Seq. ID no. 4974960
MGSMYRASKTLKSSRQALSILFNSLNSNRQNPTCIGLYQAYGFSSDSRQSSKEPTIDLTKFPSEKIRNFSIIAHIDHGKSTLADRLMELTGTIKKGHGQPQYLDKLQRERGITVKAQTATMFYENKVEDQEASGYLLNLIDTPGHVDFSYEVSRSLSACQGALLVVDAAQGVQAQTVANFYLAFEANLTIVPVINKIDQPTADPERVKAQLKSMFDLDTEDVLLVSAKTGLGLEHVLPAVIERIPPPPGISESPLRMLLFDSFFNEYKGVICYVSVVDGMLSKGDKVSFAASGQSYEVLDVGIMHPELTSTGMLLTGQVGYIVTGMRTTKEARIGDTIYRTKTTVEPLPGFKPVRHMVFSGVYPADGSDFEALGHAMEKLTCNDASVSVAKETSTALGMGFRCGFLGLLHMDVFHQRLEQEYGTQVISTIPTVPYTFEYSDGSKLQVQNPAALPSNPKYRVTASWEPTVIATIILPSEYVGAVINLCSDRRGQQLEYTFIDAQRVFLKYQLPLREIVVDFYDELKSITSGYASFDYEDAEYQASDLVKLDILLNGQAVDALATIVHKQKAYRVGKELVEKLKNYIERQMFEVMIQAAIGSKIIARDTISAMRKNVLAKCYGGDITRKKKLLEKQKEGKKRMKRVGSVDIPHEAFQQILKVS

SEQ ID NO: 30879 - protein, 658 aa, Arabidopsis thaliana
  misc_feature (1)..(658): Ceres Seq. ID no. 4974961
MYRASKTLKSSRQALSILFNSLNSNRQNPTCIGLYQAYGFSSDSRQSSKEPTIDLTKFPSEKIRNFSIIAHIDHGKSTLADRLMELTGTIKKGHGQPQYLDKLQRERGITVKAQTATMFYENKVEDQEASGYLLNLIDTPGHVDFSYEVSRSLSACQGALLVVDAAQGVQAQTVANFYLAFEANLTIVPVINKIDQPTADPERVKAQLKSMFDLDTEDVLLVSAKTGLGLEHVLPAVIERIPPPPGISESPLRMLLFDSFFNEYKGVICYVSVVDGMLSKGDKVSFAASGQSYEVLDVGIMHPELTSTGMLLTGQVGYIVTGMRTTKEARIGDTIYRTKTTVEPLPGFKPVRHMVFSGVYPADGSDFEALGHAMEKLTCNDASVSVAKETSTALGMGFRCGFLGLLHMDVFHQRLEQEYGTQVISTIPTVPYTFEYSDGSKLQVQNPAALPSNPKYRVTASWEPTVIATIILPSEYVGAVINLCSDRRGQQLEYTFIDAQRVFLKYQLPLREIVVDFYDELKSITSGYASFDYEDAEYQASDLVKLDILLNGQAVDALATIVHKQKAYRVGKELVEKLKNYIERQMFEVMIQAAIGSKIIARDTISAMRKNVLAKCYGGDITRKKKLLEKQKEGKKRMKRVGSVDIPHEAFQQILKVS

SEQ ID NO: 30880 - protein, 575 aa, Arabidopsis thaliana
  misc_feature (1)..(575): Ceres Seq. ID no. 4974962
MELTGTIKKGHGQPQYLDKLQRERGITVKAQTATMFYENKVEDQEASGYLLNLIDTPGHVDFSYEVSRSLSACQGALLVVDAAQGVQAQTVANFYLAFEANLTIVPVINKIDQPTADPERVKAQLKSMFDLDTEDVLLVSAKTGLGLEHVLPAVIERIPPPPGISESPLRMLLFDSFFNEYKGVICYVSVVDGMLSKGDKVSFAASGQSYEVLDVGIMHPELTSTGMLLTGQVGYIVTGMRTTKEARIGDTIYRTKTTVEPLPGFKPVRHMVFSGVYPADGSDFEALGHAMEKLTCNDASVSVAKETSTALGMGFRCGFLGLLHMDVFHQRLEQEYGTQVISTIPTVPYTFEYSDGSKLQVQNPAALPSNPKYRVTASWEPTVIATIILPSEYVGAVINLCSDRRGQQLEYTFIDAQRVFLKYQLPLREIVVDFYDELKSITSGYASFDYEDAEYQASDLVKLDILLNGQAVDALATIVHKQKAYRVGKELVEKLKNYIERQMFEVMIQAAIGSKIIARDTISAMRKNVLAKCYGGDITRKKKLLEKQKEGKKRMKRVGSVDIPHEAFQQILKVS

SEQ ID NO: 30881 - DNA, 1131 bp, Arabidopsis thaliana
  misc_feature (1)..(1131): Ceres Seq. ID no. 4975114
atgtatttctatgctcaaatgccaaatcatctaaattcgtatttaaacctgcttagggacttgacaattctcatagcacaaactgttttttttatgaatgtgggttggtttcaggtagctgatgcggaattggtgaaatctgacaagtttccggtagtggtgagtacttggcctttccttgaagctgttagagctgcttggagagcagttgataatgggagctctgcagtggaagctgttgttgaaggttgttctgcttgtgaagaacttcgttgtgacggtacagttgggcctggaggaagtccggatgagaatggtgagaccatgattgatgctttagtcatggatggggtgactatggaggttggagctgttgctgcaatgcggtatgttaaagacggtataagagctgcacatctagtgatgaaatactctcaacacacgttgcttgccggagaaggagcatcagcatttgcaatctccatgggtctccccggacccatgaacctaagctcccctgaatctgtaaagaagtggtcggactggaaagagaatcagtgtcaacccaatttcaggaagaatgtagtccccgcaaatgactgtggaccttacaagccaaacaatagtgctatgaatgtttttgtagacaaaagcactgaatcttgcgagatgggggcgattgagtataaacctcctcttgttggtcctcacaatcacgatacgatatcgatggctgtcattgacagaatggggcatatagctgttgggacatcgaccaatggagccacatataaaattcctggaagggttggtgatgggcctatcgtcggttcatcagcctacgctgatgatgaagtaggtggatgtggtgcaactggagatggtgacaccatgatgcgcttcctcccttgttaccaagttgtggagagcatgagacaaggaatgaaaccagaagaagctgctaaagatgcaatctcgagaatcgcaaggaagtttccagatttcgtgggagcagttgtggctgttgacaagaacggatctcacgcaggagcttgctatggctggacgtttcagtactcagtccaaaaccctgacatgaacgatgttcaagtctttacagttcttccatga

SEQ ID NO: 30882 - protein, 376 aa, Arabidopsis thaliana
  misc_feature (1)..(376): Ceres Seq. ID no. 4975115
MYFYAQMPNHLNSYLNLLRDLTILIAQTVFFMNVGWFQVADAELVKSDKFPVVVSTWPFLEAVRAAWRAVDNGSSAVEAVVEGCSACEELRCDGTVGPGGSPDENGETMIDALVMDGVTMEVGAVAAMRYVKDGIRAAHLVMKYSQHTLLAGEGASAFAISMGLPGPMNLSSPESVKKWSDWKENQCQPNFRKNVVPANDCGPYKPNNSAMNVFVDKSTESCEMGAIEYKPPLVGPHNHDTISMAVIDRMGHIAVGTSTNGATYKIPGRVGDGPIVGSSAYADDEVGGCGATGDGDTMMRFLPCYQVVESMRQGMKPEEAAKDAISRIARKFPDFVGAVVAVDKNGSHAGACYGWTFQYSVQNPDMNDVQVFTVLP

SEQ ID NO: 30883 - protein, 370 aa, Arabidopsis thaliana
  misc_feature (1)..(370): Ceres Seq. ID no. 4975116
MPNHLNSYLNLLRDLTILIAQTVFFMNVGWFQVADAELVKSDKFPVVVSTWPFLEAVRAAWRAVDNGSSAVEAVVEGCSACEELRCDGTVGPGGSPDENGETMIDALVMDGVTMEVGAVAAMRYVKDGIRAAHLVMKYSQHTLLAGEGASAFAISMGLPGPMNLSSPESVKKWSDWKENQCQPNFRKNVVPANDCGPYKPNNSAMNVFVDKSTESCEMGAIEYKPPLVGPHNHDTISMAVIDRMGHIAVGTSTNGATYKIPGRVGDGPIVGSSAYADDEVGGCGATGDGDTMMRFLPCYQVVESMRQGMKPEEAAKDAISRIARKFPDFVGAVVAVDKNGSHAGACYGWTFQYSVQNPDMNDVQVFTVLP

SEQ ID NO: 30884 - protein, 345 aa, Arabidopsis thaliana
  misc_feature (1)..(345): Ceres Seq. ID no. 4975117
MNVGWFQVADAELVKSDKFPVVVSTWPFLEAVRAAWRAVDNGSSAVEAVVEGCSACEELRCDGTVGPGGSPDENGETMIDALVMDGVTMEVGAVAAMRYVKDGIRAAHLVMKYSQHTLLAGEGASAFAISMGLPGPMNLSSPESVKKWSDWKENQCQPNFRKNVVPANDCGPYKPNNSAMNVFVDKSTESCEMGAIEYKPPLVGPHNHDTISMAVIDRMGHIAVGTSTNGATYKIPGRVGDGPIVGSSAYADDEVGGCGATGDGDTMMRFLPCYQVVESMRQGMKPEEAAKDAISRIARKFPDFVGAVVAVDKNGSHAGACYGWTFQYSVQNPDMNDVQVFTVLP

SEQ ID NO: 30885 - DNA, 929 bp, Arabidopsis thaliana
  misc_feature (1)..(929): Ceres Seq. ID no. 4975441
ctctccaaatttcttcttcttctccggcgaagaaatcgaaaagtcattaccctaagagtcccagagtcgtcagaaggaacagcttttgaaatggacggtgtcacctaccaaagattcccaacggtgaagatccgtgagcttaaagatgactacgccaagttcgagcttcgtgaaaccgacgtttcaatggccaacgctctccgtcgcgtaatgatctccgaagtccccaccatggcaatccatctcgtcaaaatcgaggttaattcctctgttctcaacgacgagttcattgctcaacgacttagtctcatccctctcactagcgagcgtgctatgagcatgcggttctgtcaagattgtgaagattgtaatggagatgaacattgcgagttctgctctgttgagtttccccttagtgctaagtgtgttactgaccaaaccctagatgttactagtagggatctctacagtgctgatcctactgttactcctgttgatttcactagtaactcatctacttctgattcaagcgagcacaagggaattatcattgcgaaactacgcaggggacaagagttgaagcttaaagcattagctaggaaaggaattgggaaagatcatgcgaaatggtctcctgcagctactgttacgtatatgtatgagcctgacattattatcaatgaagagatgatgaacactttgacagatgaggaaaaaattgacttgattgagagcagtcctaccaaagtgtttggcattgacccagtcaccggacaggttaatttcgatgttctgtaagaataacatctatacaagtttatagctttgagacttcaatatgattgtactactttataggctaccatgctttgaaatatatgtatgtgatgtggtgtatgaattttctttaagtgtttagtgcgtttagc

SEQ ID NO: 30886 - protein, 265 aa, Arabidopsis thaliana
  misc_feature (1)..(265): Ceres Seq. ID no. 4975442
LSKFLLLLRRRNRKVITLRVPESSEGTAFEMDGVTYQRFPTVKIRELKDDYAKFELRETDVSMANALRRVMISEVPTMAIHLVKIEVNSSVLNDEFIAQRLSLIPLTSERAMSMRFCQDCEDCNGDEHCEFCSVEFPLSAKCVTDQTLDVTSRDLYSADPTVTPVDFTSNSSTSDSSEHKGIIIAKLRRGQELKLKALARKGIGKDHAKWSPAATVTYMYEPDIIINEEMMNTLTDEEKIDLIESSPTKVFGIDPVTGQVNFDVL

SEQ ID NO: 30887 - protein, 235 aa, Arabidopsis thaliana
  misc_feature (1)..(235): Ceres Seq. ID no. 4975443
MDGVTYQRFPTVKIRELKDDYAKFELRETDVSMANALRRVMISEVPTMAIHLVKIEVNSSVLNDEFIAQRLSLIPLTSERAMSMRFCQDCEDCNGDEHCEFCSVEFPLSAKCVTDQTLDVTSRDLYSADPTVTPVDFTSNSSTSDSSEHKGIIIAKLRRGQELKLKALARKGIGKDHAKWSPAATVTYMYEPDIIINEEMMNTLTDEEKIDLIESSPTKVFGIDPVTGQVNFDVL

SEQ ID NO: 30888 - protein, 203 aa, Arabidopsis thaliana
  misc_feature (1)..(203): Ceres Seq. ID no. 4975444
MANALRRVMISEVPTMAIHLVKIEVNSSVLNDEFIAQRLSLIPLTSERAMSMRFCQDCEDCNGDEHCEFCSVEFPLSAKCVTDQTLDVTSRDLYSADPTVTPVDFTSNSSTSDSSEHKGIIIAKLRRGQELKLKALARKGIGKDHAKWSPAATVTYMYEPDIIINEEMMNTLTDEEKIDLIESSPTKVFGIDPVTGQVNFDVL

SEQ ID NO: 30889 - DNA, 1127 bp, Arabidopsis thaliana
  misc_feature (1)..(1127): Ceres Seq. ID no. 4975592
atcgatcactgaatcttcttcttcttcttcttccttctctcaagaacaggtaaaactctctcctcttctccttctttttctctcctctctcttctctcttttaacaaaaaaaaactgtcttttcttcatttctgttctttttttggttgccgagaaaaacagaggataattttccgatatctgttttttttttctcggtgaccagaatcggttggttctgttttttttttttttttccttctttgttattgttatcttattaatgaatcttttttgttgttataatttacagattttttttaaacgagcttgatcaataaattctctcaagatctatggcggaagagcatcgatgtcagacaccagaaagcaaccgtctctgtgttaacaactgtggcttcctcggcagctccgccaccatgaatctctgttctaattgttacggcgatctttgtctcaaacaacaacaacaatcctcctccatcaaatccaccgttgaatcttccctctctgtatctcctccgtcgtcatcatcatcggagatctcttctccgatcatccctcctctccttaaaaatccatcagtcaagctagaggtaccggagaaaaaggcggtgatttcgctgccgacgacggagcagaatcagcaacagaggccgaatcggtgcacgacgtgtaggaaacgggtcgggttaaccggattcaagtgccggtgcggtacgatgttttgcggggttcataggtacccggagatccatggatgcagctacgatttcaaatcggccggacgtgaagagatcgcgaaagcgaatccgttggtgaaagcagcgaagcttcagaagatatgatcagagccgttcgatgcgttgacttttcctctcgtaagtcttcatttctacgcgtatgtgtgtcctccgtcccccgagaaatacggatggtgtcgatttgattgatctcagccgttggatcaaaaatggtttattattgtaaaagattgattatgtatttatcaaagggacacgtgtcacgtggttttaggatggagacgctttcgctttttctccttcattttattttctttttcctttcagaaagaaataagattattcgcgttggctttttctttt

SEQ ID NO: 30890 - protein, 170 aa, Arabidopsis thaliana
  misc_feature (1)..(170): Ceres Seq. ID no. 4975593
MAEEHRCQTPESNRLCVNNCGFLGSSATMNLCSNCYGDLCLKQQQQSSSIKSTVESSLSVSPPSSSSSEISSPIIPPLLKNPSVKLEVPEKKAVISLPTTEQNQQQRPNRCTTCRKRVGLTGFKCRCGTMFCGVHRYPEIHGCSYDFKSAGREEIAKANPLVKAAKLQKI

SEQ ID NO: 30891 - protein, 142 aa, Arabidopsis thaliana
  misc_feature (1)..(142): Ceres Seq. ID no. 4975594
MNLCSNCYGDLCLKQQQQSSSIKSTVESSLSVSPPSSSSSEISSPIIPPLLKNPSVKLEVPEKKAVISLPTTEQNQQQRPNRCTTCRKRVGLTGFKCRCGTMFCGVHRYPEIHGCSYDFKSAGREEIAKANPLVKAAKLQKI

SEQ ID NO: 30892 - DNA, 603 bp, Arabidopsis thaliana
  misc_feature (1)..(603): Ceres Seq. ID no. 4975943
atgtcgtttgggtctctcgtgcttccatctccaccttcctccttgtctgcaaatgtcaagcatttcaatggctacggtaggcttaatcgtaatctcgtgcgagcttcttcgtccgatgttcccgatttcctctctgccgattggttggagagccgtaggaaacgaccttttggccccagacttgattttagtgcagaagacgctgttcgacatcagcttgatgcattgaagtataatgaccatcctcgtgatgattatggcattgaggtcatgtatcggtttgctggattcgatccatttgagagatccacctatttcggtcctttctttgatcttggacagtttgaaaggtttaggcgtatttttcatcactcgtcttaccgtgtgttgcttggtcacaaggatagaaaacttttaagcagtttgttcgtggaggagaatcgtttcaagcagaggatctggattcagggaaatcgacctgaagaggaagagatatttgaattcacaatgttccagcgaataggcggttcatgggatggatattggttgacagaaagcttgcttcatgacggagatgtgttttcaggagggatggcttactga

SEQ ID NO: 30893 - protein, 200 aa, Arabidopsis thaliana
  misc_feature (1)..(200): Ceres Seq. ID no. 4975944
MSFGSLVLPSPPSSLSANVKHFNGYGRLNRNLVRASSSDVPDFLSADWLESRRKRPFGPRLDFSAEDAVRHQLDALKYNDHPRDDYGIEVMYRFAGFDPFERSTYFGPFFDLGQFERFRRIFHHSSYRVLLGHKDRKLLSSLFVEENRFKQRIWIQGNRPEEEEIFEFTMFQRIGGSWDGYWLTESLLHDGDVFSGGMAY

SEQ ID NO: 30894 - protein, 110 aa, Arabidopsis thaliana
  misc_feature (1)..(110): Ceres Seq. ID no. 4975945
MYRFAGFDPFERSTYFGPFFDLGQFERFRRIFHHSSYRVLLGHKDRKLLSSLFVEENRFKQRIWIQGNRPEEEEIFEFTMFQRIGGSWDGYWLTESLLHDGDVFSGGMAY

SEQ ID NO: 30895 - DNA, 1488 bp, Arabidopsis thaliana
  misc_feature (1)..(1488): Ceres Seq. ID no. 4976003
atgacccagatgcaggaacctaatgttttcgtctacaacgcgttgtttaaaggcttcgttacttgttctcacccgattcgatctctggaattgtatgttcgtatgctcagggactcggtttctccatcaagctacacgtactcttcactagtaaaggcgtcttctttcgcttctaggtttggggaatcactccaggcgcacatctggaaatttggatttggtttccatgttaaaattcagacgactcttattgatttttattcagccactggtagaatcagggaagccaggaaagtgtttgatgaaatgcctgaaagagatgatattgcttggaccacaatggtttctgcttatcgtcgggttttggatatggactctgcgaattctttagctaaccaaatgtcggagaagaatgaggctacgtcgaactgtttgattaatggatatatgggattaggcaatctggaacaagcagagtcattgtttaatcagatgcctgtgaaggacataatctcatggaccactatgatcaagggttactcgcagaataaaagatatagagaagcaattgcagtgttctacaaaatgatggaggagggcatcattcctgatgaggttactatgtcaactgttatttcagcttgtgcccatctcggcgtgctggaaataggtaaggaggttcatatgtacacgttacagaacggttttgttcttgatgtctacattggttctgcactggtagatatgtattccaaatgtggtagcttagagcgggcgcttctggtgttcttcaatttgcccaaaaagaatctattttgttggaattcgatcattgaaggactggcggctcatggttttgcacaagaagcactgaaaatgtttgccaagatggagatggagtcggtgaaacctaacgcagtcacttttgtgagtgtttttactgcgtgtactcacgcaggtcttgttgacgaaggtcggaggatatatcgcagcatgattgatgactattccattgtctctaatgttgaacattacggaggcatggttcatctattcagcaaagctgggttgatctatgaggctcttgaattgattggaaatatggaatttgaaccaaatgcggttatctggggggccttgcttgatgggtgcagaattcacaagaatctcgtgatagctgaaatagcgtttaacaaactgatggttttggagccgatgaatagtgggtattatttccttttagttagcatgtatgcagaacaaaacaggtggagagatgttgcagagattaggggaaggatgagagagttgggtatagaaaagatatgtcctgggacaagttcgattcggatagataaacgagaccatctgtttgctgcagctgataagtctcactcagcttcagatgaggtttgcttgctgcttgatgagatatatgatcagatgggattagctggatatgtgcaggaaactgagaatgtatattaa

SEQ ID NO: 30896 - protein, 495 aa, Arabidopsis thaliana
  misc_feature (1)..(495): Ceres Seq. ID no. 4976004
MTQMQEPNVFVYNALFKGFVTCSHPIRSLELYVRMLRDSVSPSSYTYSSLVKASSFASRFGESLQAHIWKFGFGFHVKIQTTLIDFYSATGRIREARKVFDEMPERDDIAWTTMVSAYRRVLDMDSANSLANQMSEKNEATSNCLINGYMGLGNLEQAESLFNQMPVKDIISWTTMIKGYSQNKRYREAIAVFYKMMEEGIIPDEVTMSTVISACAHLGVLEIGKEVHMYTLQNGFVLDVYIGSALVDMYSKCGSLERALLVFFNLPKKNLFCWNSIIEGLAAHGFAQEALKMFAKMEMESVKPNAVTFVSVFTACTHAGLVDEGRRIYRSMIDDYSIVSNVEHYGGMVHLFSKAGLIYEALELIGNMEFEPNAVIWGALLDGCRIHKNLVIAEIAFNKLMVLEPMNSGYYFLLVSMYAEQNRWRDVAEIRGRMRELGIEKICPGTSSIRIDKRDHLFAAADKSHSASDEVCLLLDEIYDQMGLAGYVQETENVY

SEQ ID NO: 30897 - protein, 492 aa, Arabidopsis thaliana
  misc_feature (1)..(492): Ceres Seq. ID no. 4976005
MQEPNVFVYNALFKGFVTCSHPIRSLELYVRMLRDSVSPSSYTYSSLVKASSFASRFGESLQAHIWKFGFGFHVKIQTTLIDFYSATGRIREARKVFDEMPERDDIAWTTMVSAYRRVLDMDSANSLANQMSEKNEATSNCLINGYMGLGNLEQAESLFNQMPVKDIISWTTMIKGYSQNKRYREAIAVFYKMMEEGIIPDEVTMSTVISACAHLGVLEIGKEVHMYTLQNGFVLDVYIGSALVDMYSKCGSLERALLVFFNLPKKNLFCWNSIIEGLAAHGFAQEALKMFAKMEMESVKPNAVTFVSVFTACTHAGLVDEGRRIYRSMIDDYSIVSNVEHYGGMVHLFSKAGLIYEALELIGNMEFEPNAVIWGALLDGCRIHKNLVIAEIAFNKLMVLEPMNSGYYFLLVSMYAEQNRWRDVAEIRGRMRELGIEKICPGTSSIRIDKRDHLFAAADKSHSASDEVCLLLDEIYDQMGLAGYVQETENVY

SEQ ID NO: 30898 - protein, 461 aa, Arabidopsis thaliana
  misc_feature (1)..(461): Ceres Seq. ID no. 4976006
MLRDSVSPSSYTYSSLVKASSFASRFGESLQAHIWKFGFGFHVKIQTTLIDFYSATGRIREARKVFDEMPERDDIAWTTMVSAYRRVLDMDSANSLANQMSEKNEATSNCLINGYMGLGNLEQAESLFNQMPVKDIISWTTMIKGYSQNKRYREAIAVFYKMMEEGIIPDEVTMSTVISACAHLGVLEIGKEVHMYTLQNGFVLDVYIGSALVDMYSKCGSLERALLVFFNLPKKNLFCWNSIIEGLAAHGFAQEALKMFAKMEMESVKPNAVTFVSVFTACTHAGLVDEGRRIYRSMIDDYSIVSNVEHYGGMVHLFSKAGLIYEALELIGNMEFEPNAVIWGALLDGCRIHKNLVIAEIAFNKLMVLEPMNSGYYFLLVSMYAEQNRWRDVAEIRGRMRELGIEKICPGTSSIRIDKRDHLFAAADKSHSASDEVCLLLDEIYDQMGLAGYVQETENVY

SEQ ID NO: 30899 - DNA, 2205 bp, Arabidopsis thaliana
  misc_feature (1)..(2205): Ceres Seq. ID no. 4976007
atgggttataccttgcaacagatactgaggagcatctgctccaacacggattggaactacgccgtgttctggaaacttaatcaccactcgccaatggttcttactttggaggatgtgtactgtgttaatcatgagcgcggtttgatgccggaaagcttgcatggagggcgccatgctcatgaccctcttgggttagctgtggctaagatgtcatatcatgtacactctcttggggaagggattgtaggacaagtagcaatctctggacaacatcaatggatcttctctgaatatttgaatgactctcattcgacacttcaggttcacaacggttgggagagtcaaatttctgctggaattaagacaattcttatagtagctgttggttcttgcggagttgtgcagcttggctctttgtgtaaagttgaagaagacccggctttggtgactcatatcaggcatttatttttggcacttacggatccactagcagaccatgcatcaaatttaatgcaatgtgatattaacagtccatcggatcggccaaaaataccttccaaatgcttacatgaggcatcccctgatttctcaggagaatttgacaaagctatggatatggaagggttaaatattgtatctcaaaacacaagtaatagaagtaacgaccttccatacaatttcactccaacatattttcacatggagaggactgctcaagtaattggtgggcttgaagcagtccaaccttccatgtttggaagcaatgattgtgttacaagtggtttttcagttggtgtggttgatactaaacacaagaatcaagtggatataagtgatatgagtaaggtgatttatgatgaggaaacaggtggataccgatactcaagagaattagatcccaatttccaacactactcgaggaatcatgtgcgtaatagtggaggcacatctgctttagctatggagagtgataggctaaaagcaggttcatcatatccacaacttgattcaactgtacttactgcgttgaaaacagataaagattattctcgtcgaaatgaggttttccaaccatctgagagccaaggaagtatatttgtgaaagatacagaacataggcaggaggaaaaaagtgagtcaagtcagttggatgctttaactgcatctttgtgttctttttctggcagtgagctgttagaggcattagggccagcgttcagtaaaacaagcactgattatggggagctagcaaagtttgaatctgctgcagctataagacgaacaaatgatatgagccatagtcacctgacatttgaatccagctccgagaatcttctagatgccgttgttgctagtatgagtaatggtgatggtaatgtcaggcgtgaaatatcttcaagcaggtcaacacagtcattgcttacaactgctgaaatggcacaggcagaaccttttggtcataataagcaaaatattgttagcacagttgatagtgtgattagccagccgcctctagcagatgggcttatccaacagaatccatcaaatatctgcggagcattttcttccattgggttttcatcaacatgtctcagttcatccagcgaccagtttccgacgtccctggaaattcccaagaagaacaaaaagagagctaaacctggtgaaagttctcggcctcgtccaagggacaggcaacttattcaggatcgtatcaaagaactaagggagcttgtgcctaatggatctaagtgcagtattgattccttgctagagtgcacgatcaagcacatgctcttcctgcagagtgtctctcagcatgctgacaagctcactaaaagtgcaagttcaaagatgcaacacaaggataccggcaccctaggaatatcaagcactgaacaaggttcgagctgggcagtggagattggaggccatctgcaagtgtgctcaatcatggtggagaatctggacaaagaaggagtgatgcttattgagatgctatgcgaagaatgtagccactttctcgagatagcgaacgtgataaggagcttggaactcatcatcctcagaggcaccactgagaaacaaggcgagaaaacatggatatgttttgtagtggagggacaaaacaacaaagtaatgcacaggatggacatcctgtggtctcttgtgcaaatatttcaacccaaggctacaaacaggtag

SEQ ID NO: 30900 - protein, 734 aa, Arabidopsis thaliana
  misc_feature (1)..(734): Ceres Seq. ID no. 4976008
MGYTLQQILRSICSNTDWNYAVFWKLNHHSPMVLTLEDVYCVNHERGLMPESLHGGRHAHDPLGLAVAKMSYHVHSLGEGIVGQVAISGQHQWIFSEYLNDSHSTLQVHNGWESQISAGIKTILIVAVGSCGVVQLGSLCKVEEDPALVTHIRHLFLALTDPLADHASNLMQCDINSPSDRPKIPSKCLHEASPDFSGEFDKAMDMEGLNIVSQNTSNRSNDLPYNFTPTYFHMERTAQVIGGLEAVQPSMFGSNDCVTSGFSVGVVDTKHKNQVDISDMSKVIYDEETGGYRYSRELDPNFQHYSRNHVRNSGGTSALAMESDRLKAGSSYPQLDSTVLTALKTDKDYSRRNEVFQPSESQGSIFVKDTEHRQEEKSESSQLDALTASLCSFSGSELLEALGPAFSKTSTDYGELAKFESAAAIRRTNDMSHSHLTFESSSENLLDAVVASMSNGDGNVRREISSSRSTQSLLTTAEMAQAEPFGHNKQNIVSTVDSVISQPPLADGLIQQNPSNICGAFSSIGFSSTCLSSSSDQFPTSLEIPKKNKKRAKPGESSRPRPRDRQLIQDRIKELRELVPNGSKCSIDSLLECTIKHMLFLQSVSQHADKLTKSASSKMQHKDTGTLGISSTEQGSSWAVEIGGHLQVCSIMVENLDKEGVMLIEMLCEECSHFLEIANVIRSLELIILRGTTEKQGEKTWICFVVEGQNNKVMHRMDILWSLVQIFQPKATNR

SEQ ID NO: 30901 - protein, 703 aa, Arabidopsis thaliana
  misc_feature (1)..(703): Ceres Seq. ID no. 4976009
MVLTLEDVYCVNHERGLMPESLHGGRHAHDPLGLAVAKMSYHVHSLGEGIVGQVAISGQHQWIFSEYLNDSHSTLQVHNGWESQISAGIKTILIVAVGSCGVVQLGSLCKVEEDPALVTHIRHLFLALTDPLADHASNLMQCDINSPSDRPKIPSKCLHEASPDFSGEFDKAMDMEGLNIVSQNTSNRSNDLPYNFTPTYFHMERTAQVIGGLEAVQPSMFGSNDCVTSGFSVGVVDTKHKNQVDISDMSKVIYDEETGGYRYSRELDPNFQHYSRNHVRNSGGTSALAMESDRLKAGSSYPQLDSTVLTALKTDKDYSRRNEVFQPSESQGSIFVKDTEHRQEEKSESSQLDALTASLCSFSGSELLEALGPAFSKTSTDYGELAKFESAAAIRRTNDMSHSHLTFESSSENLLDAVVASMSNGDGNVRREISSSRSTQSLLTTAEMAQAEPFGHNKQNIVSTVDSVISQPPLADGLIQQNPSNICGAFSSIGFSSTCLSSSSDQFPTSLEIPKKNKKRAKPGESSRPRPRDRQLIQDRIKELRELVPNGSKCSIDSLLECTIKHMLFLQSVSQHADKLTKSASSKMQHKDTGTLGISSTEQGSSWAVEIGGHLQVCSIMVENLDKEGVMLIEMLCEECSHFLEIANVIRSLELIILRGTTEKQGEKTWICFVVEGQNNKVMHRMDILWSLVQIFQPKATNR

SEQ ID NO: 30902 - protein, 686 aa, Arabidopsis thaliana
  misc_feature (1)..(686): Ceres Seq. ID no. 4976010
MPESLHGGRHAHDPLGLAVAKMSYHVHSLGEGIVGQVAISGQHQWIFSEYLNDSHSTLQVHNGWESQISAGIKTILIVAVGSCGVVQLGSLCKVEEDPALVTHIRHLFLALTDPLADHASNLMQCDINSPSDRPKIPSKCLHEASPDFSGEFDKAMDMEGLNIVSQNTSNRSNDLPYNFTPTYFHMERTAQVIGGLEAVQPSMFGSNDCVTSGFSVGVVDTKHKNQVDISDMSKVIYDEETGGYRYSRELDPNFQHYSRNHVRNSGGTSALAMESDRLKAGSSYPQLDSTVLTALKTDKDYSRRNEVFQPSESQGSIFVKDTEHRQEEKSESSQLDALTASLCSFSGSELLEALGPAFSKTSTDYGELAKFESAAAIRRTNDMSHSHLTFESSSENLLDAVVASMSNGDGNVRREISSSRSTQSLLTTAEMAQAEPFGHNKQNIVSTVDSVISQPPLADGLIQQNPSNICGAFSSIGFSSTCLSSSSDQFPTSLEIPKKNKKRAKPGESSRPRPRDRQLIQDRIKELRELVPNGSKCSIDSLLECTIKHMLFLQSVSQHADKLTKSASSKMQHKDTGTLGISSTEQGSSWAVEIGGHLQVCSIMVENLDKEGVMLIEMLCEECSHFLEIANVIRSLELIILRGTTEKQGEKTWICFVVEGQNNKVMHRMDILWSLVQIFQPKATNR

SEQ ID NO: 30903 - DNA, 921 bp, Arabidopsis thaliana
  misc_feature (1)..(921): Ceres Seq. ID no. 4976097
atggctaaagtagaacagagcagatggattcttcaaggcatgaccgctcttgtcaccggcggaacgaaagacattgggtttgtcttccatcatcactttccaaaaatggctaagacaggggaaagcttgagagacaaacctagatggagtcttgtaggcatgaccgctcttgtcaccggtggctcaaaaggcatcggagaagctgtggttgaggaactagctacgttaggggcaagaatccacacatgtgccagagacgaaactcagcttcaagaaagcttacgtaagtggcaagcaaaagggtttcaggttaccacttctgtctgcgacgtttcttctcgtgataaacgagagaagctcatggaaaccgtttccactatcttcgaaggaaaactcaacatacttgtcaacaatgtgggaacgtgtatagtcaaaccgaccttacaacatacagccgaagatttctcatttacaatggcaacgaatctcgagtcagcttttcatctctcgcagctcgcgcatcctttgttgaaagcttctggttcagggagcatcgtgctcatctcctccgtatctggagttgtacatgtcaatggtgcatccatatatggagtatctaaaggagctatgaatcagctaggaagaaacttagcgtgcgagtgggcaagtgacaacataaggactaactctgtgtgtccatggttcatagaaactcctttagttaccgaaagtcttagtaatgaggagtttagaaaagaagtggagagtagaccaccaatgggacgtgttggagaagtaaatgaagtatcatcgcttgtggcatttctttgtcttcctgcagcttcttatattacaggtcaaaccatttgtgttgatggaggtttcactgttaatggtttctctttcaagcctctgccttaa

SEQ ID NO: 30904 - protein, 306 aa, Arabidopsis thaliana
  misc_feature (1)..(306): Ceres Seq. ID no. 4976098
MAKVEQSRWILQGMTALVTGGTKDIGFVFHHHFPKMAKTGESLRDKPRWSLVGMTALVTGGSKGIGEAVVEELATLGARIHTCARDETQLQESLRKWQAKGFQVTTSVCDVSSRDKREKLMETVSTIFEGKLNILVNNVGTCIVKPTLQHTAEDFSFTMATNLESAFHLSQLAHPLLKASGSGSIVLISSVSGVVHVNGASIYGVSKGAMNQLGRNLACEWASDNIRTNSVCPWFIETPLVTESLSNEEFRKEVESRPPMGRVGEVNEVSSLVAFLCLPAASYITGQTICVDGGFTVNGFSFKPLP

SEQ ID NO: 30905 - protein, 293 aa, Arabidopsis thaliana
  misc_feature (1)..(293): Ceres Seq. ID no. 4976099
MTALVTGGTKDIGFVFHHHFPKMAKTGESLRDKPRWSLVGMTALVTGGSKGIGEAVVEELATLGARIHTCARDETQLQESLRKWQAKGFQVTTSVCDVSSRDKREKLMETVSTIFEGKLNILVNNVGTCIVKPTLQHTAEDFSFTMATNLESAFHLSQLAHPLLKASGSGSIVLISSVSGVVHVNGASIYGVSKGAMNQLGRNLACEWASDNIRTNSVCPWFIETPLVTESLSNEEFRKEVESRPPMGRVGEVNEVSSLVAFLCLPAASYITGQTICVDGGFTVNGFSFKPLP

SEQ ID NO: 30906 - protein, 271 aa, Arabidopsis thaliana
  misc_feature (1)..(271): Ceres Seq. ID no. 4976100
MAKTGESLRDKPRWSLVGMTALVTGGSKGIGEAVVEELATLGARIHTCARDETQLQESLRKWQAKGFQVTTSVCDVSSRDKREKLMETVSTIFEGKLNILVNNVGTCIVKPTLQHTAEDFSFTMATNLESAFHLSQLAHPLLKASGSGSIVLISSVSGVVHVNGASIYGVSKGAMNQLGRNLACEWASDNIRTNSVCPWFIETPLVTESLSNEEFRKEVESRPPMGRVGEVNEVSSLVAFLCLPAASYITGQTICVDGGFTVNGFSFKPLP

SEQ ID NO: 30907 - DNA, 480 bp, Arabidopsis thaliana
  misc_feature (1)..(480): Ceres Seq. ID no. 4976172
atggataaaggcttcagattagtaaccagtcttcttcttctctccttcttcttctcaggtacaaaagcaattactgaaccaatagaagaagaaaaagacataaccacaccattagccacaaacccaaccaccacaccaacaaccgtggtccctaactccgactctgacgcttccgcggtggccacaacgccactaacgattccatcgtcaccacacggtgtagcctacccaggtgatcagagctggtgcgttgctagagagaacgttgcaaaaatggcgttacaagcggctttggactatgcatgtgggattggtggagcagactgctctgagatacaagaaggaggaaattgttataaccccaactcgttgagagcacatgcctcttttgccttcaatagttattaccagaagaatccaatccctagtagttgcaattttgatggaactgctatcactatcagtgctgacccaagttag

SEQ ID NO: 30908 - protein, 159 aa, Arabidopsis thaliana
  misc_feature (1)..(159): Ceres Seq. ID no. 4976173
MDKGFRLVTSLLLLSFFFSGTKAITEPIEEEKDITTPLATNPTTTPTTVVPNSDSDASAVATTPLTIPSSPHGVAYPGDQSWCVARENVAKMALQAALDYACGIGGADCSEIQEGGNCYNPNSLRAHASFAFNSYYQKNPIPSSCNFDGTAITISADPS

SEQ ID NO: 30909 - DNA, 1179 bp, Arabidopsis thaliana
  misc_feature (1)..(1179): Ceres Seq. ID no. 4976203
aatatagtaccaactccattgaatgttaaaactcagaagaaagtggagtgatcatataacgacaatgaagaatctctttaacttgttccttatgtttttctttgcaatgccaattctttcactctccgagaatccaaccaatttcagcgagagttgcgaagacgggagtggagaaaccggttcaagctttggcatagggttcgatttggttcttgattttggtttataccggaatagctgccccgaagcagagtctatcgtctactcgtgggtggaaaccacggtgttagaggatccaagaatggctgcttctcttctccgtcttcatttccacgactgttttgtcaatggatgtgatgcttcggtgttgttagatgacacagaaggactggttggtgaaaaaacggcgcctcctaatctaaattctctacgagggttcgaagtgattgattcgataaagtctgatattgaatctgtatgtccagagaccgtctcatgcgcagacattcttgccatggctgctagagattcagtcgttgtgtcgggtggaccaaggtgggaggtggaagtaggaagaaaagacagtagaacagcaagcaaacaggcagcaacaaatggcttaccctcaccaaactcaaccgtatcaactctcatctctactttccagaatcttggcctttcacaaaccgacatggtcgctctttccggtggacatacattgggaaaggcacggtgcacttcgtttacagctcggttgcagccactgcaaactggacaaccagctaaccacggagacaaccttgagttcctcgagtcactgcaacagttatgctcgactgttgggcccagtgtaggtatcactcagcttgacttggtgactccatcaacatttgacaaccagtactatgtaaacctcctctcgggtgagggattgcttccatcagaccaggctttagcggttcaagacccagggacaagggcgattgttgagacctacgcaacagatcagtcggttttctttgaggattttaagaacgctatggttaaaatgggagggatacccggtggtagtaatagcgagattaggaagaattgtagaatgattaactaaaaataaaagcccgacttattgaatgatatctaattatctatataaaaattaaagaagtccacctacgt

SEQ ID NO: 30910 - protein, 362 aa, Arabidopsis thaliana
  misc_feature (1)..(362): Ceres Seq. ID no. 4976204
MLKLRRKWSDHITTMKNLFNLFLMFFFAMPILSLSENPTNFSESCEDGSGETGSSFGIGFDLVLDFGLYRNSCPEAESIVYSWVETTVLEDPRMAASLLRLHFHDCFVNGCDASVLLDDTEGLVGEKTAPPNLNSLRGFEVIDSIKSDIESVCPETVSCADILAMAARDSVVVSGGPRWEVEVGRKDSRTASKQAATNGLPSPNSTVSTLISTFQNLGLSQTDMVALSGGHTLGKARCTSFTARLQPLQTGQPANHGDNLEFLESLQQLCSTVGPSVGITQLDLVTPSTFDNQYYVNLLSGEGLLPSDQALAVQDPGTRAIVETYATDQSVFFEDFKNAMVKMGGIPGGSNSEIRKNCRMIN

SEQ ID NO: 30911 - protein, 348 aa, Arabidopsis thaliana
  misc_feature (1)..(348): Ceres Seq. ID no. 4976205
MKNLFNLFLMFFFAMPILSLSENPTNFSESCEDGSGETGSSFGIGFDLVLDFGLYRNSCPEAESIVYSWVETTVLEDPRMAASLLRLHFHDCFVNGCDASVLLDDTEGLVGEKTAPPNLNSLRGFEVIDSIKSDIESVCPETVSCADILAMAARDSVVVSGGPRWEVEVGRKDSRTASKQAATNGLPSPNSTVSTLISTFQNLGLSQTDMVALSGGHTLGKARCTSFTARLQPLQTGQPANHGDNLEFLESLQQLCSTVGPSVGITQLDLVTPSTFDNQYYVNLLSGEGLLPSDQALAVQDPGTRAIVETYATDQSVFFEDFKNAMVKMGGIPGGSNSEIRKNCRMIN

SEQ ID NO: 30912 - protein, 339 aa, Arabidopsis thaliana
  misc_feature (1)..(339): Ceres Seq. ID no. 4976206
MFFFAMPILSLSENPTNFSESCEDGSGETGSSFGIGFDLVLDFGLYRNSCPEAESIVYSWVETTVLEDPRMAASLLRLHFHDCFVNGCDASVLLDDTEGLVGEKTAPPNLNSLRGFEVIDSIKSDIESVCPETVSCADILAMAARDSVVVSGGPRWEVEVGRKDSRTASKQAATNGLPSPNSTVSTLISTFQNLGLSQTDMVALSGGHTLGKARCTSFTARLQPLQTGQPANHGDNLEFLESLQQLCSTVGPSVGITQLDLVTPSTFDNQYYVNLLSGEGLLPSDQALAVQDPGTRAIVETYATDQSVFFEDFKNAMVKMGGIPGGSNSEIRKNCRMIN

SEQ ID NO: 30913 - DNA, 1455 bp, Arabidopsis thaliana
  misc_feature (1)..(1455): Ceres Seq. ID no. 4976645
atgaaaaagggaaaagacatggcgaaagaggagcaagaaacagcggcaatagagccacttagcccggtttcacagttgtttgtttcgccgagtctctactgcttcattattttcactttagggttccaaactagatgcaacccatccaccattgttgaaggtgtcaagaacacatggatcaagctccctcgcttctctagcaaagtggagataaagaaaaatggaaaagcgtcttgggttcctgttagtgttcgagtagaagatcatgttgttgttccagatcttgattattccaacattgaaaatcctgatcaatttatagaagactatacttcgaaattagctaatactccgatggacatgtcccgacctttatgggaacttcatttacttaatataaagacatcaaatgcagaatctttagctataggaaaatttcatcattctcttggcgatgggatgtctcttatatctcttctattagctagttcacggaaaacatcagatcctgacgctttgcctactaccgcggctacaagaaagcatgccagttccaataaaaagagttggtggttggttggaagattttggtttatgataagaatcattttcactactgttgttgaattgtttaagtatttgcttacactatgttttatgcgggacactaaaactcccctaatgggtaaaacgggtgatgcaatacgatctagaaaggttatacatcggatagtaagctttgatgatgtcaagttggtgaagaacaacatggatatgaaagtgaatgatgttcttcttggaatgacacaggcaggtctctcaagatatttgagcaggaaatatgatgaagatatggtggtcgagaagaaaaaaaacttggagaaaatccgtcttcgtggtacagtattcgtaaatttaagagcagacacaaaactcgaggatttggcgaatatgatggcaaaaggttcaaagtgtagatggggaaacttcgtaggtgttattatatttcctttatgggtgagatccgaagatgatccgttggaatacgttcgacgagccaaatctactatggatatcaaaaaactgtccatagaatcacttatttgctatggactcatcaaacttaccagaaaaatactcgggggaaaggtagtagaaactcttgttaggagactatttgatcatacgacattgacattttctaatgtgatgggtccagacgaagatataagtttttttgaccatccaatgtcttacgtagcagcaagcgcattaggtggaccacaagctcttattatccattacgtaacctatgtaaacaagattgtcatcaatctagcagtagacacatcagtgattcgagaccctcatctactatgtgatgatttggtagaatcgctcgatatcatcaaacttgctgccatggagaaaggagttcataaaatggaggtttga

SEQ ID NO: 30914 - protein, 484 aa, Arabidopsis thaliana
  misc_feature (1)..(484): Ceres Seq. ID no. 4976646
MKKGKDMAKEEQETAAIEPLSPVSQLFVSPSLYCFIIFTLGFQTRCNPSTIVEGVKNTWIKLPRFSSKVEIKKNGKASWVPVSVRVEDHVVVPDLDYSNIENPDQFIEDYTSKLANTPMDMSRPLWELHLLNIKTSNAESLAIGKFHHSLGDGMSLISLLLASSRKTSDPDALPTTAATRKHASSNKKSWWLVGRFWFMIRIIFTTVVELFKYLLTLCFMRDTKTPLMGKTGDAIRSRKVIHRIVSFDDVKLVKNNMDMKVNDVLLGMTQAGLSRYLSRKYDEDMVVEKKKNLEKIRLRGTVFVNLRADTKLEDLANMMAKGSKCRWGNFVGVIIFPLWVRSEDDPLEYVRRAKSTMDIKKLSIESLICYGLIKLTRKILGGKVVETLVRRLFDHTTLTFSNVMGPDEDISFFDHPMSYVAASALGGPQALIIHYVTYVNKIVINLAVDTSVIRDPHLLCDDLVESLDIIKLAAMEKGVHKMEV

SEQ ID NO: 30915 - protein, 478 aa, Arabidopsis thaliana
  misc_feature (1)..(478): Ceres Seq. ID no. 4976647
MAKEEQETAAIEPLSPVSQLFVSPSLYCFIIFTLGFQTRCNPSTIVEGVKNTWIKLPRFSSKVEIKKNGKASWVPVSVRVEDHVVVPDLDYSNIENPDQFIEDYTSKLANTPMDMSRPLWELHLLNIKTSNAESLAIGKFHHSLGDGMSLISLLLASSRKTSDPDALPTTAATRKHASSNKKSWWLVGRFWFMIRIIFTTVVELFKYLLTLCFMRDTKTPLMGKTGDAIRSRKVIHRIVSFDDVKLVKNNMDMKVNDVLLGMTQAGLSRYLSRKYDEDMVVEKKKNLEKIRLRGTVFVNLRADTKLEDLANMMAKGSKCRWGNFVGVIIFPLWVRSEDDPLEYVRRAKSTMDIKKLSIESLICYGLIKLTRKILGGKVVETLVRRLFDHTTLTFSNVMGPDEDISFFDHPMSYVAASALGGPQALIIHYVTYVNKIVINLAVDTSVIRDPHLLCDDLVESLDIIKLAAMEKGVHKMEV

SEQ ID NO: 30916 - protein, 366 aa, Arabidopsis thaliana
  misc_feature (1)..(366): Ceres Seq. ID no. 4976648
MDMSRPLWELHLLNIKTSNAESLAIGKFHHSLGDGMSLISLLLASSRKTSDPDALPTTAATRKHASSNKKSWWLVGRFWFMIRIIFTTVVELFKYLLTLCFMRDTKTPLMGKTGDAIRSRKVIHRIVSFDDVKLVKNNMDMKVNDVLLGMTQAGLSRYLSRKYDEDMVVEKKKNLEKIRLRGTVFVNLRADTKLEDLANMMAKGSKCRWGNFVGVIIFPLWVRSEDDPLEYVRRAKSTMDIKKLSIESLICYGLIKLTRKILGGKVVETLVRRLFDHTTLTFSNVMGPDEDISFFDHPMSYVAASALGGPQALIIHYVTYVNKIVINLAVDTSVIRDPHLLCDDLVESLDIIKLAAMEKGVHKMEV

SEQ ID NO: 30917 - DNA, 1002 bp, Arabidopsis thaliana
  misc_feature (1)..(1002): Ceres Seq. ID no. 4977027
atggatgagtttatggatcttagaccagtgaagtacacagagcacaagactgttatcagaaagtacactaaaaagtcgtctatggagaggaagaccagtgttcgtgactcggccaggttggttcgggtctcaatgacggatcgtgacgccactgattcatcaagcgacgaggaagagtttctgttccctcgaagacgtgtcaagagattgattaacgagatcagagtcgagcctagcagctcttccaccggcgacgtctctgcttctccgacgaaggaccggaaaagaatcaacgttgattctacggttcaaaagccctctgtttccggccaaaaccagaagaagtaccgcggcgtgagacagcgaccatggggaaaatgggcggcggagattcgtgatcctgagcaacgccggagaatctggctcggtacttttgcaacggcggaggaagctgccatcgtctacgacaacgcagcaatcaaacttcgtggccctgatgctcttaccaacttcaccgtacaaccagaaccagaaccggtacaagaacaagaacaagaaccggagagcaacatgtcggtttcgatatcagaatcaatggacgattctcaacatctatcatctccgacatcggttctcaactaccaaacatatgtctcggaggaaccaatcgatagtcttatcaaaccggttaaacaagagtttcttgaaccagaacaagagccaataagctggcatcttggagaaggtaatactaatactaatgatgattcatttccattggacattacatttctcgacaactatttcaatgaatcattaccagacatctccatcttcgatcaacctatgtctcctattcaaccaacagagaatgatttcttcaacgaccttatgttattcgatagcaacgcagaagaatactactcctccgagatcaaagagattggttcatcgttcaacgatcttgatgattctttgatatccgatctcttacttgtgtga

SEQ ID NO: 30918 - protein, 333 aa, Arabidopsis thaliana; identical to SEQ ID NO: 27655
  misc_feature (1)..(333): Ceres Seq. ID no. 4977028

SEQ ID NO: 30919 - protein, 329 aa, Arabidopsis thaliana; identical to SEQ ID NO: 27656
  misc_feature (1)..(329): Ceres Seq. ID no. 4977029

SEQ ID NO: 30920 - protein, 306 aa, Arabidopsis thaliana
  misc_feature (1)..(306): Ceres Seq. ID no. 4977030
MERKTSVRDSARLVRVSMTDRDATDSSSDEEEFLFPRRRVKRLINEIRVEPSSSSTGDVSASPTKDRKRINVDSTVQKPSVSGQNQKKYRGVRQRPWGKWAAEIRDPEQRRRIWLGTFATAEEAAIVYDNAAIKLRGPDALTNFTVQPEPEPVQEQEQEPESNMSVSISESMDDSQHLSSPTSVLNYQTYVSEEPIDSLIKPVKQEFLEPEQEPISWHLGEGNTNTNDDSFPLDITFLDNYFNESLPDISIFDQPMSPIQPTENDFFNDLMLFDSNAEEYYSSEIKEIGSSFNDLDDSLISDLLLV

SEQ ID NO: 30921 - DNA, 1332 bp, Arabidopsis thaliana
  misc_feature (1)..(1332): Ceres Seq. ID no. 4977718
atggctccggagtcgaaaaatgcgggagtctctgttgtcgttaatctcgacagtgacagtgacagtgacaatgacgacggagtaggaggaagaggagcttttcgaagcatggcgtccctaatggacaaacatcaagttccaagtacgactgctgacgcgacggttgctcctcgagaaaacctagagtgccggagcttttggaaggccggagaaaacttcgtgatccctaccggtgttactaatccagctgctccagcaatagccgagctaattgacaatgctgttgacgagatacaaaatggtgctacgtttgttaagattgataagatcaatattgtcaaagataattccccagctttagttttccaagatgatggcggtggaatggatcccgatgggctcagaaaatgcatgagcttaggctactcatcaaagaagtctaatacgacgattggacagtatggaaatggtttcaagacaagtaccatgagacttggagctgatgatattgtttttactcgctcaactcgtggaggcaaatctactcagagcgttggccttctgtcatacacattcctcagaaaaactggtcaggatgatgtcgttgttcctatgatccgatatgcaatgcagattgatattgatacatccaaggagcgaccacaaccaattatctatggatctgcagaagattgggctgccagccttgaaattatactcaagtggtctccgttttctacagagggcgaactttggcagcagctcgaggatattggaactcatggaacaaaagtaattatatacaacttgtggcttaatgatgaaggaatctacgagctgagttttcacgacgacaatgaggacatccgactccgagatgaaagtgtccatgacagtaaacgggcttatgcttcaatgttatatctcaaaaggttcaataatttcaaaattatacttcgtggaatccctgtggagcagttcaacattgctgatgaattaagattacctgagactattaagtacaatccccatacaacaaaggaaaaagctcccactgaaatcaaagttggatttataaaggaggcgcctaagcttgcagtttgtggtttcaatgtctatcacaaaaaccgtctcatccggcctttctggaaggtcactatgggaggggaaaggagaggcagtggtgttgtgggagttcttgaagcaaactttatagaaccggcccacgataagcaagattttgagaggtcttctctatttcagcggttggaggcaaggctgaaaaagattgtctctaattactggtctcctcttcctctccaaaacctttaa

SEQ ID NO: 30922 - protein, 443 aa, Arabidopsis thaliana
  misc_feature (1)..(443): Ceres Seq. ID no. 4977719
MAPESKNAGVSVVVNLDSDSDSDNDDGVGGRGAFRSMASLMDKHQVPSTTADATVAPRENLECRSFWKAGENFVIPTGVTNPAAPAIAELIDNAVDEIQNGATFVKIDKINIVKDNSPALVFQDDGGGMDPDGLRKCMSLGYSSKKSNTTIGQYGNGFKTSTMRLGADDIVFTRSTRGGKSTQSVGLLSYTFLRKTGQDDVVVPMIRYAMQIDIDTSKERPQPIIYGSAEDWAASLEIILKWSPFSTEGELWQQLEDIGTHGTKVIIYNLWLNDEGIYELSFHDDNEDIRLRDESVHDSKRAYASMLYLKRFNNFKIILRGIPVEQFNIADELRLPETIKYNPHTTKEKAPTEIKVGFIKEAPKLAVCGFNVYHKNRLIRPFWKVTMGGERRGSGVVGVLEANFIEPAHDKQDFERSSLFQRLEARLKKIVSNYWSPLPLQNL

SEQ ID NO: 30923 - protein, 407 aa, Arabidopsis thaliana
  misc_feature (1)..(407): Ceres Seq. ID no. 4977720
MASLMDKHQVPSTTADATVAPRENLECRSFWKAGENFVIPTGVTNPAAPAIAELIDNAVDEIQNGATFVKIDKINIVKDNSPALVFQDDGGGMDPDGLRKCMSLGYSSKKSNTTIGQYGNGFKTSTMRLGADDIVFTRSTRGGKSTQSVGLLSYTFLRKTGQDDVVVPMIRYAMQIDIDTSKERPQPIIYGSAEDWAASLEIILKWSPFSTEGELWQQLEDIGTHGTKVIIYNLWLNDEGIYELSFHDDNEDIRLRDESVHDSKRAYASMLYLKRFNNFKIILRGIPVEQFNIADELRLPETIKYNPHTTKEKAPTEIKVGFIKEAPKLAVCGFNVYHKNRLIRPFWKVTMGGERRGSGVVGVLEANFIEPAHDKQDFERSSLFQRLEARLKKIVSNYWSPLPLQNL

SEQ ID NO: 30924 - protein, 403 aa, Arabidopsis thaliana
  misc_feature (1)..(403): Ceres Seq. ID no. 4977721
MDKHQVPSTTADATVAPRENLECRSFWKAGENFVIPTGVTNPAAPAIAELIDNAVDEIQNGATFVKIDKINIVKDNSPALVFQDDGGGMDPDGLRKCMSLGYSSKKSNTTIGQYGNGFKTSTMRLGADDIVFTRSTRGGKSTQSVGLLSYTFLRKTGQDDVVVPMIRYAMQIDIDTSKERPQPIIYGSAEDWAASLEIILKWSPFSTEGELWQQLEDIGTHGTKVIIYNLWLNDEGIYELSFHDDNEDIRLRDESVHDSKRAYASMLYLKRFNNFKIILRGIPVEQFNIADELRLPETIKYNPHTTKEKAPTEIKVGFIKEAPKLAVCGFNVYHKNRLIRPFWKVTMGGERRGSGVVGVLEANFIEPAHDKQDFERSSLFQRLEARLKKIVSNYWSPLPLQNL

SEQ ID NO: 30925 - DNA, 2658 bp, Arabidopsis thaliana
  misc_feature (1)..(2658): Ceres Seq. ID no. 4978442
atggagagacattgtgtgttagttgccacttttttgctgatgcttcatatcgttcatgctcaggatcaaattggattcattagtgtggattgtggtttggcacctcgtgagtctccttacaatgaagccaaaactggtttaacatatacatcagatgacggtctagtcaacgttgggaaacccggtagaatcgccaaggaattcgaaccgctcgccgataagccgactttgacactgagatattttccagagggagtacgaaactgctacaatctaaatgtcaccagcgacaccaactatctgatcaaggccacattcgtatatggaaattacgatggtcttaatgttgggccaaacttcgacctttacttcggtccgaatttgtggactacggtgagtagtaatgatactataaaggagatcattcatgtgaccaaaaccaattctttacaggtatgtcttattaagactggaataagtataccttttataaatgttttggagctacgaccgatgaagaaaaacatgtacgttactcaaggcgaatcactgaattacttattcagggtgtatattagcaattcaagtactcgtataaggttcccggatgatgtctatgatcgtaaatggtacccgtacttcgacaactcatggacacaagtaactacgactctcgatgtaaacacaagtcttacttatgaactaccacaaagtgtaatggcaaaagccgcaacgccaattaaggctaacgacaccttgaacattacatggacagtagagcctcctactacaaagttttactcctacatgcactttgcagagcttcagactttaagagccaacgatgcaagggaattcaatgtgacgatgaatggaatatatacatatggaccttatagtcctaaaccactaaaaaccgaaaccatatacgacaaaatccctgagcaatgcgatggaggtgcatgccttttgcaggttgtgaagacacttaaatctacccttccacctttacttaatgctatcgaggctttcaccgtgattgatttcccgcagatggagactaatggagatgacgttgatgcaatcaagaatgttcaagatacgtatggaattagtagaattagttggcaaggagatccatgtgtccccaaactgtttttgtgggatggtctaaattgcaacaactccgataattcgacatcaccaatcatcacttccttagacttatcttcaagtggactaactgggagcatcacccaagccattcagaatctaactaacctgcaagaactggacttgtcagataacaatttgactggagaaatacctgatttcttaggggacattaaatcactcttggtcataaacttaagtggtaataatctaagtggctcagttcctccctcacttcttcagaagaaaggaatgaagttaaatgtcgaaggaaaccctcatcttctttgcacagctgattcatgtgtgaaaaaaggagaggatggacacaagaaaaagagtgtcatagtgccagttgttgcatcaattgcttcaatagctgttcttataggtgcattggttctgtttttcattcttagaaagaaaaagtcaccaaaagttgaaggaccaccaccatcttatatgcaagcatcagatggtagatcgccaagatcatctgaaccggcaatagtgacaaagaatagaaggtttacttactcacaagttgcgataatgacaaataacttccaaagaatccttggaaaaggagggtttggaatggtttatcatggttttgtgaacggtacagaacaagtagctgttaagatactctcccattcatcgtctcaaggatataaagaatttaaagcggaggtagaacttcttcttagagttcatcacaagaacttggtcggtcttgttgggtactgcgacgaaggagagaacatggctcttatctatgaatacatggccaatggagatctaaaagaacatatgtcaggaacacgtaaccggtttactttgaattggggaactagactgaaaatagtcgtcgagtctgcacaaggacttgagtacttgcataatggatgcaaaccaccaatggttcatagagatgtcaaaaccacaaatatattgctgaacgaacacttccaagccaaactagctgattttgggctttcaaggtcatttccaattgaaggtgaaactcatgtgtcaacagttgttgctggaacgcctggatatcttgatcccgaatactataaaacaaattggttgacagaaaagagtgatgtttatagttttgggattgtattgttggagcttatcacaaatcgacccgtgatcgacaaaagccgtgaaaagccacatatagcagaatgggtaggagtaatgcttacaaaaggagacatcaacagtatcatggatcctaatttaaatgaagattatgattctggttctgtttggaaagctgttgagctagccatgagttgtctcaatccttcttcagcaagaagaccgaccatgtcccaagttgttattgaactaaacgagtgtatagcatcagaaaattcaaggggaggagcgagtcgggatatggactcgaagagttccatagaagtgagcttgacctttgataccgaactgagcccaacggctcggtag

SEQ ID NO: 30926 - protein, 885 aa, Arabidopsis thaliana
  misc_feature (1)..(885): Ceres Seq. ID no. 4978443
MERHCVLVATFLLMLHIVHAQDQIGFISVDCGLAPRESPYNEAKTGLTYTSDDGLVNVGKPGRIAKEFEPLADKPTLTLRYFPEGVRNCYNLNVTSDTNYLIKATFVYGNYDGLNVGPNFDLYFGPNLWTTVSSNDTIKEIIHVTKTNSLQVCLIKTGISIPFINVLELRPMKKNMYVTQGESLNYLFRVYISNSSTRIRFPDDVYDRKWYPYFDNSWTQVTTTLDVNTSLTYELPQSVMAKAATPIKANDTLNITWTVEPPTTKFYSYMHFAELQTLRANDAREFNVTMNGIYTYGPYSPKPLKTETIYDKIPEQCDGGACLLQVVKTLKSTLPPLLNAIEAFTVIDFPQMETNGDDVDAIKNVQDTYGISRISWQGDPCVPKLFLWDGLNCNNSDNSTSPIITSLDLSSSGLTGSITQAIQNLTNLQELDLSDNNLTGEIPDFLGDIKSLLVINLSGNNLSGSVPPSLLQKKGMKLNVEGNPHLLCTADSCVKKGEDGHKKKSVIVPVVASIASIAVLIGALVLFFILRKKKSPKVEGPPPSYMQASDGRSPRSSEPAIVTKNRRFTYSQVAIMTNNFQRILGKGGFGMVYHGFVNGTEQVAVKILSHSSSQGYKEFKAEVELLLRVHHKNLVGLVGYCDEGENMALIYEYMANGDLKEHMSGTRNRFTLNWGTRLKIVVESAQGLEYLHNGCKPPMVHRDVKTTNILLNEHFQAKLADFGLSRSFPIEGETHVSTVVAGTPGYLDPEYYKTNWLTEKSDVYSFGIVLLELITNRPVIDKSREKPHIAEWVGVMLTKGDINSIMDPNLNEDYDSGSVWKAVELAMSCLNPSSARRPTMSQVVIELNECIASENSRGGASRDMDSKSSIEVSLTFDTELSPTAR

SEQ ID NO: 30927 - protein, 872 aa, Arabidopsis thaliana
  misc_feature (1)..(872): Ceres Seq. ID no. 4978444
MLHIVHAQDQIGFISVDCGLAPRESPYNEAKTGLTYTSDDGLVNVGKPGRIAKEFEPLADKPTLTLRYFPEGVRNCYNLNVTSDTNYLIKATFVYGNYDGLNVGPNFDLYFGPNLWTTVSSNDTIKEIIHVTKTNSLQVCLIKTGISIPFINVLELRPMKKNMYVTQGESLNYLFRVYISNSSTRIRFPDDVYDRKWYPYFDNSWTQVTTTLDVNTSLTYELPQSVMAKAATPIKANDTLNITWTVEPPTTKFYSYMHFAELQTLRANDAREFNVTMNGIYTYGPYSPKPLKTETIYDKIPEQCDGGACLLQVVKTLKSTLPPLLNAIEAFTVIDFPQMETNGDDVDAIKNVQDTYGISRISWQGDPCVPKLFLWDGLNCNNSDNSTSPIITSLDLSSSGLTGSITQAIQNLTNLQELDLSDNNLTGEIPDFLGDIKSLLVINLSGNNLSGSVPPSLLQKKGMKLNVEGNPHLLCTADSCVKKGEDGHKKKSVIVPVVASIASIAVLIGALVLFFILRKKKSPKVEGPPPSYMQASDGRSPRSSEPAIVTKNRRFTYSQVAIMTNNFQRILGKGGFGMVYHGFVNGTEQVAVKILSHSSSQGYKEFKAEVELLLRVHHKNLVGLVGYCDEGENMALIYEYMANGDLKEHMSGTRNRFTLNWGTRLKIVVESAQGLEYLHNGCKPPMVHRDVKTTNILLNEHFQAKLADFGLSRSFPIEGETHVSTVVAGTPGYLDPEYYKTNWLTEKSDVYSFGIVLLELITNRPVIDKSREKPHIAEWVGVMLTKGDINSIMDPNLNEDYDSGSVWKAVELAMSCLNPSSARRPTMSQVVIELNECIASENSRGGASRDMDSKSSIEVSLTFDTELSPTAR

SEQ ID NO: 30928 - protein, 714 aa, Arabidopsis thaliana; identical to SEQ ID NO: 29012
  misc_feature (1)..(714): Ceres Seq. ID no. 4978445

SEQ ID NO: 30929 - DNA, 435 bp, Arabidopsis thaliana
  misc_feature (1)..(435): Ceres Seq. ID no. 4978568
atggcaaataagaagccatcaccttctgctgcaacaagaacaataacctcaaagaagagcacagcgactccacaggtgaaactgctgacaagagtcgagcagctcaagcttctgaccaaagccgagaaagcaggacttttgtctttagcagagaaatcaggtttctctctatcgaccatcgagcgtcttggattgctgaccaaagcagaggagttcggcgttttgtctgccgccacaaacccggaaacgcctggaacgttattcactttgagcctcggtttactccttcttggaccggtttttgcatatgtggttcctgaagattacacttgggaagtagtgattcaggttcttgtggctctactctctgttcttggtggctctgctgcttttgctgcttctggttttgtctccaatttgcagaaatctgattag

SEQ ID NO: 30930 - protein, 144 aa, Arabidopsis thaliana
  misc_feature (1)..(144): Ceres Seq. ID no. 4978569
MANKKPSPSAATRTITSKKSTATPQVKLLTRVEQLKLLTKAEKAGLLSLAEKSGFSLSTIERLGLLTKAEEFGVLSAATNPETPGTLFTLSLGLLLLGPVFAYVVPEDYTWEVVIQVLVALLSVLGGSAAFAASGFVSNLQKSD

SEQ ID NO: 30931 - DNA, 1653 bp, Arabidopsis thaliana
  misc_feature (1)..(1653): Ceres Seq. ID no. 4979423
atgacagagatcttcagtgacaccagcatcagacagttatctcaaatgctactatcactaatcttcttccacatatccgaatacattctagccatcaccattcacggagcatcaaacgtaactcttagttcgcttttaatcaccaagcattacgctttagcaatgcttctgtcgcttctcgaatacctaacggagattatcctcttcccggggctgaaacaacactggtgggtcagcaactttggactcataatgatcatcgttggggaaatcatcaggaaggcagcgataataacagcgggaagatcgttcactcacctcataaagatcaactacgaagagcatcacgggcttgtgactcatggtgtgtatagactaatgaggcatccaagttactgcggttttctcatctggtcggtcgggacacaagttatgctctgtaaccccgtttcagcagttgcgttcgcggttgtcgtgtggcggttttttgctcagagaataccgtacgaggagtattttctgaatcagttttttggggtacagtatctagagtatgcagagagtgttgcctctgtggagtcggtaaccatgttatgcggaggctctcgcgcctccgtgcatttgtgggaccatcgtcatcctcctaggctcggtgctaaggttttgcggaaatcttcgttcatgctcagaccttgttcggctatatcgcagcagcggataaagtcgtcgtttaggtctcactgtaaaactccaagaaaaatcccagctcctctcgattgtttcagccagggagatgatcatcctgagctttcagctgaagggctttccccagttgcaggaggcattgttgctctagggaagtttgatgccctgcatatcggtcatcgagagcttgcaattcaagctgcaagaattggtactccgtatctactgtcgtttgttggattggctgaagtacttggttggaagcctagagcaccaatagtagccaaatgcgacagaaaacgagtgctttcctcttgggcatcgtattgtggtaacatagcaccggtagagtttgagattgaatttgccagcgttcgacaccttaacccacaacagtttgtcgagaagttgtcaagagagcttagagtctgcggagttgtggcaggcgaaaattacaggtttggataccgggcttctggtgacgcctctgaacttgtgaggttatgcaaagactttggtatcagcgcttacatcattaactccgtgatggataagaaccaagtctctgtaaacacagaggaggaggactcaaagtcgaaagaaagaggtcaagtctcatccacacgagtccgtcatgctctagctgcaggagatgtgaggtatgtaacagagctcctcggcagaccacacagggtcatctctcggacaagaacacaagatttaacgagcaaaagagggaggatctcgcttcagacatcttcgctactaaatttaccaccagggaatggagtttacaaagcatgctcgcttatagttggtgataagcatccaatttcgtgtaaggttattgtcgatacatcgaatctctatatagaaacagaggaagaacgtttccacaactcagatgagtctcaagagtttcaactcttagggattgagttcggttaa

SEQ ID NO: 30932 - protein, 550 aa, Arabidopsis thaliana
  misc_feature (1)..(550): Ceres Seq. ID no. 4979424
MTEIFSDTSIRQLSQMLLSLIFFHISEYILAITIHGASNVTLSSLLITKHYALAMLLSLLEYLTEIILFPGLKQHWWVSNFGLIMIIVGEIIRKAAIITAGRSFTHLIKINYEEHHGLVTHGVYRLMRHPSYCGFLIWSVGTQVMLCNPVSAVAFAVVVWRFFAQRIPYEEYFLNQFFGVQYLEYAESVASVESVTMLCGGSRASVHLWDHRHPPRLGAKVLRKSSFMLRPCSAISQQRIKSSFRSHCKTPRKIPAPLDCFSQGDDHPELSAEGLSPVAGGIVALGKFDALHIGHRELAIQAARIGTPYLLSFVGLAEVLGWKPRAPIVAKCDRKRVLSSWASYCGNIAPVEFEIEFASVRHLNPQQFVEKLSRELRVCGVVAGENYRFGYRASGDASELVRLCKDFGISAYIINSVMDKNQVSVNTEEEDSKSKERGQVSSTRVRHALAAGDVRYVTELLGRPHRVISRTRTQDLTSKRGRISLQTSSLLNLPPGNGVYKACSLIVGDKHPISCKVIVDTSNLYIETEEERFHNSDESQEFQLLGIEFG

SEQ ID NO: 30933 - protein, 535 aa, Arabidopsis thaliana
  misc_feature (1)..(535): Ceres Seq. ID no. 4979425
MLLSLIFFHISEYILAITIHGASNVTLSSLLITKHYALAMLLSLLEYLTEIILFPGLKQHWWVSNFGLIMIIVGEIIRKAAIITAGRSFTHLIKINYEEHHGLVTHGVYRLMRHPSYCGFLIWSVGTQVMLCNPVSAVAFAVVVWRFFAQRIPYEEYFLNQFFGVQYLEYAESVASVESVTMLCGGSRASVHLWDHRHPPRLGAKVLRKSSFMLRPCSAISQQRIKSSFRSHCKTPRKIPAPLDCFSQGDDHPELSAEGLSPVAGGIVALGKFDALHIGHRELAIQAARIGTPYLLSFVGLAEVLGWKPRAPIVAKCDRKRVLSSWASYCGNIAPVEFEIEFASVRHLNPQQFVEKLSRELRVCGVVAGENYRFGYRASGDASELVRLCKDFGISAYIINSVMDKNQVSVNTEEEDSKSKERGQVSSTRVRHALAAGDVRYVTELLGRPHRVISRTRTQDLTSKRGRISLQTSSLLNLPPGNGVYKACSLIVGDKHPISCKVIVDTSNLYIETEEERFHNSDESQEFQLLGIEFG

SEQ ID NO: 30934 - protein, 496 aa, Arabidopsis thaliana
  misc_feature (1)..(496): Ceres Seq. ID no. 4979426
MLLSLLEYLTEIILFPGLKQHWWVSNFGLIMIIVGEIIRKAAIITAGRSFTHLIKINYEEHHGLVTHGVYRLMRHPSYCGFLIWSVGTQVMLCNPVSAVAFAVVVWRFFAQRIPYEEYFLNQFFGVQYLEYAESVASVESVTMLCGGSRASVHLWDHRHPPRLGAKVLRKSSFMLRPCSAISQQRIKSSFRSHCKTPRKIPAPLDCFSQGDDHPELSAEGLSPVAGGIVALGKFDALHIGHRELAIQAARIGTPYLLSFVGLAEVLGWKPRAPIVAKCDRKRVLSSWASYCGNIAPVEFEIEFASVRHLNPQQFVEKLSRELRVCGVVAGENYRFGYRASGDASELVRLCKDFGISAYIINSVMDKNQVSVNTEEEDSKSKERGQVSSTRVRHALAAGDVRYVTELLGRPHRVISRTRTQDLTSKRGRISLQTSSLLNLPPGNGVYKACSLIVGDKHPISCKVIVDTSNLYIETEEERFHNSDESQEFQLLGIEFG

SEQ ID NO: 30935 - DNA, 723 bp, Arabidopsis thaliana
  misc_feature (1)..(723): Ceres Seq. ID no. 4979462
atgttactgattcgaacagcgacggtcgctcttcttctaatcgcgtttcttgaaaacgctgcgtggtgctgcaatgatgcttgtgtttcgggctctctcggggttcatcgacttgttgaggctctgaaacacgctttcgcagttagaatgaaccttggggatccggattttgtcgatgtttctaaggttatttctgatatgttgtctacaaattttgcacaaggcttgaagaaaaagataaacgacaacaaaacctttgatccaaattattacggtggcaggtgggatcagattaacgaccatgggacaagccatttatcaatcatagatagcgagaggaatgttgtttcactgactagtacaataaacagttactttggggcattgatgttatctccaagcaccggaattgttctgaacaacgaaatggatgatttctcaatccccatgaaatccagcagtaacctaactgtgccaccaccggcaccggccaatttcattcgtcctgggaaacgacctctgtcttctatgacacccaccattgtactcaaggatggtaaagtgaaagcctccgtgggtgcgagcggaggactgtacatcatcgctgggacaacagaagtttttctgaattatttcttcctcaagatggatcctctttcttccgttttggctccaagaatctaccatcagctgataccaaacatagtttcgtatgaaaactag

SEQ ID NO: 30936 - protein, 240 aa, Arabidopsis thaliana
  misc_feature (1)..(240): Ceres Seq. ID no. 4979463
MLLIRTATVALLLIAFLENAAWCCNDACVSGSLGVHRLVEALKHAFAVRMNLGDPDFVDVSKVISDMLSTNFAQGLKKKINDNKTFDPNYYGGRWDQINDHGTSHLSIIDSERNVVSLTSTINSYFGALMLSPSTGIVLNNEMDDFSIPMKSSSNLTVPPPAPANFIRPGKRPLSSMTPTIVLKDGKVKASVGASGGLYIIAGTTEVFLNYFFLKMDPLSSVLAPRIYHQLIPNIVSYEN

SEQ ID NO: 30937 - protein, 191 aa, Arabidopsis thaliana; identical to SEQ ID NO: 29163
  misc_feature (1)..(191): Ceres Seq. ID no. 4979464

SEQ ID NO: 30938 - protein, 174 aa, Arabidopsis thaliana; identical to SEQ ID NO: 29164
  misc_feature (1)..(174): Ceres Seq. ID no. 4979465

SEQ ID NO: 30939 - DNA, 1422 bp, Arabidopsis thaliana
  misc_feature (1)..(1422): Ceres Seq. ID no. 4980355
atgtatttgacaataatattcctcttcattagctccattattttccctctcctattcttccttggaaaacatttatcaaacttccgttatcccaaccttcctccgggaaagattggctttcccttaataggagagactttatcctttctctctgctggccgtcaaggccacccggagaagtttgtcaccgaccgagttcgtcatttctcctcaggtatcttcaagacccacctctttgggtctcccttcgcggtggtgactggtgcctctgggaacaagtttctattcaccaacgaaaacaagcttgtgatctcatggtggccagattcggtgaacaagatcttcccttcttcaacgcagaccagctctaaggaagaggccatcaagacgaggatgcttcttatgccgtccatgaagcctgaggctttgagaaggtatgttggtgttatggatgagattgctcagaaacattttgagacggaatgggccaaccaagatcaacttattgtcttccctctcaccaaaaagttcacgttttctatagcatgccgtttgttcctgagcatggacgacctcgaaagagtaagaaaactcgaagagccattcactacggttatgacgggtgtcttctcaatcccaatagatttaccgggaacacggtttaaccgtgccatcaaggcgtcaaggttactcagcaaagaggtttcaacgatcattaggcagagaaaagaagagctgaaggccgggaaagtatcagtggaacaggacatcctatctcatatgttgatgaatataggagagaccaaagacgaggatttggctgataagattattgccttgttaatcggaggacatgacacaacaagtatcgtatgcacattcgttgtcaactatcttgctgagttccctcatatctaccaacgtgtgctagaagagcaaaaggagatactaaacaacaaagacgtaaacgaaaaattaacgtgggaggacattgagaaaatgagatattcatggaatgttgcatgtgaagtgatgagaattgttcctcctcttgctggcacttttcgtgaggccatcgatcacttctcttttaagggtttttacatccccaaaggatggaagttatattggagtgccaccgctacgcataagaatccagaatactttccggaaccagagaaatttgagccaagccgatttgaaggaagtggtccgaagccttatacatatgttccctttggaggaggatccaggatatgtccagggagggagtatgctcgtctagagattcttatatttatgcacaatcttgttaagagatttaagtgggaaaaagtgtttccaaaagaaaataaattagtggctgatcccgcaccaataccagccaaaggtctccctattagaatctttcctcagtcttga

SEQ ID NO: 30940 - protein, 473 aa, Arabidopsis thaliana
  misc_feature (1)..(473): Ceres Seq. ID no. 4980356
MYLTIIFLFISSIIFPLLFFLGKHLSNFRYPNLPPGKIGFPLIGETLSFLSAGRQGHPEKFVTDRVRHFSSGIFKTHLFGSPFAVVTGASGNKFLFTNENKLVISWWPDSVNKIFPSSTQTSSKEEAIKTRMLLMPSMKPEALRRYVGVMDEIAQKHFETEWANQDQLIVFPLTKKFTFSIACRLFLSMDDLERVRKLEEPFTTVMTGVFSIPIDLPGTRFNRAIKASRLLSKEVSTIIRQRKEELKAGKVSVEQDILSHMLMNIGETKDEDLADKIIALLIGGHDTTSIVCTFVVNYLAEFPHIYQRVLEEQKEILNNKDVNEKLTWEDIEKMRYSWNVACEVMRIVPPLAGTFREAIDHFSFKGFYIPKGWKLYWSATATHKNPEYFPEPEKFEPSRFEGSGPKPYTYVPFGGGSRICPGREYARLEILIFMHNLVKRFKWEKVFPKENKLVADPAPIPAKGLPIRIFPQS

SEQ ID NO: 30941 - protein, 342 aa, Arabidopsis thaliana
  misc_feature (1)..(342): Ceres Seq. ID no. 4980357
MLLMPSMKPEALRRYVGVMDEIAQKHFETEWANQDQLIVFPLTKKFTFSIACRLFLSMDDLERVRKLEEPFTTVMTGVFSIPIDLPGTRFNRAIKASRLLSKEVSTIIRQRKEELKAGKVSVEQDILSHMLMNIGETKDEDLADKIIALLIGGHDTTSIVCTFVVNYLAEFPHIYQRVLEEQKEILNNKDVNEKLTWEDIEKMRYSWNVACEVMRIVPPLAGTFREAIDHFSFKGFYIPKGWKLYWSATATHKNPEYFPEPEKFEPSRFEGSGPKPYTYVPFGGGSRICPGREYARLEILIFMHNLVKRFKWEKVFPKENKLVADPAPIPAKGLPIRIFPQS

SEQ ID NO: 30942 - protein, 339 aa, Arabidopsis thaliana
  misc_feature (1)..(339): Ceres Seq. ID no. 4980358
MPSMKPEALRRYVGVMDEIAQKHFETEWANQDQLIVFPLTKKFTFSIACRLFLSMDDLERVRKLEEPFTTVMTGVFSIPIDLPGTRFNRAIKASRLLSKEVSTIIRQRKEELKAGKVSVEQDILSHMLMNIGETKDEDLADKIIALLIGGHDTTSIVCTFVVNYLAEFPHIYQRVLEEQKEILNNKDVNEKLTWEDIEKMRYSWNVACEVMRIVPPLAGTFREAIDHFSFKGFYIPKGWKLYWSATATHKNPEYFPEPEKFEPSRFEGSGPKPYTYVPFGGGSRICPGREYARLEILIFMHNLVKRFKWEKVFPKENKLVADPAPIPAKGLPIRIFPQS

SEQ ID NO: 30943 - DNA, 1515 bp, Arabidopsis thaliana
  misc_feature (1)..(1515): Ceres Seq. ID no. 4981130
atggctaaatcagtatctggcgggaagattacttattttgtggtggcttcatgtgtcatggccgccatgggcggtgtcatcttcggctacgacatcggggtttcaggtggagtgatgtcaatggggccatttctaaaaagatttttcccaaaagtgtataagctccaagaagaagatagaagaagaagaggcaatagcaataaccactactgccttttcaatagccaacttcttacatccttcacatcttctctatacgtttccggtctcatcgctactctgttagcttcgtccgtgactcgttcatggggtcgcaagccctctatatttcttggcggtgtgtcctttctcgccggcgctgctcttggtggctctgctcaaaacgttgctatgctcattattgcgcgtctcttgctcggcgtaggagttggattcgctaaccagtcggttcctctgtatctctccgagatggcgccggcaaaatacagaggagcaatcagcaatggtttccagctctgtatcggaattggatttctatctgcaaatgtaataaactacgaaacccaaaatatcaaacatggttggagaatctctttagccacagctgcaatacctgcttcaatcctcactttaggatcactgtttctcccggaaacgccgaatagtatcatccagaccaccggagatgttcacaagaccgagcttatgcttcgccgtgtccgtggaactaacgacgttcaagatgagcttactgatctcgttgaagcgagttctggttctgatacagattcaaacgcgtttttgaaactgcttcaaagaaaatataggcctgagttagtgatggctttggtgatacctttctttcagcaagttactggaatcaatgttgttgctttctacgcaccggttttgtatagaaccgttgggtttggagagagtggttcgttgatgtcgaccctcgtgactggaatcgtgggaacctcgtcgacgttgttgtcgatgcttgtcgttgacagaatcggtagaaagactctgtttttgattggagggttacagatgctcgtgtcgcaagttaccattggtgtgatcgttatggtggctgatgttcacgacggtgtgatcaaggaagggtatggttacgcggttgtggttttggtgtgtgtctacgtggccgggtttggttggtcttggggtccattaggatggcttgtaccgagtgagatttttccgttggagataagatcggtggcgcagagtgtaactgtggcagtgagttttgtgtttacttttgcggtggctcaaagtgcaccaccgatgttgtgtaagtttcgagctgggattttcttcttttatggagggtggttggtggtaatgacggtagcggtgcagctgtttttgccggagactaagaatgttccaatcgagaaggtggttggactttgggagaagcattggttttggaggagaatgacgagcaagcgtgatatccaagaaaccaccattcttagccattga

SEQ ID NO: 30944 - protein, 504 aa, Arabidopsis thaliana
  misc_feature (1)..(504): Ceres Seq. ID no. 4981131
MAKSVSGGKITYFVVASCVMAAMGGVIFGYDIGVSGGVMSMGPFLKRFFPKVYKLQEEDRRRRGNSNNHYCLFNSQLLTSFTSSLYVSGLIATLLASSVTRSWGRKPSIFLGGVSFLAGAALGGSAQNVAMLIIARLLLGVGVGFANQSVPLYLSEMAPAKYRGAISNGFQLCIGIGFLSANVINYETQNIKHGWRISLATAAIPASILTLGSLFLPETPNSIIQTTGDVHKTELMLRRVRGTNDVQDELTDLVEASSGSDTDSNAFLKLLQRKYRPELVMALVIPFFQQVTGINVVAFYAPVLYRTVGFGESGSLMSTLVTGIVGTSSTLLSMLVVDRIGRKTLFLIGGLQMLVSQVTIGVIVMVADVHDGVIKEGYGYAVVVLVCVYVAGFGWSWGPLGWLVPSEIFPLEIRSVAQSVTVAVSFVFTFAVAQSAPPMLCKFRAGIFFFYGGWLVVMTVAVQLFLPETKNVPIEKVVGLWEKHWFWRRMTSKRDIQETTILSH

SEQ ID NO: 30945 - protein, 485 aa, Arabidopsis thaliana
  misc_feature (1)..(485): Ceres Seq. ID no. 4981132
MAAMGGVIFGYDIGVSGGVMSMGPFLKRFFPKVYKLQEEDRRRRGNSNNHYCLFNSQLLTSFTSSLYVSGLIATLLASSVTRSWGRKPSIFLGGVSFLAGAALGGSAQNVAMLIIARLLLGVGVGFANQSVPLYLSEMAPAKYRGAISNGFQLCIGIGFLSANVINYETQNIKHGWRISLATAAIPASILTLGSLFLPETPNSIIQTTGDVHKTELMLRRVRGTNDVQDELTDLVEASSGSDTDSNAFLKLLQRKYRPELVMALVIPFFQQVTGINVVAFYAPVLYRTVGFGESGSLMSTLVTGIVGTSSTLLSMLVVDRIGRKTLFLIGGLQMLVSQVTIGVIVMVADVHDGVIKEGYGYAVVVLVCVYVAGFGWSWGPLGWLVPSEIFPLEIRSVAQSVTVAVSFVFTFAVAQSAPPMLCKFRAGIFFFYGGWLVVMTVAVQLFLPETKNVPIEKVVGLWEKHWFWRRMTSKRDIQETTILSH

SEQ ID NO: 30946 - protein, 482 aa, Arabidopsis thaliana
  misc_feature (1)..(482): Ceres Seq. ID no. 4981133
MGGVIFGYDIGVSGGVMSMGPFLKRFFPKVYKLQEEDRRRRGNSNNHYCLFNSQLLTSFTSSLYVSGLIATLLASSVTRSWGRKPSIFLGGVSFLAGAALGGSAQNVAMLIIARLLLGVGVGFANQSVPLYLSEMAPAKYRGAISNGFQLCIGIGFLSANVINYETQNIKHGWRISLATAAIPASILTLGSLFLPETPNSIIQTTGDVHKTELMLRRVRGTNDVQDELTDLVEASSGSDTDSNAFLKLLQRKYRPELVMALVIPFFQQVTGINVVAFYAPVLYRTVGFGESGSLMSTLVTGIVGTSSTLLSMLVVDRIGRKTLFLIGGLQMLVSQVTIGVIVMVADVHDGVIKEGYGYAVVVLVCVYVAGFGWSWGPLGWLVPSEIFPLEIRSVAQSVTVAVSFVFTFAVAQSAPPMLCKFRAGIFFFYGGWLVVMTVAVQLFLPETKNVPIEKVVGLWEKHWFWRRMTSKRDIQETTILSH

SEQ ID NO: 30947 - DNA, 1101 bp, Arabidopsis thaliana
  misc_feature (1)..(1101): Ceres Seq. ID no. 4981193
cttctttcctctttcttctttctgttttctggtcgctcgttaccaccaagacctcgtcgaggtttctctctctctgaaaaagtgcttttgctgcgtttccatgctctcggaaggaacttggctgaatcgttggagaattatcgatctggcgtcgttggtgcatctctagctgcgccaattcatcggatccggtttgatttctccctttcgcgaatctagccttccgtgatcttagccatgttctatggcacagctgtatgggacccttggcttatcgttggccagattatttgcctccaatgctcttactatctcactcttggactcttcaccatggtctttcttggccttcgtgttcctcgccttagtcttgtctacttcttcgattacgctactctcactacttccaccttcaccggttggtctgttattgcctcattcctcttctcttcactcgctggggctgtgtacatgatatttttggtggagcgagcacggaaatgcttagatttctctgcaactctctacatcatacatctcttcttttgcatcatgtatggaggatggccttcctctatggcgtggtgggttgttaatggaaccggactcgctgttatggctttgctagctgagtacttgtgcattaaacgcgaacagcgagagatccctatggatcgcttccactcaagggtttgaagattggtgaaagaacaagtgatgaagattcttgtgggttagcagcgcgactcgtagagcctagtagagcctagtactcttaacaattgtgatgtacagagatgaaatcagaggagtagaatgggcgaaaggaagttcagctagccaagcaacaatgttggacactggtgcaccaactctgactgcaatttttagtgacttcaaatactaagactttggaatacgtttcaatttgttcttttgtatgaaaaaaacattagactcgaataggttattgatttcatgttgcttcttttttttgtttatactggattttctcttctatcctctacttggtgcagctttgtgtgttttaaaaccagtgtctcattcatcatactcttttaccaccaattgaatccttcc

SEQ ID NO: 30948 - protein, 152 aa, Arabidopsis thaliana
  misc_feature (1)..(152): Ceres Seq. ID no. 4981194
MFYGTAVWDPWLIVGQIICLQCSYYLTLGLFTMVFLGLRVPRLSLVYFFDYATLTTSTFTGWSVIASFLFSSLAGAVYMIFLVERARKCLDFSATLYIIHLFFCIMYGGWPSSMAWWVVNGTGLAVMALLAEYLCIKREQREIPMDRFHSRV

SEQ ID NO: 30949 - protein, 120 aa, Arabidopsis thaliana
  misc_feature (1)..(120): Ceres Seq. ID no. 4981195
MVFLGLRVPRLSLVYFFDYATLTTSTFTGWSVIASFLFSSLAGAVYMIFLVERARKCLDFSATLYIIHLFFCIMYGGWPSSMAWWVVNGTGLAVMALLAEYLCIKREQREIPMDRFHSRV

SEQ ID NO: 30950 - protein, 76 aa, Arabidopsis thaliana
  misc_feature (1)..(76): Ceres Seq. ID no. 4981196
MAQLYGTLGLSLARLFASNALTISLLDSSPWSFLAFVFLALVLSTSSITLLSLLPPSPVGLLLPHSSSLHSLGLCT

SEQ ID NO: 30951 - DNA, 797 bp, Arabidopsis thaliana
  misc_feature (1)..(797): Ceres Seq. ID no. 4981253
acgatagcctctcatcttcttttttcctctccatcatcttcaccataaccgaaaaaccaaacaaaaaatccttagataatcagatcttgatattatggatcatatcatcggctttatgggcacaacaaacatgtcacataacacaaaccttatgatcgctgccgcagccactaccactacgacctcttcgtcttcctcttcgtcctccggaggctcggggactaaccagctaagcaggtacgagaatcagaagagaagagattggaacactttcggacagtatctacgcaatcaccgtccaccactttctctctcccgttgcagtggtgctcatgttcttgaattcctcaggtacctcgaccaattcggcaagactaaggttcacacacacctatgtccgttcttcggacacccaaacccaccagcaccatgtgcctgtccactccgacaagcgtggggtagtctggacgcactcattggccgtcttagagctgcttttgaagagaacggtggttcaccagagacgaacccttttggtgcacgagccgttcgactctacctaagggaagtacgtgactcgcaggctaaagcacgtgggatcagctatgaaaaaaagaagcgcaagcgacctcctccgccactaccaccggctcagccggcgatttcaagtagccctaattaacattaagtcatgagtaagatgtttcaatgaactacgtttgtttacaaatttttatcaatgacgaacatgcacgagttcttttaaagtcacatgccctttcctaaacttttatttg

SEQ ID NO: 30952 - protein, 195 aa, Arabidopsis thaliana
  misc_feature (1)..(195): Ceres Seq. ID no. 4981254
MDHIIGFMGTTNMSHNTNLMIAAAATTTTTSSSSSSSSGGSGTNQLSRYENQKRRDWNTFGQYLRNHRPPLSLSRCSGAHVLEFLRYLDQFGKTKVHTHLCPFFGHPNPPAPCACPLRQAWGSLDALIGRLRAAFEENGGSPETNPFGARAVRLYLREVRDSQAKARGISYEKKKRKRPPPPLPPAQPAISSSPN

SEQ ID NO: 30953 - protein, 188 aa, Arabidopsis thaliana
  misc_feature (1)..(188): Ceres Seq. ID no. 4981255
MGTTNMSHNTNLMIAAAATTTTTSSSSSSSSGGSGTNQLSRYENQKRRDWNTFGQYLRNHRPPLSLSRCSGAHVLEFLRYLDQFGKTKVHTHLCPFFGHPNPPAPCACPLRQAWGSLDALIGRLRAAFEENGGSPETNPFGARAVRLYLREVRDSQAKARGISYEKKKRKRPPPPLPPAQPAISSSPN

SEQ ID NO: 30954 - protein, 183 aa, Arabidopsis thaliana
  misc_feature (1)..(183): Ceres Seq. ID no. 4981256
MSHNTNLMIAAAATTTTTSSSSSSSSGGSGTNQLSRYENQKRRDWNTFGQYLRNHRPPLSLSRCSGAHVLEFLRYLDQFGKTKVHTHLCPFFGHPNPPAPCACPLRQAWGSLDALIGRLRAAFEENGGSPETNPFGARAVRLYLREVRDSQAKARGISYEKKKRKRPPPPLPPAQPAISSSPN

SEQ ID NO: 30955 - DNA, 1117 bp, Arabidopsis thaliana
  misc_feature (1)..(1117): Ceres Seq. ID no. 4981295
agggaaaaatgttgcagaagatttctcagtctatttctttatgtaacggcgatcaatttaagccgttaatatacctcgccggagctccgacgaacttcatctcttcccctctctcagtttcaggcaagaagaaatcatcttctctgagaattaaaaggatacaacaacttcaaagtacattagaagatagaataaatccaccactagtatgtggaacagtatcgccacgtcttagtgttcctgatcatatactaaagcctctatatgttgagtctagcaaagttccagagatatcaagtgaattacagattcctgactctataggcattgtgaaaatgaagaaagcgtgtgagctcgcggctcgtgtattagactatgcaggaactttggttagaccgtttgttactacagatgaaattgataaagcagtgcatcagatggttattgagtttggtgcatatccttcacctcttggatatggtggatttcctaaaagtgtttgtacatcggttaatgaatgtatgtttcacgggattcccgattctcgtccgctacagaatggagatattataaacatcgatgttgcggtttacttggatgggtatcatggagatacgtcaaagactttcttatgtggagacgtcaatggaagccttaaacaacttgtcaaggtcacagaagaatgcttggagaaaggtatatcggtttgtaaagatggagcaagcttcaaacaaatcgggaagataatcagtgagcatgctgcaaagtatggctataatatggagcgattcatcggtcatggtgtaggaacggtattacactcggaacctcttatatatcttcatagtaactatgattatgaacttgaatatatgattgaaggtcaaacttttacgctcgaaccaattctcaccattggaacaacagagtttgtaacatggcctgacaaatggacaattgtgaccgcagatggtggtccggccgcacagtttgagcatacaattcttattaccaccactggtgcagaaattctcaccatatcatcatgaattatatcacaatgttacggaatttacattatgaaccatccatttctgttgtaaataaaagaaaatat

SEQ ID NO: 30956 - protein, 348 aa, Arabidopsis thaliana
  misc_feature (1)..(348): Ceres Seq. ID no. 4981296
GKMLQKISQSISLCNGDQFKPLIYLAGAPTNFISSPLSVSGKKKSSSLRIKRIQQLQSTLEDRINPPLVCGTVSPRLSVPDHILKPLYVESSKVPEISSELQIPDSIGIVKMKKACELAARVLDYAGTLVRPFVTTDEIDKAVHQMVIEFGAYPSPLGYGGFPKSVCTSVNECMFHGIPDSRPLQNGDIINIDVAVYLDGYHGDTSKTFLCGDVNGSLKQLVKVTEECLEKGISVCKDGASFKQIGKIISEHAAKYGYNMERFIGHGVGTVLHSEPLIYLHSNYDYELEYMIEGQTFTLEPILTIGTTEFVTWPDKWTIVTADGGPAAQFEHTILITTTGAEILTISS

SEQ ID NO: 30957 - protein, 346 aa, Arabidopsis thaliana
  misc_feature (1)..(346): Ceres Seq. ID no. 4981297
MLQKISQSISLCNGDQFKPLIYLAGAPTNFISSPLSVSGKKKSSSLRIKRIQQLQSTLEDRINPPLVCGTVSPRLSVPDHILKPLYVESSKVPEISSELQIPDSIGIVKMKKACELAARVLDYAGTLVRPFVTTDEIDKAVHQMVIEFGAYPSPLGYGGFPKSVCTSVNECMFHGIPDSRPLQNGDIINIDVAVYLDGYHGDTSKTFLCGDVNGSLKQLVKVTEECLEKGISVCKDGASFKQIGKIISEHAAKYGYNMERFIGHGVGTVLHSEPLIYLHSNYDYELEYMIEGQTFTLEPILTIGTTEFVTWPDKWTIVTADGGPAAQFEHTILITTTGAEILTISS

SEQ ID NO: 30958 - protein, 237 aa, Arabidopsis thaliana
  misc_feature (1)..(237): Ceres Seq. ID no. 4981298
MKKACELAARVLDYAGTLVRPFVTTDEIDKAVHQMVIEFGAYPSPLGYGGFPKSVCTSVNECMFHGIPDSRPLQNGDIINIDVAVYLDGYHGDTSKTFLCGDVNGSLKQLVKVTEECLEKGISVCKDGASFKQIGKIISEHAAKYGYNMERFIGHGVGTVLHSEPLIYLHSNYDYELEYMIEGQTFTLEPILTIGTTEFVTWPDKWTIVTADGGPAAQFEHTILITTTGAEILTISS

SEQ ID NO: 30959 - DNA, 1358 bp, Arabidopsis thaliana
  misc_feature (1)..(1358): Ceres Seq. ID no. 4981446
gtattcctcgtgagcactaacttctcactcattcttcttcttcagctgaatccaaatacccatttccatttttaaccgtggttggattgttttgagagttgaaggaagaagatgacgtctgacggagcaacgtcgacgtcagctgcagctgcagcagcagcgatggcgacgaggaggaaaccgtcgtggagagagagggagaacaatcggagaagagagcggcggagaagagctgttgcggcgaagatttatactggtcttagagctcaaggtaactacaatcttccaaaacattgtgacaacaatgaggttcttaaggctctttgttctgaagctggttgggttgttgaagaagacggaactacttatcgcaagggacacaagcctctacctggtgacatggctggatcatcttctcgagcaactccttactcttcccataaccaaagtcctctttcttccacttttgatagccccatcttatcttaccaagtcagtccttcctcttcttcattcccgagtccttctcgagttggtgatccacacaatatctccacaatcttccctttcctcaggaatggtggtattccttcatcgcttcctccacttagaatctcaaacagtgctcctgtcactccaccagtgtcatccccaacttctagaaaccccaaaccattgcctacttgggaatcttttaccaaacaatccatgtccatggctgctaaacagtcaatgacttctttgaactacccgttttatgcggtgtctgcacctgccagtcctactcatcatcgccagttccatgctccggctactatacctgaatgtgatgagtctgactcttccactgttgattctggtcattggataagctttcaaaagtttgcacaacaacagccattctctgcctctatggtgccaacctcgcctaccttcaatctcgtgaaacctgcaccacagcaattgtctccaaacacagcagcaatccaagagattggtcaaagctccgagtttaagtttgagaacagccaagttaagccatgggaaggggagaggatccatgatgtggctatggaggatctagagctcacgcttggaaatggtaaagctcatagttgagatgaagtatacatgaacctgttatgtcatgtcggaaggaaggattggagaatgagaattagtgtgttgttcattcagttcatggttttggttcttgttctagaatcgatattcattgtaccagtgagtttgtttcacaacgcattatttgtagatagaatgtttaagatgtatgtttctattatcattccttttaggtcttgaaaacattacaaatatattacatgattaagtggctt

SEQ ID NO: 30960 - protein, 335 aa, Arabidopsis thaliana
  misc_feature (1)..(335): Ceres Seq. ID no. 4981447
MTSDGATSTSAAAAAAAMATRRKPSWRERENNRRRERRRRAVAAKIYTGLRAQGNYNLPKHCDNNEVLKALCSEAGWVVEEDGTTYRKGHKPLPGDMAGSSSRATPYSSHNQSPLSSTFDSPILSYQVSPSSSSFPSPSRVGDPHNISTIFPFLRNGGIPSSLPPLRISNSAPVTPPVSSPTSRNPKPLPTWESFTKQSMSMAAKQSMTSLNYPFYAVSAPASPTHHRQFHAPATIPECDESDSSTVDSGHWISFQKFAQQQPFSASMVPTSPTFNLVKPAPQQLSPNTAAIQEIGQSSEFKFENSQVKPWEGERIHDVAMEDLELTLGNGKAHS

SEQ ID NO: 30961 - protein, 318 aa, Arabidopsis thaliana
  misc_feature (1)..(318): Ceres Seq. ID no. 4981448
MATRRKPSWRERENNRRRERRRRAVAAKIYTGLRAQGNYNLPKHCDNNEVLKALCSEAGWVVEEDGTTYRKGHKPLPGDMAGSSSRATPYSSHNQSPLSSTFDSPILSYQVSPSSSSFPSPSRVGDPHNISTIFPFLRNGGIPSSLPPLRISNSAPVTPPVSSPTSRNPKPLPTWESFTKQSMSMAAKQSMTSLNYPFYAVSAPASPTHHRQFHAPATIPECDESDSSTVDSGHWISFQKFAQQQPFSASMVPTSPTFNLVKPAPQQLSPNTAAIQEIGQSSEFKFENSQVKPWEGERIHDVAMEDLELTLGNGKAHS

SEQ ID NO: 30962 - protein, 239 aa, Arabidopsis thaliana
  misc_feature (1)..(239): Ceres Seq. ID no. 4981449
MAGSSSRATPYSSHNQSPLSSTFDSPILSYQVSPSSSSFPSPSRVGDPHNISTIFPFLRNGGIPSSLPPLRISNSAPVTPPVSSPTSRNPKPLPTWESFTKQSMSMAAKQSMTSLNYPFYAVSAPASPTHHRQFHAPATIPECDESDSSTVDSGHWISFQKFAQQQPFSASMVPTSPTFNLVKPAPQQLSPNTAAIQEIGQSSEFKFENSQVKPWEGERIHDVAMEDLELTLGNGKAHS

SEQ ID NO: 30963 - DNA, 819 bp, Arabidopsis thaliana
  misc_feature (1)..(819): Ceres Seq. ID no. 4982024
cattagagaaacgtgatcgtcttttcatactaaaactcaccggcgacggcgaacaccgtctaaacccaaccttactcgactctctccgctccaccatcaaccaaatccgatcagatccatcattttcacaatcagtactcatcacaacatcagatggtaaattcttctccaacggctacgatctcgctttagccgagtcaaatccttctctctctgttgtaatggacgcaaaacttagatccttagtcgccgatctaatctctcttcctatgccaacaatcgccgccgtcacaggtcacgcttccgccgcgggatgtattttagcgatgagtcatgattatgtattgatgcgtcgtgatagaggttttttgtatatgagtgaattggatattgagttgatagttccggcgtggtttatggctgttattaggggtaagattggttctccggcggccagaagggatgtgatgttgacggcggcgaaagtgacggcggatgtgggtgttaagatggggattgttgattcggcgtatggtagtgcggcggagacggttgaagccgccattaagttaggtgaggagattgttcagagaggtggtgatggacacgtgtatggtaagatgagagagagtcttttaagagaggttcttatccatacgattggtgaatatgagagtggttcaagtgtggtgcgtagcactggatctaaactttagaacatgtttgtacttcttgggctacttgtcagttcttttcaagcaattgttctttatacattgatgatgtatcttttcaccaagtgaatttatagtctttttt

SEQ ID NO: 30964 - protein, 237 aa, Arabidopsis thaliana
  misc_feature (1)..(237): Ceres Seq. ID no. 4982025
LEKRDRLFILKLTGDGEHRLNPTLLDSLRSTINQIRSDPSFSQSVLITTSDGKFFSNGYDLALAESNPSLSVVMDAKLRSLVADLISLPMPTIAAVTGHASAAGCILAMSHDYVLMRRDRGFLYMSELDIELIVPAWFMAVIRGKIGSPAARRDVMLTAAKVTADVGVKMGIVDSAYGSAAETVEAAIKLGEEIVQRGGDGHVYGKMRESLLREVLIHTIGEYESGSSVVRSTGSKL

SEQ ID NO: 30965 - protein, 164 aa, Arabidopsis thaliana
  misc_feature (1)..(164): Ceres Seq. ID no. 4982026
MDAKLRSLVADLISLPMPTIAAVTGHASAAGCILAMSHDYVLMRRDRGFLYMSELDIELIVPAWFMAVIRGKIGSPAARRDVMLTAAKVTADVGVKMGIVDSAYGSAAETVEAAIKLGEEIVQRGGDGHVYGKMRESLLREVLIHTIGEYESGSSVVRSTGSKL

SEQ ID NO: 30966 - protein, 148 aa, Arabidopsis thaliana
  misc_feature (1)..(148): Ceres Seq. ID no. 4982027
MPTIAAVTGHASAAGCILAMSHDYVLMRRDRGFLYMSELDIELIVPAWFMAVIRGKIGSPAARRDVMLTAAKVTADVGVKMGIVDSAYGSAAETVEAAIKLGEEIVQRGGDGHVYGKMRESLLREVLIHTIGEYESGSSVVRSTGSKL

SEQ ID NO: 30967 - DNA, 1251 bp, Arabidopsis thaliana
  misc_feature (1)..(1251): Ceres Seq. ID no. 4982269
tttcgatgccttacgagaaagagctcgctgctgctaagaaagccgtctctctagctgctcgtctcagccaggaagtgcagaagtctctgttgcaatcagatgtccggtcaaaatctgataaaagtccggttacagctgctgattatggatcccaagctgtgatcagtcatgtactagagagagaacttcaccctgaaccactatacttggttgctgaagagaatgcagaagatctgcacaagaatggcgccgaggaatttctagaaagcattactaagcttgtgaacaatgctctagcttctgatgattcctacgccaactcttctctttcaatggatgatgtaaggaaggcgatagaccacgggaggtcacaaggcggttccagtggccgccattggattcttgatcctgttgatggaaccagagggtttgtaaaaggagaggaatacgctgtggcattagctttgcttgtggaaggcaaagtagtgctcggtgtcatggcttgcccgaaacttgagaatcacaagtcttcttcttcaggatgccttttctttgctacagtgggagaaggagcttatgtgcaatcgcttgaaggcgactctcatcctccacagaaggtattataattatcagagcatttgatgtcccttaggcttgttctctcgttttgtgttcttaaaacagagtggagaaagtgtgctaataggtgcaagtgagcaacattgagaatcctgaagaagcaacctttgtggaatcatcccacaaaccaatccccatccatagctccattgccaataaacttgggatcaaagctccacctctaagaatccatagtcaagtgaagtacgcagctctggctcgaggagatgcagagatatacttgcgtttcactcttaaagggtaccgagagttcatatggaaccatgctgctggtgcaatcatcacaacagaagctggaggtgtagtttgcgatgctgacgggaatcctctggacttctcgagaggaaatcatcttgaacacaaaacagggatcgtggtcagcaccaagaaccttatgccacggctcttgaaagccattagagaatccatagaagaggagatgcttctctctgagacacaactgaaactgtaatatatgtactgcctgaaatagctatctggtgtatatcacacatctgccgttgtgtactgtcagacactgaagaaattgtatgcttttgaatattggtctcgatttcaataaaagatttc

SEQ ID NO: 30968 - protein, 207 aa, Arabidopsis thaliana
  misc_feature (1)..(207): Ceres Seq. ID no. 4982270
SMPYEKELAAAKKAVSLAARLSQEVQKSLLQSDVRSKSDKSPVTAADYGSQAVISHVLERELHPEPLYLVAEENAEDLHKNGAEEFLESITKLVNNALASDDSYANSSLSMDDVRKAIDHGRSQGGSSGRHWILDPVDGTRGFVKGEEYAVALALLVEGKVVLGVMACPKLENHKSSSSGCLFFATVGEGAYVQSLEGDSHPPQKVL

SEQ ID NO: 30969 - protein, 206 aa, Arabidopsis thaliana
  misc_feature (1)..(206): Ceres Seq. ID no. 4982271
MPYEKELAAAKKAVSLAARLSQEVQKSLLQSDVRSKSDKSPVTAADYGSQAVISHVLERELHPEPLYLVAEENAEDLHKNGAEEFLESITKLVNNALASDDSYANSSLSMDDVRKAIDHGRSQGGSSGRHWILDPVDGTRGFVKGEEYAVALALLVEGKVVLGVMACPKLENHKSSSSGCLFFATVGEGAYVQSLEGDSHPPQKVL

SEQ ID NO: 30970 - DNA, 1786 bp, Arabidopsis thaliana
  misc_feature (1)..(1786): Ceres Seq. ID no. 4982425
tctctattctcttactaacgttatttcttcaatctcattgatcaaaaaaaaccaaaaccctaatctgcaaaaatctcaatttcctccaaaagtttcagtttttaaaaatgggttttcttcttttgtaacgaaaaaatgtgtcaaactttgaattgaccatttttttttataaggattcgatgaagaaattgagaagctattactcaaatgtgagacatcatcagaatcaccatcatcatcaccatcatcatagcaacattgtttcttcagagaggaaatggatatttttccctctattgattggttcaatcttcgctttgttcttactcttcctcacaacaaccctaacttcaccaaccggaggagtccgatttctcccttttacccgacccgttttgttaaccggatctggttcatcagctttcgttgaatccaaaatcaaacctcaacaaatctcatcactcccgtcgccaccgcgttttgcttacttgatttctggatccgccggcgacgggaaatctctccggcgaactcttttggctctttaccatccgaataatcggtatgttgttcatttagatagagaatcttcgcgtgaggagagagaggagcttcatggatatatcaaaaactcgtctttgtttcgaaggtttatgaatgttcatatgattgagaaagctaatcttgtcacgtatcgtggacctactatggttgccaatacacttcacgccgctgcgattttgcttagagaaggagctgattgggattggtttatcaatcttagctcttctgactatcctttagtgactcaagatgatttgttgcatatcttttcgcatttgccgcgggatttgaacttcattgatcatactagtaacattggatggaaagcatcacaaagagcaaaaccggtgattatagatcctggactgtatttgaacaagaaatctgatgttttttgggttacgcaaagacggagcatcccaacagcattcaagcttttcacaggctctgcttggatggcgttatctcggccattcgtcgactattgtatatggggttgggataatctacctcgtacggtcttaatgtattactcgaattttctctcttctccagaaggatattttcacactgttctctgcaacgctgaggaattcagaaacacaacggtaaatagcgacctgcacttcatatcgtgggacaatccgcctaagcagcatccacaccatctcactcttacagacatgaccaaaatggtaaatagcaatgccccgtttgctagaaagttcagaagagaagatcctgtccttgacaagatcgatgatgagctccttaacagaggtcctgggatgataacacctggcggttggtgcattggaagccatgagaatgggagtgacccttgtgctgttattggtgatactgatgttatcaggcctggtccaggcgctagacggctcgagaatctggtaacttcgttattatccactgagaatttccgatcaaaacagtgtaagtgatctgatatatctagagaacgacatcacatagagatggaatgtagcagccttgattattggggttagatgtgatttaggatctgatagaaatccctcttttagtcaagaatataagtgaagaaatacagaacaattaggctatatgatgtgggaagtatttgtcttgttgctccacacaacatgccttaaggtcttgttgtagttctcagattggaattttgagattttgtactctgctgttttaaagttagtttcttcctttc

SEQ ID NO: 30971 - protein, 447 aa, Arabidopsis thaliana
  misc_feature (1)..(447): Ceres Seq. ID no. 4982426
MKKLRSYYSNVRHHQNHHHHHHHHSNIVSSERKWIFFPLLIGSIFALFLLFLTTTLTSPTGGVRFLPFTRPVLLTGSGSSAFVESKIKPQQISSLPSPPRFAYLISGSAGDGKSLRRTLLALYHPNNRYVVHLDRESSREEREELHGYIKNSSLFRRFMNVHMIEKANLVTYRGPTMVANTLHAAAILLREGADWDWFINLSSSDYPLVTQDDLLHIFSHLPRDLNFIDHTSNIGWKASQRAKPVIIDPGLYLNKKSDVFWVTQRRSIPTAFKLFTGSAWMALSRPFVDYCIWGWDNLPRTVLMYYSNFLSSPEGYFHTVLCNAEEFRNTTVNSDLHFISWDNPPKQHPHHLTLTDMTKMVNSNAPFARKFRREDPVLDKIDDELLNRGPGMITPGGWCIGSHENGSDPCAVIGDTDVIRPGPGARRLENLVTSLLSTENFRSKQCK

SEQ ID NO: 30972 - protein, 289 aa, Arabidopsis thaliana
  misc_feature (1)..(289): Ceres Seq. ID no. 4982427
MNVHMIEKANLVTYRGPTMVANTLHAAAILLREGADWDWFINLSSSDYPLVTQDDLLHIFSHLPRDLNFIDHTSNIGWKASQRAKPVIIDPGLYLNKKSDVFWVTQRRSIPTAFKLFTGSAWMALSRPFVDYCIWGWDNLPRTVLMYYSNFLSSPEGYFHTVLCNAEEFRNTTVNSDLHFISWDNPPKQHPHHLTLTDMTKMVNSNAPFARKFRREDPVLDKIDDELLNRGPGMITPGGWCIGSHENGSDPCAVIGDTDVIRPGPGARRLENLVTSLLSTENFRSKQCK

SEQ ID NO: 30973 - protein, 285 aa, Arabidopsis thaliana
  misc_feature (1)..(285): Ceres Seq. ID no. 4982428
MIEKANLVTYRGPTMVANTLHAAAILLREGADWDWFINLSSSDYPLVTQDDLLHIFSHLPRDLNFIDHTSNIGWKASQRAKPVIIDPGLYLNKKSDVFWVTQRRSIPTAFKLFTGSAWMALSRPFVDYCIWGWDNLPRTVLMYYSNFLSSPEGYFHTVLCNAEEFRNTTVNSDLHFISWDNPPKQHPHHLTLTDMTKMVNSNAPFARKFRREDPVLDKIDDELLNRGPGMITPGGWCIGSHENGSDPCAVIGDTDVIRPGPGARRLENLVTSLLSTENFRSKQCK

SEQ ID NO: 30974 - DNA, 1015 bp, Arabidopsis thaliana
  misc_feature (1)..(1015): Ceres Seq. ID no. 4982473
acttcagcaaaaccactacacctatcttatctctcagattttctcaagaagattgtgtggaagatgatgagacggaagatttttctctttggtgattccatcactgaagaatcctttagtgacggtggctggggtgcttctctcgccgatcttctccgccgcaaggctgatatggtgctacgaggatacagtggatataacacgaggtgggcactgaaagtggtggagagagtttttccggtggcagaagaagacggcggagattctccggcagctgtgactgttttctttggagcgaacgacgcgtgtcttccggagagatgctcggggtttcagcatgtgccacttcacgagtacaagcagaatcttcgctctattgtttcgtttctcaagaatcgttggccacaaacggccattattcttataactccgcctccaatagacgaagaggcccgcctcagatatccttatatcgaaaacacaacggggttgccggaaagaacgaatgaagtagccggactatacgcaaaagcatgtatagcagtagctgaggaatgtcaaatttcggtcactgatctttggtccaaaatgcagcaaattccaaattggcaaacagaatgtctatgggacgggttacatttgagtcgggtcggtaacaaagtagtgtttgaagaagtagcaaagaagcttaaagaagaaggcattggagctgaggacttagctgtggatcttccccttatagaagatgttgaccctaaggatcctctcaaatcctttgatgagttttgatgctttatattactaccatgcagtttggttcttctatctttgattacttcttaatttcgatattattttagggaatgtattattttagggaatgtgacattattaggcactttgtgagaatctttttacgtttgaggcacttgtgagagagagggcactttgccatctttttttagaggagattgaaccaatttgcccctgaagtgatgaaaacacaataattttt

SEQ ID NO: 30975 - protein, 262 aa, Arabidopsis thaliana
  misc_feature (1)..(262): Ceres Seq. ID no. 4982474
TSAKPLHLSYLSDFLKKIVWKMMRRKIFLFGDSITEESFSDGGWGASLADLLRRKADMVLRGYSGYNTRWALKVVERVFPVAEEDGGDSPAAVTVFFGANDACLPERCSGFQHVPLHEYKQNLRSIVSFLKNRWPQTAIILITPPPIDEEARLRYPYIENTTGLPERTNEVAGLYAKACIAVAEECQISVTDLWSKMQQIPNWQTECLWDGLHLSRVGNKVVFEEVAKKLKEEGIGAEDLAVDLPLIEDVDPKDPLKSFDEF

SEQ ID NO: 30976 - protein, 241 aa, Arabidopsis thaliana
  misc_feature (1)..(241): Ceres Seq. ID no. 4982475
MMRRKIFLFGDSITEESFSDGGWGASLADLLRRKADMVLRGYSGYNTRWALKVVERVFPVAEEDGGDSPAAVTVFFGANDACLPERCSGFQHVPLHEYKQNLRSIVSFLKNRWPQTAIILITPPPIDEEARLRYPYIENTTGLPERTNEVAGLYAKACIAVAEECQISVTDLWSKMQQIPNWQTECLWDGLHLSRVGNKVVFEEVAKKLKEEGIGAEDLAVDLPLIEDVDPKDPLKSFDEF

SEQ ID NO: 30977 - protein, 240 aa, Arabidopsis thaliana
  misc_feature (1)..(240): Ceres Seq. ID no. 4982476
MRRKIFLFGDSITEESFSDGGWGASLADLLRRKADMVLRGYSGYNTRWALKVVERVFPVAEEDGGDSPAAVTVFFGANDACLPERCSGFQHVPLHEYKQNLRSIVSFLKNRWPQTAIILITPPPIDEEARLRYPYIENTTGLPERTNEVAGLYAKACIAVAEECQISVTDLWSKMQQIPNWQTECLWDGLHLSRVGNKVVFEEVAKKLKEEGIGAEDLAVDLPLIEDVDPKDPLKSFDEF

SEQ ID NO: 30978 - DNA, 1661 bp, Arabidopsis thaliana
  misc_feature (1)..(1661): Ceres Seq. ID no. 4982518
atcaagaagaagtctctgctagttccaaaacagaacaagtgaatccctcaagtttcttattacaaaacccaaaaaccaaagtgaaccagtgttgttgtttgtactcacagatccattctccactgattcatttcttgctctgcttcttctctcttagttttgttaagaatcttctcttatccattgtgttttttctattttataaatacatatataattttagttgggggagagcttgcctggtgtcgccttcttctctctctaagacttgtgcttaatttacggacatgtgaagatacttcgcttttgcctcatcgaagggcatgttagctatttacttatctcttctcttctcttctttgtcttgtgagctctcaaatcttcatagatacaaatcaagaaagtgatcaaacaaaaaaaggacaagtctttttggtatttcagatcgagaaaaaatgtggttgcaaggtttgaagtaatcttgcaatggattctttgactggatttagaatggaacccaaatggcaaattgatcctcagcttctctttgttggtccaaagattggtgaaggagctcatgctaaagtctatgagggaaaatacaagaatcagacagttgctataaagatagttcacagaggagaaacaccagaagagattgctaaaagagattcaagattccttagagaagtagaaatgctctcacgtgttcaacacaagaatttggtcaagttcattggtgcttgcaaggagcctgtaatggtgatagttacagaacttcttcaaggcggtacattgcgtaaatatctattaaacttgagacccgcatgtttggagactcgtgtggctatcggttttgcgcttgatattgctcgtggtatggaatgcttgcattcccatgggatcattcaccgtgatctcaaacccgagaacttgcttttaactgcagaccataaaacagtaaaactagcagattttggattagcaagagaagagtcactgactgagatgatgacggctgagacaggaacataccgatggatggcacctgagttgtacagcacggtaactcttcgattgggagagaagaagcactacaatcataaagtcgacgcctatagctttgcaatagttctttgggagcttttacacaataaattgccttttgagggaatgtcaaatctccaagcagcatatgcagcagccttcaaaaatgtgagaccaagcgcggagagcttaccggaggagttgggcgacattgtaacatcatgttggaatgaggatccgaatgctcggcccaacttcacgcatatcattgagttacttcttaactatctctctaaagttggatctccgatatccgctattccacaacggattcttgcttcgaagaacacgctattgccaccggattctcctggaactagctctttgatggctaagcttgatgaatgtggggaaactccaaaggccaaaagtgaagacaaacgaaaaggtttgtttttctgcttcaatcaatgttattaaccttgaaatcacagagtggttttaggaccagagatttggtagacatcactcaaattattcatgtaataatatcctccctaccatatgaatttagcaagaagttcatttatataaataaatagttatgtaattgt

SEQ ID NO: 30979 - protein, 346 aa, Arabidopsis thaliana
  misc_feature (1)..(346): Ceres Seq. ID no. 4982519
MDSLTGFRMEPKWQIDPQLLFVGPKIGEGAHAKVYEGKYKNQTVAIKIVHRGETPEEIAKRDSRFLREVEMLSRVQHKNLVKFIGACKEPVMVIVTELLQGGTLRKYLLNLRPACLETRVAIGFALDIARGMECLHSHGIIHRDLKPENLLLTADHKTVKLADFGLAREESLTEMMTAETGTYRWMAPELYSTVTLRLGEKKHYNHKVDAYSFAIVLWELLHNKLPFEGMSNLQAAYAAAFKNVRPSAESLPEELGDIVTSCWNEDPNARPNFTHIIELLLNYLSKVGSPISAIPQRILASKNTLLPPDSPGTSSLMAKLDECGETPKAKSEDKRKGLFFCFNQCY

SEQ ID NO: 30980 - protein, 338 aa, Arabidopsis thaliana
  misc_feature (1)..(338): Ceres Seq. ID no. 4982520
MEPKWQIDPQLLFVGPKIGEGAHAKVYEGKYKNQTVAIKIVHRGETPEEIAKRDSRFLREVEMLSRVQHKNLVKFIGACKEPVMVIVTELLQGGTLRKYLLNLRPACLETRVAIGFALDIARGMECLHSHGIIHRDLKPENLLLTADHKTVKLADFGLAREESLTEMMTAETGTYRWMAPELYSTVTLRLGEKKHYNHKVDAYSFAIVLWELLHNKLPFEGMSNLQAAYAAAFKNVRPSAESLPEELGDIVTSCWNEDPNARPNFTHIIELLLNYLSKVGSPISAIPQRILASKNTLLPPDSPGTSSLMAKLDECGETPKAKSEDKRKGLFFCFNQCY

SEQ ID NO: 30981 - protein, 276 aa, Arabidopsis thaliana
  misc_feature (1)..(276): Ceres Seq. ID no. 4982521
MLSRVQHKNLVKFIGACKEPVMVIVTELLQGGTLRKYLLNLRPACLETRVAIGFALDIARGMECLHSHGIIHRDLKPENLLLTADHKTVKLADFGLAREESLTEMMTAETGTYRWMAPELYSTVTLRLGEKKHYNHKVDAYSFAIVLWELLHNKLPFEGMSNLQAAYAAAFKNVRPSAESLPEELGDIVTSCWNEDPNARPNFTHIIELLLNYLSKVGSPISAIPQRILASKNTLLPPDSPGTSSLMAKLDECGETPKAKSEDKRKGLFFCFNQCY

SEQ ID NO: 30982 - DNA, 3000 bp, Arabidopsis thaliana
  misc_feature (1)..(3000): Ceres Seq. ID no. 4982946
atgaactccaatctgctatcgaatcctatatcatcggaggtcttcacctccattgatttgggaacaaattctttcaagcttctaatagtccaagctgagccttccggtagatctttcgttccaatcgagagactcaaagagccagtggtgttgtctcgtgaatctccaacctcaatttcgtctcaatctcaggctcgcgcgcttcaatctctacggaaattcaaaagtttaattctctcgcaccacgtctctggtgataggatccgatgcgttgcaacggaagccttacggcgagccgagaatcaggaagagttcgtggatgcggtttttgaggatgttgggcttaaggtcgatgtgctttctggtgaagaggaagccaggttagtttatttaggcgtgcttcagtttttacctgtgtttgagaaatcagtgttgtgtgttgatattggaggtggttctactgaatttgtggttggtaagtgtggtgatgtcaagcttgctgtttctttaaagctaggtcacgtgaatttgacgcagatgtttatgaaaaatggtattggattgaaggaaatgagagactatattcgtcatgcgattgatgagtctaggttagcagaaaaattgaatgaatcagatggttttgaggttgttgtgggatcttctggaactatacgagctattgagaatgcagttttcagtggctatggagctgatttgtgtgatttcaatttggaagggtataagagggactggagatttggtacaagagagctgagcagcgttgtagcaaagctatgcagtgaaggagacgaagagctgattcgaagggagggatttttcaagagaagatcagagttcattgttgctggggctgtattgttggaggaaatattcaaggctcttggcatagaggacatggaggtctcagagtatgcattggcagagggtgtgattgctgattctctggccaaagcttttgatggatcatatgatttaaatgctaatgcaagatggcgatcggtcatgaggcttgccacgcgtttcagtggtaaaaagcgaatgactcatgcgatacactgtgccaagattgcaaaggttatcttagacgataaagatcttgagtatctcgaagctgcttgtttcttgcacaatatcggaatcatcacagggaaaaagggttatcataagcaatcttatcatatcatcaagaatggggatcatctccacagctacactgctgaggaaatcgagcttatagctatgcttgtgagataccaaagaaaaaagtttcccaagcttgatcgtgcacctcttaagggcttcactggggaggcaaagcgaaaattcataattttgtgtttgattacacgattatcagttacacttcaacggaatgagaatatggatctccaagaagttgaatttattgaatcttccgagatcttcaaactcgtgctgaaaagacaacaccaggaaccggtagaggttggttgtcaagatcaagtaaacaaaaactctgatgaatcacaactggagaaagaagttgagcattttaaaaggagagttgttggtttctttcctggagttttccgttgtccaatttgtgaagtcgaaaatgtcagttttaaaccagaaactgatggtaaaactatgattgtacgcagattgaattggtgtaatgaaaagagatttgactccatgttaacttttcccactggatgtgtgcatttgggttataagcagatgttgaaacggttgccttcgaatcaaggtcatctacacatgactgcaggaccaaaatctttatctttcttctcttccatgaaaagccggggaatttgggctgacgagtatacttacgcgcctttgctcaaatcctgttcgtctctttctgatttgcgatttgggaaatgcgttcatggtgagcttataagaactgggttccaccgtcttgggaaaattaggattggggtggtggagctttatacttccggtgggagaatgggtgatgcacagaaagtgttcgacgaaatgtctgagagaaacgttgtcgtctggaatcttatgattcgcgggttctgtgactccggggacgttgaaagaggtcttcatttgttcaaacagatgagcgaaagaagcattgtgtcgtggaattcgatgatatctagcttgtctaaatgtggtagagatcgtgaggctttggagcttttctgcgaaatgattgatcaaggttttgaccctgatgaggcgactgtggttacagtcttgccaatttctgcatctctaggagtgttggataccggaaaatggattcattctaccgcagaatccagtggtttgtttaaagatttcatcaccgtgggaaacgctttggtagatttctactgcaaaagcggcgacttggaggcagcaacggctatatttagaaaaatgcagcgtagaaacgttgtttcatggaacacattgatatcgggatcagccgtaaacggaaagggagaatttgggatagacttgtttgatgctatgatagaggaagggaaagtagctccaaatgaagcgacatttttgggggttttggcatgttgctcatacacaggtcaggtggagagaggagaggaattgtttggtttgatgatggaaagattcaaacttgaggcgagaaccgagcattacggtgccatggtagatctaatgagtagaagtgggagaatcacagaggcgtttaagtttctaaaaaatatgcccgtaaacgcaaatgcggcaatgtgggggtcgctgctcagtgcttgtcgtagccacggagatgtaaagctagcagaagttgcagcaatggagttagtgaagattgagccagggaattcggggaattatgtgttgttatctaatttgtatgcagaggaagggagatggcaagatgtggagaaggtacgaacgttgatgaaaaagaaccgccttagaaagtctactggccaaagcaccatttgcgatgtttcagtctga

SEQ ID NO: 30983 - protein, 999 aa, Arabidopsis thaliana
  misc_feature (1)..(999): Ceres Seq. ID no. 4982947
MNSNLLSNPISSEVFTSIDLGTNSFKLLIVQAEPSGRSFVPIERLKEPVVLSRESPTSISSQSQARALQSLRKFKSLILSHHVSGDRIRCVATEALRRAENQEEFVDAVFEDVGLKVDVLSGEEEARLVYLGVLQFLPVFEKSVLCVDIGGGSTEFVVGKCGDVKLAVSLKLGHVNLTQMFMKNGIGLKEMRDYIRHAIDESRLAEKLNESDGFEVVVGSSGTIRAIENAVFSGYGADLCDFNLEGYKRDWRFGTRELSSVVAKLCSEGDEELIRREGFFKRRSEFIVAGAVLLEEIFKALGIEDMEVSEYALAEGVIADSLAKAFDGSYDLNANARWRSVMRLATRFSGKKRMTHAIHCAKIAKVILDDKDLEYLEAACFLHNIGIITGKKGYHKQSYHIIKNGDHLHSYTAEEIELIAMLVRYQRKKFPKLDRAPLKGFTGEAKRKFIILCLITRLSVTLQRNENMDLQEVEFIESSEIFKLVLKRQHQEPVEVGCQDQVNKNSDESQLEKEVEHFKRRVVGFFPGVFRCPICEVENVSFKPETDGKTMIVRRLNWCNEKRFDSMLTFPTGCVHLGYKQMLKRLPSNQGHLHMTAGPKSLSFFSSMKSRGIWADEYTYAPLLKSCSSLSDLRFGKCVHGELIRTGFHRLGKIRIGVVELYTSGGRMGDAQKVFDEMSERNVVVWNLMIRGFCDSGDVERGLHLFKQMSERSIVSWNSMISSLSKCGRDREALELFCEMIDQGFDPDEATVVTVLPISASLGVLDTGKWIHSTAESSGLFKDFITVGNALVDFYCKSGDLEAATAIFRKMQRRNVVSWNTLISGSAVNGKGEFGIDLFDAMIEEGKVAPNEATFLGVLACCSYTGQVERGEELFGLMMERFKLEARTEHYGAMVDLMSRSGRITEAFKFLKNMPVNANAAMWGSLLSACRSHGDVKLAEVAAMELVKIEPGNSGNYVLLSNLYAEEGRWQDVEKVRTLMKKNRLRKSTGQSTICDVSV

SEQ ID NO: 30984 - protein, 820 aa, Arabidopsis thaliana
  misc_feature (1)..(820): Ceres Seq. ID no. 4982948
MFMKNGIGLKEMRDYIRHAIDESRLAEKLNESDGFEVVVGSSGTIRAIENAVFSGYGADLCDFNLEGYKRDWRFGTRELSSVVAKLCSEGDEELIRREGFFKRRSEFIVAGAVLLEEIFKALGIEDMEVSEYALAEGVIADSLAKAFDGSYDLNANARWRSVMRLATRFSGKKRMTHAIHCAKIAKVILDDKDLEYLEAACFLHNIGIITGKKGYHKQSYHIIKNGDHLHSYTAEEIELIAMLVRYQRKKFPKLDRAPLKGFTGEAKRKFIILCLITRLSVTLQRNENMDLQEVEFIESSEIFKLVLKRQHQEPVEVGCQDQVNKNSDESQLEKEVEHFKRRVVGFFPGVFRCPICEVENVSFKPETDGKTMIVRRLNWCNEKRFDSMLTFPTGCVHLGYKQMLKRLPSNQGHLHMTAGPKSLSFFSSMKSRGIWADEYTYAPLLKSCSSLSDLRFGKCVHGELIRTGFHRLGKIRIGVVELYTSGGRMGDAQKVFDEMSERNVVVWNLMIRGFCDSGDVERGLHLFKQMSERSIVSWNSMISSLSKCGRDREALELFCEMIDQGFDPDEATVVTVLPISASLGVLDTGKWIHSTAESSGLFKDFITVGNALVDFYCKSGDLEAATAIFRKMQRRNVVSWNTLISGSAVNGKGEFGIDLFDAMIEEGKVAPNEATFLGVLACCSYTGQVERGEELFGLMMERFKLEARTEHYGAMVDLMSRSGRITEAFKFLKNMPVNANAAMWGSLLSACRSHGDVKLAEVAAMELVKIEPGNSGNYVLLSNLYAEEGRWQDVEKVRTLMKKNRLRKSTGQSTICDVSV

SEQ ID NO: 30985 - protein, 818 aa, Arabidopsis thaliana
  misc_feature (1)..(818): Ceres Seq. ID no. 4982949
MKNGIGLKEMRDYIRHAIDESRLAEKLNESDGFEVVVGSSGTIRAIENAVFSGYGADLCDFNLEGYKRDWRFGTRELSSVVAKLCSEGDEELIRREGFFKRRSEFIVAGAVLLEEIFKALGIEDMEVSEYALAEGVIADSLAKAFDGSYDLNANARWRSVMRLATRFSGKKRMTHAIHCAKIAKVILDDKDLEYLEAACFLHNIGIITGKKGYHKQSYHIIKNGDHLHSYTAEEIELIAMLVRYQRKKFPKLDRAPLKGFTGEAKRKFIILCLITRLSVTLQRNENMDLQEVEFIESSEIFKLVLKRQHQEPVEVGCQDQVNKNSDESQLEKEVEHFKRRVVGFFPGVFRCPICEVENVSFKPETDGKTMIVRRLNWCNEKRFDSMLTFPTGCVHLGYKQMLKRLPSNQGHLHMTAGPKSLSFFSSMKSRGIWADEYTYAPLLKSCSSLSDLRFGKCVHGELIRTGFHRLGKIRIGVVELYTSGGRMGDAQKVFDEMSERNVVVWNLMIRGFCDSGDVERGLHLFKQMSERSIVSWNSMISSLSKCGRDREALELFCEMIDQGFDPDEATVVTVLPISASLGVLDTGKWIHSTAESSGLFKDFITVGNALVDFYCKSGDLEAATAIFRKMQRRNVVSWNTLISGSAVNGKGEFGIDLFDAMIEEGKVAPNEATFLGVLACCSYTGQVERGEELFGLMMERFKLEARTEHYGAMVDLMSRSGRITEAFKFLKNMPVNANAAMWGSLLSACRSHGDVKLAEVAAMELVKIEPGNSGNYVLLSNLYAEEGRWQDVEKVRTLMKKNRLRKSTGQSTICDVSV

SEQ ID NO: 30986 - DNA, 2988 bp, Arabidopsis thaliana
  misc_feature (1)..(2988): Ceres Seq. ID no. 4983066
atggcgacgaagcttttgtcgcttacatgcataaggaaagagagattcagcgagcgttaccctctggtgcggaagcaccttaccaggtctcgcgacggcggcggaggatcatcgtcggagacggcggcttttgagatcgatgatccgatttccagggcggtttttcaagtgttaggaatgacttgctctgcttgcgctggatctgttgaaaaggctatcaagcgtctccctggaattcacgatgctgtcatcgatgctctgaataatcgtgctcagattctgttttaccctaactctgtcgatgtggagacaattcgtgagactattgaggatgctggatttgaagcatcgttgatcgaaaatgaagcgaatgagaggtcgagacaagtttgtagaataagaattaatggtatgacttgtacttcgtgttcttcaacaatcgaaagagttttgcaatcggttaatggtgtacaaagagcacatgtggctttagcaattgaagaagctgagattcattatgatcctagactctcgagctatgatagactattggaggagatagaaaatgctggttttgaagctgtgcttataagtacaggcgaggatgtgagcaagattgatttgaagattgatggtgagcttactgatgaatccatgaaggttattgaaaggtcgcttgaagcacttcctggtgttcaaagtgttgagatcagccatggaactgataagatatctgtattgtacaaacctgatgtgacggggccgaggaatttcattcaggtgattgagtctactgtctttggtcatagtggtcacatcaaggcaacaatattctcagagggaggggtaggcagagaatctcaaaagcaaggggagattaagcagtattataagtcgtttctctggagtttggtttttacagtaccggtgtttttgacagccatggtctttatgtatatccctggaattaaagatttgctcatgtttaaggtcatcaatatgctcaccgttggagaaatcataaggtgtgttttggctactcctgtccagtttgtcattggttggagattttatactggctcttacaaggctttacgccgaggatcggctaatatggatgttctgattgctctggggacaaatgcagcttatttctattcattatacacagtgttgagagctgcaacatctcctgatttcaagggagtagatttctttgagactagtgccatgctcatttcctttatcatactaggaaaatatttggaggttatggctaaaggaaaaacatctcaagcgatcgcaaagcttatgaacttggcacccgacactgcgatattgttgagtttggacaaggaagggaatgtgactggtgaagaggagattgatggtcgattgatacagaagaatgacgtgatcaaaattgttcctggtgctaaagtagcttcagatggttatgtcatatggggacaaagtcatgtgaatgaaagtatgatcactggagaggctaggccagtggcaaagagaaagggtgatacagttataggaggcactttgaacgagaatggtgttctgcatgttaaggttacaagggttggttcagagagtgctcttgctcagattgttcgacttgttgagtccgcacaactggccaaagctccagtacagaagttggctgatcggatttccaagttctttgttcctcttgtaattttcctctcgttctcaacttggcttgcctggttcttagctgggaaactgcattggtaccctgaatcctggataccttcttcgatggatagctttgagctagctcttcagttcgggatctctgtcatggtcatagcttgtccatgtgctcttgggctggctactccaactgctgttatggttggtactggggttggtgcatcccaaggtgtgctgataaagggtggccaagccctagaaagagcacacaaggtaaattgcattgtctttgacaagacaggaactctcacgatggggaagcccgttgttgtgaaaacaaagctcctgaaaaacatggtacttcgagagttctatgaacttgttgctgcaactgaggtaaacagtgagcatccgttagcaaaggccattgtcgagtacgcgaagaaattcagagacgacgaagagaaccctgcctggccagaagcctgtgattttgtgtccatcactggaaagggagtgaaagccaccgttaaaggtagagagattatggtggggaacaagaatctgatgaatgatcataaagttattattccagatgatgctgaagagttgctagctgactctgaagatatggcccagaccggaattcttgtctccataaacagtgaactgattggagttttgtctgtttcggatcctctaaaaccgagtgctcgagaagccatctccattctaaaatccatgaatatcaaaagcatcatggtaactggtgacaactggggaacagcaaactcaattgctagagaagtcggtatcgactctgttatcgcagaagctaaacctgagcaaaaagcagagaaagtcaaggaattacaggctgcgggacatgttgtggcaatggtaggtgacggaatcaatgactcaccggctctcgtggcagcggatgtaggtatggcgataggtgcaggaacagacattgctatagaagcagcggatatagttctgatgaaaagcaacttagaagatgtgatcacagccattgatctttcaaggaaaacgttctcaagaatccgtctcaactacgtatgggctctcgggtataacctcatggggataccgatcgctgcgggagtgcttttcccagggacacgtttcaggttgcctccatggattgcaggtgctgcaatggctgcttcttctgttagtgttgtgtgttgctctctcttgcttaagaactacaagcgacctaagaagcttgatcatctggagattcgggagattcaggtggagcgagtttaa

SEQ ID NO: 30987 - protein, 995 aa, Arabidopsis thaliana
  misc_feature (1)..(995): Ceres Seq. ID no. 4983067
MATKLLSLTCIRKERFSERYPLVRKHLTRSRDGGGGSSSETAAFEIDDPISRAVFQVLGMTCSACAGSVEKAIKRLPGIHDAVIDALNNRAQILFYPNSVDVETIRETIEDAGFEASLIENEANERSRQVCRIRINGMTCTSCSSTIERVLQSVNGVQRAHVALAIEEAEIHYDPRLSSYDRLLEEIENAGFEAVLISTGEDVSKIDLKIDGELTDESMKVIERSLEALPGVQSVEISHGTDKISVLYKPDVTGPRNFIQVIESTVFGHSGHIKATIFSEGGVGRESQKQGEIKQYYKSFLWSLVFTVPVFLTAMVFMYIPGIKDLLMFKVINMLTVGEIIRCVLATPVQFVIGWRFYTGSYKALRRGSANMDVLIALGTNAAYFYSLYTVLRAATSPDFKGVDFFETSAMLISFIILGKYLEVMAKGKTSQAIAKLMNLAPDTAILLSLDKEGNVTGEEEIDGRLIQKNDVIKIVPGAKVASDGYVIWGQSHVNESMITGEARPVAKRKGDTVIGGTLNENGVLHVKVTRVGSESALAQIVRLVESAQLAKAPVQKLADRISKFFVPLVIFLSFSTWLAWFLAGKLHWYPESWIPSSMDSFELALQFGISVMVIACPCALGLATPTAVMVGTGVGASQGVLIKGGQALERAHKVNCIVFDKTGTLTMGKPVVVKTKLLKNMVLREFYELVAATEVNSEHPLAKAIVEYAKKFRDDEENPAWPEACDFVSITGKGVKATVKGREIMVGNKNLMNDHKVIIPDDAEELLADSEDMAQTGILVSINSELIGVLSVSDPLKPSAREAISILKSMNIKSIMVTGDNWGTANSIAREVGIDSVIAEAKPEQKAEKVKELQAAGHVVAMVGDGINDSPALVAADVGMAIGAGTDIAIEAADIVLMKSNLEDVITAIDLSRKTFSRIRLNYVWALGYNLMGIPIAAGVLFPGTRFRLPPWIAGAAMAASSVSVVCCSLLLKNYKRPKKLDHLEIREIQVERV

SEQ ID NO: 30988 - protein, 936 aa, Arabidopsis thaliana
  misc_feature (1)..(936): Ceres Seq. ID no. 4983068
MTCSACAGSVEKAIKRLPGIHDAVIDALNNRAQILFYPNSVDVETIRETIEDAGFEASLIENEANERSRQVCRIRINGMTCTSCSSTIERVLQSVNGVQRAHVALAIEEAEIHYDPRLSSYDRLLEEIENAGFEAVLISTGEDVSKIDLKIDGELTDESMKVIERSLEALPGVQSVEISHGTDKISVLYKPDVTGPRNFIQVIESTVFGHSGHIKATIFSEGGVGRESQKQGEIKQYYKSFLWSLVFTVPVFLTAMVFMYIPGIKDLLMFKVINMLTVGEIIRCVLATPVQFVIGWRFYTGSYKALRRGSANMDVLIALGTNAAYFYSLYTVLRAATSPDFKGVDFFETSAMLISFIILGKYLEVMAKGKTSQAIAKLMNLAPDTAILLSLDKEGNVTGEEEIDGRLIQKNDVIKIVPGAKVASDGYVIWGQSHVNESMITGEARPVAKRKGDTVIGGTLNENGVLHVKVTRVGSESALAQIVRLVESAQLAKAPVQKLADRISKFFVPLVIFLSFSTWLAWFLAGKLHWYPESWIPSSMDSFELALQFGISVMVIACPCALGLATPTAVMVGTGVGASQGVLIKGGQALERAHKVNCIVFDKTGTLTMGKPVVVKTKLLKNMVLREFYELVAATEVNSEHPLAKAIVEYAKKFRDDEENPAWPEACDFVSITGKGVKATVKGREIMVGNKNLMNDHKVIIPDDAEELLADSEDMAQTGILVSINSELIGVLSVSDPLKPSAREAISILKSMNIKSIMVTGDNWGTANSIAREVGIDSVIAEAKPEQKAEKVKELQAAGHVVAMVGDGINDSPALVAADVGMAIGAGTDIAIEAADIVLMKSNLEDVITAIDLSRKTFSRIRLNYVWALGYNLMGIPIAAGVLFPGTRFRLPPWIAGAAMAASSVSVVCCSLLLKNYKRPKKLDHLEIREIQVERV

SEQ ID NO: 30989 - protein, 858 aa, Arabidopsis thaliana
  misc_feature (1)..(858): Ceres Seq. ID no. 4983069
MTCTSCSSTIERVLQSVNGVQRAHVALAIEEAEIHYDPRLSSYDRLLEEIENAGFEAVLISTGEDVSKIDLKIDGELTDESMKVIERSLEALPGVQSVEISHGTDKISVLYKPDVTGPRNFIQVIESTVFGHSGHIKATIFSEGGVGRESQKQGEIKQYYKSFLWSLVFTVPVFLTAMVFMYIPGIKDLLMFKVINMLTVGEIIRCVLATPVQFVIGWRFYTGSYKALRRGSANMDVLIALGTNAAYFYSLYTVLRAATSPDFKGVDFFETSAMLISFIILGKYLEVMAKGKTSQAIAKLMNLAPDTAILLSLDKEGNVTGEEEIDGRLIQKNDVIKIVPGAKVASDGYVIWGQSHVNESMITGEARPVAKRKGDTVIGGTLNENGVLHVKVTRVGSESALAQIVRLVESAQLAKAPVQKLADRISKFFVPLVIFLSFSTWLAWFLAGKLHWYPESWIPSSMDSFELALQFGISVMVIACPCALGLATPTAVMVGTGVGASQGVLIKGGQALERAHKVNCIVFDKTGTLTMGKPVVVKTKLLKNMVLREFYELVAATEVNSEHPLAKAIVEYAKKFRDDEENPAWPEACDFVSITGKGVKATVKGREIMVGNKNLMNDHKVIIPDDAEELLADSEDMAQTGILVSINSELIGVLSVSDPLKPSAREAISILKSMNIKSIMVTGDNWGTANSIAREVGIDSVIAEAKPEQKAEKVKELQAAGHVVAMVGDGINDSPALVAADVGMAIGAGTDIAIEAADIVLMKSNLEDVITAIDLSRKTFSRIRLNYVWALGYNLMGIPIAAGVLFPGTRFRLPPWIAGAAMAASSVSVVCCSLLLKNYKRPKKLDHLEIREIQVERV

SEQ ID NO: 30990 - DNA, 648 bp, Arabidopsis thaliana
  misc_feature (1)..(648): Ceres Seq. ID no. 4983157
atgccggaaaagatcgattacgtgttcaaggtggtggtcattggagattctgctgtcgggaaaacgcagctcctctcacgttttacacacaacgagttctgttatgattcaaaatcaaccattggtgtcgagtttcagacacggaccatcactcttcggggcaaactcgtcaaagctcagatctgggacaccgccggtcaagagagagcggtgactagcgcctactacagaggtgcgttaggtgcgatggtggtttacgacattaccaaacgcctctcattcgaccacgttgcacgttgggtcgaggaattacgtgctcacgccgatgattccgccgtgatcatgctcgtcggaaacaaagccgatctctccgttggtaaacgtgccgttcctacggaggatgcagtcgaattcgccgagactcaacggctttttttctcggaagtctcggctctaagcggcggaaacgtcgacgaagcttttttccgtttactcgaggagattttcagccgcgttgttgtttcgagaaaagctatggaatccgacggtggagccaccgtgaaacttgacggttcgagaattgatgtcatctctggttcggatcttgagactagtaatatcaaggaacaagcttcgtgctcgtgttga

SEQ ID NO: 30991 - protein, 215 aa, Arabidopsis thaliana
  misc_feature (1)..(215): Ceres Seq. ID no. 4983158
MPEKIDYVFKVVVIGDSAVGKTQLLSRFTHNEFCYDSKSTIGVEFQTRTITLRGKLVKAQIWDTAGQERAVTSAYYRGALGAMVVYDITKRLSFDHVARWVEELRAHADDSAVIMLVGNKADLSVGKRAVPTEDAVEFAETQRLFFSEVSALSGGNVDEAFFRLLEEIFSRVVVSRKAMESDGGATVKLDGSRIDVISGSDLETSNIKEQASCSC

SEQ ID NO: 30992 - protein, 133 aa, Arabidopsis thaliana
  misc_feature (1)..(133): Ceres Seq. ID no. 4983159
MVVYDITKRLSFDHVARWVEELRAHADDSAVIMLVGNKADLSVGKRAVPTEDAVEFAETQRLFFSEVSALSGGNVDEAFFRLLEEIFSRVVVSRKAMESDGGATVKLDGSRIDVISGSDLETSNIKEQASCSC

SEQ ID NO: 30993 - DNA, 885 bp, Arabidopsis thaliana
  misc_feature (1)..(885): Ceres Seq. ID no. 4983181
atgggaaagccaagaagcgtgtctccgaccatcttcctcctagtcatcctcttggtgaccgccggagagaagacggaggcgaagccatggtggaagaaagtcggagattccatcgggaatatagccggaggaataagaaatgcggttgggaattataaaccagtggagatgggattgtcgttaaaaggaggattttgtgtgagaaagcttctgtctttgaatacgaatgtgttcagtgaatggtgtatagctcttaatgatccaagagctcctatgtacatgaagattgagaatataccaagtgcgacgagtactcggcttctgttgtcaccaccttcgttcaccggaaaccgattctcgttcaggttcaggtggaggagaatacgacgtcgtaacagagtcaacagagcgagcagagagtttttaatcgcacataacctcgtaagagcgcgcgtgggagaaccaccgtttcaatgggacggaagattagcggcgtacgcgcgcacgtgggcgaatcagcgcgtgggtgattgtaggcttgttcactctaacgggccgtatggagaaaacatattttgggccggaaagaataactggagccccagagatattgttaatgtgtgggccgatgaggataaattctacgacgtgaaaggtaacacgtgtgagccgcaacacatgtgtgggcactacacgcagatcgtgtggagagatagtaccaaggtcggatgcgcaagtgtggattgttcgaacggcggcgtttatgcgatttgtgtttataacccaccgggaaattacgaaggtgaaaatccgtttggaagttatgatgatcagattggtcttgcccgggatgatccaccggcggtgatcggaggaatggcttga

SEQ ID NO: 30994 - protein, 294 aa, Arabidopsis thaliana
  misc_feature (1)..(294): Ceres Seq. ID no. 4983182
MGKPRSVSPTIFLLVILLVTAGEKTEAKPWWKKVGDSIGNIAGGIRNAVGNYKPVEMGLSLKGGFCVRKLLSLNTNVFSEWCIALNDPRAPMYMKIENIPSATSTRLLLSPPSFTGNRFSFRFRWRRIRRRNRVNRASREFLIAHNLVRARVGEPPFQWDGRLAAYARTWANQRVGDCRLVHSNGPYGENIFWAGKNNWSPRDIVNVWADEDKFYDVKGNTCEPQHMCGHYTQIVWRDSTKVGCASVDCSNGGVYAICVYNPPGNYEGENPFGSYDDQIGLARDDPPAVIGGMA

SEQ ID NO: 30995 - protein, 238 aa, Arabidopsis thaliana
  misc_feature (1)..(238): Ceres Seq. ID no. 4983183
MGLSLKGGFCVRKLLSLNTNVFSEWCIALNDPRAPMYMKIENIPSATSTRLLLSPPSFTGNRFSFRFRWRRIRRRNRVNRASREFLIAHNLVRARVGEPPFQWDGRLAAYARTWANQRVGDCRLVHSNGPYGENIFWAGKNNWSPRDIVNVWADEDKFYDVKGNTCEPQHMCGHYTQIVWRDSTKVGCASVDCSNGGVYAICVYNPPGNYEGENPFGSYDDQIGLARDDPPAVIGGMA

SEQ ID NO: 30996 - protein, 203 aa, Arabidopsis thaliana
  misc_feature (1)..(203): Ceres Seq. ID no. 4983184
MYMKIENIPSATSTRLLLSPPSFTGNRFSFRFRWRRIRRRNRVNRASREFLIAHNLVRARVGEPPFQWDGRLAAYARTWANQRVGDCRLVHSNGPYGENIFWAGKNNWSPRDIVNVWADEDKFYDVKGNTCEPQHMCGHYTQIVWRDSTKVGCASVDCSNGGVYAICVYNPPGNYEGENPFGSYDDQIGLARDDPPAVIGGMA

SEQ ID NO: 30997 - DNA, 1677 bp, Arabidopsis thaliana
  misc_feature (1)..(1677): Ceres Seq. ID no. 4983275
atggctcgtgtttacatggagacgatgatacaaaaatgcgtcagcttctcccaaatcaaacaactccaatctcacttcctcaccgccggccatttccaatcttcctttctccgttctcgtcttctcgaacgctgcgcaatctcaccattcggagacctttccttcgccgtacaaattttccggtacatccctaaacctttaaccaatgattggaacgcaatcatccgcggattcgccggaagttctcatccttcacttgcgttttcatggtatcgttccatgttgcagcaatcttcgtcatcgtcggctatatgtagagtcgatgctttgacttgttcttttactcttaaagcttgtgcacgtgcgctttgttcttccgctatggatcaacttcattgtcagattaaccgtcggggattatccgctgattcgcttctttgtactacgttgcttgatgcttactctaaaaacggagatttaattagtgcgtataagttgttcgatgaaatgcctgtgagagatgttgcgtcgtggaacgcgttgatcgcggggttagtgtctggtaatcgagcgagtgaggcgatggagttgtataagagaatggaaacggaaggaattagaagaagtgaagtaactgttgttgctgctttaggagcttgttctcatttgggtgatgttaaggaaggtgaaaatatcttccatggatacagtaacgataatgtgattgttagtaacgcggctattgatatgtattcgaaatgcgggtttgttgataaagcttatcaagtgtttgaacaattcactggtaagaagagtgttgttacatggaacactatgattacagggtttgcagtgcatggagaagcacatagagcgttggagatttttgacaagttggaggataatggtattaagcctgatgatgtctcgtacttagctgctttaactgcgtgtagacatgcggggttagtggagtatggtttgtctgtattcaataatatggcttgtaagggcgttgagcgtaacatgaagcactatggttgtgtggttgatctgttaagccgtgcaggaaggttgagagaagctcacgatatcatatgttcaatgtcgatgattccggatcctgttttgtggcagagccttcttggagcttcggagatttatagtgatgttgaaatggctgagattgcttctagggaaataaaggaaatgggagttaacaatgatggtgattttgtgttgctatcgaatgtttatgctgcgcagggacggtggaaagatgtaggacgagtgagagatgatatggaaagcaaacaagtgaagaaaattccaggtcttagctacatagaagccaaaggaacgattcatgaattctacaacagtgacaagagccatgaacagtggagagagatttatgagaagatcgatgagatcaggttcaagataagagaggatggttacgtggcgcagacaggacttgtgttgcacgacataggagaggaagagaaagagaacgctttgtgctatcacagcgagaaattggcggtggcctacggactgatgatgatggatggtgcggacgaggagagtccgttcggtttcataggttcaaagatggttcttgctcttgcagagatttttggtaacgttacaaaattaagagggtggcaattttaa

SEQ ID NO: 30998 - protein, 558 aa, Arabidopsis thaliana
  misc_feature (1)..(558): Ceres Seq. ID no. 4983276
MARVYMETMIQKCVSFSQIKQLQSHFLTAGHFQSSFLRSRLLERCAISPFGDLSFAVQIFRYIPKPLTNDWNAIIRGFAGSSHPSLAFSWYRSMLQQSSSSSAICRVDALTCSFTLKACARALCSSAMDQLHCQINRRGLSADSLLCTTLLDAYSKNGDLISAYKLFDEMPVRDVASWNALIAGLVSGNRASEAMELYKRMETEGIRRSEVTVVAALGACSHLGDVKEGENIFHGYSNDNVIVSNAAIDMYSKCGFVDKAYQVFEQFTGKKSVVTWNTMITGFAVHGEAHRALEIFDKLEDNGIKPDDVSYLAALTACRHAGLVEYGLSVFNNMACKGVERNMKHYGCVVDLLSRAGRLREAHDIICSMSMIPDPVLWQSLLGASEIYSDVEMAEIASREIKEMGVNNDGDFVLLSNVYAAQGRWKDVGRVRDDMESKQVKKIPGLSYIEAKGTIHEFYNSDKSHEQWREIYEKIDEIRFKIREDGYVAQTGLVLHDIGEEEKENALCYHSEKLAVAYGLMMMDGADEESPFGFIGSKMVLALAEIFGNVTKLRGWQF

SEQ ID NO: 30999 - protein, 553 aa, Arabidopsis thaliana
  misc_feature (1)..(553): Ceres Seq. ID no. 4983277
METMIQKCVSFSQIKQLQSHFLTAGHFQSSFLRSRLLERCAISPFGDLSFAVQIFRYIPKPLTNDWNAIIRGFAGSSHPSLAFSWYRSMLQQSSSSSAICRVDALTCSFTLKACARALCSSAMDQLHCQINRRGLSADSLLCTTLLDAYSKNGDLISAYKLFDEMPVRDVASWNALIAGLVSGNRASEAMELYKRMETEGIRRSEVTVVAALGACSHLGDVKEGENIFHGYSNDNVIVSNAAIDMYSKCGFVDKAYQVFEQFTGKKSVVTWNTMITGFAVHGEAHRALEIFDKLEDNGIKPDDVSYLAALTACRHAGLVEYGLSVFNNMACKGVERNMKHYGCVVDLLSRAGRLREAHDIICSMSMIPDPVLWQSLLGASEIYSDVEMAEIASREIKEMGVNNDGDFVLLSNVYAAQGRWKDVGRVRDDMESKQVKKIPGLSYIEAKGTIHEFYNSDKSHEQWREIYEKIDEIRFKIREDGYVAQTGLVLHDIGEEEKENALCYHSEKLAVAYGLMMMDGADEESPFGFIGSKMVLALAEIFGNVTKLRGWQF

SEQ ID NO: 31000 - protein, 550 aa, Arabidopsis thaliana
  misc_feature (1)..(550): Ceres Seq. ID no. 4983278
MIQKCVSFSQIKQLQSHFLTAGHFQSSFLRSRLLERCAISPFGDLSFAVQIFRYIPKPLTNDWNAIIRGFAGSSHPSLAFSWYRSMLQQSSSSSAICRVDALTCSFTLKACARALCSSAMDQLHCQINRRGLSADSLLCTTLLDAYSKNGDLISAYKLFDEMPVRDVASWNALIAGLVSGNRASEAMELYKRMETEGIRRSEVTVVAALGACSHLGDVKEGENIFHGYSNDNVIVSNAAIDMYSKCGFVDKAYQVFEQFTGKKSVVTWNTMITGFAVHGEAHRALEIFDKLEDNGIKPDDVSYLAALTACRHAGLVEYGLSVFNNMACKGVERNMKHYGCVVDLLSRAGRLREAHDIICSMSMIPDPVLWQSLLGASEIYSDVEMAEIASREIKEMGVNNDGDFVLLSNVYAAQGRWKDVGRVRDDMESKQVKKIPGLSYIEAKGTIHEFYNSDKSHEQWREIYEKIDEIRFKIREDGYVAQTGLVLHDIGEEEKENALCYHSEKLAVAYGLMMMDGADEESPFGFIGSKMVLALAEIFGNVTKLRGWQF

SEQ ID NO: 31001 - DNA, 2190 bp, Arabidopsis thaliana
  misc_feature (1)..(2190): Ceres Seq. ID no. 4983283
atgggaggaaaatcagagccagcgaaatcggaatccatggcgacgaagccagatctactcaacactagtttcttctcattcaaatccctaaaattgaagacgaaacaacaagagctcttactccgtatctcgatccttggtctcgtctacatcttagctttcatagctcgtctcttcagtgttctccgctacgaatcaatgatccacgaattcgatccgtatttcaactaccgtacgactcttttcctcacagagaaaggcttctacgagttttggaactggttcgattccgagagttggtatcctctaggtcgaatcatcggcggtactctttatcccggtcttatggtcacagctgcgttaatctactggacattgcgatttctccgattcttcgttcatatccgtgaggtttgtgtgttaaccgcaccgtttttcgcgtcgaatacgactctcgttgcgtatttctttggtaaagagctttgggatacaggagctggtcttgttgctgctgttcttatcgctatttgtcctggatacatttctcgttctgtagctggttcgtatgataacgaagctgttgcgattttcgctctgttgctgacgttttatctctttgttaaagcggtgaacactggttcattagcttgggctcttgcctctgcgtttggttacttttatatggtttcagcttggggaggatatgtgtttattatcaacttggttcctctttacgtgttggtgttgttgatcaccggaaggtattcgatgaggctttacattgcttataactgtatgtatatcttggggatgttgctcgcgatgcaaattcgctttgttggttttcaacatgttcaatctggtgaacatatgggtgccatgggtgtcttcttattaatgcaggtgttttacttcttggactgggttaagtaccagctcaatgacaccaagttgttccaaacgtttttgagaataactgtgacatcggctattcttgttggtggtgttgctgtgggtgttggaacagcgtctggctatatatctccatggactggtcgattttactcgttgcttgacccgacttacgcaaaggatcatattcctattattgcatctgtttctgagcatcagcctactgcctggtcgtcattcatgtttgactaccatattctgctctttcttttccctgcgggtctttacttctgtttcaagcgtttgacggatgctacgatatttattgtcatgtatggtctcactagcttgtactttgctggtgttatggttcggcttattctcgtcgctactccagcagtttgtcttatcagtgccatagctgtctctgccactatcaagaatttaacttctctgttaaggacaaaacaaaaggtttctcagactggttccacgaaaggagctggtagttcaaaagcttcttcaaaggttacacttgatcagtctcagcctttccagaagaatggtgccattgctcttcttgttggtgtattttatttgctcagtagatatgctattcactgcacatgggtgacagcagaggcatattcatctccctcaattgtcttagctgcaagaggagcccacgggaacagaatcatctttgatgattaccgcgaggcatactactggcttaggcaaaacactgccactgatgctaagattatgtcgtggtgggactatgggtaccaaatcactgccatgggaaatagaactgtcatcgtcgataacaatacctggaacaacactcacattgctaccgttggacgtgccatgtcttcttatgaagatgatgcgtatgacatcatgaggtcacttgatgtgaactatgtattggtcgtctttggtggtgttactggttattcttcagatgatatcaacaagattggaggtggagtattcccagtgatcaaagaacctgattaccttgtgaatggtgaattccgtgtagacaaaggtgcatcaccgaagatgctgaactgtctcatgtacaagttatgctattacaggttcggtgagctgaccacagaatacggcaagccacccgggtatgatagagcaagaggagtggagatagggaacaaagatatcaaacttgaacacttagaagaagcttacacaacatccaactggatagttcgtatttacagagttaaacctcctacaaataggttgtga

SEQ ID NO: 31002 - protein, 729 aa, Arabidopsis thaliana
  misc_feature (1)..(729): Ceres Seq. ID no. 4983284
MGGKSEPAKSESMATKPDLLNTSFFSFKSLKLKTKQQELLLRISILGLVYILAFIARLFSVLRYESMIHEFDPYFNYRTTLFLTEKGFYEFWNWFDSESWYPLGRIIGGTLYPGLMVTAALIYWTLRFLRFFVHIREVCVLTAPFFASNTTLVAYFFGKELWDTGAGLVAAVLIAICPGYISRSVAGSYDNEAVAIFALLLTFYLFVKAVNTGSLAWALASAFGYFYMVSAWGGYVFIINLVPLYVLVLLITGRYSMRLYIAYNCMYILGMLLAMQIRFVGFQHVQSGEHMGAMGVFLLMQVFYFLDWVKYQLNDTKLFQTFLRITVTSAILVGGVAVGVGTASGYISPWTGRFYSLLDPTYAKDHIPIIASVSEHQPTAWSSFMFDYHILLFLFPAGLYFCFKRLTDATIFIVMYGLTSLYFAGVMVRLILVATPAVCLISAIAVSATIKNLTSLLRTKQKVSQTGSTKGAGSSKASSKVTLDQSQPFQKNGAIALLVGVFYLLSRYAIHCTWVTAEAYSSPSIVLAARGAHGNRIIFDDYREAYYWLRQNTATDAKIMSWWDYGYQITAMGNRTVIVDNNTWNNTHIATVGRAMSSYEDDAYDIMRSLDVNYVLVVFGGVTGYSSDDINKIGGGVFPVIKEPDYLVNGEFRVDKGASPKMLNCLMYKLCYYRFGELTTEYGKPPGYDRARGVEIGNKDIKLEHLEEAYTTSNWIVRIYRVKPPTNRL

SEQ ID NO: 31003 - protein, 717 aa, Arabidopsis thaliana
  misc_feature (1)..(717): Ceres Seq. ID no. 4983285
MATKPDLLNTSFFSFKSLKLKTKQQELLLRISILGLVYILAFIARLFSVLRYESMIHEFDPYFNYRTTLFLTEKGFYEFWNWFDSESWYPLGRIIGGTLYPGLMVTAALIYWTLRFLRFFVHIREVCVLTAPFFASNTTLVAYFFGKELWDTGAGLVAAVLIAICPGYISRSVAGSYDNEAVAIFALLLTFYLFVKAVNTGSLAWALASAFGYFYMVSAWGGYVFIINLVPLYVLVLLITGRYSMRLYIAYNCMYILGMLLAMQIRFVGFQHVQSGEHMGAMGVFLLMQVFYFLDWVKYQLNDTKLFQTFLRITVTSAILVGGVAVGVGTASGYISPWTGRFYSLLDPTYAKDHIPIIASVSEHQPTAWSSFMFDYHILLFLFPAGLYFCFKRLTDATIFIVMYGLTSLYFAGVMVRLILVATPAVCLISAIAVSATIKNLTSLLRTKQKVSQTGSTKGAGSSKASSKVTLDQSQPFQKNGAIALLVGVFYLLSRYAIHCTWVTAEAYSSPSIVLAARGAHGNRIIFDDYREAYYWLRQNTATDAKIMSWWDYGYQITAMGNRTVIVDNNTWNNTHIATVGRAMSSYEDDAYDIMRSLDVNYVLVVFGGVTGYSSDDINKIGGGVFPVIKEPDYLVNGEFRVDKGASPKMLNCLMYKLCYYRFGELTTEYGKPPGYDRARGVEIGNKDIKLEHLEEAYTTSNWIVRIYRVKPPTNRL

SEQ ID NO: 31004 - protein, 663 aa, Arabidopsis thaliana
  misc_feature (1)..(663): Ceres Seq. ID no. 4983286
MIHEFDPYFNYRTTLFLTEKGFYEFWNWFDSESWYPLGRIIGGTLYPGLMVTAALIYWTLRFLRFFVHIREVCVLTAPFFASNTTLVAYFFGKELWDTGAGLVAAVLIAICPGYISRSVAGSYDNEAVAIFALLLTFYLFVKAVNTGSLAWALASAFGYFYMVSAWGGYVFIINLVPLYVLVLLITGRYSMRLYIAYNCMYILGMLLAMQIRFVGFQHVQSGEHMGAMGVFLLMQVFYFLDWVKYQLNDTKLFQTFLRITVTSAILVGGVAVGVGTASGYISPWTGRFYSLLDPTYAKDHIPIIASVSEHQPTAWSSFMFDYHILLFLFPAGLYFCFKRLTDATIFIVMYGLTSLYFAGVMVRLILVATPAVCLISAIAVSATIKNLTSLLRTKQKVSQTGSTKGAGSSKASSKVTLDQSQPFQKNGAIALLVGVFYLLSRYAIHCTWVTAEAYSSPSIVLAARGAHGNRIIFDDYREAYYWLRQNTATDAKIMSWWDYGYQITAMGNRTVIVDNNTWNNTHIATVGRAMSSYEDDAYDIMRSLDVNYVLVVFGGVTGYSSDDINKIGGGVFPVIKEPDYLVNGEFRVDKGASPKMLNCLMYKLCYYRFGELTTEYGKPPGYDRARGVEIGNKDIKLEHLEEAYTTSNWIVRIYRVKPPTNRL

SEQ ID NO: 31005 - DNA, 2439 bp, Arabidopsis thaliana
  misc_feature (1)..(2439): Ceres Seq. ID no. 4983380
atggttaatgtgctggctttcctcccggatgagcttagagaaaagcttatcgatgagcaagaaactagagagaagtttcagagattacacagttatgtgcatgctctttcgactgaagtcgcaatgaagcggttttatggagctctgactacaaaggaagggatttctggttcgggtgttaatgccacaagtgactggggtagctatgttactgagctaagctctcttcttgaaaaatctcctaagattgaaagagtgctcatcgacgacgacaatgctaaaatggctcaatttagacaatcgggaacagatagatttagtgttcgcggcaacggcggaggagcttcttctgatcacgtaacgatcgggatccgaaacggcgtcggtggagctactaaaggtaacaacaacaggtggcgaagatccgtgagagctgataagattcgtcgacttggaatcggttctgttgtgtttgttctttgctttgtgcttcttgttactgttctcgcttactgttatatctctgggtttacttataatagctacgatgataaaggatttgttgattcatatgagggtgattttttgacgaatgtgactagattagatccttcgaaagtgcttgagtttggtcaaggttcagtgattcatggacgagattcgaggtattgggataaagatgatagaagaagagatgatgattataatgaggatgaagtgaaaaaggatgtacaacaagttcataatcctgtgaaggggattggtttgtataatgaagctggaaggaatgagttgaagatgtatgaagctgagtataaagctacgcttgggaaaggtggtcatgagaaaaacaatgagggagttgatagggatcgtgaggatgatgatgcgattgattctcatgatggggatgaatatgttgattctgggcatgaggatgataatgaagaggtgcataaagagaaggttgttcatttggtgaccaagcaagagaatgtggacaaggatgatggaggtgtttcaaaaatgtcacttggggattcttctcttgttagtaagggtggtaagtctgggaaaacatcacgatctgatactaaaagaagaggtcgtcgcagatcttcaggttcatgtgaaatgaagctattgaattctagtcaaccaatagtggagcccttgaatactcgaaaatctgctagattttctttacagtacatagagaaggaagataagcctgatgaagaagaacagtgggagcctagatttgcaggtcatcagagtttacaggagcgagaagattccttcgtggctcaagacaagaaaattcattgcggctttgtcaaaggtcccaaaggatcttcaagcactgggtttgacctgacagaagatgatactaattatatcagtagatgccacatcgctgttagctcatgcatctttggcaattctgatcgtttgaggcctcctgccaacaaaatgataagtcggttgtcgagaaaaaatgtatgcttcattgtgttcgtggacgagattaccatgcaaacactttctgcagaaggacatgccccagacagagcaggattcattggtctgtggaagttggttgtcgtgaagaatcttccttacgcagatatgcggaggcaaggtgagtctcatgtcataacgataactctcattttgatgggtctgactagcacatatgttttccagcagttgcatgtagagaacaggtactcaatctggttggacagcaagttacgacttcagttggacccactactcattctggagtacttcctatggcgtaaaggtcacgagtatgctatatccaatcactatgaccgtcattgtttatgggaagaggttgcacaaaacaagaagctgaacaagtataaccatactgttattaatcaacagtttcagttttacaaggctgatgggctgaccagattcaatgcttcggatccgttcaagcttcttcctagcaatgttccagaggggtctttcatagtacgagctcatactcccatgtcgaacctattctcatgtctttggttcaatgaagtggaacgcttcactccccgggaccagctgagctttgcctatacttaccagaaactaagaaggatgaatcctgataaaccatttaatcttcacatgttcaagatcagacgagaagcgaaaccttatacaagcagcaatacaataaacaactctatgttgtaccaagctgtatccgtcgtgtatagtactttgagactctactgctatattcacatggagaaaagccactttttctttgctccagtgacttggaaactgctacaagaagatccagatgttgttgtacattgggaccgagtctgttgcttgtggcgacaaccagatgaggcggcgttaagagttgaaactttgaaagaagaagaaaaggggcttgattag

SEQ ID NO: 31006 - protein, 812 aa, Arabidopsis thaliana
  misc_feature (1)..(812): Ceres Seq. ID no. 4983381
MVNVLAFLPDELREKLIDEQETREKFQRLHSYVHALSTEVAMKRFYGALTTKEGISGSGVNATSDWGSYVTELSSLLEKSPKIERVLIDDDNAKMAQFRQSGTDRFSVRGNGGGASSDHVTIGIRNGVGGATKGNNNRWRRSVRADKIRRLGIGSVVFVLCFVLLVTVLAYCYISGFTYNSYDDKGFVDSYEGDFLTNVTRLDPSKVLEFGQGSVIHGRDSRYWDKDDRRRDDDYNEDEVKKDVQQVHNPVKGIGLYNEAGRNELKMYEAEYKATLGKGGHEKNNEGVDRDREDDDAIDSHDGDEYVDSGHEDDNEEVHKEKVVHLVTKQENVDKDDGGVSKMSLGDSSLVSKGGKSGKTSRSDTKRRGRRRSSGSCEMKLLNSSQPIVEPLNTRKSARFSLQYIEKEDKPDEEEQWEPRFAGHQSLQEREDSFVAQDKKIHCGFVKGPKGSSSTGFDLTEDDTNYISRCHIAVSSCIFGNSDRLRPPANKMISRLSRKNVCFIVFVDEITMQTLSAEGHAPDRAGFIGLWKLVVVKNLPYADMRRQGESHVITITLILMGLTSTYVFQQLHVENRYSIWLDSKLRLQLDPLLILEYFLWRKGHEYAISNHYDRHCLWEEVAQNKKLNKYNHTVINQQFQFYKADGLTRFNASDPFKLLPSNVPEGSFIVRAHTPMSNLFSCLWFNEVERFTPRDQLSFAYTYQKLRRMNPDKPFNLHMFKIRREAKPYTSSNTINNSMLYQAVSVVYSTLRLYCYIHMEKSHFFFAPVTWKLLQEDPDVVVHWDRVCCLWRQPDEAALRVETLKEEEKGLD

SEQ ID NO: 31007 - protein, 771 aa, Arabidopsis thaliana
  misc_feature (1)..(771): Ceres Seq. ID no. 4983382
MKRFYGALTTKEGISGSGVNATSDWGSYVTELSSLLEKSPKIERVLIDDDNAKMAQFRQSGTDRFSVRGNGGGASSDHVTIGIRNGVGGATKGNNNRWRRSVRADKIRRLGIGSVVFVLCFVLLVTVLAYCYISGFTYNSYDDKGFVDSYEGDFLTNVTRLDPSKVLEFGQGSVIHGRDSRYWDKDDRRRDDDYNEDEVKKDVQQVHNPVKGIGLYNEAGRNELKMYEAEYKATLGKGGHEKNNEGVDRDREDDDAIDSHDGDEYVDSGHEDDNEEVHKEKVVHLVTKQENVDKDDGGVSKMSLGDSSLVSKGGKSGKTSRSDTKRRGRRRSSGSCEMKLLNSSQPIVEPLNTRKSARFSLQYIEKEDKPDEEEQWEPRFAGHQSLQEREDSFVAQDKKIHCGFVKGPKGSSSTGFDLTEDDTNYISRCHIAVSSCIFGNSDRLRPPANKMISRLSRKNVCFIVFVDEITMQTLSAEGHAPDRAGFIGLWKLVVVKNLPYADMRRQGESHVITITLILMGLTSTYVFQQLHVENRYSIWLDSKLRLQLDPLLILEYFLWRKGHEYAISNHYDRHCLWEEVAQNKKLNKYNHTVINQQFQFYKADGLTRFNASDPFKLLPSNVPEGSFIVRAHTPMSNLFSCLWFNEVERFTPRDQLSFAYTYQKLRRMNPDKPFNLHMFKIRREAKPYTSSNTINNSMLYQAVSVVYSTLRLYCYIHMEKSHFFFAPVTWKLLQEDPDVVVHWDRVCCLWRQPDEAALRVETLKEEEKGLD

SEQ ID NO: 31008 - protein, 718 aa, Arabidopsis thaliana
  misc_feature (1)..(718): Ceres Seq. ID no. 4983383
MAQFRQSGTDRFSVRGNGGGASSDHVTIGIRNGVGGATKGNNNRWRRSVRADKIRRLGIGSVVFVLCFVLLVTVLAYCYISGFTYNSYDDKGFVDSYEGDFLTNVTRLDPSKVLEFGQGSVIHGRDSRYWDKDDRRRDDDYNEDEVKKDVQQVHNPVKGIGLYNEAGRNELKMYEAEYKATLGKGGHEKNNEGVDRDREDDDAIDSHDGDEYVDSGHEDDNEEVHKEKVVHLVTKQENVDKDDGGVSKMSLGDSSLVSKGGKSGKTSRSDTKRRGRRRSSGSCEMKLLNSSQPIVEPLNTRKSARFSLQYIEKEDKPDEEEQWEPRFAGHQSLQEREDSFVAQDKKIHCGFVKGPKGSSSTGFDLTEDDTNYISRCHIAVSSCIFGNSDRLRPPANKMISRLSRKNVCFIVFVDEITMQTLSAEGHAPDRAGFIGLWKLVVVKNLPYADMRRQGESHVITITLILMGLTSTYVFQQLHVENRYSIWLDSKLRLQLDPLLILEYFLWRKGHEYAISNHYDRHCLWEEVAQNKKLNKYNHTVINQQFQFYKADGLTRFNASDPFKLLPSNVPEGSFIVRAHTPMSNLFSCLWFNEVERFTPRDQLSFAYTYQKLRRMNPDKPFNLHMFKIRREAKPYTSSNTINNSMLYQAVSVVYSTLRLYCYIHMEKSHFFFAPVTWKLLQEDPDVVVHWDRVCCLWRQPDEAALRVETLKEEEKGLD

SEQ ID NO: 31009 - DNA, 1269 bp, Arabidopsis thaliana
  misc_feature (1)..(1269): Ceres Seq. ID no. 4983857
atgggtggagaagagagatcaggagatggagaaaaaagaggggaagaagtagttgatgctggttctctcttcgtccttaaatccaaaggatgggctgccgggatatcttgtctggtcggaggagcagccgttactttctactcgtacactcttctttctcttactctcgaacaccacgcttctctcggcaaccgttacctccgcttccgtgacatggctcatcacatcctcagtccgaaatggggaaggtactacgttggaccaatacaaatggcggtgtgctatggtgtggttattgccaatgcgctcttgggagggcaatgcctaaaggcaatgtacttggtagtgcagccaaatggggaaatgaaactctttgagtttgtgattatttttggatgcttacttttggttttggcacaattcccatcctttcactctctacgatacatcaactcactgtctctcctcctctgcctcctctacagtgcttctgccgctgctgcatccatctacattggaaaagaaccaaatgcaccagagaaggactatactatagttggtgatccagaaactagagtgtttggaatctttaatgctatggctattattgctactacatacggcaatggcattatacctgaaattcaggcaacaatatcggcaccagtgaaaggaaaaatgatgaaagggttgtgtatgtgttaccttgtagtaataatgacatttttcacagtagccatcacaggatattgggcattcggtaaaaaagccaatggacttatcttcaccaatttcttaaatgccgagacaaaccattactttgtccctacttggtttatttttctcgtcaatctcttcactgtccttcaactttcggccgttgctgtggtatacctacaacctataaacgatattttggaaagtgtgatcagcgatccaacaaagaaagaattctctatccgcaatgtcatccctcgactagttgtgcgttccctcttcgtcgtgatggctacaatcgttgcggcaatgcttccattttttggagatgtaaactccttgttaggcgctttcggttttatacctctagacttcgttcttcctgtagttttcttcaactttactttcaagccgtctaaaaaaagtttcattttttggatcaacactgtgatcgccgtggttttttcgtgtttaggggtgattgctatggtagcggcggttagacagattataatagatgccaatacgtataagttgtttgcggatgtataa

SEQ ID NO: 31010 - protein, 422 aa, Arabidopsis thaliana
  misc_feature (1)..(422): Ceres Seq. ID no. 4983858
MGGEERSGDGEKRGEEVVDAGSLFVLKSKGWAAGISCLVGGAAVTFYSYTLLSLTLEHHASLGNRYLRFRDMAHHILSPKWGRYYVGPIQMAVCYGVVIANALLGGQCLKAMYLVVQPNGEMKLFEFVIIFGCLLLVLAQFPSFHSLRYINSLSLLLCLLYSASAAAASIYIGKEPNAPEKDYTIVGDPETRVFGIFNAMAIIATTYGNGIIPEIQATISAPVKGKMMKGLCMCYLVVIMTFFTVAITGYWAFGKKANGLIFTNFLNAETNHYFVPTWFIFLVNLFTVLQLSAVAVVYLQPINDILESVISDPTKKEFSIRNVIPRLVVRSLFVVMATIVAAMLPFFGDVNSLLGAFGFIPLDFVLPVVFFNFTFKPSKKSFIFWINTVIAVVFSCLGVIAMVAAVRQIIIDANTYKLFADV

SEQ ID NO: 31011 - protein, 351 aa, Arabidopsis thaliana; identical to SEQ ID NO: 28677
  misc_feature (1)..(351): Ceres Seq. ID no. 4983859

SEQ ID NO: 31012 - protein, 332 aa, Arabidopsis thaliana; identical to SEQ ID NO: 28678
  misc_feature (1)..(332): Ceres Seq. ID no. 4983860

SEQ ID NO: 31013 - DNA, 2184 bp, Arabidopsis thaliana
  misc_feature (1)..(2184): Ceres Seq. ID no. 4983896
atgcatccaagtacctttcaaacagaactcaacccgcatacttccacgttattaaaaaaactgactcatcattcacagcaaaggaacctcgtggctggacgtgcagttcatggacagatcatcagaacgggagcatcaacctgcatccaacatgccaatgtccttgtcaacttttatgcaaaatgtggaaaattggccaaagcccactccatctttaacgccataatctgcaaggatgttgtgtcctggaacagtctcatcactggctattctcagaacggcggtatctccagctcctacactgttatgcagctgtttcgtgagatgagagcgcaagatatactgccaaatgcttatacccttgctgggatttttaaggccgagtcgagtcttcaaagttctacagttgggaggcaggctcacgcgctagtggtcaaaatgtcaagttttggggatatatatgttgatacttcgttggtgggcatgtactgtaaagcgggcttggtcgaggatggacttaaagtgttcgcctatatgcctgaaagaaatacttatacatggtctactatggtttctggttatgctacaagaggacgcgttgaagaggcaattaaagtcttcaatttgtttcttagagagaaggaggaaggaagtgatagtgactatgtcttcaccgcggttctcagctcgctggctgcaaccatatacgtaggactaggcaggcaaatccattgcatcacaattaaaaatgggttgcttgggtttgtagctttgagtaatgcgcttgttacaatgtattcaaagtgtgagagcttgaatgaggcatgcaagatgtttgactcgtctggtgacagaaattcgattacatggtcagcaatggtcactggttattctcagaatggggaatcacttgaagcagtaaagcttttctctagaatgttttctgctggaatcaagcccagtgaatacacgattgttggggttcttaatgcatgcagtgacatttgctatctagaagaagggaagcaacttcattctttcttgttaaagttgggatttgaaagacatttatttgcaactactgctttggttgacatgtatgcaaaagccggttgtctagcagatgccagaaaaggttttgactgcctacaagaacgtgatgtggcgctttggacatcgcttattagcgggtatgttcaaaactcagataacgaagaggctttgattctgtaccgcagaatgaaaacagcaggtattatcccaaacgacccaaccatggcaagtgttctaaaagcttgctcttctctagctaccttggagctcggaaagcaagtacacggccacacaatcaagcatgggtttgggcttgaagttccaataggaagcgcactttctacaatgtactcaaagtgtgggagtttagaagatgggaacctcgtctttagaagaactcccaataaagatgttgtgtcttggaacgctatgatctcaggcttgtcccataatggacaaggagatgaggctttggaactgtttgaggagatgttagcagaaggaatggaaccagatgatgtcactttcgtgaacattatatcagcgtgtagccacaaaggttttgtagagagaggctggttttatttcaatatgatgtcagatcagatcgggcttgatccaaaagttgaccactatgcttgtatggttgatctgctgagccgtgcaggacagctcaaagaggcaaaagagttcatcgaatcagctaatattgatcacggtttatgcctttggcggatactattaagcgcatgtaagaaccatgggaaatgtgagctaggagtttacgcaggagagaagctcatggcccttggatcgagagaatcatcaacttatgtgcaattgtcaggcatttacacggctttagggcggatgagagatgtggaacgggtttggaaacacatgagagcaaacggggtgagcaaagaagtgggttgcagttggatcgagctgaagaatcagtaccatgtttttgttgtgggagatacaatgcatccgatgattgaagagacgaaggatttggtttgtttggttagtagacagatgatagaagaaggattcgtaactgtgttggattcgtcttttgtcgaagaagaagaaggaacacaattatctacttctttcataatataa

SEQ ID NO: 31014 - protein, 727 aa, Arabidopsis thaliana
  misc_feature (1)..(727): Ceres Seq. ID no. 4983897
MHPSTFQTELNPHTSTLLKKLTHHSQQRNLVAGRAVHGQIIRTGASTCIQHANVLVNFYAKCGKLAKAHSIFNAIICKDVVSWNSLITGYSQNGGISSSYTVMQLFREMRAQDILPNAYTLAGIFKAESSLQSSTVGRQAHALVVKMSSFGDIYVDTSLVGMYCKAGLVEDGLKVFAYMPERNTYTWSTMVSGYATRGRVEEAIKVFNLFLREKEEGSDSDYVFTAVLSSLAATIYVGLGRQIHCITIKNGLLGFVALSNALVTMYSKCESLNEACKMFDSSGDRNSITWSAMVTGYSQNGESLEAVKLFSRMFSAGIKPSEYTIVGVLNACSDICYLEEGKQLHSFLLKLGFERHLFATTALVDMYAKAGCLADARKGFDCLQERDVALWTSLISGYVQNSDNEEALILYRRMKTAGIIPNDPTMASVLKACSSLATLELGKQVHGHTIKHGFGLEVPIGSALSTMYSKCGSLEDGNLVFRRTPNKDVVSWNAMISGLSHNGQGDEALELFEEMLAEGMEPDDVTFVNIISACSHKGFVERGWFYFNMMSDQIGLDPKVDHYACMVDLLSRAGQLKEAKEFIESANIDHGLCLWRILLSACKNHGKCELGVYAGEKLMALGSRESSTYVQLSGIYTALGRMRDVERVWKHMRANGVSKEVGCSWIELKNQYHVFVVGDTMHPMIEETKDLVCLVSRQMIEEGFVTVLDSSFVEEEEGTQLSTSFII

SEQ ID NO: 31015 - protein, 625 aa, Arabidopsis thaliana
  misc_feature (1)..(625): Ceres Seq. ID no. 4983898
MQLFREMRAQDILPNAYTLAGIFKAESSLQSSTVGRQAHALVVKMSSFGDIYVDTSLVGMYCKAGLVEDGLKVFAYMPERNTYTWSTMVSGYATRGRVEEAIKVFNLFLREKEEGSDSDYVFTAVLSSLAATIYVGLGRQIHCITIKNGLLGFVALSNALVTMYSKCESLNEACKMFDSSGDRNSITWSAMVTGYSQNGESLEAVKLFSRMFSAGIKPSEYTIVGVLNACSDICYLEEGKQLHSFLLKLGFERHLFATTALVDMYAKAGCLADARKGFDCLQERDVALWTSLISGYVQNSDNEEALILYRRMKTAGIIPNDPTMASVLKACSSLATLELGKQVHGHTIKHGFGLEVPIGSALSTMYSKCGSLEDGNLVFRRTPNKDVVSWNAMISGLSHNGQGDEALELFEEMLAEGMEPDDVTFVNIISACSHKGFVERGWFYFNMMSDQIGLDPKVDHYACMVDLLSRAGQLKEAKEFIESANIDHGLCLWRILLSACKNHGKCELGVYAGEKLMALGSRESSTYVQLSGIYTALGRMRDVERVWKHMRANGVSKEVGCSWIELKNQYHVFVVGDTMHPMIEETKDLVCLVSRQMIEEGFVTVLDSSFVEEEEGTQLSTSFII

SEQ ID NO: 31016 - protein, 619 aa, Arabidopsis thaliana
  misc_feature (1)..(619): Ceres Seq. ID no. 4983899
MRAQDILPNAYTLAGIFKAESSLQSSTVGRQAHALVVKMSSFGDIYVDTSLVGMYCKAGLVEDGLKVFAYMPERNTYTWSTMVSGYATRGRVEEAIKVFNLFLREKEEGSDSDYVFTAVLSSLAATIYVGLGRQIHCITIKNGLLGFVALSNALVTMYSKCESLNEACKMFDSSGDRNSITWSAMVTGYSQNGESLEAVKLFSRMFSAGIKPSEYTIVGVLNACSDICYLEEGKQLHSFLLKLGFERHLFATTALVDMYAKAGCLADARKGFDCLQERDVALWTSLISGYVQNSDNEEALILYRRMKTAGIIPNDPTMASVLKACSSLATLELGKQVHGHTIKHGFGLEVPIGSALSTMYSKCGSLEDGNLVFRRTPNKDVVSWNAMISGLSHNGQGDEALELFEEMLAEGMEPDDVTFVNIISACSHKGFVERGWFYFNMMSDQIGLDPKVDHYACMVDLLSRAGQLKEAKEFIESANIDHGLCLWRILLSACKNHGKCELGVYAGEKLMALGSRESSTYVQLSGIYTALGRMRDVERVWKHMRANGVSKEVGCSWIELKNQYHVFVVGDTMHPMIEETKDLVCLVSRQMIEEGFVTVLDSSFVEEEEGTQLSTSFII

SEQ ID NO: 31017 - DNA, 3024 bp, Arabidopsis thaliana
  misc_feature (1)..(3024): Ceres Seq. ID no. 4983908
atggtgatgaaagtttcaggtttttctgactttgaagctcttttggagcttaagaaaggttttcagggtgacccttctcgaaaagttcttacttcatgggatgctaaagctttatcctctgataggtgtccgttaaactggtacggagttacttgtagtagcggaggtgttacttctattgatttgaatggtttcggtctgcttgggagtttcagttttccagtcattgttggtctgagaatgcttcagaatttgtcgattgcgaataatcagtttagtggaactctctctaacattggttcgttaacgtctcttaagtacttggatgtttcgggtaacttgttccatggcgcattaccttctggaattgagaatttgaggaaccttgagtttgtgaatctctctggtaacaacaacttgggaggagtgattccttctggttttgggagtcttgccaagttgaagtaccttgatttgcaaggcaacagtttctctggggaagtgatgagtctgttttcacagctaattagtgtggagtatgtagatataagcaggaacaacttctcgggttcgcttgatctgggtctagcaaagtcaagctttgtttcctcgattcgtcatttgaacgtaagtgggaattctttggtaggggagctatttgctcatgatggtatcccctttttcgatagcttagaggtgtttgatgctagcagcaatcaattgtctggttctgttccagtcttcagctttgttgtctctctcaagattcttcggttacaagacaatcagttgtcggcttctttaccaccgggccttctgcaagagagttcaaccatcttaactgaccttgatcttagcctcaatcaacttgaaggtcctatcggaagtataacctcttcaacactagagaagctcaatttgtcttcaaatagactatcgggatcattacctttgaaagttggacattgtgccattattgatctgagtaacaataagatatcaggagaattgtcaaggatacagaattggggagattctgtagaaattattcggttgagttcaaactcactcactggaacactacctggccaaacttctcaattcctgaggctgacttcactcaaggctgctaacaactcgttgcagggtgtactaccatttattttaggaacgtatcctgagctgaaagagattgatctcagtcacaaccagcttagtggcgtcataccgagtaatctgttcatatctgcaaagttgacggaactcaacttgtcaaacaataatttctctggttctcttcctcttcaagatgcaagtactgtgggaaaccttagcttgaccaatattggtctgtctcataactcgttaggtggagttctctcagaggaactaactcgcttccacaatctgatttctcttgacctttcttataacaactttgaagggaatatccctgatggccttccagacagcctaaagatgttcactgtctctgccaataatctctctggaaatgtgccggagaatcttagacggtttccagattcagcgtttcatccagggaacgctttactgaatgtccccatttctctaccaaaagataaaacagatataaccttacggaagcatgggtatcatatgaagacttctgtaaaggcagccctgatcataggcttggtcgtgggtactgctctacttgctcttgtttgcgtaatgtttcattttatgttgagaaagcaacatgatgaagagaagtcggatgtgactggagaaaagagtattgttccaaaaactgaaccttcttcttccaatgtgattgcagcaaagaacagtgtacaggaaaatgaatcttcgtcttctactacttctactccctcaatcaaggccaagctaccggtttcttcttcacgtttctcccaatatagtgactctgagaattcttcaccatttttgaaagaacctaacgaggagcttcactctgaatccagaaaagatgaaatcttgtcatcccaagtatcttcttcaactccatcgctgcctaaaatccagaattcaccagataatcctacgtctcgccagacttctatgagattggatgggaacctgtatattttcgacagttctcttaagcttactgcagaggaactgtctcgtgctccggctgaagctatcggaaggagttgccatggaacgctgtacagggcagtgcttaattctgattctgtattagcggtcaaatggttaagagaagggactgcaaaaggtaagaaggaatttgcaagggagataaagaaacttgggaacatcaatcacccaaatcttgtttctcttcaggcttactattggggtccaaaagaacacgagaagctcatcatatcaagatacatggatgcaccctgtttagctttctatctccaagaggctggacagctaaacctcccaccattgttactggaaaaccgtcttaaaattactctggacatagccagttgtcttagttacctgcacaatggggaagcaattccacacgggaatctaaaatcaactaatgttctcctgaaacctcctgaactcactgcacacctaacagattatagtcttcatcgattaatcacaccagaagccacgtcagagcaagtcttgaacgcagctgcccttggctactgccctccagagtttgccagctcgagtaaaccgtacccttctctgaaaagcgatgtctatgcctttggagtcattttgttagagcttctaacaggaaaagtttcgggagatatagtgtgcagtgatccaggtgtcgttgaactcactgaatgggttctactgcttgtgggacaaaaccgtgcaactgagtgttttgatccatcgattgttggatcacagggctcaaggaatccctttggggttcttactgatgtcttgcaggttgctctgagctgtatctcaccagcaccagagagaccggatatgaagctagtctctcaagagctctccagaattgttctcaagaggacagcaatctag

SEQ ID NO: 31018 - protein, 1007 aa, Arabidopsis thaliana
  misc_feature (1)..(1007): Ceres Seq. ID no. 4983909
MVMKVSGFSDFEALLELKKGFQGDPSRKVLTSWDAKALSSDRCPLNWYGVTCSSGGVTSIDLNGFGLLGSFSFPVIVGLRMLQNLSIANNQFSGTLSNIGSLTSLKYLDVSGNLFHGALPSGIENLRNLEFVNLSGNNNLGGVIPSGFGSLAKLKYLDLQGNSFSGEVMSLFSQLISVEYVDISRNNFSGSLDLGLAKSSFVSSIRHLNVSGNSLVGELFAHDGIPFFDSLEVFDASSNQLSGSVPVFSFVVSLKILRLQDNQLSASLPPGLLQESSTILTDLDLSLNQLEGPIGSITSSTLEKLNLSSNRLSGSLPLKVGHCAIIDLSNNKISGELSRIQNWGDSVEIIRLSSNSLTGTLPGQTSQFLRLTSLKAANNSLQGVLPFILGTYPELKEIDLSHNQLSGVIPSNLFISAKLTELNLSNNNFSGSLPLQDASTVGNLSLTNIGLSHNSLGGVLSEELTRFHNLISLDLSYNNFEGNIPDGLPDSLKMFTVSANNLSGNVPENLRRFPDSAFHPGNALLNVPISLPKDKTDITLRKHGYHMKTSVKAALIIGLVVGTALLALVCVMFHFMLRKQHDEEKSDVTGEKSIVPKTEPSSSNVIAAKNSVQENESSSSTTSTPSIKAKLPVSSSRFSQYSDSENSSPFLKEPNEELHSESRKDEILSSQVSSSTPSLPKIQNSPDNPTSRQTSMRLDGNLYIFDSSLKLTAEELSRAPAEAIGRSCHGTLYRAVLNSDSVLAVKWLREGTAKGKKEFAREIKKLGNINHPNLVSLQAYYWGPKEHEKLIISRYMDAPCLAFYLQEAGQLNLPPLLLENRLKITLDIASCLSYLHNGEAIPHGNLKSTNVLLKPPELTAHLTDYSLHRLITPEATSEQVLNAAALGYCPPEFASSSKPYPSLKSDVYAFGVILLELLTGKVSGDIVCSDPGVVELTEWVLLLVGQNRATECFDPSIVGSQGSRNPFGVLTDVLQVALSCISPAPERPDMKLVSQELSRIVLKRTAI

SEQ ID NO: 31019 - protein, 1005 aa, Arabidopsis thaliana
  misc_feature (1)..(1005): Ceres Seq. ID no. 4983910
MKVSGFSDFEALLELKKGFQGDPSRKVLTSWDAKALSSDRCPLNWYGVTCSSGGVTSIDLNGFGLLGSFSFPVIVGLRMLQNLSIANNQFSGTLSNIGSLTSLKYLDVSGNLFHGALPSGIENLRNLEFVNLSGNNNLGGVIPSGFGSLAKLKYLDLQGNSFSGEVMSLFSQLISVEYVDISRNNFSGSLDLGLAKSSFVSSIRHLNVSGNSLVGELFAHDGIPFFDSLEVFDASSNQLSGSVPVFSFVVSLKILRLQDNQLSASLPPGLLQESSTILTDLDLSLNQLEGPIGSITSSTLEKLNLSSNRLSGSLPLKVGHCAIIDLSNNKISGELSRIQNWGDSVEIIRLSSNSLTGTLPGQTSQFLRLTSLKAANNSLQGVLPFILGTYPELKEIDLSHNQLSGVIPSNLFISAKLTELNLSNNNFSGSLPLQDASTVGNLSLTNIGLSHNSLGGVLSEELTRFHNLISLDLSYNNFEGNIPDGLPDSLKMFTVSANNLSGNVPENLRRFPDSAFHPGNALLNVPISLPKDKTDITLRKHGYHMKTSVKAALIIGLVVGTALLALVCVMFHFMLRKQHDEEKSDVTGEKSIVPKTEPSSSNVIAAKNSVQENESSSSTTSTPSIKAKLPVSSSRFSQYSDSENSSPFLKEPNEELHSESRKDEILSSQVSSSTPSLPKIQNSPDNPTSRQTSMRLDGNLYIFDSSLKLTAEELSRAPAEAIGRSCHGTLYRAVLNSDSVLAVKWLREGTAKGKKEFAREIKKLGNINHPNLVSLQAYYWGPKEHEKLIISRYMDAPCLAFYLQEAGQLNLPPLLLENRLKITLDIASCLSYLHNGEAIPHGNLKSTNVLLKPPELTAHLTDYSLHRLITPEATSEQVLNAAALGYCPPEFASSSKPYPSLKSDVYAFGVILLELLTGKVSGDIVCSDPGVVELTEWVLLLVGQNRATECFDPSIVGSQGSRNPFGVLTDVLQVALSCISPAPERPDMKLVSQELSRIVLKRTAI

SEQ ID NO: 31020 - protein, 927 aa, Arabidopsis thaliana
  misc_feature (1)..(927): Ceres Seq. ID no. 4983911
MLQNLSIANNQFSGTLSNIGSLTSLKYLDVSGNLFHGALPSGIENLRNLEFVNLSGNNNLGGVIPSGFGSLAKLKYLDLQGNSFSGEVMSLFSQLISVEYVDISRNNFSGSLDLGLAKSSFVSSIRHLNVSGNSLVGELFAHDGIPFFDSLEVFDASSNQLSGSVPVFSFVVSLKILRLQDNQLSASLPPGLLQESSTILTDLDLSLNQLEGPIGSITSSTLEKLNLSSNRLSGSLPLKVGHCAIIDLSNNKISGELSRIQNWGDSVEIIRLSSNSLTGTLPGQTSQFLRLTSLKAANNSLQGVLPFILGTYPELKEIDLSHNQLSGVIPSNLFISAKLTELNLSNNNFSGSLPLQDASTVGNLSLTNIGLSHNSLGGVLSEELTRFHNLISLDLSYNNFEGNIPDGLPDSLKMFTVSANNLSGNVPENLRRFPDSAFHPGNALLNVPISLPKDKTDITLRKHGYHMKTSVKAALIIGLVVGTALLALVCVMFHFMLRKQHDEEKSDVTGEKSIVPKTEPSSSNVIAAKNSVQENESSSSTTSTPSIKAKLPVSSSRFSQYSDSENSSPFLKEPNEELHSESRKDEILSSQVSSSTPSLPKIQNSPDNPTSRQTSMRLDGNLYIFDSSLKLTAEELSRAPAEAIGRSCHGTLYRAVLNSDSVLAVKWLREGTAKGKKEFAREIKKLGNINHPNLVSLQAYYWGPKEHEKLIISRYMDAPCLAFYLQEAGQLNLPPLLLENRLKITLDIASCLSYLHNGEAIPHGNLKSTNVLLKPPELTAHLTDYSLHRLITPEATSEQVLNAAALGYCPPEFASSSKPYPSLKSDVYAFGVILLELLTGKVSGDIVCSDPGVVELTEWVLLLVGQNRATECFDPSIVGSQGSRNPFGVLTDVLQVALSCISPAPERPDMKLVSQELSRIVLKRTAI

SEQ ID NO: 31021 - DNA, 552 bp, Arabidopsis thaliana
  misc_feature (1)..(552): Ceres Seq. ID no. 4983933
atgtggaagaatcgacgcggagggtttcttctacttggatcaacgacattgttatggttcctctttgagaaatgtggatacagtttcttcccctttgttgttaatactcagcttctctccgtcgttatactcttcctctgggccaaatctgctattctcttcaataggcctatgcctcaactacctaatcttgaaatcactgaggaatttgtgtttatggtggctgatgctatacgagtctggattaataccgtgctcgctgttgctcgtgagatttacgtgggaagaaatgcaaagcaactctttcgggtgagtgttgtgttgtggacagtatcatttgttggaaatttcttaaacttcctcacaatactctatcttggtgttgttctgagtctgttgattccctttttgtacgagagataccaggatcttattgacgagaagctatctttaactcatcgagtcattcagacacagtacaggaagatcgatgaaagattactacagaagattattgctaagcccacaaataagataaagaagatgcaatag

SEQ ID NO: 31022 - protein, 183 aa, Arabidopsis thaliana; identical to SEQ ID NO: 28579
  misc_feature (1)..(183): Ceres Seq. ID no. 4983934

SEQ ID NO: 31023 - protein, 126 aa, Arabidopsis thaliana; identical to SEQ ID NO: 28580
  misc_feature (1)..(126): Ceres Seq. ID no. 4983935

SEQ ID NO: 31024 - protein, 111 aa, Arabidopsis thaliana
  misc_feature (1)..(111): Ceres Seq. ID no. 4983936
MVADAIRVWINTVLAVAREIYVGRNAKQLFRVSVVLWTVSFVGNFLNFLTILYLGVVLSLLIPFLYERYQDLIDEKLSLTHRVIQTQYRKIDERLLQKIIAKPTNKIKKMQ

SEQ ID NO: 31025 - DNA, 2742 bp, Arabidopsis thaliana
  misc_feature (1)..(2742): Ceres Seq. ID no. 4984244
atgaaagttcgtaggaaacttggtggtggttgcggcggagacgtcgttgtttcatggcggacgttcttttggttcgtgattctgtttgtcttctccttcgttctcttctccaccatgtttatttttaaggggaagtttcgtccggtggttcgttcgacgataagcttctcaacggctgttacggcaagggcggttttccgtgagtctatatcgtcttctccggcggttacgattcgtgaagcggtgaaattacctgaacaaactctggttttcctaaaataccctcagtctcgtcggttatttacaaaagacgatctcatttgcgttttctccggttcgtcgaagctacggaaagtgtatccgacggctgtggacagagacaaatttggaggtcagatcgtacggtgtcctgagacgccacgtggctacaccatttcgcttgccgtttcgagatggacgaccgatgatcatctcccggctggaccaactcaccggtatgattggctggtttacgacgccgtgatcgactacgataactctacggtggtttttgtcaaggggcttaatctacggccaggaagagttgctgacgtgtcgagatatgagtgcgtgtacggttgggatttcgcgaaacataatcggttaataagatcagatgtcatcactgcggctcaggagatcgtacggtgtagaacaccgttagctgtgttagacggcccaaaagcggcccgtgggcctgttaaagtctcggttagaatcaaaggaggaaccggaatgcttccttctatcgctcagccggttcggatcattaacccgccgcgaaagaaaccctttcaaatgtgcgtttgcaccatgacccgaaacgcagccgcggttttgagagagtgggtgatgtatcacgccggaattggcgttcaacggtggttcatctatgacaacaacagcgacgacgatatcatcgccgagatcgagaatctcgaaagacgtggttacaacatctctagacatttctggccgtggattaaaactcaggaagccggattctctaattgcgcgatccgtgcaaagagcgattgcgattggattgcgtttatcgacgtcgacgagttcttctacatcccatccggtgaaactctaacttccgtcatcagaaattacacaaccaccgactcaatcggtgaaattcgaacaccttgccacagtttcgggccatcgggtttgagatctcggcctcggagtggagtcacgtcgggatacacttgccgtgtggtgttaccggagagacacaagagcataatccggccggaagcgatgaacgcgacgctgataaacgttgttcaccattttcacctcagagatggattcacgtttgctgacatggataaggatataatggtaatcaaccactacaagtatcaggtgtgggaggttttcaaagagaagttttatcggcgagtcgcgacgtacgtagcggattggcaaaacgaagagaatgtcgggtcaagagatcgagcacccggtttaggaacccgacccgttgaaccatctgattgggctgagagattctgtgaggttaatgatacggggcttagagatcaagtgtttgagaagttcaaagacaaaaaaacgcagcgtttagtttgggaaaaagcggaagaagacgacaatatccagagaatggtgagtgaaacaccattgagagttactaatcgatctggagatggatcaaatggatcaaaggaagtatcgatcgcgagagagaagaatggtgaaaacgcagagatattcatcagcccgagattcaaatcagcggcggctatggcgggttgggacgaagaagatctgataatcgctagctttgtggtagatgatactcctgaaagaagttcttcaaagcgaaggagacgttccaatttgttgtttaaatcaaccccaccttctggttcttcaagaaggaatcagcgtgttaagcaaagtcttgttccgttacctgttattgatcttgataaagtaatcagacatgaagaagaaaaatctgcagagaagaagaaaaagaagagagagatggaaacagaaacaaaagaagagaagaaaatagataaagatgagaagagtttgtcagatcatgttgtgcttccttgcatagataagcttcgagatgaattgtcttgcgcgatttgtcttgagatttgctttgaacctagtactacaacttgtggacacagcttctgcaaaaagtgtttgcgatctgcggcggataagtgtggaaggaaatgccctaaatgcaggcaactaataggaaatggaagatattgtactgtcaatacggttctttggaacacaatccagcttttgttccctaaagaagtcgaagcacagagagctgcttctgctaacttgaaaggcaaggagacaccgagtcctagaaatccgaatcaaaggctaagaagcagaaacagggaaactgcattgtttcaagagaggttacaaagagaggatatttcgagattgcttgtatctgaagagagaagtgagaggagcgaaagaaggaggagaagtacaagtatgaggttggatcaaaatagggatgcagcattagcgatgcggttacagcgacaggagttcgcatcagcttttggcgcaacgacggctgaaacttcttcttcatcggtttctactctgtcgcgagcaagagctaacctgcaagctatggcgtcaagagctgttcgcaggcaaggatga

SEQ ID NO: 31026 - protein, 913 aa, Arabidopsis thaliana
  misc_feature (1)..(913): Ceres Seq. ID no. 4984245
MKVRRKLGGGCGGDVVVSWRTFFWFVILFVFSFVLFSTMFIFKGKFRPVVRSTISFSTAVTARAVFRESISSSPAVTIREAVKLPEQTLVFLKYPQSRRLFTKDDLICVFSGSSKLRKVYPTAVDRDKFGGQIVRCPETPRGYTISLAVSRWTTDDHLPAGPTHRYDWLVYDAVIDYDNSTVVFVKGLNLRPGRVADVSRYECVYGWDFAKHNRLIRSDVITAAQEIVRCRTPLAVLDGPKAARGPVKVSVRIKGGTGMLPSIAQPVRIINPPRKKPFQMCVCTMTRNAAAVLREWVMYHAGIGVQRWFIYDNNSDDDIIAEIENLERRGYNISRHFWPWIKTQEAGFSNCAIRAKSDCDWIAFIDVDEFFYIPSGETLTSVIRNYTTTDSIGEIRTPCHSFGPSGLRSRPRSGVTSGYTCRVVLPERHKSIIRPEAMNATLINVVHHFHLRDGFTFADMDKDIMVINHYKYQVWEVFKEKFYRRVATYVADWQNEENVGSRDRAPGLGTRPVEPSDWAERFCEVNDTGLRDQVFEKFKDKKTQRLVWEKAEEDDNIQRMVSETPLRVTNRSGDGSNGSKEVSIAREKNGENAEIFISPRFKSAAAMAGWDEEDLIIASFVVDDTPERSSSKRRRRSNLLFKSTPPSGSSRRNQRVKQSLVPLPVIDLDKVIRHEEEKSAEKKKKKREMETETKEEKKIDKDEKSLSDHVVLPCIDKLRDELSCAICLEICFEPSTTTCGHSFCKKCLRSAADKCGRKCPKCRQLIGNGRYCTVNTVLWNTIQLLFPKEVEAQRAASANLKGKETPSPRNPNQRLRSRNRETALFQERLQREDISRLLVSEERSERSERRRRSTSMRLDQNRDAALAMRLQRQEFASAFGATTAETSSSSVSTLSRARANLQAMASRAVRRQG

SEQ ID NO: 31027 - protein, 875 aa, Arabidopsis thaliana
  misc_feature (1)..(875): Ceres Seq. ID no. 4984246
MFIFKGKFRPVVRSTISFSTAVTARAVFRESISSSPAVTIREAVKLPEQTLVFLKYPQSRRLFTKDDLICVFSGSSKLRKVYPTAVDRDKFGGQIVRCPETPRGYTISLAVSRWTTDDHLPAGPTHRYDWLVYDAVIDYDNSTVVFVKGLNLRPGRVADVSRYECVYGWDFAKHNRLIRSDVITAAQEIVRCRTPLAVLDGPKAARGPVKVSVRIKGGTGMLPSIAQPVRIINPPRKKPFQMCVCTMTRNAAAVLREWVMYHAGIGVQRWFIYDNNSDDDIIAEIENLERRGYNISRHFWPWIKTQEAGFSNCAIRAKSDCDWIAFIDVDEFFYIPSGETLTSVIRNYTTTDSIGEIRTPCHSFGPSGLRSRPRSGVTSGYTCRVVLPERHKSIIRPEAMNATLINVVHHFHLRDGFTFADMDKDIMVINHYKYQVWEVFKEKFYRRVATYVADWQNEENVGSRDRAPGLGTRPVEPSDWAERFCEVNDTGLRDQVFEKFKDKKTQRLVWEKAEEDDNIQRMVSETPLRVTNRSGDGSNGSKEVSIAREKNGENAEIFISPRFKSAAAMAGWDEEDLIIASFVVDDTPERSSSKRRRRSNLLFKSTPPSGSSRRNQRVKQSLVPLPVIDLDKVIRHEEEKSAEKKKKKREMETETKEEKKIDKDEKSLSDHVVLPCIDKLRDELSCAICLEICFEPSTTTCGHSFCKKCLRSAADKCGRKCPKCRQLIGNGRYCTVNTVLWNTIQLLFPKEVEAQRAASANLKGKETPSPRNPNQRLRSRNRETALFQERLQREDISRLLVSEERSERSERRRRSTSMRLDQNRDAALAMRLQRQEFASAFGATTAETSSSSVSTLSRARANLQAMASRAVRRQG

SEQ ID NO: 31028 - protein, 655 aa, Arabidopsis thaliana
  misc_feature (1)..(655): Ceres Seq. ID no. 4984247
MLPSIAQPVRIINPPRKKPFQMCVCTMTRNAAAVLREWVMYHAGIGVQRWFIYDNNSDDDIIAEIENLERRGYNISRHFWPWIKTQEAGFSNCAIRAKSDCDWIAFIDVDEFFYIPSGETLTSVIRNYTTTDSIGEIRTPCHSFGPSGLRSRPRSGVTSGYTCRVVLPERHKSIIRPEAMNATLINVVHHFHLRDGFTFADMDKDIMVINHYKYQVWEVFKEKFYRRVATYVADWQNEENVGSRDRAPGLGTRPVEPSDWAERFCEVNDTGLRDQVFEKFKDKKTQRLVWEKAEEDDNIQRMVSETPLRVTNRSGDGSNGSKEVSIAREKNGENAEIFISPRFKSAAAMAGWDEEDLIIASFVVDDTPERSSSKRRRRSNLLFKSTPPSGSSRRNQRVKQSLVPLPVIDLDKVIRHEEEKSAEKKKKKREMETETKEEKKIDKDEKSLSDHVVLPCIDKLRDELSCAICLEICFEPSTTTCGHSFCKKCLRSAADKCGRKCPKCRQLIGNGRYCTVNTVLWNTIQLLFPKEVEAQRAASANLKGKETPSPRNPNQRLRSRNRETALFQERLQREDISRLLVSEERSERSERRRRSTSMRLDQNRDAALAMRLQRQEFASAFGATTAETSSSSVSTLSRARANLQAMASRAVRRQG

SEQ ID NO: 31029 - DNA, 1692 bp, Arabidopsis thaliana
  misc_feature (1)..(1692): Ceres Seq. ID no. 4984414
atggcagcaatgatcacctttgactttcaaaacagcttcatcttcatcctcttttttctcttctctctcctttgttactctctcttcttcaggaaaccaaagggctcacgagctggccgtgatcttcctccgagccctccttcttttcctgtaattggtcatcttcaccttcttctctctgctcttgttcacaagtcttttcaaaacatctcctctaagtatggacctcttctccatctccgcgtcttccacattcccatagtcctcgcctcctcggcctcagtggcctacgagatcttcaaggcccaagatgtgaatgtctcctctcgcggtcacgctccagtcggggagtctctctggtttggatcgtctagcttcttcttcgctccctatggagattactttaaatttatgaggaagctcatagccacaaagcttcttggaccacaggcactcgagcgttcacgaaaaatccgtgcagatgagctagatcggttttacaaaaccttgcttgacaaggcgatgaagaaggagagtgttgagatcggtgaggaagcagcgaagctcaataacaatatcatctgcaagatgatcatggggaggagttgttcagaggagaatggtgaggcggagaaattcagacacttggtgatcgagtcgatggctttgacaaagcaaatcttctttggtatgatctttcacaaaccgcttaaaaagctcgggatctcactgttccaaaaggatatactaagtctttcccgcaagttcgacgagttgctggagaagattctttttgaacacgaagagaaaaaggcggagcacaatcaagctaatgacatgatggattttttgttggaagcttatggagacgaaaatgcagagtataaaatcacaagaaaccatatcaagtccttgttcgtggatcttgtcattgcagggactgacacctcggtgcaagcaacacagtggacaatgggggagctcattaacaaccctaagattcttcagagattgagagaagaaatcgaatcggttgtagggaacacaagattaattcaagaaaatgatttaccaaacctcccttacttgcaagcggtagtcaaagaagggctaagattgcatccgccggggtctatctcggtaaggatgtttcaagaaaggtgtgaactcaaagggttctacataccggagaagacattacttgttgttaatacttatgctataatgagagatcctaatttctgggaagatcctgaggagtttaaacctgagaggtttatagcatcttcaagatcagagcaagaggacgaggtaagagaggaagtcttgaaatacattcctttctccgcgggaaggagaggctgtcctggatcaaatctagcttatatctctctaggaatcgtgattggggtaatggtgcagtgctttgattggagaattgaaggagagaaagtaaacatgaatgaggctgctgaaacaactgcgttgtccatggctcagcctcttaagtgcactcctgtttctcgaaccaaaaaccctttgccatcaatggccggcgagatcttcagggcccacgacatgaacgtatcctctcgcggtgctgctgcgatagatgagtccctcgtgtttggatcttctggtgtcgtctacgctccctatggagataacttgaagttcgtgaagaagaaataa

SEQ ID NO: 31030 - protein, 563 aa, Arabidopsis thaliana
  misc_feature (1)..(563): Ceres Seq. ID no. 4984415
MAAMITFDFQNSFIFILFFLFSLLCYSLFFRKPKGSRAGRDLPPSPPSFPVIGHLHLLLSALVHKSFQNISSKYGPLLHLRVFHIPIVLASSASVAYEIFKAQDVNVSSRGHAPVGESLWFGSSSFFFAPYGDYFKFMRKLIATKLLGPQALERSRKIRADELDRFYKTLLDKAMKKESVEIGEEAAKLNNNIICKMIMGRSCSEENGEAEKFRHLVIESMALTKQIFFGMIFHKPLKKLGISLFQKDILSLSRKFDELLEKILFEHEEKKAEHNQANDMMDFLLEAYGDENAEYKITRNHIKSLFVDLVIAGTDTSVQATQWTMGELINNPKILQRLREEIESVVGNTRLIQENDLPNLPYLQAVVKEGLRLHPPGSISVRMFQERCELKGFYIPEKTLLVVNTYAIMRDPNFWEDPEEFKPERFIASSRSEQEDEVREEVLKYIPFSAGRRGCPGSNLAYISLGIVIGVMVQCFDWRIEGEKVNMNEAAETTALSMAQPLKCTPVSRTKNPLPSMAGEIFRAHDMNVSSRGAAAIDESLVFGSSGVVYAPYGDNLKFVKKK

SEQ ID NO: 31031 - protein, 560 aa, Arabidopsis thaliana
  misc_feature (1)..(560): Ceres Seq. ID no. 4984416
MITFDFQNSFIFILFFLFSLLCYSLFFRKPKGSRAGRDLPPSPPSFPVIGHLHLLLSALVHKSFQNISSKYGPLLHLRVFHIPIVLASSASVAYEIFKAQDVNVSSRGHAPVGESLWFGSSSFFFAPYGDYFKFMRKLIATKLLGPQALERSRKIRADELDRFYKTLLDKAMKKESVEIGEEAAKLNNNIICKMIMGRSCSEENGEAEKFRHLVIESMALTKQIFFGMIFHKPLKKLGISLFQKDILSLSRKFDELLEKILFEHEEKKAEHNQANDMMDFLLEAYGDENAEYKITRNHIKSLFVDLVIAGTDTSVQATQWTMGELINNPKILQRLREEIESVVGNTRLIQENDLPNLPYLQAVVKEGLRLHPPGSISVRMFQERCELKGFYIPEKTLLVVNTYAIMRDPNFWEDPEEFKPERFIASSRSEQEDEVREEVLKYIPFSAGRRGCPGSNLAYISLGIVIGVMVQCFDWRIEGEKVNMNEAAETTALSMAQPLKCTPVSRTKNPLPSMAGEIFRAHDMNVSSRGAAAIDESLVFGSSGVVYAPYGDNLKFVKKK

SEQ ID NO: 31032 - protein, 426 aa, Arabidopsis thaliana
  misc_feature (1)..(426): Ceres Seq. ID no. 4984417
MRKLIATKLLGPQALERSRKIRADELDRFYKTLLDKAMKKESVEIGEEAAKLNNNIICKMIMGRSCSEENGEAEKFRHLVIESMALTKQIFFGMIFHKPLKKLGISLFQKDILSLSRKFDELLEKILFEHEEKKAEHNQANDMMDFLLEAYGDENAEYKITRNHIKSLFVDLVIAGTDTSVQATQWTMGELINNPKILQRLREEIESVVGNTRLIQENDLPNLPYLQAVVKEGLRLHPPGSISVRMFQERCELKGFYIPEKTLLVVNTYAIMRDPNFWEDPEEFKPERFIASSRSEQEDEVREEVLKYIPFSAGRRGCPGSNLAYISLGIVIGVMVQCFDWRIEGEKVNMNEAAETTALSMAQPLKCTPVSRTKNPLPSMAGEIFRAHDMNVSSRGAAAIDESLVFGSSGVVYAPYGDNLKFVKKK

SEQ ID NO: 31033 - DNA, 2133 bp, Arabidopsis thaliana
  misc_feature (1)..(2133): Ceres Seq. ID no. 4984473
atgatgatcgggaagttgtggagatctgtgggaaccgtcggaaagtttgatggtcgttacgacggcgtgaggacgatggttggaaaagcctcgaaccgagctggtgttcatgtcacagatactgtacttttcgaagagacgagtttcgaattttcgccttctctcactcctgagctgaatgaatttccaatgccttctttagatgttatcactccacaagcttatcttactccactggggtctcagagtatcaaccatgctaaatttttacaaatcccatggagacaatttgtcttcacaaagcctttaggtctctctaaatcaaccaaactcgacgaagccgtgacattgatagagaattcatcatcctcgccgtccaatctctccactcccgaagcttacacagaccttcttcatgcttgtatctccgctaaatcactccaccatggtataaaaatatgttctttgattctcaacaatcctagtctccgtcacaaccccaaattgctaagcaagctcattaccctattctcggtttgtcgccgattggatcttgctcggaaaatctttgacgatgtaactgattcgagtctacttactgagaaagtctgggcagctatggcgattgggtattctagaaacgggtcaccaagagacgctttgatcgtctatgtggatatgttgtgtagcttcattgagcctgggaatttttcgatatccgtggcgttgaaagcgtgcgtggatttgaaagatcttcgggttggtagaggaatccatgcccagattgtgaaacgaaaggagaaggttgaccaagtagtgtataatgtgctcttgaagctttatatggaaagtggcttatttgatgatgcacgtaaggtgttcgatggaatgtctgagagaaatgttgttacttggaattctttaatttcggtactcagtaagaaagttcgggttcatgagatgtttaatctgttcaggaagatgcaggaagagatgatcgggtttagttgggcgacgttgacgacaatattacccgcttgttcacgtgtcgctgctcttctcaccgggaaagagattcatgcacagattctgaaatcgaaagagaaacctgatgttccattgcttaattcattgatggatatgtatgggaaatgtggagaggttgagtattctcggagagtctttgatgtgatgttaactaaggatttggcttcatggaacataatgctaaactgttatgcaatcaacggaaatattgaagaagtgataaatctgtttgaatggatgatagagtcaggcgttgcaccagatgggattacctttgttgctttgttatctgggtgtagcgatacagggcttacggaatatggtctaagtttgtttgaacgcatgaaaacggagttcagagtttcaccggctttggagcattatgcttgtttggttgacatcttggggcgagctggtaagatcaaagaagcagtgaaggtgatagaaacaatgccatttaagccaagtgcgtccatttggggatcactgctcaactcttgcaggcttcatgggaatgtttcagtgggagagattgcagcaaaagagttgtttgttcttgaacctcataatccagggaactacgttatggtttctaacatatatgctgatgcaaagatgtgggacaatgtggataagattcgagagatgatgaaacaaagaggggtcaaaaaggaagctggttgcagttgggtacaggttaaagacaagattcaaatctttgttgcaggaggtggttatgagtttcgtaattctgatgagtataagaaagtatggacagaactacaagaagcaattgaaaaatccggttattcgcctaatacgagtgtggtgcttcatgatgttgatgaagaaaccaaagcaaattgggtttgtggacacagcgagagactcgcgacaacctactccctaatccacacaggtgaaggggttccaattaggattaccaagaatctcagagtatgtgcagactgtcattcatggatgaagattgtgtcacaagtaactaggagagtcatagtcctcagagacacaaaacgattccaccatttcgtcgacggaatctgctcatgtaaagactactggtga

SEQ ID NO: 31034 - protein, 710 aa, Arabidopsis thaliana
  misc_feature (1)..(710): Ceres Seq. ID no. 4984474
MMIGKLWRSVGTVGKFDGRYDGVRTMVGKASNRAGVHVTDTVLFEETSFEFSPSLTPELNEFPMPSLDVITPQAYLTPLGSQSINHAKFLQIPWRQFVFTKPLGLSKSTKLDEAVTLIENSSSSPSNLSTPEAYTDLLHACISAKSLHHGIKICSLILNNPSLRHNPKLLSKLITLFSVCRRLDLARKIFDDVTDSSLLTEKVWAAMAIGYSRNGSPRDALIVYVDMLCSFIEPGNFSISVALKACVDLKDLRVGRGIHAQIVKRKEKVDQVVYNVLLKLYMESGLFDDARKVFDGMSERNVVTWNSLISVLSKKVRVHEMFNLFRKMQEEMIGFSWATLTTILPACSRVAALLTGKEIHAQILKSKEKPDVPLLNSLMDMYGKCGEVEYSRRVFDVMLTKDLASWNIMLNCYAINGNIEEVINLFEWMIESGVAPDGITFVALLSGCSDTGLTEYGLSLFERMKTEFRVSPALEHYACLVDILGRAGKIKEAVKVIETMPFKPSASIWGSLLNSCRLHGNVSVGEIAAKELFVLEPHNPGNYVMVSNIYADAKMWDNVDKIREMMKQRGVKKEAGCSWVQVKDKIQIFVAGGGYEFRNSDEYKKVWTELQEAIEKSGYSPNTSVVLHDVDEETKANWVCGHSERLATTYSLIHTGEGVPIRITKNLRVCADCHSWMKIVSQVTRRVIVLRDTKRFHHFVDGICSCKDYW

SEQ ID NO: 31035 - protein, 709 aa, Arabidopsis thaliana
  misc_feature (1)..(709): Ceres Seq. ID no. 4984475
MIGKLWRSVGTVGKFDGRYDGVRTMVGKASNRAGVHVTDTVLFEETSFEFSPSLTPELNEFPMPSLDVITPQAYLTPLGSQSINHAKFLQIPWRQFVFTKPLGLSKSTKLDEAVTLIENSSSSPSNLSTPEAYTDLLHACISAKSLHHGIKICSLILNNPSLRHNPKLLSKLITLFSVCRRLDLARKIFDDVTDSSLLTEKVWAAMAIGYSRNGSPRDALIVYVDMLCSFIEPGNFSISVALKACVDLKDLRVGRGIHAQIVKRKEKVDQVVYNVLLKLYMESGLFDDARKVFDGMSERNVVTWNSLISVLSKKVRVHEMFNLFRKMQEEMIGFSWATLTTILPACSRVAALLTGKEIHAQILKSKEKPDVPLLNSLMDMYGKCGEVEYSRRVFDVMLTKDLASWNIMLNCYAINGNIEEVINLFEWMIESGVAPDGITFVALLSGCSDTGLTEYGLSLFERMKTEFRVSPALEHYACLVDILGRAGKIKEAVKVIETMPFKPSASIWGSLLNSCRLHGNVSVGEIAAKELFVLEPHNPGNYVMVSNIYADAKMWDNVDKIREMMKQRGVKKEAGCSWVQVKDKIQIFVAGGGYEFRNSDEYKKVWTELQEAIEKSGYSPNTSVVLHDVDEETKANWVCGHSERLATTYSLIHTGEGVPIRITKNLRVCADCHSWMKIVSQVTRRVIVLRDTKRFHHFVDGICSCKDYW

SEQ ID NO: 31036 - protein, 685 aa, Arabidopsis thaliana
  misc_feature (1)..(685): Ceres Seq. ID no. 4984476
MVGKASNRAGVHVTDTVLFEETSFEFSPSLTPELNEFPMPSLDVITPQAYLTPLGSQSINHAKFLQIPWRQFVFTKPLGLSKSTKLDEAVTLIENSSSSPSNLSTPEAYTDLLHACISAKSLHHGIKICSLILNNPSLRHNPKLLSKLITLFSVCRRLDLARKIFDDVTDSSLLTEKVWAAMAIGYSRNGSPRDALIVYVDMLCSFIEPGNFSISVALKACVDLKDLRVGRGIHAQIVKRKEKVDQVVYNVLLKLYMESGLFDDARKVFDGMSERNVVTWNSLISVLSKKVRVHEMFNLFRKMQEEMIGFSWATLTTILPACSRVAALLTGKEIHAQILKSKEKPDVPLLNSLMDMYGKCGEVEYSRRVFDVMLTKDLASWNIMLNCYAINGNIEEVINLFEWMIESGVAPDGITFVALLSGCSDTGLTEYGLSLFERMKTEFRVSPALEHYACLVDILGRAGKIKEAVKVIETMPFKPSASIWGSLLNSCRLHGNVSVGEIAAKELFVLEPHNPGNYVMVSNIYADAKMWDNVDKIREMMKQRGVKKEAGCSWVQVKDKIQIFVAGGGYEFRNSDEYKKVWTELQEAIEKSGYSPNTSVVLHDVDEETKANWVCGHSERLATTYSLIHTGEGVPIRITKNLRVCADCHSWMKIVSQVTRRVIVLRDTKRFHHFVDGICSCKDYW

SEQ ID NO: 31037 - DNA, 585 bp, Arabidopsis thaliana
  misc_feature (1)..(585): Ceres Seq. ID no. 4984562
atggacgaggtgatgacagcggcggacgttggttcgttaggtggcggcaatagggcgttgtacggatctcctccgtcgcataatctgtttcctcacaatctcccaatcttctccgcttttcttgccttcgctcttgctcagttcctcaaagtcttcactaattggtacaaagaaaagaggtgggactctaaacgtatgattagttctggtggaatgccttcttctcattctgctactgtcactgccttagctgttgccattggctttgaagaaggagctggagcaccagcttttgctattgcagttgtcttggcttgcgttgttatgtatgatgcctctggtgtcaggcttcatgctggtcgtcaagccgagctgctgaatcaaattgtttgtgagtttcctccggagcatccattatcaacagttagaccattgcgtgaactgcttggccacactcctatccaggagctcaagctagtcagtctctctacacaagaacaaatcccgaattcttttgaaatcatagacccttcaggtactaagatagattcagcgatatcaagtgacgctagattattggagtaa

SEQ ID NO: 31038 - protein, 194 aa, Arabidopsis thaliana
  misc_feature (1)..(194): Ceres Seq. ID no. 4984563
MDEVMTAADVGSLGGGNRALYGSPPSHNLFPHNLPIFSAFLAFALAQFLKVFTNWYKEKRWDSKRMISSGGMPSSHSATVTALAVAIGFEEGAGAPAFAIAVVLACVVMYDASGVRLHAGRQAELLNQIVCEFPPEHPLSTVRPLRELLGHTPIQELKLVSLSTQEQIPNSFEIIDPSGTKIDSAISSDARLLE

SEQ ID NO: 31039 - protein, 190 aa, Arabidopsis thaliana
  misc_feature (1)..(190): Ceres Seq. ID no. 4984564
MTAADVGSLGGGNRALYGSPPSHNLFPHNLPIFSAFLAFALAQFLKVFTNWYKEKRWDSKRMISSGGMPSSHSATVTALAVAIGFEEGAGAPAFAIAVVLACVVMYDASGVRLHAGRQAELLNQIVCEFPPEHPLSTVRPLRELLGHTPIQELKLVSLSTQEQIPNSFEIIDPSGTKIDSAISSDARLLE

SEQ ID NO: 31040 - protein, 129 aa, Arabidopsis thaliana
  misc_feature (1)..(129): Ceres Seq. ID no. 4984565
MISSGGMPSSHSATVTALAVAIGFEEGAGAPAFAIAVVLACVVMYDASGVRLHAGRQAELLNQIVCEFPPEHPLSTVRPLRELLGHTPIQELKLVSLSTQEQIPNSFEIIDPSGTKIDSAISSDARLLE

SEQ ID NO: 31041 - DNA, 1296 bp, Arabidopsis thaliana
  misc_feature (1)..(1296): Ceres Seq. ID no. 4984598
atgatcacctctcttacatccaacaaccgcctccggtacgaaataatctccggaggagatcaacaaccaacggagctcaaagcaactgattcccacatccaaagtctaaagccactggtgagagacgcggttgctaaactcgtagattccactctaccagacgcgcctcgtcttgcgggattcgttgttgacatgtactgcacgtcgatgatcgatgtcgctaacgaatttggcgtccctagttacttgttttacacctctaacgctggatttcttggacttttgcttcacattcagttcatgtacgatgcagaggatatctatgacatgagcgaattagaagactctgacgtagagttggtggttccgagtttgactagtccttatccgttgaaatgtcttccttacattttcaaatcaaaagagtggctcactttttttgtaactcaagcgagaagattcagagaaactaagggcattttggtaaacacggttcctgacttggaacctcaagcgttgacgtttctttccaatggtaacattccacgtgcttacccagtaggaccattgttgcatctcaaaaacgtaaattgtgattacgtggacaagaagcaatcggagattttacggtggctagacgagcaaccgccaagatctgtagtgttcctctgtttcgggagcatgggagggttcagtgaggaacaagtgagagaaaccgcattagctctcgatcgaagcggccaccggtttctttggtctctccgtcgtgcatctccgaatatattgagagagcctcccggagaattcacaaacctagaggagattctcccagaagggtttttcgatcggacggctaacagaggaaaggttatcggatgggctgaacaggtggccatattggcgaagccggcgatcggaggttttgtttctcacggcggatggaattcgacgttggagagtttgtggtttggtgttccgatggcgatttggccgctttacgctgaacagaagtttaacgctttcgagatggtggaagagcttggtttggctgtggagatcaagaagcattggcgaggagatcttttgttggggaggtcggagattgtgacggcggaggagattgagaaaggaatcatatgtttgatggagcaagacagtgacgtcaggaagagagtgaatgagatcagcgagaagtgccacgtggctttaatggacggtggatcgtcagaaactgctttgaaaagatttattcaagacgtaacggagaatattgcttggtcggaaactgaaagctag

SEQ ID NO: 31042 - protein, 431 aa, Arabidopsis thaliana
  misc_feature (1)..(431): Ceres Seq. ID no. 4984599
MITSLTSNNRLRYEIISGGDQQPTELKATDSHIQSLKPLVRDAVAKLVDSTLPDAPRLAGFVVDMYCTSMIDVANEFGVPSYLFYTSNAGFLGLLLHIQFMYDAEDIYDMSELEDSDVELVVPSLTSPYPLKCLPYIFKSKEWLTFFVTQARRFRETKGILVNTVPDLEPQALTFLSNGNIPRAYPVGPLLHLKNVNCDYVDKKQSEILRWLDEQPPRSVVFLCFGSMGGFSEEQVRETALALDRSGHRFLWSLRRASPNILREPPGEFTNLEEILPEGFFDRTANRGKVIGWAEQVAILAKPAIGGFVSHGGWNSTLESLWFGVPMAIWPLYAEQKFNAFEMVEELGLAVEIKKHWRGDLLLGRSEIVTAEEIEKGIICLMEQDSDVRKRVNEISEKCHVALMDGGSSETALKRFIQDVTENIAWSETES

SEQ ID NO: 31043 - protein, 367 aa, Arabidopsis thaliana
  misc_feature (1)..(367): Ceres Seq. ID no. 4984600
MYCTSMIDVANEFGVPSYLFYTSNAGFLGLLLHIQFMYDAEDIYDMSELEDSDVELVVPSLTSPYPLKCLPYIFKSKEWLTFFVTQARRFRETKGILVNTVPDLEPQALTFLSNGNIPRAYPVGPLLHLKNVNCDYVDKKQSEILRWLDEQPPRSVVFLCFGSMGGFSEEQVRETALALDRSGHRFLWSLRRASPNILREPPGEFTNLEEILPEGFFDRTANRGKVIGWAEQVAILAKPAIGGFVSHGGWNSTLESLWFGVPMAIWPLYAEQKFNAFEMVEELGLAVEIKKHWRGDLLLGRSEIVTAEEIEKGIICLMEQDSDVRKRVNEISEKCHVALMDGGSSETALKRFIQDVTENIAWSETES

SEQ ID NO: 31044 - protein, 362 aa, Arabidopsis thaliana
  misc_feature (1)..(362): Ceres Seq. ID no. 4984601
MIDVANEFGVPSYLFYTSNAGFLGLLLHIQFMYDAEDIYDMSELEDSDVELVVPSLTSPYPLKCLPYIFKSKEWLTFFVTQARRFRETKGILVNTVPDLEPQALTFLSNGNIPRAYPVGPLLHLKNVNCDYVDKKQSEILRWLDEQPPRSVVFLCFGSMGGFSEEQVRETALALDRSGHRFLWSLRRASPNILREPPGEFTNLEEILPEGFFDRTANRGKVIGWAEQVAILAKPAIGGFVSHGGWNSTLESLWFGVPMAIWPLYAEQKFNAFEMVEELGLAVEIKKHWRGDLLLGRSEIVTAEEIEKGIICLMEQDSDVRKRVNEISEKCHVALMDGGSSETALKRFIQDVTENIAWSETES

SEQ ID NO: 31045 - DNA, 393 bp, Arabidopsis thaliana
  misc_feature (1)..(393): Ceres Seq. ID no. 4984678
atgacggatgattgcaagaaatcgttcatggagatgaaatggaagaaagtgcatagatacgtcgtttacaaactcgaggagaagtctcggaaagtcaccgtcgacaaggttggtgccgccggcgagagctacgacgatctcgctgcttctttgccggaggatgactgtcgttacgccgtgtttgatttcgattacgtcaccgtcgataactgtcgtatgagcaagatcttcttcataacttggtcgccggaggcttcaaggataagggagaagatgatgtacgcgacgtcgaagagcggactgagaagagtgttggatggtgttcactacgagcttcaagccaccgacccaaccgagatgggatttgataaaatccaggaccgggccaaatga

SEQ ID NO: 31046 - protein, 130 aa, Arabidopsis thaliana
  misc_feature (1)..(130): Ceres Seq. ID no. 4984679
MTDDCKKSFMEMKWKKVHRYVVYKLEEKSRKVTVDKVGAAGESYDDLAASLPEDDCRYAVFDFDYVTVDNCRMSKIFFITWSPEASRIREKMMYATSKSGLRRVLDGVHYELQATDPTEMGFDKIQDRAK

SEQ ID NO: 31047 - protein, 121 aa, Arabidopsis thaliana
  misc_feature (1)..(121): Ceres Seq. ID no. 4984680
MEMKWKKVHRYVVYKLEEKSRKVTVDKVGAAGESYDDLAASLPEDDCRYAVFDFDYVTVDNCRMSKIFFITWSPEASRIREKMMYATSKSGLRRVLDGVHYELQATDPTEMGFDKIQDRAK

SEQ ID NO: 31048 - protein, 119 aa, Arabidopsis thaliana
  misc_feature (1)..(119): Ceres Seq. ID no. 4984681
MKWKKVHRYVVYKLEEKSRKVTVDKVGAAGESYDDLAASLPEDDCRYAVFDFDYVTVDNCRMSKIFFITWSPEASRIREKMMYATSKSGLRRVLDGVHYELQATDPTEMGFDKIQDRAK

SEQ ID NO: 31049 - DNA, 2070 bp, Arabidopsis thaliana
  misc_feature (1)..(2070): Ceres Seq. ID no. 4984739
atgttcaagtataacataaaaccaaaacaaataaataaaaataaagagatgggtatgatgagatcctcaagaacgatggggttagggcattgcatggtttacgttgtggtcctaagtgccattgcggctacagtgacatcatacccttactcctctccttactcatcccctcaaaccccacattacaattctcccagccatgaacacaaaagccctaagtacgcgccacatccaaaaccatacgtttatatttctccaccacctccatcatactattctccttctccaaaagtaaactataagtctccaccaccaccaaacgtctacaactctccacctccaccatactattctccttcaccaaaggttgattataagtctccaccaccaccttacgtctacagttccccacctccaccatactattctccttctccgaaggttgactataagtctcctccaccaccatacgtctacagctccccacccccaccatactattctccttcgccaaaggttgaatacaagtctccaccaccaccgtacgtctacaattctccacctccaccatactactctccttctcctaagatagagtacaagtccccaccaccaccatatgtctacagttctccacccccaccgtactactctccatctccaaaggttgactacaagtccccaccaccaccgtacgtctacaactccccacccccaccatactactctccttcgccaaaggttgactacaaatctcccccaccaccgtacgtctacagttccccacccccaccatacttctctccttcgccaaaggttgaatacaagtctcccccaccaccgtacgtctacaattctccacctccaccatactactctccttctcctaaggtagagtacaagtccccaccaccaccatatgtctacagctctccacccccaccgtactactcaccatctccaaaagtttactacaagtccccaccaccaccatacgtctacagctccccacccccaccatactactctccatctccaaaggttgactacaagtccccaccaccaccgtatgtttacagctctccacccccaccatactactctccttcgcctaaggttgactacaagtctcccccaccaccatacgtctacagctccccgcccccacaatactactctccttcgccaaaggttgcgtacaagtctcccccaccaccatacgtctacagctctccgcccccaccttactactctccttcaccaaaggttgcgtacaagtctcccccaccaccatacgtctacagctccccgcccccaccatactactctccttcacctaaggttgattacaagtctcccccaccaccatacgtctacagctcccctcctccaccttactactctccttcaccaaaggttgagtacaagtctcccccaccaccatacgtctacagctcccctcccccaccttactactctccttcaccaaaggttgagtacaagtctccaccaccaccatacgtctacagttcccctcccccaccataccactctccttcgcctaaggtaaactacaaatctccaccaccaccatacgtctacagctcccatcccccaccatactactctccttcgcctaaggtaaactacaaatctccaccaccaccatacgtctacagctccccacccccaccatactactctccttcgcctaaggttaactacaagtctcccccaccaccatacgtttacagttctccgcccccaccatactactctccttctcctatggttgactacaagtctacccccccaccatacgtctatagcttcccacccctaccatattattctccttctccaaaggttgactacaagtctccaccactaccatacgtttacagctccccacccccactatattactctccttctccaaaggttcattacaaatctccaccaccaccatacgtgtataactctccacctccaccatactattctccttctccaaaggtcacttacaagtctccaccacccccatatgtctacaaggcgccttactattga

SEQ ID NO: 31050 - protein, 689 aa, Arabidopsis thaliana
  misc_feature (1)..(689): Ceres Seq. ID no. 4984740
MFKYNIKPKQINKNKEMGMMRSSRTMGLGHCMVYVVVLSAIAATVTSYPYSSPYSSPQTPHYNSPSHEHKSPKYAPHPKPYVYISPPPPSYYSPSPKVNYKSPPPPNVYNSPPPPYYSPSPKVDYKSPPPPYVYSSPPPPYYSPSPKVDYKSPPPPYVYSSPPPPYYSPSPKVEYKSPPPPYVYNSPPPPYYSPSPKIEYKSPPPPYVYSSPPPPYYSPSPKVDYKSPPPPYVYNSPPPPYYSPSPKVDYKSPPPPYVYSSPPPPYFSPSPKVEYKSPPPPYVYNSPPPPYYSPSPKVEYKSPPPPYVYSSPPPPYYSPSPKVYYKSPPPPYVYSSPPPPYYSPSPKVDYKSPPPPYVYSSPPPPYYSPSPKVDYKSPPPPYVYSSPPPQYYSPSPKVAYKSPPPPYVYSSPPPPYYSPSPKVAYKSPPPPYVYSSPPPPYYSPSPKVDYKSPPPPYVYSSPPPPYYSPSPKVEYKSPPPPYVYSSPPPPYYSPSPKVEYKSPPPPYVYSSPPPPYHSPSPKVNYKSPPPPYVYSSHPPPYYSPSPKVNYKSPPPPYVYSSPPPPYYSPSPKVNYKSPPPPYVYSSPPPPYYSPSPMVDYKSTPPPYVYSFPPLPYYSPSPKVDYKSPPLPYVYSSPPPLYYSPSPKVHYKSPPPPYVYNSPPPPYYSPSPKVTYKSPPPPYVYKAPYY

SEQ ID NO: 31051 - protein, 673 aa, Arabidopsis thaliana
  misc_feature (1)..(673): Ceres Seq. ID no. 4984741
MGMMRSSRTMGLGHCMVYVVVLSAIAATVTSYPYSSPYSSPQTPHYNSPSHEHKSPKYAPHPKPYVYISPPPPSYYSPSPKVNYKSPPPPNVYNSPPPPYYSPSPKVDYKSPPPPYVYSSPPPPYYSPSPKVDYKSPPPPYVYSSPPPPYYSPSPKVEYKSPPPPYVYNSPPPPYYSPSPKIEYKSPPPPYVYSSPPPPYYSPSPKVDYKSPPPPYVYNSPPPPYYSPSPKVDYKSPPPPYVYSSPPPPYFSPSPKVEYKSPPPPYVYNSPPPPYYSPSPKVEYKSPPPPYVYSSPPPPYYSPSPKVYYKSPPPPYVYSSPPPPYYSPSPKVDYKSPPPPYVYSSPPPPYYSPSPKVDYKSPPPPYVYSSPPPQYYSPSPKVAYKSPPPPYVYSSPPPPYYSPSPKVAYKSPPPPYVYSSPPPPYYSPSPKVDYKSPPPPYVYSSPPPPYYSPSPKVEYKSPPPPYVYSSPPPPYYSPSPKVEYKSPPPPYVYSSPPPPYHSPSPKVNYKSPPPPYVYSSHPPPYYSPSPKVNYKSPPPPYVYSSPPPPYYSPSPKVNYKSPPPPYVYSSPPPPYYSPSPMVDYKSTPPPYVYSFPPLPYYSPSPKVDYKSPPLPYVYSSPPPLYYSPSPKVHYKSPPPPYVYNSPPPPYYSPSPKVTYKSPPPPYVYKAPYY

SEQ ID NO: 31052 - protein, 671 aa, Arabidopsis thaliana
  misc_feature (1)..(671): Ceres Seq. ID no. 4984742
MMRSSRTMGLGHCMVYVVVLSAIAATVTSYPYSSPYSSPQTPHYNSPSHEHKSPKYAPHPKPYVYISPPPPSYYSPSPKVNYKSPPPPNVYNSPPPPYYSPSPKVDYKSPPPPYVYSSPPPPYYSPSPKVDYKSPPPPYVYSSPPPPYYSPSPKVEYKSPPPPYVYNSPPPPYYSPSPKIEYKSPPPPYVYSSPPPPYYSPSPKVDYKSPPPPYVYNSPPPPYYSPSPKVDYKSPPPPYVYSSPPPPYFSPSPKVEYKSPPPPYVYNSPPPPYYSPSPKVEYKSPPPPYVYSSPPPPYYSPSPKVYYKSPPPPYVYSSPPPPYYSPSPKVDYKSPPPPYVYSSPPPPYYSPSPKVDYKSPPPPYVYSSPPPQYYSPSPKVAYKSPPPPYVYSSPPPPYYSPSPKVAYKSPPPPYVYSSPPPPYYSPSPKVDYKSPPPPYVYSSPPPPYYSPSPKVEYKSPPPPYVYSSPPPPYYSPSPKVEYKSPPPPYVYSSPPPPYHSPSPKVNYKSPPPPYVYSSHPPPYYSPSPKVNYKSPPPPYVYSSPPPPYYSPSPKVNYKSPPPPYVYSSPPPPYYSPSPMVDYKSTPPPYVYSFPPLPYYSPSPKVDYKSPPLPYVYSSPPPLYYSPSPKVHYKSPPPPYVYNSPPPPYYSPSPKVTYKSPPPPYVYKAPYY

SEQ ID NO: 31053 - DNA, 1401 bp, Arabidopsis thaliana
  misc_feature (1)..(1401): Ceres Seq. ID no. 4984986
atgaggagcaaaaccccaacgcctctccgcttctcaaatggaaagcatcagagagatgattctgagtatagttggactgatgtaggtactggggagaaggccaggaatgtctccgtcctcggtgcgatcagaagggcagctaagaaagtctttgttattattttcttaggacaacggaagttaaagccaacagaatgtagatctgatcctggagagagcagcacgcacgacagagaatctacatcctttcttgaatatcaggagcatgctttgaatctcttaagctctggtgatgtatgccgaccattaagacaaccaaactttgttacaaacctgaggtatcaggctggactggttattcatcaccaagctcctttggaaggtcaacagaaagaaaggtttcagcttcaaagggcaaccgcaaatttttcttcggttcatcaaattggggaaggcggttttggaactgtttttaagggaaaacttgatgatggaactattgttgctatcaagcgtgcgagaaagaacaactatggcaaaagctggttgctagagttcaagaatgaaatatacacattgtcaaagattgagcatatgaatttggtaaagctgtatggatttcttgaacatggagatgaaaaggttattgttgttgaatatgttgccaatggaaacctacgagaacatctagatggtttaaggggtaaccgccttgaaatggcagaacgtcttgagattgcaattgatgtggctcatgcattgacctatttgcacacatatactgatagtccaataatccacagagacattaaagcatcaaatatcctcatcacgaataagcttagagccaaagtggcggactttggctttgctcgtttagtgtcggaagatcttggggctactcatatatcgactcaggtcaaaggatctgcaggctatgtggatccagattacctcaggacgtttcaactaactgacaagagcgacgtttactcttttggtgttttgctcgtagagattctcactggaagacgtcccattgagttaaagagaccacgaaaagacagactcacggttaaatgggcattgaggagactcaaagacgatgaagctgttctcataatggacccatttctcaagagaaaccgagccgccattgaagtggctgagaagatgctgagacttgcgagcgaatgtgttaccccgacgagagctacacgtccagctatgaaaggcattgcggaaaagctatgggctataaggagagagatgaaggagacgatgatatgttcatctgcatctaattcttcttgttcttcaacaacacatagcttcattggtcgtgattcagacagatatgcattgccgaggattgaagataacgagaatagcattgagtaa

SEQ ID NO: 31054 - protein, 466 aa, Arabidopsis thaliana
  misc_feature (1)..(466): Ceres Seq. ID no. 4984987
MRSKTPTPLRFSNGKHQRDDSEYSWTDVGTGEKARNVSVLGAIRRAAKKVFVIIFLGQRKLKPTECRSDPGESSTHDRESTSFLEYQEHALNLLSSGDVCRPLRQPNFVTNLRYQAGLVIHHQAPLEGQQKERFQLQRATANFSSVHQIGEGGFGTVFKGKLDDGTIVAIKRARKNNYGKSWLLEFKNEIYTLSKIEHMNLVKLYGFLEHGDEKVIVVEYVANGNLREHLDGLRGNRLEMAERLEIAIDVAHALTYLHTYTDSPIIHRDIKASNILITNKLRAKVADFGFARLVSEDLGATHISTQVKGSAGYVDPDYLRTFQLTDKSDVYSFGVLLVEILTGRRPIELKRPRKDRLTVKWALRRLKDDEAVLIMDPFLKRNRAAIEVAEKMLRLASECVTPTRATRPAMKGIAEKLWAIRREMKETMICSSASNSSCSSTTHSFIGRDSDRYALPRIEDNENSIE

SEQ ID NO: 31055 - protein, 268 aa, Arabidopsis thaliana
  misc_feature (1)..(268): Ceres Seq. ID no. 4984988
MNLVKLYGFLEHGDEKVIVVEYVANGNLREHLDGLRGNRLEMAERLEIAIDVAHALTYLHTYTDSPIIHRDIKASNILITNKLRAKVADFGFARLVSEDLGATHISTQVKGSAGYVDPDYLRTFQLTDKSDVYSFGVLLVEILTGRRPIELKRPRKDRLTVKWALRRLKDDEAVLIMDPFLKRNRAAIEVAEKMLRLASECVTPTRATRPAMKGIAEKLWAIRREMKETMICSSASNSSCSSTTHSFIGRDSDRYALPRIEDNENSIE

SEQ ID NO: 31056 - DNA, 2010 bp, Arabidopsis thaliana
  misc_feature (1)..(2010): Ceres Seq. ID no. 4985288
atgaggagtatgatgatggagagagagggaaggaatgagatagaaagagaagtaatagatgacttggaagagacgcaaaacgaaggagatgatttcaagtcaatacctccatggaaggaacaaatcactttcagaggaattgttgcaagtttaatcattggtataatctacagtgtgatcgtgatgaaactaaacctaacaacaggtttggtcccaaacctaaatgtctctgcagcacttttagcctttgtcttccttagaagctggaccaagctgttgaccaaagccgggattgtgactaaaccgttcactaaacaagagaacactgttgtccaaacatgtgctgttgcttgttacagcattgcagttggaggtgggtttggttcataccttcttggtttgaacagaattacttatgaacagtcaggaggaactcacactgatgggaattatccggaaggcacgaaagagcctggaatcggttggatgaccgctttcttgttctttacttgctttgttggtcttttagcattggttcctctaagaaagatcatgatcatagactacaagctgacatatccaagtggaacagctaccgcggttttgatcaacggtttccacactcctaaaggcaataaaatggccaagaaacaagtgtttgggtttgtgaagtacttctcatttagcttcatttgggctttcttccaatggttcttctctggtggtacagagtgcggtttcattcagtttccaactttcgggttagaagctttgaagaacaccatgacatacgttggagcaggaatgatctgtccccatattgtcaatatatctttgctttttggcgcggttctgtcttggggaatcatgtggccactcattaaaggtcttaaaggagattggttcccatcaactcttcctgaaaacagcatgaagagtctcaatggttacaaggtgtttatatcaatctcattgatcctcggagacgggctttaccaattcatcaagatactttttaagacaggaataaacatgtacgtcaagttaaacaatcgcaactctgggaaatctaattcggagaaagataagcaatctattgcagatcttaaaagagatgagatctttgtaagagacagcattccattatgggttgcagcagtaggatacgcagcgttctctgttgtctcgatcatcgcgatccctataatgttccccgagctgaaatggtacttcatagtcgtagcttacatgttagctccatcgttaggtttcagtaacgcttatggagcagggctaacagatatgaacatggcttataactatggtaaagtcgctctgtttatcttagccgctatggcagggaaacaaaatggtgtagtcgcgggacttgtcggatgcgggttgataaaatcgattgtatcgatttcttctgacctaatgcacgatttcaagacaggacatttgactctgacttcacctaggtcgatgcttgtgagtcaagcgatcggtacagcgatcggatgcgttgtggcgcctctaactttcttcttgttttataaagctttcgatgtcgggaaccaggagggagagtacaaagctccttacgctttggtatacagaaacatggcaattcttggagttgaaggtttctctgctttgcctcaacattgtttacagctttgttacgggtttttcgcattcgcggtggcggcaaatctcgttagggataggttaccggataagatagggaattgggttccattaccgatggcaatggcggttccgtttcttgttggagggtactttgctattgatatgtgtgtgggaagtttgattgtgtttgcttggaatatgagagatcgagttaaagccggtttaatggtaccggcggttgcttccggtttgatatgtggagatggtctatggattttgccgtcgtcggttcttgctttggccggcgttagacctcctatatgtatgggcttcatgccgagtaaatattcgagttaa

SEQ ID NO: 31057 - protein, 669 aa, Arabidopsis thaliana
  misc_feature (1)..(669): Ceres Seq. ID no. 4985289
MRSMMMEREGRNEIEREVIDDLEETQNEGDDFKSIPPWKEQITFRGIVASLIIGIIYSVIVMKLNLTTGLVPNLNVSAALLAFVFLRSWTKLLTKAGIVTKPFTKQENTVVQTCAVACYSIAVGGGFGSYLLGLNRITYEQSGGTHTDGNYPEGTKEPGIGWMTAFLFFTCFVGLLALVPLRKIMIIDYKLTYPSGTATAVLINGFHTPKGNKMAKKQVFGFVKYFSFSFIWAFFQWFFSGGTECGFIQFPTFGLEALKNTMTYVGAGMICPHIVNISLLFGAVLSWGIMWPLIKGLKGDWFPSTLPENSMKSLNGYKVFISISLILGDGLYQFIKILFKTGINMYVKLNNRNSGKSNSEKDKQSIADLKRDEIFVRDSIPLWVAAVGYAAFSVVSIIAIPIMFPELKWYFIVVAYMLAPSLGFSNAYGAGLTDMNMAYNYGKVALFILAAMAGKQNGVVAGLVGCGLIKSIVSISSDLMHDFKTGHLTLTSPRSMLVSQAIGTAIGCVVAPLTFFLFYKAFDVGNQEGEYKAPYALVYRNMAILGVEGFSALPQHCLQLCYGFFAFAVAANLVRDRLPDKIGNWVPLPMAMAVPFLVGGYFAIDMCVGSLIVFAWNMRDRVKAGLMVPAVASGLICGDGLWILPSSVLALAGVRPPICMGFMPSKYSS

SEQ ID NO: 31058 - protein, 666 aa, Arabidopsis thaliana
  misc_feature (1)..(666): Ceres Seq. ID no. 4985290
MMMEREGRNEIEREVIDDLEETQNEGDDFKSIPPWKEQITFRGIVASLIIGIIYSVIVMKLNLTTGLVPNLNVSAALLAFVFLRSWTKLLTKAGIVTKPFTKQENTVVQTCAVACYSIAVGGGFGSYLLGLNRITYEQSGGTHTDGNYPEGTKEPGIGWMTAFLFFTCFVGLLALVPLRKIMIIDYKLTYPSGTATAVLINGFHTPKGNKMAKKQVFGFVKYFSFSFIWAFFQWFFSGGTECGFIQFPTFGLEALKNTMTYVGAGMICPHIVNISLLFGAVLSWGIMWPLIKGLKGDWFPSTLPENSMKSLNGYKVFISISLILGDGLYQFIKILFKTGINMYVKLNNRNSGKSNSEKDKQSIADLKRDEIFVRDSIPLWVAAVGYAAFSVVSIIAIPIMFPELKWYFIVVAYMLAPSLGFSNAYGAGLTDMNMAYNYGKVALFILAAMAGKQNGVVAGLVGCGLIKSIVSISSDLMHDFKTGHLTLTSPRSMLVSQAIGTAIGCVVAPLTFFLFYKAFDVGNQEGEYKAPYALVYRNMAILGVEGFSALPQHCLQLCYGFFAFAVAANLVRDRLPDKIGNWVPLPMAMAVPFLVGGYFAIDMCVGSLIVFAWNMRDRVKAGLMVPAVASGLICGDGLWILPSSVLALAGVRPPICMGFMPSKYSS

SEQ ID NO: 31059 - protein, 665 aa, Arabidopsis thaliana
  misc_feature (1)..(665): Ceres Seq. ID no. 4985291
MMEREGRNEIEREVIDDLEETQNEGDDFKSIPPWKEQITFRGIVASLIIGIIYSVIVMKLNLTTGLVPNLNVSAALLAFVFLRSWTKLLTKAGIVTKPFTKQENTVVQTCAVACYSIAVGGGFGSYLLGLNRITYEQSGGTHTDGNYPEGTKEPGIGWMTAFLFFTCFVGLLALVPLRKIMIIDYKLTYPSGTATAVLINGFHTPKGNKMAKKQVFGFVKYFSFSFIWAFFQWFFSGGTECGFIQFPTFGLEALKNTMTYVGAGMICPHIVNISLLFGAVLSWGIMWPLIKGLKGDWFPSTLPENSMKSLNGYKVFISISLILGDGLYQFIKILFKTGINMYVKLNNRNSGKSNSEKDKQSIADLKRDEIFVRDSIPLWVAAVGYAAFSVVSIIAIPIMFPELKWYFIVVAYMLAPSLGFSNAYGAGLTDMNMAYNYGKVALFILAAMAGKQNGVVAGLVGCGLIKSIVSISSDLMHDFKTGHLTLTSPRSMLVSQAIGTAIGCVVAPLTFFLFYKAFDVGNQEGEYKAPYALVYRNMAILGVEGFSALPQHCLQLCYGFFAFAVAANLVRDRLPDKIGNWVPLPMAMAVPFLVGGYFAIDMCVGSLIVFAWNMRDRVKAGLMVPAVASGLICGDGLWILPSSVLALAGVRPPICMGFMPSKYSS

SEQ ID NO: 31060 - DNA, 765 bp, Arabidopsis thaliana
  misc_feature (1)..(765): Ceres Seq. ID no. 4985415
atggcgttattctctccgccgatctcttcctcacttcagaaccctaatctcatccccaagatctcaacctctcttctctccaccaagcgtttctctctaatctccgtccctagagcttcctccgacaatggtacgacttcccccgtcgtggagattccgaagcctgcttctgtggctgtagaggaagttccagttaaatctccagccgaaagctcctccgcttctgaaaacggcgccgttggaggtgaagcgactgattcgagtactgagacggtaatcaaatatcagaatgcgaagtgggttaatggaacttgggatctgaaacagttcgagaaagatggcaaaactgattgggattctgttatcgtttctgaggcaaagaggagaaaatggcttgaagataacccggaaacaacgagtaacgacgagcttgttgtcttcgatacttcgattattccatggtgggcatggatgaagagataccatctacctgaagctgaacttctcaatggtcgtgctgcgatgatagggttcttcatggcttactttgttgatagtcttaccggagtaggacttgttgatcaaatgggaaatttcttctgcaaaacactcttgtttgtggctgtagctggagttctcttcatccgtaagaatgaagatttagacaaacttaaggatctgttcgatgagactacgttatatgacaaacaatggcaagctgcatggaaagagccagattcatcaacagtttcttcaaagaagtga

SEQ ID NO: 31061 - protein, 254 aa, Arabidopsis thaliana; identical to SEQ ID NO: 28793
  misc_feature (1)..(254): Ceres Seq. ID no. 4985416

SEQ ID NO: 31062 - DNA, 564 bp, Arabidopsis thaliana
  misc_feature (1)..(564): Ceres Seq. ID no. 4985417
atgcgcttgaatatcggtggaaccattactaagcttggatgggttttaagtttattggagcatgtggtttcttgtcctccatataaacataaaataaggttttcacttctgcttctctttggtgttcttcatggggcttcagttggtccatgtatcaagtccacaatcgatattgattcaagcatccttatcaccgcgttcttaggaactgcggtgatatttttctgtttctcggcagtggcaatgctggcaagacgcagggagtatatctacctcggaggactgctttcgtctggcttttccttgctaacgtggctcaagaattctgatcagtttgcctctgcgacagttgagattcagatgtaccttggactcctgctcttcgtgggatgtatagtggtgaacacacaggagataatagagaaagcacactgtggtgacatggactacgcggtacattcgctgatcctttacattggctttgtacgtgtgttccttcaaattctcagtataatgtggaatacctctgccgatagaataagaagaaataatgaagaaacttag

SEQ ID NO: 31063 - protein, 187 aa, Arabidopsis thaliana
  misc_feature (1)..(187): Ceres Seq. ID no. 4985418
MRLNIGGTITKLGWVLSLLEHVVSCPPYKHKIRFSLLLLFGVLHGASVGPCIKSTIDIDSSILITAFLGTAVIFFCFSAVAMLARRREYIYLGGLLSSGFSLLTWLKNSDQFASATVEIQMYLGLLLFVGCIVVNTQEIIEKAHCGDMDYAVHSLILYIGFVRVFLQILSIMWNTSADRIRRNNEET

SEQ ID NO: 31064 - protein, 106 aa, Arabidopsis thaliana
  misc_feature (1)..(106): Ceres Seq. ID no. 4985419
MLARRREYIYLGGLLSSGFSLLTWLKNSDQFASATVEIQMYLGLLLFVGCIVVNTQEIIEKAHCGDMDYAVHSLILYIGFVRVFLQILSIMWNTSADRIRRNNEET

SEQ ID NO: 31065 - DNA, 633 bp, Arabidopsis thaliana
  misc_feature (1)..(633): Ceres Seq. ID no. 4986087
atcatcactttcacaatcttcttcatcgatttctctcttccaaatctcccaaaagatgtcgaaccctagagttttcttcgacatgagtctcagcggtactcccatcggacggatcgagatggagcttttcgctgatacaaccccaaacacggcggagaatttccgtgctctctgtaccggcgagaaaggaatgggaaagctaagttcaaggacgagaactttatcaagaagcatacaggagctgggattctctcaatggctaactctggtcctaacactaacggatctcagttcttcatctgtaccgataagacgtcgtggttagatggtaagcacgttgtgtttggacaagttgttaaaggcttggacgtcgtgaaggcgattgagaaagttggatctgattctggaaagacttccaaagtcgttaccatcactgattgtggtcagctttcttagatctgagtgagaaagtgagagactttgatctttatgagtaataatggtgtcttttgctttcggttgttcttcctcttaccttaatggattattctgtttagggtttgagttttcgtttcagagtttgtaacaaaacccttttgtgttttctggggtttgaaataattatgagcttac

SEQ ID NO: 31066 - protein, 107 aa, Arabidopsis thaliana
  misc_feature (1)..(107): Ceres Seq. ID no. 4986088
SSLSQSSSSISLFQISQKMSNPRVFFDMSLSGTPIGRIEMELFADTTPNTAENFRALCTGEKGMGKLSSRTRTLSRSIQELGFSQWLTLVLTLTDLSSSSVPIRRRG

SEQ ID NO: 31067 - protein, 89 aa, Arabidopsis thaliana
  misc_feature (1)..(89): Ceres Seq. ID no. 4986089
MSNPRVFFDMSLSGTPIGRIEMELFADTTPNTAENFRALCTGEKGMGKLSSRTRTLSRSIQELGFSQWLTLVLTLTDLSSSSVPIRRRG

SEQ ID NO: 31068 - protein, 80 aa, Arabidopsis thaliana
  misc_feature (1)..(80): Ceres Seq. ID no. 4986090
MSLSGTPIGRIEMELFADTTPNTAENFRALCTGEKGMGKLSSRTRTLSRSIQELGFSQWLTLVLTLTDLSSSSVPIRRRG

SEQ ID NO: 31069 - DNA, 726 bp, Arabidopsis thaliana
  misc_feature (1)..(726): Ceres Seq. ID no. 4986452
atggagcttcgtaaacggaaaatacgagctccattacatatcttcgtcggcataacgttcttcctccttcagctttggtcgggaacggcccaaattaaccatgaagactcttccacaaaaccctccgttaaaaactctccgtcagcgacgagtactcggcttctgttgtcaccaccttcgttcaccggaaaccgattctcgttcaggttcaggtggaggagaatacgacgtcgtaacagagtcaacagagcgagcagagagtttttaatcgcacataacctcgtaagagcgcgcgtgggagaaccaccgtttcaatgggacggaagattagcggcgtacgcgcgcacgtgggcgaatcagcgcgtgggtgattgtaggcttgttcactctaacgggccgtatggagaaaacatattttgggccggaaagaataactggagccccagagatattgttaatgtgtgggccgatgaggataaattctacgacgtgaaaggtaacacgtgtgagccgcaacacatgtgtgggcactacacgcagatcgtgtggagagatagtaccaaggtcggatgcgcaagtgtggattgttcgaacggcggcgtttatgcgatttgtgtttataacccaccgggaaattacgaaggtgaaaatccgtttggaagttatgatgatcagattggtcttgcccgggatgatccaccggcggtgatcggaggaatggcttga

SEQ ID NO: 31070 - protein, 241 aa, Arabidopsis thaliana
  misc_feature (1)..(241): Ceres Seq. ID no. 4986453
MELRKRKIRAPLHIFVGITFFLLQLWSGTAQINHEDSSTKPSVKNSPSATSTRLLLSPPSFTGNRFSFRFRWRRIRRRNRVNRASREFLIAHNLVRARVGEPPFQWDGRLAAYARTWANQRVGDCRLVHSNGPYGENIFWAGKNNWSPRDIVNVWADEDKFYDVKGNTCEPQHMCGHYTQIVWRDSTKVGCASVDCSNGGVYAICVYNPPGNYEGENPFGSYDDQIGLARDDPPAVIGGMA

SEQ ID NO: 31071 - DNA, 1713 bp, Arabidopsis thaliana
  misc_feature (1)..(1713): Ceres Seq. ID no. 4986638
atgatacaagaatccaaagacaaaggcaagtactacaagaatctacagaagaaagttctcgaatctgtgactgaggtcagtgacatcgacgccatcattgagcaagctgaggaggcagagcgtctttacaccattaatcacagctcctccacacctttgtctatcaatctagacacaaattctagctcaagtgttatagcagctgaagaatggagagagcaacagaagatagaggaggctttacacgccagtagtcttcaagtacctcgaagacctccgtggacacctgaaatgtcagtggaagaacttgatgctaatgaaaaacaagcttttctaaattggcgccggatgcttgtgagccttgaggaaaatgaaaagctagtgttgactccattcgaaaagaaccttgacatctggagacagctttggagagtgcttgaacgcagtgatttgattgttatggtagttgatgctagagatccactgttttaccgctgccctgatcttgaggcatatgctcaagaaattgatgagcataaaaaaataatgcttctagtgaacaaggcggatcttttacctactgatgtcagggagaaatgggcagaatatttccgccttaacaacattctgtttgttttctggtcagccatagctgctacagctaccctagaaggtaaagtcttgaaagagcaatggagacaacccgataacttgcagaagacagatgatccagacattatgatatatggcagagacgagctgttgagtcgtttgcaatttgaggctcaagagattgtcaaagtaaggaattctagagcagcatccgtatcatcacagtcatggactggtgaatatcaacgtgatcaagccgtggttggatttgttgggtacccaaatgttggaaagagttctacaatcaatgcattggtgggtcagaagcgaacaggtgtcacctctaccccaggaaaaacaaagcatttccagactttgatcatctctgatgagcttatgctatgcgattgccctggtttagtcttcccttcgttctcaagctcaagatatgaaatgattgcttctggtgtacttccgattgaccggatgacggagcaccgtgaagctattcaggtggtggctgacaaggtccctcgccgtgtaattgagagtgtgtacaacatttctcttcctaaacccaaaacctatgagcgtcagtcccgcccgcctcatgctgcagagctcttaaaaagttactgtgcttctcgtggctatgttgcctcgagtggactaccggatgaaacgaaagctgcaaggctgattctgaaagattacattggaggtaagctgccacattatgcaatgccacctggaatgccccaagctgatgaaccggacatagaagacactcaagaactggaggatattctcgaaggttcagagtccgatgactctgcagtaggagatgagacagaaaacgagcaagttcctggtattgatgatgtgctagatgatctgagctcgtttgatcttgccaatgggcttaagtcttcaaagaaagtgacagcaaagaagcaaaccgcgtcacataaacagcacaaaaagccacagaggaaaaaggatcggacttggagggttcaaaacacagaagatggagatggaatgccttctgttaaagttttccagaaaccagctaacacaggtcctcttacgatgcggtga

SEQ ID NO: 31072 - protein, 570 aa, Arabidopsis thaliana; identical to SEQ ID NO: 28681
  misc_feature (1)..(570): Ceres Seq. ID no. 4986639

SEQ ID NO: 31073 - protein, 473 aa, Arabidopsis thaliana; identical to SEQ ID NO: 28682
  misc_feature (1)..(473): Ceres Seq. ID no. 4986640

SEQ ID NO: 31074 - protein, 454 aa, Arabidopsis thaliana
  misc_feature (1)..(454): Ceres Seq. ID no. 4986641
MLVSLEENEKLVLTPFEKNLDIWRQLWRVLERSDLIVMVVDARDPLFYRCPDLEAYAQEIDEHKKIMLLVNKADLLPTDVREKWAEYFRLNNILFVFWSAIAATATLEGKVLKEQWRQPDNLQKTDDPDIMIYGRDELLSRLQFEAQEIVKVRNSRAASVSSQSWTGEYQRDQAVVGFVGYPNVGKSSTINALVGQKRTGVTSTPGKTKHFQTLIISDELMLCDCPGLVFPSFSSSRYEMIASGVLPIDRMTEHREAIQVVADKVPRRVIESVYNISLPKPKTYERQSRPPHAAELLKSYCASRGYVASSGLPDETKAARLILKDYIGGKLPHYAMPPGMPQADEPDIEDTQELEDILEGSESDDSAVGDETENEQVPGIDDVLDDLSSFDLANGLKSSKKVTAKKQTASHKQHKKPQRKKDRTWRVQNTEDGDGMPSVKVFQKPANTGPLTMR

SEQ ID NO: 31075 - DNA, 1017 bp, Arabidopsis thaliana
  misc_feature (1)..(1017): Ceres Seq. ID no. 4986727
atgtatcttgttggtggaaacatgattgatgctcacaaagtgtttgatgaaatgcctgagagaaatccggtaacttggaatgtgatgatcactggccttactaatttgggagatttcgaaaaagctctttgctttttggagaagatgccgaatcggacggtagtgtcttggaccactatcattgatgggtatgcacgagtagataaacccaaggaagctatactcttgttttcaagaatggttgcttgcgacgcaataaagcccaacgagataaccattctcgccattctcccagctgtttggaacttgggagacttaaagatgtgcggatcagttcatgcttatgttgggaaaagagggtttgttccatgtgatatccgtgtgactaactctctcatcgacgcttatgcaaaatgtgggtgtattcaaagcgcgttcaagtttttcatagagattccaaacggaaggaagaatcttgtatcgtggacaacgatgatctcggcgtttgcaattcacggaatgggaaaagaagcggtcagtatgtttaaagacatggaaagattaggattgaagccgaacagagtgaccatgatcagtgttttgaacgcttgcagccatggaggtttagcagaagaagagtttctagagtttttcaacacgatggtaaacgagtacaagatcacgccggatgtgaagcactatggatgtctagtagatatgttgagaagaaaaggaagattagaagaagcagagaagattgctttggagattccaatagaagaaaaagctgtggtttggagaatgctgcttggagcttgtagcgtttatgatgatgctgaattggctgagagggttactagaaagctaatggagctagagagaagccatggaggagactatgtgcttatgtccaacatcttttgtggtactggaagatttttagatgcgcagagatttcggaaacagatggatgttagaggagtagctaaacttccaggacattcacaagtaacatag

SEQ ID NO: 31076 - protein, 338 aa, Arabidopsis thaliana
  misc_feature (1)..(338): Ceres Seq. ID no. 4986728
MYLVGGNMIDAHKVFDEMPERNPVTWNVMITGLTNLGDFEKALCFLEKMPNRTVVSWTTIIDGYARVDKPKEAILLFSRMVACDAIKPNEITILAILPAVWNLGDLKMCGSVHAYVGKRGFVPCDIRVTNSLIDAYAKCGCIQSAFKFFIEIPNGRKNLVSWTTMISAFAIHGMGKEAVSMFKDMERLGLKPNRVTMISVLNACSHGGLAEEEFLEFFNTMVNEYKITPDVKHYGCLVDMLRRKGRLEEAEKIALEIPIEEKAVVWRMLLGACSVYDDAELAERVTRKLMELERSHGGDYVLMSNIFCGTGRFLDAQRFRKQMDVRGVAKLPGHSQVT

SEQ ID NO: 31077 - protein, 331 aa, Arabidopsis thaliana
  misc_feature (1)..(331): Ceres Seq. ID no. 4986729
MIDAHKVFDEMPERNPVTWNVMITGLTNLGDFEKALCFLEKMPNRTVVSWTTIIDGYARVDKPKEAILLFSRMVACDAIKPNEITILAILPAVWNLGDLKMCGSVHAYVGKRGFVPCDIRVTNSLIDAYAKCGCIQSAFKFFIEIPNGRKNLVSWTTMISAFAIHGMGKEAVSMFKDMERLGLKPNRVTMISVLNACSHGGLAEEEFLEFFNTMVNEYKITPDVKHYGCLVDMLRRKGRLEEAEKIALEIPIEEKAVVWRMLLGACSVYDDAELAERVTRKLMELERSHGGDYVLMSNIFCGTGRFLDAQRFRKQMDVRGVAKLPGHSQVT

SEQ ID NO: 31078 - protein, 321 aa, Arabidopsis thaliana
  misc_feature (1)..(321): Ceres Seq. ID no. 4986730
MPERNPVTWNVMITGLTNLGDFEKALCFLEKMPNRTVVSWTTIIDGYARVDKPKEAILLFSRMVACDAIKPNEITILAILPAVWNLGDLKMCGSVHAYVGKRGFVPCDIRVTNSLIDAYAKCGCIQSAFKFFIEIPNGRKNLVSWTTMISAFAIHGMGKEAVSMFKDMERLGLKPNRVTMISVLNACSHGGLAEEEFLEFFNTMVNEYKITPDVKHYGCLVDMLRRKGRLEEAEKIALEIPIEEKAVVWRMLLGACSVYDDAELAERVTRKLMELERSHGGDYVLMSNIFCGTGRFLDAQRFRKQMDVRGVAKLPGHSQVT

SEQ ID NO: 31079 - DNA, 684 bp, Arabidopsis thaliana
  misc_feature (1)..(684): Ceres Seq. ID no. 4986868
atggcgatcgaggatcaagagaacacaatccgtgaaatcaaacctaagaacagaagaatcatgggagctggtggtccggaggaagaggagaaccggtggccgccatggttgaaacctttgcttaaagagcaattctttgttcattgcaagtttcatggagactctcataagagtgaatgcaatatgtattgcttagactgcaccaatggcccactttgctctctttgtcttgctcatcacaaggatcatcgcaccattcagataaggagatcttcttatcatgatgttataagggtgaatgagatacaaaagtatcttgatataggtgggatccaaacctatgtgatcaatagtgctaaagtcgtcttcctgaatgagaggcctcagcctaggcctgggaaaggagtgaccaatacctgcaaggtttgctatcgtagcctcgttgatgatagcttccgcttctgctctcttggctgcaagattgctggaacatcaagaggctttgaaaagggaagggagaacctgctaatggaaacagaggattcaagtagcagcattgcaattgggaagaacattacaaatctccagagtttcagcccatcaacacctccacttactacatctagtaactgcagaatcgtcaagcgaagaaagggaattcctcaccgatctccaatgggataa

SEQ ID NO: 31080 - protein, 227 aa, Arabidopsis thaliana
  misc_feature (1)..(227): Ceres Seq. ID no. 4986869
MAIEDQENTIREIKPKNRRIMGAGGPEEEENRWPPWLKPLLKEQFFVHCKFHGDSHKSECNMYCLDCTNGPLCSLCLAHHKDHRTIQIRRSSYHDVIRVNEIQKYLDIGGIQTYVINSAKVVFLNERPQPRPGKGVTNTCKVCYRSLVDDSFRFCSLGCKIAGTSRGFEKGRENLLMETEDSSSSIAIGKNITNLQSFSPSTPPLTTSSNCRIVKRRKGIPHRSPMG

SEQ ID NO: 31081 - protein, 207 aa, Arabidopsis thaliana
  misc_feature (1)..(207): Ceres Seq. ID no. 4986870
MGAGGPEEEENRWPPWLKPLLKEQFFVHCKFHGDSHKSECNMYCLDCTNGPLCSLCLAHHKDHRTIQIRRSSYHDVIRVNEIQKYLDIGGIQTYVINSAKVVFLNERPQPRPGKGVTNTCKVCYRSLVDDSFRFCSLGCKIAGTSRGFEKGRENLLMETEDSSSSIAIGKNITNLQSFSPSTPPLTTSSNCRIVKRRKGIPHRSPMG

SEQ ID NO: 31082 - protein, 166 aa, Arabidopsis thaliana
  misc_feature (1)..(166): Ceres Seq. ID no. 4986871
MYCLDCTNGPLCSLCLAHHKDHRTIQIRRSSYHDVIRVNEIQKYLDIGGIQTYVINSAKVVFLNERPQPRPGKGVTNTCKVCYRSLVDDSFRFCSLGCKIAGTSRGFEKGRENLLMETEDSSSSIAIGKNITNLQSFSPSTPPLTTSSNCRIVKRRKGIPHRSPMG

SEQ ID NO: 31083 - DNA, 1758 bp, Arabidopsis thaliana
  misc_feature (1)..(1758): Ceres Seq. ID no. 4987023
atggaggaagctcaccagctggagtcgagatccgatgacctaagtcaacggagaagctactggagatggaggaagcaggattttttcccggaattctcttttcagagcttctctacctacaaatcagctctctccgccacttgtccacgcctcgccgatcgtcttctctctcgctcttccgatgcgtacgagctcgatgcagcccgccgcgaaagcgagaaccctatgcgtcgttgtctcacttggtgggacttgctctggcttagctttggttctgttgttggttcgggtgtgttcgtgatcacgggtcaggaggctcgagttggagctggtcctgctgttgttctctcctacgctatctctggtgtctctgcattgctctcagttctctgttatgctgagtttggagttgagattcctgtcgctggaggttctttctcttatcttagggttgaattgggggattttattgcctttattgctgctgggaatattcttcttgaggctatggttggtgctgctggattagggaggtcatggtcttcgtatctagctagtttggtcaagaatgattctgattattttcggattaaagtcgattcctttgctaaagggtttgatcttttggatccggttgctgttgcagtgcttttagttgctaatggtattgccatgactggaacaaagaggacttcttggttgaatttgattacttccatggtcactgtttgtattattgtgtttatcgtcgttgtggggtttactcattcaaaaacctcaaatttggttccttttttcccttatggagcgaaaggtgtggtgcaatctgctgcagttgtctactggtcatacactggttttgatatggtggctaacatggctgaagaaaccgagaaaccttccagagatattccaattggtttggttggttcgatgtctatgatcactgtggtttactgtttgatggctctggccttgactatgatggtgaaatacactgaaattgatgcgaatgcagcttattctgttgcttttgctcagattgggatgaaatgggcgaagtacttggttggtatatgcgctttaaagggaatgaccacaagcctgcttgttggctctctaggccaagctcggtacaccactcagattgctcggtctcatatgattcctccatggtttgctttggttcatccaaaaacaggaacccctatttatgctactctccttgtaaccatactcagttcaataatatccttcttcaccagcttagaggttttatcaagcgttttctcctttgctaccctcttcattttcatgctcgtggcagtagcattgcttgtgagacgttactacgtgaaggatgtcactcctgaggccggtttgttgaagtttcttggttttctgtttttgataattgcttcctccattggagtatcagcgctttggaactcaggcgttaaaggttggatcgcttacacagtgactggagttatttggtttataggcactttagggttggcattgcttccgaaatatcgtgttcctaaggtatggggagtcccactagttccgtggttgccatcgttttcaatcgccatgaatctattccttatcggatcactcggttatgtagcattcttgagattcattatctgcaccatggtgatgcttttgtactacctattcgttggtcttcatgcaacctatgatgtagctcatcagcctttggaggaagcaaagtttgagggagagagataa

SEQ ID NO: 31084 - protein, 585 aa, Arabidopsis thaliana
  misc_feature (1)..(585): Ceres Seq. ID no. 4987024
MEEAHQLESRSDDLSQRRSYWRWRKQDFFPEFSFQSFSTYKSALSATCPRLADRLLSRSSDAYELDAARRESENPMRRCLTWWDLLWLSFGSVVGSGVFVITGQEARVGAGPAVVLSYAISGVSALLSVLCYAEFGVEIPVAGGSFSYLRVELGDFIAFIAAGNILLEAMVGAAGLGRSWSSYLASLVKNDSDYFRIKVDSFAKGFDLLDPVAVAVLLVANGIAMTGTKRTSWLNLITSMVTVCIIVFIVVVGFTHSKTSNLVPFFPYGAKGVVQSAAVVYWSYTGFDMVANMAEETEKPSRDIPIGLVGSMSMITVVYCLMALALTMMVKYTEIDANAAYSVAFAQIGMKWAKYLVGICALKGMTTSLLVGSLGQARYTTQIARSHMIPPWFALVHPKTGTPIYATLLVTILSSIISFFTSLEVLSSVFSFATLFIFMLVAVALLVRRYYVKDVTPEAGLLKFLGFLFLIIASSIGVSALWNSGVKGWIAYTVTGVIWFIGTLGLALLPKYRVPKVWGVPLVPWLPSFSIAMNLFLIGSLGYVAFLRFIICTMVMLLYYLFVGLHATYDVAHQPLEEAKFEGER

SEQ ID NO: 31085 - protein, 510 aa, Arabidopsis thaliana
  misc_feature (1)..(510): Ceres Seq. ID no. 4987025
MRRCLTWWDLLWLSFGSVVGSGVFVITGQEARVGAGPAVVLSYAISGVSALLSVLCYAEFGVEIPVAGGSFSYLRVELGDFIAFIAAGNILLEAMVGAAGLGRSWSSYLASLVKNDSDYFRIKVDSFAKGFDLLDPVAVAVLLVANGIAMTGTKRTSWLNLITSMVTVCIIVFIVVVGFTHSKTSNLVPFFPYGAKGVVQSAAVVYWSYTGFDMVANMAEETEKPSRDIPIGLVGSMSMITVVYCLMALALTMMVKYTEIDANAAYSVAFAQIGMKWAKYLVGICALKGMTTSLLVGSLGQARYTTQIARSHMIPPWFALVHPKTGTPIYATLLVTILSSIISFFTSLEVLSSVFSFATLFIFMLVAVALLVRRYYVKDVTPEAGLLKFLGFLFLIIASSIGVSALWNSGVKGWIAYTVTGVIWFIGTLGLALLPKYRVPKVWGVPLVPWLPSFSIAMNLFLIGSLGYVAFLRFIICTMVMLLYYLFVGLHATYDVAHQPLEEAKFEGER

SEQ ID NO: 31086 - protein, 416 aa, Arabidopsis thaliana
  misc_feature (1)..(416): Ceres Seq. ID no. 4987026
MVGAAGLGRSWSSYLASLVKNDSDYFRIKVDSFAKGFDLLDPVAVAVLLVANGIAMTGTKRTSWLNLITSMVTVCIIVFIVVVGFTHSKTSNLVPFFPYGAKGVVQSAAVVYWSYTGFDMVANMAEETEKPSRDIPIGLVGSMSMITVVYCLMALALTMMVKYTEIDANAAYSVAFAQIGMKWAKYLVGICALKGMTTSLLVGSLGQARYTTQIARSHMIPPWFALVHPKTGTPIYATLLVTILSSIISFFTSLEVLSSVFSFATLFIFMLVAVALLVRRYYVKDVTPEAGLLKFLGFLFLIIASSIGVSALWNSGVKGWIAYTVTGVIWFIGTLGLALLPKYRVPKVWGVPLVPWLPSFSIAMNLFLIGSLGYVAFLRFIICTMVMLLYYLFVGLHATYDVAHQPLEEAKFEGER

SEQ ID NO: 31087 - DNA, 2253 bp, Arabidopsis thaliana
  misc_feature (1)..(2253): Ceres Seq. ID no. 4987027
atggcgccgtgcattgattttgtgttcatggcttttggtttgcttctcttgctcatcgccgtcacaacaagtcgcccaatcactcggccaaaagtattcgacgttcgaagttatggtgctaaaggtgacggtaaaatggataacaccaatgcgttcacaaatgcatggaaagatgcatgcagatggaatggaccaagcaaaatgtacataccactaggaacattctatcttggtggtgtaacgtttgtaggaccatgcgatggtaagatctcgtttgtcattgatggaactttgttggctcctccgaacaacgacgacattaaaaaggaaatatggataaacttccgctacatcaactatctcacggtcttcggggatggcaccctcgacggccaaggaaaaaagtcatggtcactaattgattgccagaaggacaataattgtcccaaactcgctataaatatggggttcgatttcgtaaaaaactcaagcatgaatgggataacatcactcaacagtaaagccggacacttcaatttcttatccgttgaccacttcagcatcactagagtcaacataatagctcccagcaatagtcccaacactgacggaatcaaaatagctttatcaagtaacatgcaaatctcaaacactcacatcagcaccggagacgattgtatcgcaatgctctctggaaacacaaattttgatatctataatgtcaagtgcggaccgggacatggaattagtattggaagcttaggaaaaaacaaagacgaaaagaatgttaatggtttaatggttagaaattcggtctttaccggtacgaccaacggtatacggatcaagacatgggaatcttcagcttcaacaatccgaattatcaatttagtgtatgagaatctacagatgataaatgttgaaaatcctatcggcattgatcaaaaatactgtccttacccgccatgcagcaatatgggagattctcacattcagatccgaaacgtgacactaaagaacatttggggaacatcaaagaataaagtggctgtgaaatttcaatgtagcaaaacctttccttgcaaagatgttcagttaattgacattaacttaactcaccatggagtcgacggtcctgcaagtgcgttgtgtgagaacgttgatggatctgctactgggaagatgcttcagatcagtactgtgaatcccaatccagctcaatctcgattttcccgccctcgatccctccgtgttctctcactctccgccgatccatcggcaaatcggaatcctaaatcagccgttgacgcacacgcgccgccactggtggttgtgggatctgcgaacgccgatatctatgtggagatcgagagattacccaaggaaggggaaacgatttcggccaagacagggcaaacgctcgccggaggaaaaggcgcgaatcaggcggcgtgtggagcgaagctaatgtatccgacttacttcgttggtcgtttgggagaggacgcgcacgggaagctaatagctgaggcgttgggcgatgatgggtgtggggttcacttggactacgtgagatctgtgaataatgagccgacgggacacgcggtggtgatgcttcagtcggacggtcagaattcgatcattatcgttggtggtgcaaatatgaaagcttggcctgagattatgagcgatgatgatcttgagattgtgaggaatgctggtattgtgcttctgcaaagggagatcccagattccatcaatattcaagttgctaaggctgtgaagaaagcaggtgttccagtcatccttgatgtgggaggaatggatacgcctataccaaatgagctattggattccattgatatcttgagccccaatgaaactgagctcagtcgcttgacaggaatgccaactgaaacttttgaacagattagccaagctgttgcaaagtgccataagttgggagttaagcaagttctagtaaaactcgggtccaaaggatctgcactattcatacaaggggaaaaaccaatccagcagtctatcataccggctgcacaagtggttgatactacaggagctggggatactttcactgcagcatttgcagtcgctatggtagagggcaagtcccatgaggaatgcttgagatttgctgctgcagctgcctctctttgtgtccaagtaaagggtgcaataccgagcatgcctgaccgaaaatctgttttgaagctccttaaatttagtatctaa

SEQ ID NO: 31088 - protein, 750 aa, Arabidopsis thaliana
  misc_feature (1)..(750): Ceres Seq. ID no. 4987028
MAPCIDFVFMAFGLLLLLIAVTTSRPITRPKVFDVRSYGAKGDGKMDNTNAFTNAWKDACRWNGPSKMYIPLGTFYLGGVTFVGPCDGKISFVIDGTLLAPPNNDDIKKEIWINFRYINYLTVFGDGTLDGQGKKSWSLIDCQKDNNCPKLAINMGFDFVKNSSMNGITSLNSKAGHFNFLSVDHFSITRVNIIAPSNSPNTDGIKIALSSNMQISNTHISTGDDCIAMLSGNTNFDIYNVKCGPGHGISIGSLGKNKDEKNVNGLMVRNSVFTGTTNGIRIKTWESSASTIRIINLVYENLQMINVENPIGIDQKYCPYPPCSNMGDSHIQIRNVTLKNIWGTSKNKVAVKFQCSKTFPCKDVQLIDINLTHHGVDGPASALCENVDGSATGKMLQISTVNPNPAQSRFSRPRSLRVLSLSADPSANRNPKSAVDAHAPPLVVVGSANADIYVEIERLPKEGETISAKTGQTLAGGKGANQAACGAKLMYPTYFVGRLGEDAHGKLIAEALGDDGCGVHLDYVRSVNNEPTGHAVVMLQSDGQNSIIIVGGANMKAWPEIMSDDDLEIVRNAGIVLLQREIPDSINIQVAKAVKKAGVPVILDVGGMDTPIPNELLDSIDILSPNETELSRLTGMPTETFEQISQAVAKCHKLGVKQVLVKLGSKGSALFIQGEKPIQQSIIPAAQVVDTTGAGDTFTAAFAVAMVEGKSHEECLRFAAAAASLCVQVKGAIPSMPDRKSVLKLLKFSI

SEQ ID NO: 31089 - protein, 741 aa, Arabidopsis thaliana
  misc_feature (1)..(741): Ceres Seq. ID no. 4987029
MAFGLLLLLIAVTTSRPITRPKVFDVRSYGAKGDGKMDNTNAFTNAWKDACRWNGPSKMYIPLGTFYLGGVTFVGPCDGKISFVIDGTLLAPPNNDDIKKEIWINFRYINYLTVFGDGTLDGQGKKSWSLIDCQKDNNCPKLAINMGFDFVKNSSMNGITSLNSKAGHFNFLSVDHFSITRVNIIAPSNSPNTDGIKIALSSNMQISNTHISTGDDCIAMLSGNTNFDIYNVKCGPGHGISIGSLGKNKDEKNVNGLMVRNSVFTGTTNGIRIKTWESSASTIRIINLVYENLQMINVENPIGIDQKYCPYPPCSNMGDSHIQIRNVTLKNIWGTSKNKVAVKFQCSKTFPCKDVQLIDINLTHHGVDGPASALCENVDGSATGKMLQISTVNPNPAQSRFSRPRSLRVLSLSADPSANRNPKSAVDAHAPPLVVVGSANADIYVEIERLPKEGETISAKTGQTLAGGKGANQAACGAKLMYPTYFVGRLGEDAHGKLIAEALGDDGCGVHLDYVRSVNNEPTGHAVVMLQSDGQNSIIIVGGANMKAWPEIMSDDDLEIVRNAGIVLLQREIPDSINIQVAKAVKKAGVPVILDVGGMDTPIPNELLDSIDILSPNETELSRLTGMPTETFEQISQAVAKCHKLGVKQVLVKLGSKGSALFIQGEKPIQQSIIPAAQVVDTTGAGDTFTAAFAVAMVEGKSHEECLRFAAAAASLCVQVKGAIPSMPDRKSVLKLLKFSI

SEQ ID NO: 31090 - protein, 705 aa, Arabidopsis thaliana
  misc_feature (1)..(705): Ceres Seq. ID no. 4987030
MDNTNAFTNAWKDACRWNGPSKMYIPLGTFYLGGVTFVGPCDGKISFVIDGTLLAPPNNDDIKKEIWINFRYINYLTVFGDGTLDGQGKKSWSLIDCQKDNNCPKLAINMGFDFVKNSSMNGITSLNSKAGHFNFLSVDHFSITRVNIIAPSNSPNTDGIKIALSSNMQISNTHISTGDDCIAMLSGNTNFDIYNVKCGPGHGISIGSLGKNKDEKNVNGLMVRNSVFTGTTNGIRIKTWESSASTIRIINLVYENLQMINVENPIGIDQKYCPYPPCSNMGDSHIQIRNVTLKNIWGTSKNKVAVKFQCSKTFPCKDVQLIDINLTHHGVDGPASALCENVDGSATGKMLQISTVNPNPAQSRFSRPRSLRVLSLSADPSANRNPKSAVDAHAPPLVVVGSANADIYVEIERLPKEGETISAKTGQTLAGGKGANQAACGAKLMYPTYFVGRLGEDAHGKLIAEALGDDGCGVHLDYVRSVNNEPTGHAVVMLQSDGQNSIIIVGGANMKAWPEIMSDDDLEIVRNAGIVLLQREIPDSINIQVAKAVKKAGVPVILDVGGMDTPIPNELLDSIDILSPNETELSRLTGMPTETFEQISQAVAKCHKLGVKQVLVKLGSKGSALFIQGEKPIQQSIIPAAQVVDTTGAGDTFTAAFAVAMVEGKSHEECLRFAAAAASLCVQVKGAIPSMPDRKSVLKLLKFSI

SEQ ID NO: 31091 - DNA, 1995 bp, Arabidopsis thaliana
  misc_feature (1)..(1995): Ceres Seq. ID no. 4988544
atggggttagggcattgcatggtttacgttgtggtcctaagtgccattgcggctacagtgacatcatacccttactcctctccttactcatcccctcaaaccccacattacaattctcccagccatgaacacaaaagccctaagtacgcgccacatccaaaaccatacgtttatatttctccaccacctccatcatactattctccttctccaaaagtaaactataagtctccaccaccaccaaacgtctacaactctccacctccaccatactattctccttcaccaaaggttgattataagtctccaccaccaccttacgtctacagttccccacctccaccatactattctccttctccgaaggttgactataagtctcctccaccaccatacgtctacagctccccacccccaccatactattctccttcgccaaaggttgaatacaagtctccaccaccaccgtacgtctacaattctccacctccaccatactactctccttctcctaagatagagtacaagtccccaccaccaccatatgtctacagttctccacccccaccgtactactctccatctccaaaggttgactacaagtccccaccaccaccgtacgtctacaactccccacccccaccatactactctccttcgccaaaggttgactacaaatctcccccaccaccgtacgtctacagttccccacccccaccatacttctctccttcgccaaaggttgaatacaagtctcccccaccaccgtacgtctacaattctccacctccaccatactactctccttctcctaaggtagagtacaagtccccaccaccaccatatgtctacagctctccacccccaccgtactactcaccatctccaaaagtttactacaagtccccaccaccaccatacgtctacagctccccacccccaccatactactctccatctccaaaggttgactacaagtccccaccaccaccgtatgtttacagctctccacccccaccatactactctccttcgcctaaggttgactacaagtctcccccaccaccatacgtctacagctccccgcccccacaatactactctccttcgccaaaggttgcgtacaagtctcccccaccaccatacgtctacagctctccgcccccaccttactactctccttcaccaaaggttgcgtacaagtctcccccaccaccatacgtctacagctccccgcccccaccatactactctccttcacctaaggttgattacaagtctcccccaccaccatacgtctacagctcccctcctccaccttactactctccttcaccaaaggttgagtacaagtctcccccaccaccatacgtctacagctcccctcccccaccttactactctccttcaccaaaggttgagtacaagtctccaccaccaccatacgtctacagttcccctcccccaccataccactctccttcgcctaaggtaaactacaaatctccaccaccaccatacgtctacagctcccatcccccaccatactactctccttcgcctaaggtaaactacaaatctccaccaccaccatacgtctacagctccccacccccaccatactactctccttcgcctaaggttaactacaagtctcccccaccaccatacgtttacagttctccgcccccaccatactactctccttctcctatggttgactacaagtctacccccccaccatacgtctatagcttcccacccctaccatattattctccttctccaaaggttgactacaagtctccaccactaccatacgtttacagctccccacccccactatattactctccttctccaaaggttcattacaaatctccaccaccaccatacgtgtataactctccacctccaccatactattctccttctccaaaggtcacttacaagtctccaccacccccatatgtctacaaggcgccttactattga

SEQ ID NO: 31092 - protein, 664 aa, Arabidopsis thaliana
  misc_feature (1)..(664): Ceres Seq. ID no. 4988545
MGLGHCMVYVVVLSAIAATVTSYPYSSPYSSPQTPHYNSPSHEHKSPKYAPHPKPYVYISPPPPSYYSPSPKVNYKSPPPPNVYNSPPPPYYSPSPKVDYKSPPPPYVYSSPPPPYYSPSPKVDYKSPPPPYVYSSPPPPYYSPSPKVEYKSPPPPYVYNSPPPPYYSPSPKIEYKSPPPPYVYSSPPPPYYSPSPKVDYKSPPPPYVYNSPPPPYYSPSPKVDYKSPPPPYVYSSPPPPYFSPSPKVEYKSPPPPYVYNSPPPPYYSPSPKVEYKSPPPPYVYSSPPPPYYSPSPKVYYKSPPPPYVYSSPPPPYYSPSPKVDYKSPPPPYVYSSPPPPYYSPSPKVDYKSPPPPYVYSSPPPQYYSPSPKVAYKSPPPPYVYSSPPPPYYSPSPKVAYKSPPPPYVYSSPPPPYYSPSPKVDYKSPPPPYVYSSPPPPYYSPSPKVEYKSPPPPYVYSSPPPPYYSPSPKVEYKSPPPPYVYSSPPPPYHSPSPKVNYKSPPPPYVYSSHPPPYYSPSPKVNYKSPPPPYVYSSPPPPYYSPSPKVNYKSPPPPYVYSSPPPPYYSPSPMVDYKSTPPPYVYSFPPLPYYSPSPKVDYKSPPLPYVYSSPPPLYYSPSPKVHYKSPPPPYVYNSPPPPYYSPSPKVTYKSPPPPYVYKAPYY

SEQ ID NO: 31093 - protein, 658 aa, Arabidopsis thaliana
  misc_feature (1)..(658): Ceres Seq. ID no. 4988546
MVYVVVLSAIAATVTSYPYSSPYSSPQTPHYNSPSHEHKSPKYAPHPKPYVYISPPPPSYYSPSPKVNYKSPPPPNVYNSPPPPYYSPSPKVDYKSPPPPYVYSSPPPPYYSPSPKVDYKSPPPPYVYSSPPPPYYSPSPKVEYKSPPPPYVYNSPPPPYYSPSPKIEYKSPPPPYVYSSPPPPYYSPSPKVDYKSPPPPYVYNSPPPPYYSPSPKVDYKSPPPPYVYSSPPPPYFSPSPKVEYKSPPPPYVYNSPPPPYYSPSPKVEYKSPPPPYVYSSPPPPYYSPSPKVYYKSPPPPYVYSSPPPPYYSPSPKVDYKSPPPPYVYSSPPPPYYSPSPKVDYKSPPPPYVYSSPPPQYYSPSPKVAYKSPPPPYVYSSPPPPYYSPSPKVAYKSPPPPYVYSSPPPPYYSPSPKVDYKSPPPPYVYSSPPPPYYSPSPKVEYKSPPPPYVYSSPPPPYYSPSPKVEYKSPPPPYVYSSPPPPYHSPSPKVNYKSPPPPYVYSSHPPPYYSPSPKVNYKSPPPPYVYSSPPPPYYSPSPKVNYKSPPPPYVYSSPPPPYYSPSPMVDYKSTPPPYVYSFPPLPYYSPSPKVDYKSPPLPYVYSSPPPLYYSPSPKVHYKSPPPPYVYNSPPPPYYSPSPKVTYKSPPPPYVYKAPYY

SEQ ID NO: 31094 - DNA, 2134 bp, Arabidopsis thaliana
  misc_feature (1)..(2134): Ceres Seq. ID no. 4989202
aaacgacaataagctccacagtgagttcttctcagcaatcacaatctatctggtttaagccctcactatcctctctctcaaatcgcggagtctccgaagtttctctggtaattttcaaatctgaagttttgctttggatatcacgatttttgttaatcagccgcgatcgagaagagcgtttttactctctcgttcgcatcaatgcaacatatttcccaatttcgtgatgttgcgtcttcatcgttccttacttctctctttttgagttctgtttggtataaatgcgatccttttttttccttccttgcctaatatttctcgtttccttgcaattacggttataaaaagtcagacaaaatgcagtcgtcaacgtatgcggttaaaggaaacgctgcgtttgcgtttcagagacggaccttctcttctgacagatcgacgacttctaccggaattcgcttcgctggttataagagcttagccaccaccgggccactctactgttctggttctgaagccatgggagcgacgcttgctcgtgctgataacgggatccagagcgttatgagtttctcttctgtcaaagctcgatcggtcagagctcaagcctcatctgatggagatgaagaagaagctatacctctgagatctgaagggaaaagctctggaacagttttgccttttgttggtgttgcttgtcttggtgctatactctttggttatcatctcggggtggttaatggtgctcttgaatatcttgctaaggatcttgggatcgccgaaaatactgttttgcaaggatggattgttagttctctgcttgctggtgctacggtaggttcattcactggaggtgcattagctgacaaatttggacgaacaagaacttttcaattggatgctatcccgcttgccattggagctttcttatgtgcaacagctcagagtgtgcagactatgattgtgggacgtctgctcgctggaattggaattggaatctcatcagcgattgtaccactttacatatctgagatatcaccaactgaaatccgtggagcactcggatctgtgaaccagttgttcatctgtataggaatacttgcagccttgatagctggattaccccttgcagcaaaccctctatggtggaggacgatgtttggtgttgcagttatcccttccgttctattggccataggaatggctttttctccagaaagcccaaggtggctcgttcagcaaggaaaagtctctgaagctgaaaaggcgatcaaaactttgtatggtaaagaaagagtggttgaactagttcgcgacttatcagcctctggccaaggttcttctgagccggaggcaggatggtttgatctattcagcagccgctactggaaagttgtaagcgtaggtgcggctctcttcttgtttcaacagttagccgggataaacgcagttgtgtattactccacatcggtattccgtagtgcgggaatccaatcagatgttgcagccagtgctctcgttggagcatcaaatgtctttggcactgctgttgcttcatcgttgatggataaaatgggaaggaaaagtcttttactgacaagctttggtggaatggctttgtcaatgctgttactctccttgtccttcacatggaaggctcttgctgcctattctggaacccttgccgttgttggaactgttctatatgtcctgtcattctcacttggtgctggcccggtaccggctcttcttcttccagagatatttgcatcccgaatcagagcaaaagccgtcgctctttctctcggcatgcactggatatcaaactttgtgatcggactatacttcttaagcgttgtgactaaattcggaatcagcagtgtctacttgggttttgctggagtctgcgtccttgcggtcctctacattgcaggaaacgtcgtcgagactaaaggtcgatcactggaggaaatagagcttgctcttacatctggagcttgaaattaaacaaaagaaatcagcagaacaaaaaccagtttgtttcatcatttagtttgtgagtctttctctaatctgctactcttaaattgtacaatggacgacgttatcaataacgagaaatcttttcatgaccact

SEQ ID NO: 31095 - protein, 546 aa, Arabidopsis thaliana
  misc_feature (1)..(546): Ceres Seq. ID no. 4989203
MQSSTYAVKGNAAFAFQRRTFSSDRSTTSTGIRFAGYKSLATTGPLYCSGSEAMGATLARADNGIQSVMSFSSVKARSVRAQASSDGDEEEAIPLRSEGKSSGTVLPFVGVACLGAILFGYHLGVVNGALEYLAKDLGIAENTVLQGWIVSSLLAGATVGSFTGGALADKFGRTRTFQLDAIPLAIGAFLCATAQSVQTMIVGRLLAGIGIGISSAIVPLYISEISPTEIRGALGSVNQLFICIGILAALIAGLPLAANPLWWRTMFGVAVIPSVLLAIGMAFSPESPRWLVQQGKVSEAEKAIKTLYGKERVVELVRDLSASGQGSSEPEAGWFDLFSSRYWKVVSVGAALFLFQQLAGINAVVYYSTSVFRSAGIQSDVAASALVGASNVFGTAVASSLMDKMGRKSLLLTSFGGMALSMLLLSLSFTWKALAAYSGTLAVVGTVLYVLSFSLGAGPVPALLLPEIFASRIRAKAVALSLGMHWISNFVIGLYFLSVVTKFGISSVYLGFAGVCVLAVLYIAGNVVETKGRSLEEIELALTSGA

SEQ ID NO: 31096 - protein, 493 aa, Arabidopsis thaliana
  misc_feature (1)..(493): Ceres Seq. ID no. 4989204
MGATLARADNGIQSVMSFSSVKARSVRAQASSDGDEEEAIPLRSEGKSSGTVLPFVGVACLGAILFGYHLGVVNGALEYLAKDLGIAENTVLQGWIVSSLLAGATVGSFTGGALADKFGRTRTFQLDAIPLAIGAFLCATAQSVQTMIVGRLLAGIGIGISSAIVPLYISEISPTEIRGALGSVNQLFICIGILAALIAGLPLAANPLWWRTMFGVAVIPSVLLAIGMAFSPESPRWLVQQGKVSEAEKAIKTLYGKERVVELVRDLSASGQGSSEPEAGWFDLFSSRYWKVVSVGAALFLFQQLAGINAVVYYSTSVFRSAGIQSDVAASALVGASNVFGTAVASSLMDKMGRKSLLLTSFGGMALSMLLLSLSFTWKALAAYSGTLAVVGTVLYVLSFSLGAGPVPALLLPEIFASRIRAKAVALSLGMHWISNFVIGLYFLSVVTKFGISSVYLGFAGVCVLAVLYIAGNVVETKGRSLEEIELALTSGA

SEQ ID NO: 31097 - protein, 478 aa, Arabidopsis thaliana
  misc_feature (1)..(478): Ceres Seq. ID no. 4989205
MSFSSVKARSVRAQASSDGDEEEAIPLRSEGKSSGTVLPFVGVACLGAILFGYHLGVVNGALEYLAKDLGIAENTVLQGWIVSSLLAGATVGSFTGGALADKFGRTRTFQLDAIPLAIGAFLCATAQSVQTMIVGRLLAGIGIGISSAIVPLYISEISPTEIRGALGSVNQLFICIGILAALIAGLPLAANPLWWRTMFGVAVIPSVLLAIGMAFSPESPRWLVQQGKVSEAEKAIKTLYGKERVVELVRDLSASGQGSSEPEAGWFDLFSSRYWKVVSVGAALFLFQQLAGINAVVYYSTSVFRSAGIQSDVAASALVGASNVFGTAVASSLMDKMGRKSLLLTSFGGMALSMLLLSLSFTWKALAAYSGTLAVVGTVLYVLSFSLGAGPVPALLLPEIFASRIRAKAVALSLGMHWISNFVIGLYFLSVVTKFGISSVYLGFAGVCVLAVLYIAGNVVETKGRSLEEIELALTSGA

SEQ ID NO: 31098 - DNA, 1200 bp, Arabidopsis thaliana
  misc_feature (1)..(1200): Ceres Seq. ID no. 4989667
atggagtggatggagaatcaaaaagatattgaatttagtgtttatgacattgctcttagattggatttgatcatcaaaactcatggcttgaaacaaggagaggagtattttgagaagctgctacatagttctgtgtctatgagagtagcgaaatcggcttatcttccgcttcttcgtgcttatgtgaagaataaaatggttaaagaagcggaagctctaatggagaagttgaatggattagggtttcttgttactccacacccgtttaacgaaatgatgaagctttatgaagctagtggtcagtatgagaaagtagttatggttgtttcgatgatgaaagggaataagataccaagaaacgttctttcgtataatctttggatgaatgcatgttgtgaagtgtctggagttgcggctgtggaaacggtttataaggaaatggttggtgataagagtgttgaagttgggtggagttcgttgtgtactttagctaatgtttatattaagagtggttttgatgagaaggctaggttggtgcttgaggatgcggaaaagatgttgaatagaagtaataggcttggatatttctttcttatcacgctttatgcgtctttagggaataaggaaggagttgttcgtttgtgggaagtttctaaatcggtttgtggtaggattagttgtgtgaactacatatgtgtattgtcgtctttggtgaaaactggtgatcttgaagaggctgaaagggtgtttagtgagtgggaggctcaatgttttaactatgatgttagggtctccaatgttcttttgggtgcttatgtgcgtaatggagaaatccggaaagccgagtcattgcatggttgtgtgttggagagaggaggtactccaaactacaagacctgggaaatcttaatggagggatgggtgaaatgtgagaatatggagaaagccattgatgctatgcaccaagtgtttgtactaatgaggcggtgtcattggaggccatcccataacatcgtcatggcgattgccgagtactttgagaaagaggagaaaattgaagaagcaactgcatatgttagagatttgcatcgtcttggtcttgcaagcttaccattatacagattgttacttagaatgcatgaacatgccaaaagaccagcttatgatatctatgaaatgatgaagttggacaaactatga

SEQ ID NO: 31099 - protein, 399 aa, Arabidopsis thaliana; identical to SEQ ID NO: 27975
  misc_feature (1)..(399): Ceres Seq. ID no. 4989668

SEQ ID NO: 31100 - protein, 396 aa, Arabidopsis thaliana
  misc_feature (1)..(396): Ceres Seq. ID no. 4989669
MENQKDIEFSVYDIALRLDLIIKTHGLKQGEEYFEKLLHSSVSMRVAKSAYLPLLRAYVKNKMVKEAEALMEKLNGLGFLVTPHPFNEMMKLYEASGQYEKVVMVVSMMKGNKIPRNVLSYNLWMNACCEVSGVAAVETVYKEMVGDKSVEVGWSSLCTLANVYIKSGFDEKARLVLEDAEKMLNRSNRLGYFFLITLYASLGNKEGVVRLWEVSKSVCGRISCVNYICVLSSLVKTGDLEEAERVFSEWEAQCFNYDVRVSNVLLGAYVRNGEIRKAESLHGCVLERGGTPNYKTWEILMEGWVKCENMEKAIDAMHQVFVLMRRCHWRPSHNIVMAIAEYFEKEEKIEEATAYVRDLHRLGLASLPLYRLLLRMHEHAKRPAYDIYEMMKLDKL

SEQ ID NO: 31101 - protein, 353 aa, Arabidopsis thaliana
  misc_feature (1)..(353): Ceres Seq. ID no. 4989670
MRVAKSAYLPLLRAYVKNKMVKEAEALMEKLNGLGFLVTPHPFNEMMKLYEASGQYEKVVMVVSMMKGNKIPRNVLSYNLWMNACCEVSGVAAVETVYKEMVGDKSVEVGWSSLCTLANVYIKSGFDEKARLVLEDAEKMLNRSNRLGYFFLITLYASLGNKEGVVRLWEVSKSVCGRISCVNYICVLSSLVKTGDLEEAERVFSEWEAQCFNYDVRVSNVLLGAYVRNGEIRKAESLHGCVLERGGTPNYKTWEILMEGWVKCENMEKAIDAMHQVFVLMRRCHWRPSHNIVMAIAEYFEKEEKIEEATAYVRDLHRLGLASLPLYRLLLRMHEHAKRPAYDIYEMMKLDKL

SEQ ID NO: 31102 - DNA, 1918 bp, Arabidopsis thaliana
  misc_feature (1)..(1918): Ceres Seq. ID no. 4989983
gtacttgatatttaaaatcgatttctgatacacttgttagattgagacaatgagcaagggggcggcaataatagcttatgcaaatcccatctttcatattcgacatctaaagcttgaatctttcttgtggaacatcatcattcgtgccattgttcacaatgtttcgtcgcctcaacgacattctccgatctcagtctacctccgtatgcgcaaccatcgcgtctctcccgattttcatacctttccgtttcttctcccttctttccacaatccgcttcatcttcctcttgggcaacgaactcatgctcagattcttctttttggacttgacaaagacccatttgtccgaacttcactgctcaacatgtattcttcctgtggcgacttgagatcagctcagcgagttttcgatgactcgggctcgaaggatttaccggcctggaactctgtggtcaatgcttatgccaaagctgggttgatcgatgatgcgcggaaactgttcgacgaaatgcctgaaagaaacgtgatttcctggagctgcttgattaacggctacgttatgtgtgggaaatacaaagaagcgcttgatttgttccgggagatgcaattacctaaaccaaacgaagcattcgtcagacccaacgagtttacaatgtcgactgtactctcggcttgtgggcgattgggtgcgctcgagcaagggaaatgggttcacgcttacatcgataagtaccacgttgagattgacattgtcttaggcacagctctcattgatatgtacgccaaatgtgggagcctcgagagggcgaaaagggttttcaatgccttgggatccaagaaagatgtcaaagcttacagtgctatgatatgttgcttagcaatgtacggtctcacagatgagtgcttccaactgttctctgagatgaccacgagtgacaacataaacccaaactctgtgacatttgtgggcattctcggtgcttgtgtacatcgaggtctaataaacgaaggaaaatcttactttaaaatgatgattgaggaatttggtatcacgccatcaatccagcattatggttgtatggttgatctctacggaagatctggtttgatcaaagaagcagagagctttatagcatctatgcctatggagcctgatgtacttatttgggggtctctcttaagcggatcaagaatgcttggggatatcaagacttgtgaaggtgccctcaagcgactcatcgagctagatcctatgaacagtggagcatatgtgcttctctctaacgtctatgccaaaacagggaggtggatggaagtcaagtgtatcagacacgaaatggaggcaatgcaaaactatttccctcttttccaactcttttcttaactgttgcacagtttctgaagtaaatacagattctctctacaggtaaagggcattaataaagttccgggatgtagctatgttgaagtagagggagtggttcacgagtttgttgtaggagacgaatctcaacaagagagcgaaaggatctatgctatgctcgatgagataatgcagaggctgagagaagctggatatgttacagacactaaggaggttttacttgatcttaacgagaaagataaagagatagctttgtcttaccacagtgagaaactggctattgcgttctgtttgatgaagacaaggcctggaactccagtgagaatcatcaagaacctcagaatctgtggagattgtcatcttgtaatgaagatgatctcgaagctttttagtagagaaattgttgtgagagattgtaatagatttcaccattttagagacgggtcttgctcttgcagagatttttggtgataacaattgcagcaatgtttgtgttggattgaataaacacattactgaattttggaggttttg

SEQ ID NO: 31103 - protein, 444 aa, Arabidopsis thaliana
  misc_feature (1)..(444): Ceres Seq. ID no. 4989984
MSKGAAIIAYANPIFHIRHLKLESFLWNIIIRAIVHNVSSPQRHSPISVYLRMRNHRVSPDFHTFPFLLPSFHNPLHLPLGQRTHAQILLFGLDKDPFVRTSLLNMYSSCGDLRSAQRVFDDSGSKDLPAWNSVVNAYAKAGLIDDARKLFDEMPERNVISWSCLINGYVMCGKYKEALDLFREMQLPKPNEAFVRPNEFTMSTVLSACGRLGALEQGKWVHAYIDKYHVEIDIVLGTALIDMYAKCGSLERAKRVFNALGSKKDVKAYSAMICCLAMYGLTDECFQLFSEMTTSDNINPNSVTFVGILGACVHRGLINEGKSYFKMMIEEFGITPSIQHYGCMVDLYGRSGLIKEAESFIASMPMEPDVLIWGSLLSGSRMLGDIKTCEGALKRLIELDPMNSGAYVLLSNVYAKTGRWMEVKCIRHEMEAMQNYFPLFQLFS

SEQ ID NO: 31104 - protein, 392 aa, Arabidopsis thaliana
  misc_feature (1)..(392): Ceres Seq. ID no. 4989985
MRNHRVSPDFHTFPFLLPSFHNPLHLPLGQRTHAQILLFGLDKDPFVRTSLLNMYSSCGDLRSAQRVFDDSGSKDLPAWNSVVNAYAKAGLIDDARKLFDEMPERNVISWSCLINGYVMCGKYKEALDLFREMQLPKPNEAFVRPNEFTMSTVLSACGRLGALEQGKWVHAYIDKYHVEIDIVLGTALIDMYAKCGSLERAKRVFNALGSKKDVKAYSAMICCLAMYGLTDECFQLFSEMTTSDNINPNSVTFVGILGACVHRGLINEGKSYFKMMIEEFGITPSIQHYGCMVDLYGRSGLIKEAESFIASMPMEPDVLIWGSLLSGSRMLGDIKTCEGALKRLIELDPMNSGAYVLLSNVYAKTGRWMEVKCIRHEMEAMQNYFPLFQLFS

SEQ ID NO: 31105 - protein, 339 aa, Arabidopsis thaliana
  misc_feature (1)..(339): Ceres Seq. ID no. 4989986
MYSSCGDLRSAQRVFDDSGSKDLPAWNSVVNAYAKAGLIDDARKLFDEMPERNVISWSCLINGYVMCGKYKEALDLFREMQLPKPNEAFVRPNEFTMSTVLSACGRLGALEQGKWVHAYIDKYHVEIDIVLGTALIDMYAKCGSLERAKRVFNALGSKKDVKAYSAMICCLAMYGLTDECFQLFSEMTTSDNINPNSVTFVGILGACVHRGLINEGKSYFKMMIEEFGITPSIQHYGCMVDLYGRSGLIKEAESFIASMPMEPDVLIWGSLLSGSRMLGDIKTCEGALKRLIELDPMNSGAYVLLSNVYAKTGRWMEVKCIRHEMEAMQNYFPLFQLFS

SEQ ID NO: 31106 - DNA, 864 bp, Arabidopsis thaliana
  misc_feature (1)..(864): Ceres Seq. ID no. 4989995
atgggaggaagtgctagtctccagtcagactcgatggaagcagcagcagcagcagattcttcgattcccagagacaaagactttggcaaattccaattcggatgcgagcactacaagagacgatgtaaaatcagagctccttgctgcaatctcatcttctcatgccgccattgccacaacgactctgcgaattctcttcctgatcctaaagaacgtcatgatttggtccgccaaaacgtcaaacaggttgtttgttcaatttgtcaaactgagcaagaggttgctaaagtctgctcgaattgtggcgtcaatatgggagaatacttttgcgatatctgcaaattctttgacgacgatatttcgaaagaacagtttcattgtgatgactgtggaatttgtagagttggtgggcgtgacaaattctttcattgccagaactgtggagcttgctacggaatgggcttgcgcgataaacactcgtgcattgagaactctacaaaaaattcttgtcctgtctgttatgagtatctatttgattcggtaaaggccgcacatgtgatgaaatgtggtcatacaatgcatatggattgctttgaacaaatgatcaatgaaaaccagtaccgatgcccaatttgtgccaagtcaatggtggatatgtctccttcgtggcacctattagatttcgagataagcgcaacagagatgcctgttgagtacaagtttgaggtttcaattctctgcaatgactgcaacaaggggagtaaagctatgttccacattttgggacacaagtgcagtgattgcggttcatacaacactcggagaatctcaacgccacaagatccagtgagtgaaacagagtga

SEQ ID NO: 31107 - protein, 287 aa, Arabidopsis thaliana
  misc_feature (1)..(287): Ceres Seq. ID no. 4989996
MGGSASLQSDSMEAAAAADSSIPRDKDFGKFQFGCEHYKRRCKIRAPCCNLIFSCRHCHNDSANSLPDPKERHDLVRQNVKQVVCSICQTEQEVAKVCSNCGVNMGEYFCDICKFFDDDISKEQFHCDDCGICRVGGRDKFFHCQNCGACYGMGLRDKHSCIENSTKNSCPVCYEYLFDSVKAAHVMKCGHTMHMDCFEQMINENQYRCPICAKSMVDMSPSWHLLDFEISATEMPVEYKFEVSILCNDCNKGSKAMFHILGHKCSDCGSYNTRRISTPQDPVSETE

SEQ ID NO: 31108 - protein, 276 aa, Arabidopsis thaliana
  misc_feature (1)..(276): Ceres Seq. ID no. 4989997
MEAAAAADSSIPRDKDFGKFQFGCEHYKRRCKIRAPCCNLIFSCRHCHNDSANSLPDPKERHDLVRQNVKQVVCSICQTEQEVAKVCSNCGVNMGEYFCDICKFFDDDISKEQFHCDDCGICRVGGRDKFFHCQNCGACYGMGLRDKHSCIENSTKNSCPVCYEYLFDSVKAAHVMKCGHTMHMDCFEQMINENQYRCPICAKSMVDMSPSWHLLDFEISATEMPVEYKFEVSILCNDCNKGSKAMFHILGHKCSDCGSYNTRRISTPQDPVSETE

SEQ ID NO: 31109 - protein, 183 aa, Arabidopsis thaliana
  misc_feature (1)..(183): Ceres Seq. ID no. 4989998
MGEYFCDICKFFDDDISKEQFHCDDCGICRVGGRDKFFHCQNCGACYGMGLRDKHSCIENSTKNSCPVCYEYLFDSVKAAHVMKCGHTMHMDCFEQMINENQYRCPICAKSMVDMSPSWHLLDFEISATEMPVEYKFEVSILCNDCNKGSKAMFHILGHKCSDCGSYNTRRISTPQDPVSETE

SEQ ID NO: 31110 - DNA, 1404 bp, Arabidopsis thaliana
  misc_feature (1)..(1404): Ceres Seq. ID no. 4990120
atgttgaaactttctcgtgatccgattctatgtatcactacattaattctcattataacattttctctcttatcctatggaactgaagcaaggctacatcatcaagcgtctcagcctccttctccctctccaaaccctaacgacccgtcgaaatctccatctcggtcccaagatctcgaccacgaagtagtttacgacgtgaggaaatacggtgcggtcggtaatggtgtcgcagatgacactgtgtcgttcaagacagcttgggattcagcttgtagcaacaacaaaaacaatactgcctccgtcttgcatgtgccttacggtttcactttcatgatccgttccactattttcactggtccttgtcgctcttaccaatacttccaagttgatgggaccatcgtgccacgggatggaccaaagtcgtggccaagcagtttaaacaaaagacaatggctcgccttttatagaatcaacggaatggctctacaaggcgccggagttatcgacggtcgtggacaaaattggtgggatcttccctgcaaacctcatcagaatgtcaacaaaactaaacttgctggtccatgtgaaagccccgccgctttaaggttcttcatgagctcgaatgtaattgtgaaaggcctaagtataaaaaacagccctcaggttcacctcaaattagatggatgtcacgtagttcacatcaactcccttcgaatcatatctccgccggctagtcccaacaccgacggtatccacattgagaactccaactccgttgagatttacaactccgttatctccaacggagatgattgtgtctccataggacccggagcatacgatatcgatatacgaaatatcacttgtggaccaggagggcatggaattagcattggaagtttgggagaaaaaaactcacatgcgtgtgtctccaacgttacggttagagactcgttcataaaattttccgaaaatggagtacgaatcaagacatggcaaggtggatcagggtccgtttcgggtgtaacgtttgacaatatccatgtagatactgtccggaatccgataatcatcgatcaatactattgcacgactaaaagttgtgctaacaaaacatcagcggtttttgtgaatgatatagtatatcaaagtataaaaggcacatacgatattcgtagtcccccaatgcattttggatgcagcaacaatgtcccgtgcacaaacttaacactttcgaatatcgaattgttaccttcaaaagaagatattgttgtgggtccgttctgttggaatgcgtatgggatcacggatgagttctctgtacctttgatctcgtgtctcaaatcgaatccttcgacatcgttgttaagtggtctttcagggaggtgtggatcaccgtga

SEQ ID NO: 31111 - protein, 467 aa, Arabidopsis thaliana
  misc_feature (1)..(467): Ceres Seq. ID no. 4990121
MLKLSRDPILCITTLILIITFSLLSYGTEARLHHQASQPPSPSPNPNDPSKSPSRSQDLDHEVVYDVRKYGAVGNGVADDTVSFKTAWDSACSNNKNNTASVLHVPYGFTFMIRSTIFTGPCRSYQYFQVDGTIVPRDGPKSWPSSLNKRQWLAFYRINGMALQGAGVIDGRGQNWWDLPCKPHQNVNKTKLAGPCESPAALRFFMSSNVIVKGLSIKNSPQVHLKLDGCHVVHINSLRIISPPASPNTDGIHIENSNSVEIYNSVISNGDDCVSIGPGAYDIDIRNITCGPGGHGISIGSLGEKNSHACVSNVTVRDSFIKFSENGVRIKTWQGGSGSVSGVTFDNIHVDTVRNPIIIDQYYCTTKSCANKTSAVFVNDIVYQSIKGTYDIRSPPMHFGCSNNVPCTNLTLSNIELLPSKEDIVVGPFCWNAYGITDEFSVPLISCLKSNPSTSLLSGLSGRCGSP

SEQ ID NO: 31112 - protein, 356 aa, Arabidopsis thaliana
  misc_feature (1)..(356): Ceres Seq. ID no. 4990122
MIRSTIFTGPCRSYQYFQVDGTIVPRDGPKSWPSSLNKRQWLAFYRINGMALQGAGVIDGRGQNWWDLPCKPHQNVNKTKLAGPCESPAALRFFMSSNVIVKGLSIKNSPQVHLKLDGCHVVHINSLRIISPPASPNTDGIHIENSNSVEIYNSVISNGDDCVSIGPGAYDIDIRNITCGPGGHGISIGSLGEKNSHACVSNVTVRDSFIKFSENGVRIKTWQGGSGSVSGVTFDNIHVDTVRNPIIIDQYYCTTKSCANKTSAVFVNDIVYQSIKGTYDIRSPPMHFGCSNNVPCTNLTLSNIELLPSKEDIVVGPFCWNAYGITDEFSVPLISCLKSNPSTSLLSGLSGRCGSP

SEQ ID NO: 31113 - protein, 307 aa, Arabidopsis thaliana
  misc_feature (1)..(307): Ceres Seq. ID no. 4990123
MALQGAGVIDGRGQNWWDLPCKPHQNVNKTKLAGPCESPAALRFFMSSNVIVKGLSIKNSPQVHLKLDGCHVVHINSLRIISPPASPNTDGIHIENSNSVEIYNSVISNGDDCVSIGPGAYDIDIRNITCGPGGHGISIGSLGEKNSHACVSNVTVRDSFIKFSENGVRIKTWQGGSGSVSGVTFDNIHVDTVRNPIIIDQYYCTTKSCANKTSAVFVNDIVYQSIKGTYDIRSPPMHFGCSNNVPCTNLTLSNIELLPSKEDIVVGPFCWNAYGITDEFSVPLISCLKSNPSTSLLSGLSGRCGSP

SEQ ID NO: 31114 - DNA, 1296 bp, Arabidopsis thaliana
  misc_feature (1)..(1296): Ceres Seq. ID no. 4991085
atgagttctggtctgaacgaagatttcctcgattgtatcgtgcgtttagaggagacacatgttcaacaaggcttcgatgagggttacgaagaaggtcttgtgtccggtcgtgaagacgctcgtcatctgggtttgaaactcgggttcgagacaggcgagctgattggattctacagaggttgctctgctctttggaattcagctctccgtattgatcctacacgcttctctcctcagctccataagcatctcaatgatttccatgtcttgctcgataaaatcccgcttttggatcccgaggacgaagctaaagacgggatcaaggatgatctcagagtcaaattcagcatcatttgtgcatctctcggcttttccaagaaacaatttgagtggtcggaggagatgttgagagaaatgcttggttgttgcaaggtttacatatctgaagcgcggaataagacggccctcgaagccattgagagagctttaaagccttttccaccagctgcaattgtcaacaagtttgaagatgcggcttatggcagggttggttacactgttgtatcctcgcttgctaacgggtcgtcttcttccttgaagaatgcggtgtttgctatggttaagactgctctcgacactatcaatcttgagttgcactgtggatctcatccccgccttggagtggttgaccacatatgctttcaccccttatctcaaacctctatagaacaagtttcttccgtcgccaattcccttgcaatggatatcggctccattcttcgagttcctacatatctctatggagcagcagaaaaggagcagtgcaccctggattcgatcagaagaaagctggggtacttcaaggcaaacagggagggacatgaatgggcaggtgggtttgacctggagatggtgccactgaagccagacgcagggccacaagaggtgagcaaagccaaaggggttgtagcggttggggcgtgtgggtgggtaagtaactataacgtgcctgtcatgtcaaacgatctcaaggcagtgaggagaatagcgaggaagacgagcgagagaggagggggcttggcttcagtgcagacaatggcgctggtgcacggggaaggagtcatagaggttgcctgtaacttgttgaatccaagccaagtggggggagatgaagtacagggactgatcgagaggcttggcagagaggaaggtctgcttgtgggaaaagggtattatacggactatacacctgaccagatcgttgaaagatatatggacttgctcaacaattcataa

SEQ ID NO: 31115 - protein, 431 aa, Arabidopsis thaliana
  misc_feature (1)..(431): Ceres Seq. ID no. 4991086
MSSGLNEDFLDCIVRLEETHVQQGFDEGYEEGLVSGREDARHLGLKLGFETGELIGFYRGCSALWNSALRIDPTRFSPQLHKHLNDFHVLLDKIPLLDPEDEAKDGIKDDLRVKFSIICASLGFSKKQFEWSEEMLREMLGCCKVYISEARNKTALEAIERALKPFPPAAIVNKFEDAAYGRVGYTVVSSLANGSSSSLKNAVFAMVKTALDTINLELHCGSHPRLGVVDHICFHPLSQTSIEQVSSVANSLAMDIGSILRVPTYLYGAAEKEQCTLDSIRRKLGYFKANREGHEWAGGFDLEMVPLKPDAGPQEVSKAKGVVAVGACGWVSNYNVPVMSNDLKAVRRIARKTSERGGGLASVQTMALVHGEGVIEVACNLLNPSQVGGDEVQGLIERLGREEGLLVGKGYYTDYTPDQIVERYMDLLNNS

SEQ ID NO: 31116 - protein, 297 aa, Arabidopsis thaliana; identical to SEQ ID NO: 2428
  misc_feature (1)..(297): Ceres Seq. ID no. 4991087

SEQ ID NO: 31117 - protein, 293 aa, Arabidopsis thaliana; identical to SEQ ID NO: 2429
  misc_feature (1)..(293): Ceres Seq. ID no. 4991088

SEQ ID NO: 31118 - DNA, 681 bp, Arabidopsis thaliana
  misc_feature (1)..(681): Ceres Seq. ID no. 4991128
atggacgggcttaaagacttcagtcggatctctccggcgattcagagtcatcttatgcgggtttatttcagcttattctgtattcttgctgcgtctgcgtttggagcttaccttcacatgcgcttgaatatcggtggaaccattactaagcttggatgggttttaagtttattggagcatgtggtttcttgtcctccatataaacataaaataaggttttcacttctgcttctctttggtgttcttcatggggcttcagttggtccatgtatcaagtccacaatcgatattgattcaagcatccttatcaccgcgttcttaggaactgcggtgatatttttctgtttctcggcagtggcaatgctggcaagacgcagggagtatatctacctcggaggactgctttcgtctggcttttccttgctaacgtggctcaagaattctgatcagtttgcctctgcgacagttgagattcagatgtaccttggactcctgctcttcgtgggatgtatagtggtgaacacacaggagataatagagaaagcacactgtggtgacatggactacgcggtacattcgctgatcctttacattggctttgtacgtgtgttccttcaaattctcagtataatgtggaatacctctgccgatagaataagaagaaataatgaagaaacttag

SEQ ID NO: 31119 - protein, 226 aa, Arabidopsis thaliana
  misc_feature (1)..(226): Ceres Seq. ID no. 4991129
MDGLKDFSRISPAIQSHLMRVYFSLFCILAASAFGAYLHMRLNIGGTITKLGWVLSLLEHVVSCPPYKHKIRFSLLLLFGVLHGASVGPCIKSTIDIDSSILITAFLGTAVIFFCFSAVAMLARRREYIYLGGLLSSGFSLLTWLKNSDQFASATVEIQMYLGLLLFVGCIVVNTQEIIEKAHCGDMDYAVHSLILYIGFVRVFLQILSIMWNTSADRIRRNNEET

SEQ ID NO: 31120 - protein, 208 aa, Arabidopsis thaliana
  misc_feature (1)..(208): Ceres Seq. ID no. 4991130
MRVYFSLFCILAASAFGAYLHMRLNIGGTITKLGWVLSLLEHVVSCPPYKHKIRFSLLLLFGVLHGASVGPCIKSTIDIDSSILITAFLGTAVIFFCFSAVAMLARRREYIYLGGLLSSGFSLLTWLKNSDQFASATVEIQMYLGLLLFVGCIVVNTQEIIEKAHCGDMDYAVHSLILYIGFVRVFLQILSIMWNTSADRIRRNNEET

SEQ ID NO: 31121 - protein, 187 aa, Arabidopsis thaliana; identical to SEQ ID NO: 31063
  misc_feature (1)..(187): Ceres Seq. ID no. 4991131

SEQ ID NO: 31122 - DNA, 987 bp, Arabidopsis thaliana
  misc_feature (1)..(987): Ceres Seq. ID no. 4991233
atgtatgactatgatccaccattttcgcctctctctaaacccactaaacctccaaaagagaagaagaagcagaagacgaagaagcaagaccagtcgtcggagctggtaaatgacctgaagattccagtgatttcagacctccctttcgattttaggtattcgtattcagaaactaacccggaaattgaaccgattggattccgtgaaccgaaacggttctctccatttggaccgggtcgattggaccggaaatggactgggactaccgcactggcgtcgccggagattgatcagagtcaatgggtggaggagagagcaagagttctcggcgagactttgacagaggatgaagttacagagcttattgaacggtatcggcatagtgactgtacacgacagattaatctcgggaaaggtggtgtgactcacaatatgatagatgatattcataaccattggaagaaagctgaggcagtgaggatcaaatgcttgggagtaccaactcttgacatggacaacatatgtttccacctcgaggaaaaatccggtggaaagattgtatacagaaacataaacattctagttttgtaccggggaaggaattatgatccgaagagtcgtcccatcattccactcatgttatggaagcctcatccgccaatatacccaagacttgtaaagaatgtggctgatgggttagaatttgaagagaccaaggagatgagaaatcgtgggcttcattctcctgccttaatgaaacttactaggaatggtgtttatgttaatgtcgttggaagagtgagggaagagtttgaaacagaagagattgtgagactagattgcactcatgttgggatgagtgactgcaaacgaattggtgtgaaactaaaggagatggttccatgtgttcccatattgttcaaagatgagcagatcatactctggagagggaagaggactggtgaagaagagcttgttactctatga

SEQ ID NO: 31123 - protein, 328 aa, Arabidopsis thaliana
  misc_feature (1)..(328): Ceres Seq. ID no. 4991234
MYDYDPPFSPLSKPTKPPKEKKKQKTKKQDQSSELVNDLKIPVISDLPFDFRYSYSETNPEIEPIGFREPKRFSPFGPGRLDRKWTGTTALASPEIDQSQWVEERARVLGETLTEDEVTELIERYRHSDCTRQINLGKGGVTHNMIDDIHNHWKKAEAVRIKCLGVPTLDMDNICFHLEEKSGGKIVYRNINILVLYRGRNYDPKSRPIIPLMLWKPHPPIYPRLVKNVADGLEFEETKEMRNRGLHSPALMKLTRNGVYVNVVGRVREEFETEEIVRLDCTHVGMSDCKRIGVKLKEMVPCVPILFKDEQIILWRGKRTGEEELVTL

SEQ ID NO: 31124 - protein, 184 aa, Arabidopsis thaliana
  misc_feature (1)..(184): Ceres Seq. ID no. 4991235
MIDDIHNHWKKAEAVRIKCLGVPTLDMDNICFHLEEKSGGKIVYRNINILVLYRGRNYDPKSRPIIPLMLWKPHPPIYPRLVKNVADGLEFEETKEMRNRGLHSPALMKLTRNGVYVNVVGRVREEFETEEIVRLDCTHVGMSDCKRIGVKLKEMVPCVPILFKDEQIILWRGKRTGEEELVTL

SEQ ID NO: 31125 - DNA, 940 bp, Arabidopsis thaliana
  misc_feature (1)..(940): Ceres Seq. ID no. 4991465
gttgtattcagtcacgcgaagaagctatccaggtgatgaaagacgttctcatgatgagaaaagagacgcgagagaagcaagaagacttccttaacacgcttctagaagaactggagaaagacggtagctttttcgaccaaggatcggctataaatctcatcttccttctggcgtttgccttgagagaaggtacctctagttgtactgctttggccgtgaagttcatatccaaagacccgaaagtgcttgcagagctcaagcgtgagcataaggcaattgtagacaacagaaaagataaggaagctggagttagctgggaagaatatagacacaacatgactttcaccaacatggttagcaatgaggtgcttcgcctagcaaacacgacccctttgttgtttcgaaaggcggtgcaagatgttgagatcaaaggatatacaattccggctggttggattgtggcggttgcaccttcagcggttcattttgatcctgcaatctatgagaacccatttgagtttaatccatggagatgggaggggaaagaaatgatttggggatctaaaacgttcatggcgtttggatatggagttagactttgtgtaggtgcagagttttcacggcttcaaatggcaatcttcctccatcatcttgtggcatattacgatttctcaatggtccaagactccgagatcattcgttcaccattccatcaatacaccaaggatctgcttataaacatctctcagtctcctaccaagtgaaccatgcatgcagtttccaaatcttaataatcagatcattatatgcaataatctcatttcctgcttccgcaaaatctctggagtctttttatatgtaatatgcgatctctataatttttaaaaagtatctatcttgtcaaatgagttaaactttgtttatatatgtcttgaatctg

SEQ ID NO: 31126 - protein, 253 aa, Arabidopsis thaliana
  misc_feature (1)..(253): Ceres Seq. ID no. 4991466
CIQSREEAIQVMKDVLMMRKETREKQEDFLNTLLEELEKDGSFFDQGSAINLIFLLAFALREGTSSCTALAVKFISKDPKVLAELKREHKAIVDNRKDKEAGVSWEEYRHNMTFTNMVSNEVLRLANTTPLLFRKAVQDVEIKGYTIPAGWIVAVAPSAVHFDPAIYENPFEFNPWRWEGKEMIWGSKTFMAFGYGVRLCVGAEFSRLQMAIFLHHLVAYYDFSMVQDSEIIRSPFHQYTKDLLINISQSPTK

SEQ ID NO: 31127 - protein, 242 aa, Arabidopsis thaliana
  misc_feature (1)..(242): Ceres Seq. ID no. 4991467
MKDVLMMRKETREKQEDFLNTLLEELEKDGSFFDQGSAINLIFLLAFALREGTSSCTALAVKFISKDPKVLAELKREHKAIVDNRKDKEAGVSWEEYRHNMTFTNMVSNEVLRLANTTPLLFRKAVQDVEIKGYTIPAGWIVAVAPSAVHFDPAIYENPFEFNPWRWEGKEMIWGSKTFMAFGYGVRLCVGAEFSRLQMAIFLHHLVAYYDFSMVQDSEIIRSPFHQYTKDLLINISQSPTK

SEQ ID NO: 31128 - protein, 237 aa, Arabidopsis thaliana
  misc_feature (1)..(237): Ceres Seq. ID no. 4991468
MMRKETREKQEDFLNTLLEELEKDGSFFDQGSAINLIFLLAFALREGTSSCTALAVKFISKDPKVLAELKREHKAIVDNRKDKEAGVSWEEYRHNMTFTNMVSNEVLRLANTTPLLFRKAVQDVEIKGYTIPAGWIVAVAPSAVHFDPAIYENPFEFNPWRWEGKEMIWGSKTFMAFGYGVRLCVGAEFSRLQMAIFLHHLVAYYDFSMVQDSEIIRSPFHQYTKDLLINISQSPTK

SEQ ID NO: 31129 - DNA, 610 bp, Arabidopsis thaliana
  misc_feature (1)..(610): Ceres Seq. ID no. 4991643
acaacacaacttcagctttaagacagctaaaactaaatacaaagaaacagagatgggtttggttacagaggaggtgagagctaaggcagagatgtacaccggagatgagatatgtagagagaagacaaagtgtttcctcaaggaaatatctatgcccaatggtttattaccattgaaggatatagaagaggttgggtatgacagagagtcaggtgttgtatggctgaagcagaagaagagcatcactcacaagttcacagagatagataagcttgtctcctatggaaccgaagtcacagcttttatagtcccagaagaacctgccaaggaggaacctgccaaagaggaacctgccaaggagaagagcagcgaagccaccgaggccaaggaggctgttgcaatcaaggaggctgtcgcagtcaaagaggcggcctaatcagctcagcttcagcagataaaagagacccgaatttttaagtgtacttcaagaatttgaacaaatcatggagagttagtgtttctcactgctctaactatcatgtattatctacctaccacttgttgctgcttgttttacctgtaataagatatcaatatcatcctgttccac

SEQ ID NO: 31130 - protein, 144 aa, Arabidopsis thaliana
  misc_feature (1)..(144): Ceres Seq. ID no. 4991644
QHNFSFKTAKTKYKETEMGLVTEEVRAKAEMYTGDEICREKTKCFLKEISMPNGLLPLKDIEEVGYDRESGVVWLKQKKSITHKFTEIDKLVSYGTEVTAFIVPEEPAKEEPAKEEPAKEKSSEATEAKEAVAIKEAVAVKEAA

SEQ ID NO: 31131 - protein, 127 aa, Arabidopsis thaliana
  misc_feature (1)..(127): Ceres Seq. ID no. 4991645
MGLVTEEVRAKAEMYTGDEICREKTKCFLKEISMPNGLLPLKDIEEVGYDRESGVVWLKQKKSITHKFTEIDKLVSYGTEVTAFIVPEEPAKEEPAKEEPAKEKSSEATEAKEAVAIKEAVAVKEAA

SEQ ID NO: 31132 - protein, 114 aa, Arabidopsis thaliana
  misc_feature (1)..(114): Ceres Seq. ID no. 4991646
MYTGDEICREKTKCFLKEISMPNGLLPLKDIEEVGYDRESGVVWLKQKKSITHKFTEIDKLVSYGTEVTAFIVPEEPAKEEPAKEEPAKEKSSEATEAKEAVAIKEAVAVKEAA

SEQ ID NO: 31133 - DNA, 559 bp, Arabidopsis thaliana
  misc_feature (1)..(559): Ceres Seq. ID no. 4991685
aacaaccaaaaacattcatttgtcattttgtctcctcttttgttttctctgatcactagtatggctgtattcagagtcttgcttgcttctcttctcatatctcttcttgtcctcgacttcgtccatgccgatatggtgacgtcgaatgacgcccctaaaatcgattgcaacagcaggtgccaagagcggtgcagtctttcgagtaggccaaatctttgtcacagagcgtgcgggacttgctgcgctaggtgcaactgcgtggcaccgggcacatccggaaactacgacaaatgtccgtgctatggtagcctaaccacccacggaggacgcagaaagtgtccttaaaaactctgtcgctgtttgatttgatttcgtttataatactttacttttatgagagtaattgtggttattttcttgggaattattaaaaagcaaaagaaagagaatgttatacgtcatgtgcaactcttcgatctttgttttagtgtttatccaatttgtacttgttggtttggttcctggttaacattaggtctgaaaaggtattgtttttcat

SEQ ID NO: 31134 - protein, 114 aa, Arabidopsis thaliana; identical to SEQ ID NO: 2329
  misc_feature (1)..(114): Ceres Seq. ID no. 4991686

SEQ ID NO: 31135 - protein, 94 aa, Arabidopsis thaliana; identical to SEQ ID NO: 2330
  misc_feature (1)..(94): Ceres Seq. ID no. 4991687

SEQ ID NO: 31136 - protein, 70 aa, Arabidopsis thaliana; identical to SEQ ID NO: 2331
  misc_feature (1)..(70): Ceres Seq. ID no. 4991688

SEQ ID NO: 31137 - DNA, 1137 bp, Arabidopsis thaliana
  misc_feature (1)..(1137): Ceres Seq. ID no. 4991737
tcacttctccactttttttctcggttagtgtcagtttttttgttggctagtctcttcggtcaaaatgcagctctttccggtcatcctaccgacactatgcgtcttcctccaccttctaataagtggctctggctctactccaccgttgactcactccaatcaacaagtggcagccactcgttggcttcccgccaccgcaacctggtacggaagtgccgagggagacggcagcagcggaggagcttgtggttacggatcgttggtggacgtgaagccgtttaaggctagagtcggagcggtgagtccgattctgttcaaaggtggtgaaggctgcggtgcatgctacaaggtcaggtgtctcgacaagaccatttgctctaagagagcagtcaccattattgccaccgaccagtcaccgtcaggaccatctgctaaagcaaaacacactcatttcgacctcagtggcgccgcctttggacatatggctattcccggccataacggtgtcatccgcaaccgtggcctattaaacatcctctaccgccgaacggcatgcaaatacagagggaagaacatagcgtttcatgtgaacgcaggatcaactgattattggttatcgcttctcattgagtatgaagacggtgaaggagacattggctctatgcacattcgtcaagcgggatctaaggagtggatatcgatgaagcacatatggggagcgaactggtgcatcgtcgaaggaccactcaagggaccattctccgtgaagctcacaactttgtccaacaataagacactctccgccaccgacgtcatccccagtaactgggttcccaaagctacttacacctctcgcctcaacttctcccctgttctctaattagcctctcttcaaaaaaattttgttgtgggagagaggaacacagagaagacaatgagtgagccatctccaaagttaggggattaagagcttttcattgtgtgtgtgactactaacattctatgttgtcccttttcatttttttccttctccatagggatgtgtgtatcatctataatgttgtttgtgggacattactatataagaatttacaaaagatgtaataatgtaatatgcaatctcattccttttttagc

SEQ ID NO: 31138 - protein, 271 aa, Arabidopsis thaliana
  misc_feature (1)..(271): Ceres Seq. ID no. 4991738
MQLFPVILPTLCVFLHLLISGSGSTPPLTHSNQQVAATRWLPATATWYGSAEGDGSSGGACGYGSLVDVKPFKARVGAVSPILFKGGEGCGACYKVRCLDKTICSKRAVTIIATDQSPSGPSAKAKHTHFDLSGAAFGHMAIPGHNGVIRNRGLLNILYRRTACKYRGKNIAFHVNAGSTDYWLSLLIEYEDGEGDIGSMHIRQAGSKEWISMKHIWGANWCIVEGPLKGPFSVKLTTLSNNKTLSATDVIPSNWVPKATYTSRLNFSPVL

SEQ ID NO: 31139 - DNA, 667 bp, Arabidopsis thaliana
  misc_feature (1)..(667): Ceres Seq. ID no. 4991911
agcaaacaaatctctctttctctctctcactctctgctcgatcgttcaatctgatagaagaagaatctcaagttttaattcgatggggaaggacgcaaaagctggtgggaagggtaaaggaaagcaagcaagtggtagtgaagaagctccctccaagggtaaaggaaaagcaggaaaagctgcagatggtcttgggacatgcacttatgttaaagcaagacatgttttgtgcgagaagcaaggaaagatcaacgaggcctacaaaaagttgcaggatggttggttgagcaacggagacaaggttcctcctgctgagtttgcaaagattgcagcagagtactctgagtgtccatcagggaaaaaaggaggagatcttggatggttccctcgaggaaagatggcaggtccattccaagatgtcgcctttaatacacctgttggagtcaccagtgcacccttcaaatcaacgcacggataccacattattttatcagagggaaggaagaactgacagatacatctctgctctgctacttttatggaagttgctactgtaaccttaaaaaaaacacagcctttgttgttttggccaaattgttaaaaaaacttgtctcgttttgaataatgaatgcgtaacggccataatatatgccgggtgttgatttct

SEQ ID NO: 31140 - protein, 169 aa, Arabidopsis thaliana
  misc_feature (1)..(169): Ceres Seq. ID no. 4991912
ANKSLFLSLTLCSIVQSDRRRISSFNSMGKDAKAGGKGKGKQASGSEEAPSKGKGKAGKAADGLGTCTYVKARHVLCEKQGKINEAYKKLQDGWLSNGDKVPPAEFAKIAAEYSECPSGKKGGDLGWFPRGKMAGPFQDVAFNTPVGVTSAPFKSTHGYHIILSEGRKN

SEQ ID NO: 31141 - protein, 142 aa, Arabidopsis thaliana
  misc_feature (1)..(142): Ceres Seq. ID no. 4991913
MGKDAKAGGKGKGKQASGSEEAPSKGKGKAGKAADGLGTCTYVKARHVLCEKQGKINEAYKKLQDGWLSNGDKVPPAEFAKIAAEYSECPSGKKGGDLGWFPRGKMAGPFQDVAFNTPVGVTSAPFKSTHGYHIILSEGRKN

SEQ ID NO: 31142 - protein, 94 aa, Arabidopsis thaliana
  misc_feature (1)..(94): Ceres Seq. ID no. 4991914
QTNLSFSLSLSARSFNLIEEESQVLIRWGRTQKLVGRVKESKQVVVKKLPPRVKEKQEKLQMVLGHALMLKQDMFCARSKERSTRPTKSCRMVG

SEQ ID NO: 31143 - DNA, 793 bp, Arabidopsis thaliana
  misc_feature (1)..(793): Ceres Seq. ID no. 4991917
gttctctcttccgatcctttttttgtctctgcttcttgctctgctctgtggtaaataaagtcctgttcttgatattggtggtttcatcagaattaggatgaaagagaagaagggtcattacgtgccaccatcttatattccattaacacagtcagatgctgatactgaagtagagaccactactccaaatctggaaattgctgtttctgaaagcacaaaagatgatccgagacaatggtcatctggtatatgcgcttgcttcgacgatatgcagagctgttgtgtaggtttgttctgtccttgttatatctttggcaaaaacgcagagcttctggggtctggaacatttgcaggaccctgcttaacccattgcatctcctgggctttggtcaataccatttgctgctttgcaactaatggcgcattgctcggtctaccgggatgctttgtgtcatgttatgcttgcgggtaccgcaaatcattaagagccaagtacaatttacaggaggctccatgtggggattttgtaacacacttcttctgtcacttgtgtgccatttgccaagaatacagagagattcgagaacaaagcagtggttcatatcctcttgacatgaagatggctatcaccaatgcccccttggctcaaaccatggaatcagctaactgatcactttgtctcattgagcttccttgtttattttgtagaagacatttttcttttcatcgacttttgcaatgtatttgagaagtttgatgagtaagtaaaactttctaaggtaatttatcatat

SEQ ID NO: 31144 - protein, 190 aa, Arabidopsis thaliana
  misc_feature (1)..(190): Ceres Seq. ID no. 4991918
MKEKKGHYVPPSYIPLTQSDADTEVETTTPNLEIAVSESTKDDPRQWSSGICACFDDMQSCCVGLFCPCYIFGKNAELLGSGTFAGPCLTHCISWALVNTICCFATNGALLGLPGCFVSCYACGYRKSLRAKYNLQEAPCGDFVTHFFCHLCAICQEYREIREQSSGSYPLDMKMAITNAPLAQTMESAN

SEQ ID NO: 31145 - protein, 133 aa, Arabidopsis thaliana
  misc_feature (1)..(133): Ceres Seq. ID no. 4991919
MQSCCVGLFCPCYIFGKNAELLGSGTFAGPCLTHCISWALVNTICCFATNGALLGLPGCFVSCYACGYRKSLRAKYNLQEAPCGDFVTHFFCHLCAICQEYREIREQSSGSYPLDMKMAITNAPLAQTMESAN

SEQ ID NO: 31146 - DNA, 1208 bp, Arabidopsis thaliana
  misc_feature (1)..(1208): Ceres Seq. ID no. 4992056
aacacctaactcatttgatagtgatttccaaatctgcaaacaacaaagtatatttgatcatcactatactgatttcacaatccattaatcactgataggtttttggtggaatacatacatgtatgtgtttgatccaacaacagaagctggattgagattagagatggcgtttcctcaacatggttttatgttccaacaacttcatgaagacaacagtcaagatcagctcccttcttgtcctcctcatctcttcaatggaggaggaaactacatgatgaacagatctatgtctttaatgaacgtgcaagaagatcataatcaaaccttggatgaggagaatctatcagacgatggggcacatactatgctgggagagaagaagaagaggctgcaattagagcaagttaaggcattagagaagagctttgagcttggtaacaagctggagccagagaggaagatacaactagctaaagcattagggatgcaaccaagacagatcgcgatttggtttcaaaacaggagagctaggtggaagactagacagctcgagagagattatgattcactcaagaaacagtttgagtctcttaaatccgacaatgcttctctacttgcctataacaagaaactccttgctgaggtaatggctttaaagaacaaagaatgtaatgaaggaaacatagtaaagagagaagcagaagcttcatggagcaacaacggaagcacagagaatagttcagacatcaatctggagatgcctagagagaccattacaacacatgtgaacacgatcaaagacctattcccttcatcgattcgatcatctgcacatgatgatgatcatcatcagaatcatgaaatagttcaagaagaaagcctttgtaacatgtttaatggcattgatgaaacgacgccggctggttactgggcatggtctgacccaaaccacaaccaccaccaccaccagttcaactgattcatgattctaaagctcaaaaaaaagtcatcagcacgcatcaagacaaatgatcataatcatcatcatcatatcatcaggagaagatcaagacacaattcttctctttggaattatgttattgctactcatttcaatttaaattaatggagcattttgttttctttgggtttgtagagcattggtgtatagtgcgaaaatttgttgttgctttaatttaataaaaatc

SEQ ID NO: 31147 - protein, 286 aa, Arabidopsis thaliana
  misc_feature (1)..(286): Ceres Seq. ID no. 4992057
MYVFDPTTEAGLRLEMAFPQHGFMFQQLHEDNSQDQLPSCPPHLFNGGGNYMMNRSMSLMNVQEDHNQTLDEENLSDDGAHTMLGEKKKRLQLEQVKALEKSFELGNKLEPERKIQLAKALGMQPRQIAIWFQNRRARWKTRQLERDYDSLKKQFESLKSDNASLLAYNKKLLAEVMALKNKECNEGNIVKREAEASWSNNGSTENSSDINLEMPRETITTHVNTIKDLFPSSIRSSAHDDDHHQNHEIVQEESLCNMFNGIDETTPAGYWAWSDPNHNHHHHQFN

SEQ ID NO: 31148 - protein, 271 aa, Arabidopsis thaliana
  misc_feature (1)..(271): Ceres Seq. ID no. 4992058
MAFPQHGFMFQQLHEDNSQDQLPSCPPHLFNGGGNYMMNRSMSLMNVQEDHNQTLDEENLSDDGAHTMLGEKKKRLQLEQVKALEKSFELGNKLEPERKIQLAKALGMQPRQIAIWFQNRRARWKTRQLERDYDSLKKQFESLKSDNASLLAYNKKLLAEVMALKNKECNEGNIVKREAEASWSNNGSTENSSDINLEMPRETITTHVNTIKDLFPSSIRSSAHDDDHHQNHEIVQEESLCNMFNGIDETTPAGYWAWSDPNHNHHHHQFN

SEQ ID NO: 31149 - protein, 263 aa, Arabidopsis thaliana
  misc_feature (1)..(263): Ceres Seq. ID no. 4992059
MFQQLHEDNSQDQLPSCPPHLFNGGGNYMMNRSMSLMNVQEDHNQTLDEENLSDDGAHTMLGEKKKRLQLEQVKALEKSFELGNKLEPERKIQLAKALGMQPRQIAIWFQNRRARWKTRQLERDYDSLKKQFESLKSDNASLLAYNKKLLAEVMALKNKECNEGNIVKREAEASWSNNGSTENSSDINLEMPRETITTHVNTIKDLFPSSIRSSAHDDDHHQNHEIVQEESLCNMFNGIDETTPAGYWAWSDPNHNHHHHQFN

SEQ ID NO: 31150 - DNA, 1441 bp, Arabidopsis thaliana
  misc_feature (1)..(1441): Ceres Seq. ID no. 4992095
ctctcacactcgttgaccaaaaaaaaaactctctctttcactgagaaatgctctgcttcactcatgtcccacctcttcctctgttctccacctccggtatctatcttccggcctccagacgattcactagtttcaggattagaatgtcttcttcttcctccatcgattctgttcctcctccaccggataacgcaatcgtccttggttgtggtggaatcgctgtagatttcttagcgacggtggattcttatcctcaagctgacgacaagatccgaagcactagcctaaaggtgcaaggaggtggaaatgctgcaaatgcgttaacttgtgctgctcgtttgggattgaattcgagactgattagtaaggtagcgaatgactctcaaggaaaaggcatgttggaggagcttgaagctgatggtgtggatacttcttttattgtggtctctaaagagggtaattcaccatttacctatatcttagttgacaaccaaacgaaaacgcgtacttgtattcacacgcctggagacccacctatgttaccaactgacctttctcaatcgagtatgctatcagcgctagaccgagccagcattgtatactttgatgtaagattacacgaaacagctttggttattgcaaaagaggcaagtcgcaagaagatacctattttagttgatacagagaaaaaaagagatggtttagatgatctcttgccattcgccgactacgttgtctgtccagaaaatttccctcagacatggacagaagtgtcttcaactcctggtgcacttgtttccatgttgttgagattgcctaaactgaaatttgtgatcgtgacctcaggtgaacatgggtgcttaatggttcaaagagcttcaaaagcagaagtatttgaatctcaagagacagacattgaaagcttgttggagacactgaagcatagaaaagactcaacgacaacatttccaacatgtgtttcatcggagacaacaaagctgaaggccaacggggtaggaacaatgaccggaagattgtttctcggaacagcggagaaaattcctccagaagagcttgtagacaccactggtgctggcgatgcattcataggagctgttctatatgccatatgcgccggcatgcccccagagaaaatgttaccatttgctgctcaagtggctggttgcagctgccgggctttgggagctcgcacgggtcttcctcaccgtacagatcctagacttgtaccctttctggtttgacactctctgtgttcctttgtcaacctttctgagtcactactttactccattgcccactttcatatattttgaatgttcttctacttattagatgaaataaaagacatggtggtatgcatcaaataatattctggttaggtttgacttttttcttattataaaaagtagtaacatatatg

SEQ ID NO: 31151 - protein, 404 aa, Arabidopsis thaliana
  misc_feature (1)..(404): Ceres Seq. ID no. 4992096
MLCFTHVPPLPLFSTSGIYLPASRRFTSFRIRMSSSSSIDSVPPPPDNAIVLGCGGIAVDFLATVDSYPQADDKIRSTSLKVQGGGNAANALTCAARLGLNSRLISKVANDSQGKGMLEELEADGVDTSFIVVSKEGNSPFTYILVDNQTKTRTCIHTPGDPPMLPTDLSQSSMLSALDRASIVYFDVRLHETALVIAKEASRKKIPILVDTEKKRDGLDDLLPFADYVVCPENFPQTWTEVSSTPGALVSMLLRLPKLKFVIVTSGEHGCLMVQRASKAEVFESQETDIESLLETLKHRKDSTTTFPTCVSSETTKLKANGVGTMTGRLFLGTAEKIPPEELVDTTGAGDAFIGAVLYAICAGMPPEKMLPFAAQVAGCSCRALGARTGLPHRTDPRLVPFLV

SEQ ID NO: 31152 - protein, 372 aa, Arabidopsis thaliana
  misc_feature (1)..(372): Ceres Seq. ID no. 4992097
MSSSSSIDSVPPPPDNAIVLGCGGIAVDFLATVDSYPQADDKIRSTSLKVQGGGNAANALTCAARLGLNSRLISKVANDSQGKGMLEELEADGVDTSFIVVSKEGNSPFTYILVDNQTKTRTCIHTPGDPPMLPTDLSQSSMLSALDRASIVYFDVRLHETALVIAKEASRKKIPILVDTEKKRDGLDDLLPFADYVVCPENFPQTWTEVSSTPGALVSMLLRLPKLKFVIVTSGEHGCLMVQRASKAEVFESQETDIESLLETLKHRKDSTTTFPTCVSSETTKLKANGVGTMTGRLFLGTAEKIPPEELVDTTGAGDAFIGAVLYAICAGMPPEKMLPFAAQVAGCSCRALGARTGLPHRTDPRLVPFLV

SEQ ID NO: 31153 - protein, 288 aa, Arabidopsis thaliana
  misc_feature (1)..(288): Ceres Seq. ID no. 4992098
MLEELEADGVDTSFIVVSKEGNSPFTYILVDNQTKTRTCIHTPGDPPMLPTDLSQSSMLSALDRASIVYFDVRLHETALVIAKEASRKKIPILVDTEKKRDGLDDLLPFADYVVCPENFPQTWTEVSSTPGALVSMLLRLPKLKFVIVTSGEHGCLMVQRASKAEVFESQETDIESLLETLKHRKDSTTTFPTCVSSETTKLKANGVGTMTGRLFLGTAEKIPPEELVDTTGAGDAFIGAVLYAICAGMPPEKMLPFAAQVAGCSCRALGARTGLPHRTDPRLVPFLV

SEQ ID NO: 31154 - DNA, 445 bp, Arabidopsis thaliana
  misc_feature (1)..(445): Ceres Seq. ID no. 4992207
ttcaacttccagagagagaacgtagcaaaacagggcttaccggagcagaacggaaaaacccatttcgaagctggagatgatcgtgctaaggagtacgtcagtctcttgaaatcgaacgatccaattggattcaacattgttgatgttcttgcttggggttctattggacacatcgttgcttactacatcttggctacttccagcaatggatacgacccaagcttctttggatgattcgtttcaatgtcaatctctcgtatatgtatatgtatatgtttgacttgtgttgcaagctatctaatctgttctctatctctgtttcttcttctgttgttgttgttgttgtctaagacttgtccctctttttgcaaatgttttatttctccatttacaaagattggtttgcagagttttataagaagaacataatagtatatacactatg

SEQ ID NO: 31155 - protein, 77 aa, Arabidopsis thaliana
  misc_feature (1)..(77): Ceres Seq. ID no. 4992208
FNFQRENVAKQGLPEQNGKTHFEAGDDRAKEYVSLLKSNDPIGFNIVDVLAWGSIGHIVAYYILATSSNGYDPSFFG

SEQ ID NO: 31156 - protein, 61 aa, Arabidopsis thaliana
  misc_feature (1)..(61): Ceres Seq. ID no. 4992209
MSISRICICICLTCVASYLICSLSLFLLLLLLLLSKTCPSFCKCFISPFTKIGLQSFIRRT

SEQ ID NO: 31157 - protein, 45 aa, Arabidopsis thaliana; identical to SEQ ID NO: 27395
  misc_feature (1)..(45): Ceres Seq. ID no. 4992210

SEQ ID NO: 31158 - DNA, 1114 bp, Arabidopsis thaliana
  misc_feature (1)..(1114): Ceres Seq. ID no. 4992379
atactccatggagtagaaaaaggaaaaattcaaggctctttggcttcttctttcttctctgcacttgaatcagaagcttttctcagaatgggttggtcgttgagaatgtggattgtgagtatactcgtgcttacacagctcgttaatggagctctctgttggggagacgctggtcattacgctgtctgcaaaatagctcagagttattttgaggaagatactgtagttgctgtgaagaaacttctgcctgaatctgcaaatggtgagctagcagctgtttgctcatggcctgatgaaatcaaaaagctcccgcaatggcgatggactagtgctttgcattttgctgatacgcctgattacaaatgcaactatgagtactctcgggactgtcctaaagactggtgtgtgacaggggcaatcttcaattacactaaccaactaatgtctacttctgaaaactcacagagtatagtccactataacttaacagaggctctcatgttcttatcacattatatgggagatatccatcagcctttacatgaaggttttattggagatctaggtggtaacaagataaaagttcactggtacaatcaggaaactaatttgcaccgtgtgtgggatgatatgataattgagtctgctctagaaacatactacaattcaagccttccacgcatgattcatgaacttcaagccaaactcaagaacggctggtcaaacgatgtaccttcatgggagtcatgtcaacttaaccaaacggcctgcccaaatccgtatgcttctgaaagcattgatcttgcctgcaagtatgcttacaggaacgccaccgcagggactactttaggagattactatttcgtctctcggttaccggtggtagagaagagacttgcacaaggcggaattcgcttggcagggactcttaaccgaatattttctgcaaaacggaagcttgctagagcatgaaaaaagatccaggagaatcacttgaacatccatgaacactcttatgtattaataatgtgtaatggtagtagttaaggttatggtttggtattgttcctgcgttttaactataataagtatgaaacgaaaactgtacgtctac

SEQ ID NO: 31159 - protein, 323 aa, Arabidopsis thaliana
  misc_feature (1)..(323): Ceres Seq. ID no. 4992380
ILHGVEKGKIQGSLASSFFSALESEAFLRMGWSLRMWIVSILVLTQLVNGALCWGDAGHYAVCKIAQSYFEEDTVVAVKKLLPESANGELAAVCSWPDEIKKLPQWRWTSALHFADTPDYKCNYEYSRDCPKDWCVTGAIFNYTNQLMSTSENSQSIVHYNLTEALMFLSHYMGDIHQPLHEGFIGDLGGNKIKVHWYNQETNLHRVWDDMIIESALETYYNSSLPRMIHELQAKLKNGWSNDVPSWESCQLNQTACPNPYASESIDLACKYAYRNATAGTTLGDYYFVSRLPVVEKRLAQGGIRLAGTLNRIFSAKRKLARA

SEQ ID NO: 31160 - protein, 294 aa, Arabidopsis thaliana
  misc_feature (1)..(294): Ceres Seq. ID no. 4992381
MGWSLRMWIVSILVLTQLVNGALCWGDAGHYAVCKIAQSYFEEDTVVAVKKLLPESANGELAAVCSWPDEIKKLPQWRWTSALHFADTPDYKCNYEYSRDCPKDWCVTGAIFNYTNQLMSTSENSQSIVHYNLTEALMFLSHYMGDIHQPLHEGFIGDLGGNKIKVHWYNQETNLHRVWDDMIIESALETYYNSSLPRMIHELQAKLKNGWSNDVPSWESCQLNQTACPNPYASESIDLACKYAYRNATAGTTLGDYYFVSRLPVVEKRLAQGGIRLAGTLNRIFSAKRKLARA

SEQ ID NO: 31161 - protein, 288 aa, Arabidopsis thaliana
  misc_feature (1)..(288): Ceres Seq. ID no. 4992382
MWIVSILVLTQLVNGALCWGDAGHYAVCKIAQSYFEEDTVVAVKKLLPESANGELAAVCSWPDEIKKLPQWRWTSALHFADTPDYKCNYEYSRDCPKDWCVTGAIFNYTNQLMSTSENSQSIVHYNLTEALMFLSHYMGDIHQPLHEGFIGDLGGNKIKVHWYNQETNLHRVWDDMIIESALETYYNSSLPRMIHELQAKLKNGWSNDVPSWESCQLNQTACPNPYASESIDLACKYAYRNATAGTTLGDYYFVSRLPVVEKRLAQGGIRLAGTLNRIFSAKRKLARA

SEQ ID NO: 31162 - DNA, 1648 bp, Arabidopsis thaliana
  misc_feature (1)..(1648): Ceres Seq. ID no. 4992547
aaagaaacaaaaggatttattaaaaaaaaaaaaaaagagatgaagacagctcgagggatgcaatagagccaagaggaggagaaagatgggatctgctccaaacttgtaccagtcgcatcaaagcaagttttggtgaagaagaagagacgaggtcttcctcttactgtggtggtgacattttctctaaaaagaaagtctccgatatgtcgcagagatggagtagaaagaagagtagacttccattagcgggtctcctctttattctcgttgtcacctttatgattctcttcaacgagcgtagcattcagcagatccatcaccacgccgcgagtcacactcaaaatctccgagaaccttccacgttcgatttcgtcaagcctaatgttcctcggattaactacttgggagctcatgaggttttggatagattcagcaaatgcaactcgacgaaagagtacagtgggaagaaaatcggatgggttgacccgtttgaagaccacccgggtcaagtaacaaaggaggagcagaaatgtgatgtcttttctgggaaatgggtctttgataattcatcatcataccctttacacaaggaatctcagtgtccttacatgtccgaccagttggcttgtcagaagcatggtaggaaggatttggagtatcagcattggagatggcaacctcatgcctgcaacttgaagagatggaatgcgatagaaatgtgggagaagctgagaggaaagagattgatgtttgttggagactcgttaaacagaggccaatggatttcaatggtttgtctcttacagtctgtcattccacgtgacaagcagtctatgtctcctaacgctcacctcaccattttcagggctgaggactacaatgccacagtggagtttctctgggcaccgttgctcgtggagtcgaattctgatgaccctgttaatcacagattgagcgagcggattatccgacccgattctgttcttaaacatgcatcaaagtggcaacatgctgatattctaatcttcaacacctacttatggtggagacaagactctgtcaagctccgatggagcagtgaagaaaaagggtcatgcgaggaggtgaagagcgccgagggaatggagatggcaatggatagttggggtgattgggttgctaacaatgtcgatccaaacaaaaagcgagttttcttcgttacaatgtctcctacacatcaatggagccgagaatggaacccgggaagcgaaggaaactgctacggggagaagaaaccaatagaggaagagagttattggggaagtgggtcggacattccgacaatgaggatggtgaagagagttttggagagattgggaccaaaggtctcagttataaacatcactcagttgtctgagtatcgaaaagatggtcatccatcggtgtaccggaaattctgggaacctctaaatgaagaccggttgaaaaacccggcatcgtattctgactgtactcattggtgtgtacctggagttcctgatgtctggaatcaattgcttttccattttttgtgaaaatgaaatgaatataaccttaccttgatggccgaatatcacccataaattatataacggggtgattttagctagctataaggatccaaatttgt

SEQ ID NO: 31163 - protein, 449 aa, Arabidopsis thaliana
  misc_feature (1)..(449): Ceres Seq. ID no. 4992548
MSQRWSRKKSRLPLAGLLFILVVTFMILFNERSIQQIHHHAASHTQNLREPSTFDFVKPNVPRINYLGAHEVLDRFSKCNSTKEYSGKKIGWVDPFEDHPGQVTKEEQKCDVFSGKWVFDNSSSYPLHKESQCPYMSDQLACQKHGRKDLEYQHWRWQPHACNLKRWNAIEMWEKLRGKRLMFVGDSLNRGQWISMVCLLQSVIPRDKQSMSPNAHLTIFRAEDYNATVEFLWAPLLVESNSDDPVNHRLSERIIRPDSVLKHASKWQHADILIFNTYLWWRQDSVKLRWSSEEKGSCEEVKSAEGMEMAMDSWGDWVANNVDPNKKRVFFVTMSPTHQWSREWNPGSEGNCYGEKKPIEEESYWGSGSDIPTMRMVKRVLERLGPKVSVINITQLSEYRKDGHPSVYRKFWEPLNEDRLKNPASYSDCTHWCVPGVPDVWNQLLFHFL

SEQ ID NO: 31164 - protein, 424 aa, Arabidopsis thaliana
  misc_feature (1)..(424): Ceres Seq. ID no. 4992549
MILFNERSIQQIHHHAASHTQNLREPSTFDFVKPNVPRINYLGAHEVLDRFSKCNSTKEYSGKKIGWVDPFEDHPGQVTKEEQKCDVFSGKWVFDNSSSYPLHKESQCPYMSDQLACQKHGRKDLEYQHWRWQPHACNLKRWNAIEMWEKLRGKRLMFVGDSLNRGQWISMVCLLQSVIPRDKQSMSPNAHLTIFRAEDYNATVEFLWAPLLVESNSDDPVNHRLSERIIRPDSVLKHASKWQHADILIFNTYLWWRQDSVKLRWSSEEKGSCEEVKSAEGMEMAMDSWGDWVANNVDPNKKRVFFVTMSPTHQWSREWNPGSEGNCYGEKKPIEEESYWGSGSDIPTMRMVKRVLERLGPKVSVINITQLSEYRKDGHPSVYRKFWEPLNEDRLKNPASYSDCTHWCVPGVPDVWNQLLFHFL

SEQ ID NO: 31165 - protein, 314 aa, Arabidopsis thaliana
  misc_feature (1)..(314): Ceres Seq. ID no. 4992550
MSDQLACQKHGRKDLEYQHWRWQPHACNLKRWNAIEMWEKLRGKRLMFVGDSLNRGQWISMVCLLQSVIPRDKQSMSPNAHLTIFRAEDYNATVEFLWAPLLVESNSDDPVNHRLSERIIRPDSVLKHASKWQHADILIFNTYLWWRQDSVKLRWSSEEKGSCEEVKSAEGMEMAMDSWGDWVANNVDPNKKRVFFVTMSPTHQWSREWNPGSEGNCYGEKKPIEEESYWGSGSDIPTMRMVKRVLERLGPKVSVINITQLSEYRKDGHPSVYRKFWEPLNEDRLKNPASYSDCTHWCVPGVPDVWNQLLFHFL

SEQ ID NO: 31166 - DNA, 1624 bp, Arabidopsis thaliana
  misc_feature (1)..(1624): Ceres Seq. ID no. 4992709
acaatcagtctctttctctaaaccttcaccaatttctctctctctctctcttgcccttttacacagccatttgttagattcctctctcaataagcctctcttctcttttctattggagtttttgcattagactgattagctcaaagcaaaacccataaaccaaaatcttctctttgtgttcttgtttttttcatttctccaatttttctttgtggaggaggtttttcactttttgtttttctgggtttttattggctttcttctgcaaaaaccataactttattttttctgggtttttcttcgtaaagaagcttcccaaaacccagttttttgtataagctcaattagtagcaaacaagaaaaaacaatcttaaactcaatttcacaaaatctctgattcttgtgaaaatttgtatattgcaaaactttggaaaaaaaagagaaaaaagatggggaagcaaggtccttgctatcactgtggagttacaagtacacctctatggagaaacgggccaccagagaagccggtgttgtgcaatgcgtgtggttcgaggtggagaactaaaggatcattagtaaactacacacctcttcatgctcgtgctgaaggtgatgagactgagattgaggatcatagaactcaaacggtgatgattaagggaatgtctttgaacaaaaagattcccaagaggaaaccatatcaagaaaacttcacagtgaaaagagctaacttggaattccataccggtttcaagaggaaggctctggatgaagaagctagcaatagatcgagttcaggatcggttgtatcaaactccgagagctgtgcacaatctaatgcgtgggactcgacttttccttgtaagagaaggacatgtgtgggacgtccaaaggcagcttcttctgttgaaaagctcacaaaggatctttatactattctacaagaacagcaatcttcttgtctctctggtacttcagaggaagatttgctttttgagaatgaaacaccaatgctgttaggacatggtagtgttcttatgagagatcctcactcaggtgctcgagaagaggaatctgaagctagctcactcttagttgagagcagcaagtcttcatcagttcattctgttaaatttggtggaaaagcaatgaagcaggagcaagtgaagaggagcaaatctcaagtcttaggaagacatagttcactactctgtagcatagatttgaaggatgttttcaactttgatgagttcatagaaaatttcacagaggaagaacagcaaaaactgatgaaattacttcctcaagttgactctgttgatcgtcctgatagcctcagaagcatgtttgagagttctcaattcaaagagaacttatccttgtttcagcaacttgtggcagatggtgtttttgagacaaattcgtcttatgcaaaacttgaagacattaagacacttgcaaagcttgctttatcagatcctaacaaatcccatttgttggaaagctattacatgctcaagagaagagagattgaagactgtgttactacaacatcaagggtctcaagcttgagtccatcgaataataatagtcttgtaaccattgaaagaccttgtgaaagctt

SEQ ID NO: 31167 - protein, 391 aa, Arabidopsis thaliana
  misc_feature (1)..(391): Ceres Seq. ID no. 4992710
MGKQGPCYHCGVTSTPLWRNGPPEKPVLCNACGSRWRTKGSLVNYTPLHARAEGDETEIEDHRTQTVMIKGMSLNKKIPKRKPYQENFTVKRANLEFHTGFKRKALDEEASNRSSSGSVVSNSESCAQSNAWDSTFPCKRRTCVGRPKAASSVEKLTKDLYTILQEQQSSCLSGTSEEDLLFENETPMLLGHGSVLMRDPHSGAREEESEASSLLVESSKSSSVHSVKFGGKAMKQEQVKRSKSQVLGRHSSLLCSIDLKDVFNFDEFIENFTEEEQQKLMKLLPQVDSVDRPDSLRSMFESSQFKENLSLFQQLVADGVFETNSSYAKLEDIKTLAKLALSDPNKSHLLESYYMLKRREIEDCVTTTSRVSSLSPSNNNSLVTIERPCES

SEQ ID NO: 31168 - protein, 324 aa, Arabidopsis thaliana
  misc_feature (1)..(324): Ceres Seq. ID no. 4992711
MIKGMSLNKKIPKRKPYQENFTVKRANLEFHTGFKRKALDEEASNRSSSGSVVSNSESCAQSNAWDSTFPCKRRTCVGRPKAASSVEKLTKDLYTILQEQQSSCLSGTSEEDLLFENETPMLLGHGSVLMRDPHSGAREEESEASSLLVESSKSSSVHSVKFGGKAMKQEQVKRSKSQVLGRHSSLLCSIDLKDVFNFDEFIENFTEEEQQKLMKLLPQVDSVDRPDSLRSMFESSQFKENLSLFQQLVADGVFETNSSYAKLEDIKTLAKLALSDPNKSHLLESYYMLKRREIEDCVTTTSRVSSLSPSNNNSLVTIERPCES

SEQ ID NO: 31169 - protein, 320 aa, Arabidopsis thaliana
  misc_feature (1)..(320): Ceres Seq. ID no. 4992712
MSLNKKIPKRKPYQENFTVKRANLEFHTGFKRKALDEEASNRSSSGSVVSNSESCAQSNAWDSTFPCKRRTCVGRPKAASSVEKLTKDLYTILQEQQSSCLSGTSEEDLLFENETPMLLGHGSVLMRDPHSGAREEESEASSLLVESSKSSSVHSVKFGGKAMKQEQVKRSKSQVLGRHSSLLCSIDLKDVFNFDEFIENFTEEEQQKLMKLLPQVDSVDRPDSLRSMFESSQFKENLSLFQQLVADGVFETNSSYAKLEDIKTLAKLALSDPNKSHLLESYYMLKRREIEDCVTTTSRVSSLSPSNNNSLVTIERPCES

SEQ ID NO: 31170 - DNA, 887 bp, Arabidopsis thaliana
  misc_feature (1)..(887): Ceres Seq. ID no. 4992853
aaaggttccttgtttttccagacaaagaaaacacaaattcattccctcctcctcttcatctcttttgcagatatggatggttattattctctgtctcccatctctgtcctccaccggattaaagattccttccatttcgccgtctctgcccttctcgccaacctcttctccgctctcttcaccttcttcttcgctttaggggctttgatcggccaagaaacagagagcggtttcatcagaggagccgccgttggtgctatctcaggcgccgtcttctccatcgaagtctttgaatcttccctcctcctttggcaatccgatgagtctggaattggatgccttctctacttgccttttgagcgggaggcttgttcgtgagcgtatcggtcctgcaatgctaagtgccgtccagagtcagatgggagctgtggagtcccagttccaagatcatacagacatctttgacactgccatttcaaagggtctcactggggactctctcaacaggatccctaaggtccgaatcacagacacctctccggagattgtctcttgctctgtctgccttcaggactttcaggtgggagagacagttagaagtttgccgcactgccatcatatgttccacctaccatgcatcgacaaatggcttcgcaggcatgcttcttgtcccttgtgcagaagacatctttgaattgattttgaactcttctttcttctcttctttgtacatgaggtataggcatacacacacacacatatatacacactagtagtcttccttgattttttttagattacacgttacacagattttgatgcaccaatcattgtaacttcactcatctcttggagatcctgtttatttatgctacttattcttggct

SEQ ID NO: 31171 - protein, 125 aa, Arabidopsis thaliana
  misc_feature (1)..(125): Ceres Seq. ID no. 4992854
KGSLFFQTKKTQIHSLLLFISFADMDGYYSLSPISVLHRIKDSFHFAVSALLANLFSALFTFFFALGALIGQETESGFIRGAAVGAISGAVFSIEVFESSLLLWQSDESGIGCLLYLPFEREACS

SEQ ID NO: 31172 - protein, 124 aa, Arabidopsis thaliana
  misc_feature (1)..(124): Ceres Seq. ID no. 4992855
MSLELDAFSTCLLSGRLVRERIGPAMLSAVQSQMGAVESQFQDHTDIFDTAISKGLTGDSLNRIPKVRITDTSPEIVSCSVCLQDFQVGETVRSLPHCHHMFHLPCIDKWLRRHASCPLCRRHL

SEQ ID NO: 31173 - protein, 101 aa, Arabidopsis thaliana
  misc_feature (1)..(101): Ceres Seq. ID no. 4992856
MDGYYSLSPISVLHRIKDSFHFAVSALLANLFSALFTFFFALGALIGQETESGFIRGAAVGAISGAVFSIEVFESSLLLWQSDESGIGCLLYLPFEREACS

SEQ ID NO: 31174 - DNA, 3657 bp, Arabidopsis thaliana
  misc_feature (1)..(3657): Ceres Seq. ID no. 4993023
atggcaagaggtagaataaggtcaaagctgagacttagccatatatacacatttggatgtcttaggccaagtgcagatgaaggtcaagatcctcacccaatccaaggtccaggatttagcaggactgtgtactgtaaccagcctcatatgcacaagaagaagcctttgaaataccgttctaactatgtttctaccactaggtacaatttgatcaccttctttccaaagtgcctctacgaacagtttcaccgtgctgccaatttctacttcttggtagctgccattctttccgtgttccctctttccccgttcaacaaatggagtatgattgctccactggtgtttgttgttgggctcagtatgttaaaggaggctcttgaagattggagtaggtttatgcaagatgtgaagatcaatgcgagtaaagtttatgttcataaaagcgatggcgagtttcgtcgcagaaagtggaaaaagattagtgttggagatattgtaaaagtggagaaagacggctttttccctgctgatttgctcttgttgtcgtccagttatgaggatgggatttgttatgtagagactatgaatttagatggcgagacaaacttgaaagtgaaaaggtccttggaagtaacattatcgttggatgactacgactctttcaaggatttcacggggataataagatgcgaagatccaaaccccagcctttacacatttgttggcaatcttgagtatgagcgccagatatttccactggatccaagtcagattctgctgagagattcaaagcttaggaatacaccttatgtttatggagtggtggtattcacagggcatgatactaaggtgatgcagaactcaacaaaatcgccttcaaaaaggagcagaatcgaaaagacgatggactatataatctacacgcttcttgtcctacttattttgatctcttgcataagttcatcgggatttgcttgggagacaaagtttcacatgccgaaatggtggtacttaagacctgaggagcctgagaacttaaccaatccaagtaatcctgtttatgctggatttgtccatctgatcactgctctgctgctgtacggatatttgataccgatctctctttatgtctccattgaggttgtgaaagtgttgcaagcatctttcatcaataaagatctacacatgtatgatagtgagagtggggttccagcccacgcacgcacatcgaatctaaacgaagagctaggacaagtggatactatcctttctgataaaacgggaactttgacttgtaatcagatggattttctgaaatgttcaattgctggcacttcttatggtgtacgttcaagcgaagtcgaagttgctgctgcacagcaaatggctgttgatcttgatgagcatggagaagtatccagtaggacaagtactccaagggctcaggctcgagatattgaggtagaaagtagcattactccaagaattcctataaaggggtttggtttcgaggatattaggctaatggatgggaattggttgagagagccacatacagatgacattttgctgttctttcgcatattagctatatgtcacacagctattcccgagcttaacgaggagactggcaagtacacttatgaagcagagtcaccagatgaagcttcttttcttactgctgctagtgagtttggttttgtgttcttcaagagaacccaatcaagcgtttatgttcatgaaaggctatctcattcagggcaaactattgaaagggagtataaagttctgaatttgttggacttcactagcaaacgaaagcgaatgtcagtagttgtacgtgacgaggaagggcagattcttctgctatgcaaaggagctgacagtatcatttttgagcgactggctaaaaatgggaaagtatacttgggacctaccactaagcatttaaatgaatatggagaagcaggactccgtactcttgcactttcatacagaaagcttgacgaggaagaatattcagcttggaacgctgagtttcacaaggccaaaacttctataggttcggatagagatgagttgcttgagaggatatcggatatgatcgaaaaagaccttattcttgtaggtgcaactgctgtggaggacaaactccagaaaggggtgccccaatgcattgataaacttgcccaagctggcctcaaattatgggttttaactggggataagatggaaacagcaatcaacatcggatactcgtgtagtttacttcggcaaggcatgaaacagatatgcataactgtggtgaactcagaaggagcatctcaagatgcaaaagctgtgaaggacaatattttgaatcaaatcacaaaagctgtgcaaatggtgaagctggagaaagatccacacgcggcatttgctttgatcattgacgggaaaaccctaacgtatgcattggaggatgagatgaagtatcagtttcttgctttggcggtcgattgtgcctcagtcatttgctgtcgtgtgtctccaaagcagaaagctttggtatttcccctcttcccttatgcccatggaaccgggaaaatcacattggcaataggtgatggtgcgaatgatgttggaatgattcaagaagctgacattggtgttggaattagtggggttgaaggaatgcaggctgtaatggcaagtgatttttctatcgcccagttccggtttcttgaaagattgctcgtcgttcatggacactggtgctacaaaagaatagctcaaatgatctgctatttcttttacaagaacatagcatttggtctcactctcttctattttgaggctttcaccgggttttctgggcaatcagtatataatgactactacctattactcttcaacgtcgtccttacttcattgccagtgattgcccttggagtctttgaacaagatgtttcctctgagatctgtttacagtttccagcgttgtaccaacaagggaagaaaaatctcttctttgactggtatagaatacttgggtggatgggaaatggtgtgtactcctcccttgtaatattcttcctcaacattggaatcatttatgagcaagctttcagagtcagtggccaaactgctgacatggatgctgttggtactaccatgtttacctgcattatttgggctgtgaatgtgcaaatcgcattgacggtgagtcacttcacttggatccaacacgtcttgatctggggaagcattggtttatggtatctgtttgttgcgctctacgggatgatgcctccaagtctttcaggcaacatctatagaattctagtagagatacttgctcctgcacccatttattggatagccacatttttggtcacagtgactacagttctcccttactttgcccacatatcattccaaaggttcttacatccgttggatcatcacatcattcaagagataaaatactacaagagagatgtggaggatagaagaatgtggacacgagagcgtacaaaagcacgggagaagactaagattggattcacagctagagttgacgcgaaaatcagacacctacgatcaaagctcaataagaaacagtcaaatatgtcacaattttcaactcaagatacaatgtccccaagatcagtatag

SEQ ID NO: 31175 - protein, 1218 aa, Arabidopsis thaliana
  misc_feature (1)..(1218): Ceres Seq. ID no. 4993024
MARGRIRSKLRLSHIYTFGCLRPSADEGQDPHPIQGPGFSRTVYCNQPHMHKKKPLKYRSNYVSTTRYNLITFFPKCLYEQFHRAANFYFLVAAILSVFPLSPFNKWSMIAPLVFVVGLSMLKEALEDWSRFMQDVKINASKVYVHKSDGEFRRRKWKKISVGDIVKVEKDGFFPADLLLLSSSYEDGICYVETMNLDGETNLKVKRSLEVTLSLDDYDSFKDFTGIIRCEDPNPSLYTFVGNLEYERQIFPLDPSQILLRDSKLRNTPYVYGVVVFTGHDTKVMQNSTKSPSKRSRIEKTMDYIIYTLLVLLILISCISSSGFAWETKFHMPKWWYLRPEEPENLTNPSNPVYAGFVHLITALLLYGYLIPISLYVSIEVVKVLQASFINKDLHMYDSESGVPAHARTSNLNEELGQVDTILSDKTGTLTCNQMDFLKCSIAGTSYGVRSSEVEVAAAQQMAVDLDEHGEVSSRTSTPRAQARDIEVESSITPRIPIKGFGFEDIRLMDGNWLREPHTDDILLFFRILAICHTAIPELNEETGKYTYEAESPDEASFLTAASEFGFVFFKRTQSSVYVHERLSHSGQTIEREYKVLNLLDFTSKRKRMSVVVRDEEGQILLLCKGADSIIFERLAKNGKVYLGPTTKHLNEYGEAGLRTLALSYRKLDEEEYSAWNAEFHKAKTSIGSDRDELLERISDMIEKDLILVGATAVEDKLQKGVPQCIDKLAQAGLKLWVLTGDKMETAINIGYSCSLLRQGMKQICITVVNSEGASQDAKAVKDNILNQITKAVQMVKLEKDPHAAFALIIDGKTLTYALEDEMKYQFLALAVDCASVICCRVSPKQKALVFPLFPYAHGTGKITLAIGDGANDVGMIQEADIGVGISGVEGMQAVMASDFSIAQFRFLERLLVVHGHWCYKRIAQMICYFFYKNIAFGLTLFYFEAFTGFSGQSVYNDYYLLLFNVVLTSLPVIALGVFEQDVSSEICLQFPALYQQGKKNLFFDWYRILGWMGNGVYSSLVIFFLNIGIIYEQAFRVSGQTADMDAVGTTMFTCIIWAVNVQIALTVSHFTWIQHVLIWGSIGLWYLFVALYGMMPPSLSGNIYRILVEILAPAPIYWIATFLVTVTTVLPYFAHISFQRFLHPLDHHIIQEIKYYKRDVEDRRMWTRERTKAREKTKIGFTARVDAKIRHLRSKLNKKQSNMSQFSTQDTMSPRSV

SEQ ID NO: 31176 - protein, 1169 aa, Arabidopsis thaliana
  misc_feature (1)..(1169): Ceres Seq. ID no. 4993025
MHKKKPLKYRSNYVSTTRYNLITFFPKCLYEQFHRAANFYFLVAAILSVFPLSPFNKWSMIAPLVFVVGLSMLKEALEDWSRFMQDVKINASKVYVHKSDGEFRRRKWKKISVGDIVKVEKDGFFPADLLLLSSSYEDGICYVETMNLDGETNLKVKRSLEVTLSLDDYDSFKDFTGIIRCEDPNPSLYTFVGNLEYERQIFPLDPSQILLRDSKLRNTPYVYGVVVFTGHDTKVMQNSTKSPSKRSRIEKTMDYIIYTLLVLLILISCISSSGFAWETKFHMPKWWYLRPEEPENLTNPSNPVYAGFVHLITALLLYGYLIPISLYVSIEVVKVLQASFINKDLHMYDSESGVPAHARTSNLNEELGQVDTILSDKTGTLTCNQMDFLKCSIAGTSYGVRSSEVEVAAAQQMAVDLDEHGEVSSRTSTPRAQARDIEVESSITPRIPIKGFGFEDIRLMDGNWLREPHTDDILLFFRILAICHTAIPELNEETGKYTYEAESPDEASFLTAASEFGFVFFKRTQSSVYVHERLSHSGQTIEREYKVLNLLDFTSKRKRMSVVVRDEEGQILLLCKGADSIIFERLAKNGKVYLGPTTKHLNEYGEAGLRTLALSYRKLDEEEYSAWNAEFHKAKTSIGSDRDELLERISDMIEKDLILVGATAVEDKLQKGVPQCIDKLAQAGLKLWVLTGDKMETAINIGYSCSLLRQGMKQICITVVNSEGASQDAKAVKDNILNQITKAVQMVKLEKDPHAAFALIIDGKTLTYALEDEMKYQFLALAVDCASVICCRVSPKQKALVFPLFPYAHGTGKITLAIGDGANDVGMIQEADIGVGISGVEGMQAVMASDFSIAQFRFLERLLVVHGHWCYKRIAQMICYFFYKNIAFGLTLFYFEAFTGFSGQSVYNDYYLLLFNVVLTSLPVIALGVFEQDVSSEICLQFPALYQQGKKNLFFDWYRILGWMGNGVYSSLVIFFLNIGIIYEQAFRVSGQTADMDAVGTTMFTCIIWAVNVQIALTVSHFTWIQHVLIWGSIGLWYLFVALYGMMPPSLSGNIYRILVEILAPAPIYWIATFLVTVTTVLPYFAHISFQRFLHPLDHHIIQEIKYYKRDVEDRRMWTRERTKAREKTKIGFTARVDAKIRHLRSKLNKKQSNMSQFSTQDTMSPRSV

SEQ ID NO: 31177 - protein, 1110 aa, Arabidopsis thaliana
  misc_feature (1)..(1110): Ceres Seq. ID no. 4993026
MIAPLVFVVGLSMLKEALEDWSRFMQDVKINASKVYVHKSDGEFRRRKWKKISVGDIVKVEKDGFFPADLLLLSSSYEDGICYVETMNLDGETNLKVKRSLEVTLSLDDYDSFKDFTGIIRCEDPNPSLYTFVGNLEYERQIFPLDPSQILLRDSKLRNTPYVYGVVVFTGHDTKVMQNSTKSPSKRSRIEKTMDYIIYTLLVLLILISCISSSGFAWETKFHMPKWWYLRPEEPENLTNPSNPVYAGFVHLITALLLYGYLIPISLYVSIEVVKVLQASFINKDLHMYDSESGVPAHARTSNLNEELGQVDTILSDKTGTLTCNQMDFLKCSIAGTSYGVRSSEVEVAAAQQMAVDLDEHGEVSSRTSTPRAQARDIEVESSITPRIPIKGFGFEDIRLMDGNWLREPHTDDILLFFRILAICHTAIPELNEETGKYTYEAESPDEASFLTAASEFGFVFFKRTQSSVYVHERLSHSGQTIEREYKVLNLLDFTSKRKRMSVVVRDEEGQILLLCKGADSIIFERLAKNGKVYLGPTTKHLNEYGEAGLRTLALSYRKLDEEEYSAWNAEFHKAKTSIGSDRDELLERISDMIEKDLILVGATAVEDKLQKGVPQCIDKLAQAGLKLWVLTGDKMETAINIGYSCSLLRQGMKQICITVVNSEGASQDAKAVKDNILNQITKAVQMVKLEKDPHAAFALIIDGKTLTYALEDEMKYQFLALAVDCASVICCRVSPKQKALVFPLFPYAHGTGKITLAIGDGANDVGMIQEADIGVGISGVEGMQAVMASDFSIAQFRFLERLLVVHGHWCYKRIAQMICYFFYKNIAFGLTLFYFEAFTGFSGQSVYNDYYLLLFNVVLTSLPVIALGVFEQDVSSEICLQFPALYQQGKKNLFFDWYRILGWMGNGVYSSLVIFFLNIGIIYEQAFRVSGQTADMDAVGTTMFTCIIWAVNVQIALTVSHFTWIQHVLIWGSIGLWYLFVALYGMMPPSLSGNIYRILVEILAPAPIYWIATFLVTVTTVLPYFAHISFQRFLHPLDHHIIQEIKYYKRDVEDRRMWTRERTKAREKTKIGFTARVDAKIRHLRSKLNKKQSNMSQFSTQDTMSPRSV

SEQ ID NO: 31178 - DNA, 1419 bp, Arabidopsis thaliana
  misc_feature (1)..(1419): Ceres Seq. ID no. 4993274
atgacgtacacggaatttgtacgtacactaagcgaggctttcagtttgaagtccacagagatcaatcccataattagttactggatgccaggagagatgttagtgatgatagatactaaacgtcttcctgtctacattgacagtcaagtggggactcatggtgacgatgctgaaagtgaccgtgtgtgtgatagtgtttcaaatgttgatgaaaataatgagaccgtagatgagcaagacgacgttgaagacgataaaacagatgaggatgaagaggagggggacaacaaagatggtgatgggtatgatgattatcagggtgacgatggatctatgggggaaagtaccctcgatcctactattgatggtaatgaaagtactggcgaagattatgattacaacaagtggaacgatataattgtaaaagaatatggaatatggaatgttgaggagaacgtcattctcacacaactgactattcaacatccagggaaattcagtcgtttgttggcagagtgtacgtacacaagtcagcgtgtacctggcgaagataacatttctcactcgggtgaccatacaccagttgtgactccaagaagtatgtgtcaacatgatgaagaacttgtaggttattacctgcacagaagaaacgaagggcttgagatcgagctcgaaataatcccattaatggacttatacaagtttgatccttgggaacttccagagaaatccttcttgccaaatcgagatatggaatggtttttcttctgtcatcgcgacagaaaataccagaacggatctcgaataaacagagcaactaaatctggttattggaaagccactggcaaagatcgaaaaatcgtttgccactcttcttcttcttcatcatcttcctctatcaccggctgccgaaaaaccctagttttttatatgggtcgagctccttttggtggtagaaccgagtgggtaatgcatgagtatcgcctcttcgacaacgatacttcacaaggatcactaaacttcaagggagacttcgcgctgtgtcgtgtgataaagaggaatgagcatacgcttaagaaatgtgaaattatctcaccagaggtttcagatgagtcattaagcaataatgttaacaatttttgtcaagcaagtgacctagaaaagggttcttgtgatgcaagtaacacacgtttgtcttctcctgatttcatccttgaatcatcttttcagggaaattcacattcaaaaacagaagaagattccggtttccaagtatttacattacccgaattcgaatatccgctagaggtttttgcagatttgaatttcgatttggaaatggaggatccattcatgttcgattatcatccagagcctcatatgaacaatgaagtcatgagccatcacattcgtgggtaa

SEQ ID NO: 31179 - protein, 472 aa, Arabidopsis thaliana
  misc_feature (1)..(472): Ceres Seq. ID no. 4993275
MTYTEFVRTLSEAFSLKSTEINPIISYWMPGEMLVMIDTKRLPVYIDSQVGTHGDDAESDRVCDSVSNVDENNETVDEQDDVEDDKTDEDEEEGDNKDGDGYDDYQGDDGSMGESTLDPTIDGNESTGEDYDYNKWNDIIVKEYGIWNVEENVILTQLTIQHPGKFSRLLAECTYTSQRVPGEDNISHSGDHTPVVTPRSMCQHDEELVGYYLHRRNEGLEIELEIIPLMDLYKFDPWELPEKSFLPNRDMEWFFFCHRDRKYQNGSRINRATKSGYWKATGKDRKIVCHSSSSSSSSSITGCRKTLVFYMGRAPFGGRTEWVMHEYRLFDNDTSQGSLNFKGDFALCRVIKRNEHTLKKCEIISPEVSDESLSNNVNNFCQASDLEKGSCDASNTRLSSPDFILESSFQGNSHSKTEEDSGFQVFTLPEFEYPLEVFADLNFDLEMEDPFMFDYHPEPHMNNEVMSHHIRG

SEQ ID NO: 31180 - protein, 444 aa, Arabidopsis thaliana
  misc_feature (1)..(444): Ceres Seq. ID no. 4993276
MPGEMLVMIDTKRLPVYIDSQVGTHGDDAESDRVCDSVSNVDENNETVDEQDDVEDDKTDEDEEEGDNKDGDGYDDYQGDDGSMGESTLDPTIDGNESTGEDYDYNKWNDIIVKEYGIWNVEENVILTQLTIQHPGKFSRLLAECTYTSQRVPGEDNISHSGDHTPVVTPRSMCQHDEELVGYYLHRRNEGLEIELEIIPLMDLYKFDPWELPEKSFLPNRDMEWFFFCHRDRKYQNGSRINRATKSGYWKATGKDRKIVCHSSSSSSSSSITGCRKTLVFYMGRAPFGGRTEWVMHEYRLFDNDTSQGSLNFKGDFALCRVIKRNEHTLKKCEIISPEVSDESLSNNVNNFCQASDLEKGSCDASNTRLSSPDFILESSFQGNSHSKTEEDSGFQVFTLPEFEYPLEVFADLNFDLEMEDPFMFDYHPEPHMNNEVMSHHIRG

SEQ ID NO: 31181 - protein, 440 aa, Arabidopsis thaliana
  misc_feature (1)..(440): Ceres Seq. ID no. 4993277
MLVMIDTKRLPVYIDSQVGTHGDDAESDRVCDSVSNVDENNETVDEQDDVEDDKTDEDEEEGDNKDGDGYDDYQGDDGSMGESTLDPTIDGNESTGEDYDYNKWNDIIVKEYGIWNVEENVILTQLTIQHPGKFSRLLAECTYTSQRVPGEDNISHSGDHTPVVTPRSMCQHDEELVGYYLHRRNEGLEIELEIIPLMDLYKFDPWELPEKSFLPNRDMEWFFFCHRDRKYQNGSRINRATKSGYWKATGKDRKIVCHSSSSSSSSSITGCRKTLVFYMGRAPFGGRTEWVMHEYRLFDNDTSQGSLNFKGDFALCRVIKRNEHTLKKCEIISPEVSDESLSNNVNNFCQASDLEKGSCDASNTRLSSPDFILESSFQGNSHSKTEEDSGFQVFTLPEFEYPLEVFADLNFDLEMEDPFMFDYHPEPHMNNEVMSHHIRG

SEQ ID NO: 31182 - DNA, 3208 bp, Arabidopsis thaliana
  misc_feature (1)..(3208): Ceres Seq. ID no. 13578959
  misc_feature (57)..(57): n is a, c, t, g, unknown, or other
aaacccaaccctggtttcttcttcttcctcagtgccgccgtaaacaagcttcgccgncgattttctcctcctctgaagaagaagataatttaatttctaaatcatcgagaatccagtaccaggaaccatggaggcagatactaagacagactctcgtactctgaaagttaacgacttgttaaaagatgctcgcttagattacgattctctcaggaagcttgttgatgataccgtttcgtcgattaaagaagctattgatggaatccctgaaaaatttcaggttacctcggagttagctcctagttttgttgaggacattggggcagataaagaagtggagttcagttttaagaagccaaatggtttcaatctctgtggaagttactccatttgtggcatggcaaagccggatacttctgttgatcttcttgttcacttgcctaaagaatgtttttatgagaaggattacatgaatcatagataccatgccaaaagatgtctatatctttgtgttattgaaaagcatttgttgtcgtcatcgtccattgagaaggttgtatggtcaaccttacataacgaagctaggaagccagtccttgttgttttcccagctaagaaacttgatcagtttcctggattttccataaggttaatcccttccgcaacatcactgtttagtgttgcaaaattgagtattagcagaaacaacgtccgttctgtaactgcagatggtgtccctgagcccacgccaacttacaactcaagcatattggaggacatgtttctggaggaaaattctgagtttctcaagaaaaccttctctgagtggaaggagttgagcgatgctttgattttgctgaagatatgggcaagacaaaggagctcgatatacgtccacgattgcttgaacggatttctaatctctgtgatactttcatatcttgcaacccattccaaaattaacaaggcactaagtgcattagatatattcagagtgacattggatttcataggagaagatgcagttcagagagttgttccctgttgttatatgcgattcatctacgtttgtgaacttggctttccggatgaccagtgttggattcctggagcacagcttcaagatgaggcttctttgacgcttaagtgtatggagaaactcagagatgggggattcgaggagatttttatgactaagattgactatcctgttaagtatgaccactgcataagttctcttaggttacagctaaaggggaaaacagcagtgtctctgtcagggttttgtttggacaaggaatgttggagactctatgagcagaaagtgcatagcctgcttttagaaggactcggtgacagagctaaatcaatccgtgtaggcttgtcagttcttgacagagaacctcttttcattggcatatctgtcagctccactgaaaaggcttatagaacagttgatattgggccagatgctgaaaacaagatagaggcacttagattccggaagttttggggtgagaagtctgatctaaggaggtttaaagatggaagaatatctgaaagcacagtttgggagactcagcagtggaccaaacatcttatcatgaaacaaattgttgaatatatccttaagcggcatctttcactgacgtccgatgacattgtacaattagtggatcaacttgatttctctctaaactatgggggcaaagacccaatatctttatctggaaatttggttcaagcctatgaagttttatcaaagtgcttgcgtgagattgaaggcatacctctcaaagtctctagcgttcagtctttagattcagctctcaggttcacatccgtattccctcctgaacctcacccagtggcttgcgaaaaaatcgattcgcgaagactgcaaaaacttataccatcctgcattccagcaatggaagtcatgattcagctagaaggttctggtaactggcccatggatgatttagcagttgagaaaacaaaatctgccttcctcctgaaaattgcagagaggtgggtgaagctattgtttgtaacacttcaaactattaaccttcagaacgtcaagggaataccatgcacagctactgaggataatgtcgatgttttcattggtggttacgcatttcgcttgagaatattgcatgaaagaggcctgagtttggtgaagagagaaagtgagttttcttcttttggagtggacccggtgaagcatgtttcctctaccgataaaatgctttttattcgtagtcaacatgcaagtatgattaatggtttgcaaggtcgatttcctgtatacgcaccagttgccaggcttgcaaaaagatgggtttctgcgcatctcttttctggttgcctggcagaagaggccattgaacttttggttgcttatctcttcctcacacctctcccactcggtgttccttcctcccggattaatggattcttaaggttcttgcgattactagcagactatgaatggatgttctacccgttgattgttgacataaacaatgactttggtagaaatgacgagaaagagatcaatgataacttcatgtcaagtagaaaaggctacgaagaggacaaacaaaacataagttcagctatgttcttggctgctccttacgacaaggcatcagaggcatggacatcaacttcaccaaatttattggaacaaaaaaggttggtggcttatgctcgaagcagtgcaaacgtgttgagcaagatggtattgcaagaacataatgattctgttcaatgggagtgccttttcaggacacccttgaacaactatgacgcagttattcttctccatagagacaaattaccttatccacgtcgtcttctgtttccatctgaacttaaccaagggaagcatgtagcacggggaaaagcgagtagattgttcaacccatttatgtcgcctggagatttgaagagaagccatgaagagcttaagaataagctaatggaagagtttgggacgttgaagccatggtatgatcatataggaggcgacgcaattggtttaacatggaacaaacacaattcaaagaaacgagaacgagatgaagaagaagaagaagaagaagaaagtaatccaatggagatgttaaaggcggtaggcgaaatgggtaaagggttagtgagggatatctatttgctcaagcctccacgctttgtctaa

SEQ ID NO: 31183 - protein, 1026 aa, Arabidopsis thaliana
  misc_feature (1)..(1026): Ceres Seq. ID no. 13578960
MEADTKTDSRTLKVNDLLKDARLDYDSLRKLVDDTVSSIKEAIDGIPEKFQVTSELAPSFVEDIGADKEVEFSFKKPNGFNLCGSYSICGMAKPDTSVDLLVHLPKECFYEKDYMNHRYHAKRCLYLCVIEKHLLSSSSIEKVVWSTLHNEARKPVLVVFPAKKLDQFPGFSIRLIPSATSLFSVAKLSISRNNVRSVTADGVPEPTPTYNSSILEDMFLEENSEFLKKTFSEWKELSDALILLKIWARQRSSIYVHDCLNGFLISVILSYLATHSKINKALSALDIFRVTLDFIGEDAVQRVVPCCYMRFIYVCELGFPDDQCWIPGAQLQDEASLTLKCMEKLRDGGFEEIFMTKIDYPVKYDHCISSLRLQLKGKTAVSLSGFCLDKECWRLYEQKVHSLLLEGLGDRAKSIRVGLSVLDREPLFIGISVSSTEKAYRTVDIGPDAENKIEALRFRKFWGEKSDLRRFKDGRISESTVWETQQWTKHLIMKQIVEYILKRHLSLTSDDIVQLVDQLDFSLNYGGKDPISLSGNLVQAYEVLSKCLREIEGIPLKVSSVQSLDSALRFTSVFPPEPHPVACEKIDSRRLQKLIPSCIPAMEVMIQLEGSGNWPMDDLAVEKTKSAFLLKIAERWVKLLFVTLQTINLQNVKGIPCTATEDNVDVFIGGYAFRLRILHERGLSLVKRESEFSSFGVDPVKHVSSTDKMLFIRSQHASMINGLQGRFPVYAPVARLAKRWVSAHLFSGCLAEEAIELLVAYLFLTPLPLGVPSSRINGFLRFLRLLADYEWMFYPLIVDINNDFGRNDEKEINDNFMSSRKGYEEDKQNISSAMFLAAPYDKASEAWTSTSPNLLEQKRLVAYARSSANVLSKMVLQEHNDSVQWECLFRTPLNNYDAVILLHRDKLPYPRRLLFPSELNQGKHVARGKASRLFNPFMSPGDLKRSHEELKNKLMEEFGTLKPWYDHIGGDAIGLTWNKHNSKKRERDEEEEEEEESNPMEMLKAVGEMGKGLVRDIYLLKPPRFV

SEQ ID NO: 31184 - protein, 936 aa, Arabidopsis thaliana
  misc_feature (1)..(936): Ceres Seq. ID no. 13578961
MAKPDTSVDLLVHLPKECFYEKDYMNHRYHAKRCLYLCVIEKHLLSSSSIEKVVWSTLHNEARKPVLVVFPAKKLDQFPGFSIRLIPSATSLFSVAKLSISRNNVRSVTADGVPEPTPTYNSSILEDMFLEENSEFLKKTFSEWKELSDALILLKIWARQRSSIYVHDCLNGFLISVILSYLATHSKINKALSALDIFRVTLDFIGEDAVQRVVPCCYMRFIYVCELGFPDDQCWIPGAQLQDEASLTLKCMEKLRDGGFEEIFMTKIDYPVKYDHCISSLRLQLKGKTAVSLSGFCLDKECWRLYEQKVHSLLLEGLGDRAKSIRVGLSVLDREPLFIGISVSSTEKAYRTVDIGPDAENKIEALRFRKFWGEKSDLRRFKDGRISESTVWETQQWTKHLIMKQIVEYILKRHLSLTSDDIVQLVDQLDFSLNYGGKDPISLSGNLVQAYEVLSKCLREIEGIPLKVSSVQSLDSALRFTSVFPPEPHPVACEKIDSRRLQKLIPSCIPAMEVMIQLEGSGNWPMDDLAVEKTKSAFLLKIAERWVKLLFVTLQTINLQNVKGIPCTATEDNVDVFIGGYAFRLRILHERGLSLVKRESEFSSFGVDPVKHVSSTDKMLFIRSQHASMINGLQGRFPVYAPVARLAKRWVSAHLFSGCLAEEAIELLVAYLFLTPLPLGVPSSRINGFLRFLRLLADYEWMFYPLIVDINNDFGRNDEKEINDNFMSSRKGYEEDKQNISSAMFLAAPYDKASEAWTSTSPNLLEQKRLVAYARSSANVLSKMVLQEHNDSVQWECLFRTPLNNYDAVILLHRDKLPYPRRLLFPSELNQGKHVARGKASRLFNPFMSPGDLKRSHEELKNKLMEEFGTLKPWYDHIGGDAIGLTWNKHNSKKRERDEEEEEEEESNPMEMLKAVGEMGKGLVRDIYLLKPPRFV

SEQ ID NO: 31185 - protein, 912 aa, Arabidopsis thaliana
  misc_feature (1)..(912): Ceres Seq. ID no. 13578962
MNHRYHAKRCLYLCVIEKHLLSSSSIEKVVWSTLHNEARKPVLVVFPAKKLDQFPGFSIRLIPSATSLFSVAKLSISRNNVRSVTADGVPEPTPTYNSSILEDMFLEENSEFLKKTFSEWKELSDALILLKIWARQRSSIYVHDCLNGFLISVILSYLATHSKINKALSALDIFRVTLDFIGEDAVQRVVPCCYMRFIYVCELGFPDDQCWIPGAQLQDEASLTLKCMEKLRDGGFEEIFMTKIDYPVKYDHCISSLRLQLKGKTAVSLSGFCLDKECWRLYEQKVHSLLLEGLGDRAKSIRVGLSVLDREPLFIGISVSSTEKAYRTVDIGPDAENKIEALRFRKFWGEKSDLRRFKDGRISESTVWETQQWTKHLIMKQIVEYILKRHLSLTSDDIVQLVDQLDFSLNYGGKDPISLSGNLVQAYEVLSKCLREIEGIPLKVSSVQSLDSALRFTSVFPPEPHPVACEKIDSRRLQKLIPSCIPAMEVMIQLEGSGNWPMDDLAVEKTKSAFLLKIAERWVKLLFVTLQTINLQNVKGIPCTATEDNVDVFIGGYAFRLRILHERGLSLVKRESEFSSFGVDPVKHVSSTDKMLFIRSQHASMINGLQGRFPVYAPVARLAKRWVSAHLFSGCLAEEAIELLVAYLFLTPLPLGVPSSRINGFLRFLRLLADYEWMFYPLIVDINNDFGRNDEKEINDNFMSSRKGYEEDKQNISSAMFLAAPYDKASEAWTSTSPNLLEQKRLVAYARSSANVLSKMVLQEHNDSVQWECLFRTPLNNYDAVILLHRDKLPYPRRLLFPSELNQGKHVARGKASRLFNPFMSPGDLKRSHEELKNKLMEEFGTLKPWYDHIGGDAIGLTWNKHNSKKRERDEEEEEEEESNPMEMLKAVGEMGKGLVRDIYLLKPPRFV

SEQ ID NO: 31186 - DNA, 1515 bp, Arabidopsis thaliana
  misc_feature (1)..(1515): Ceres Seq. ID no. 13578963
gaaaacaggaaaatggaagacctctggttcatcttcttctccttcctcacagctactttaatcttcttcatcaccaagaagttcctgtggagtctaaattctaaattacctccaagccctacgcctctccctatcatcggccatcttcacctcatcaagaagtatcctttaccacaagctctacgtcatctctcttcaaactacggcccggttctgttcctcaaatttggatgccgtaacgttttgactctctcttctccagattccatcgaagaatgcttcaccaatcacgacgtaaccctcgcgaatcgtcccaagaccatcacctccgatcacttcagctacggctataaaaactttggatttgctccttacggtgacctctggcgaactctccgtcgtctctccactctcgaggtcttctcctccgctagcctgcagaagaactcttccatccgaaacgaggaagtctccaacctctgtttgattatcttcagattatcccgtgactctcggatagtggatctcaagtatcaattcactcttctcacggctcatatcatgcttagattagtatctgggaagcgtggggtcaaaaagagcgatcccgaatcagagaagaggttcttggatgattttaaattgaggtttttctcgagcatgtcgatgaatgtctgcgactattttccagtgttgaggtggattgggtacaaaggtttggagaagagagtgattgatatgcagagaatgagagatgagtatcttcagcgactcattgatgatattcgaatgaagaacattgattcctctggttccgtagtagagaaattcttgaagcttcaagaatcagaacctgaattttacgcagatgatgttatcaaaggaatcatagtgctaatgttcaatggcggaacggatacatcacctgtggcaatggaatgggcagtgtcacttttactaaaccatccagataagcttgagaagctcagagaagaaatcaaatctaatgttaaacacaaagggcttatacaagactcggatctctcgagcttaccttatcttcgatgtgtcatctatgagacgcttaggctataccctgcagctccactcttgcttcctcactgctcatccaagagattcaacttaggcaactacgagattccagaaaacataatgttattggtgaatgcttgggctgttcatagggacggtgagctttgggaagaagccaatgttttcaagccggagagatttgaagggtttgttggcgatagagatggttttaggtttctgccatttggagttgggaggcgggcgtgtcctgcagctggacttggaatgagggtagtgtcgcttgctgttggagcattggttcagtgttttgagtgggagaaggtagaagcaggagatatagacatgaggcccgtgtttggtgtggcaatggctaaggctgagccgcttgtcgcattgccgaagccatggtctgaaatggttcctatcttgtctcagctctag

SEQ ID NO: 31187 - protein, 504 aa, Arabidopsis thaliana
  misc_feature (1)..(504): Ceres Seq. ID no. 13578964
ENRKMEDLWFIFFSFLTATLIFFITKKFLWSLNSKLPPSPTPLPIIGHLHLIKKYPLPQALRHLSSNYGPVLFLKFGCRNVLTLSSPDSIEECFTNHDVTLANRPKTITSDHFSYGYKNFGFAPYGDLWRTLRRLSTLEVFSSASLQKNSSIRNEEVSNLCLIIFRLSRDSRIVDLKYQFTLLTAHIMLRLVSGKRGVKKSDPESEKRFLDDFKLRFFSSMSMNVCDYFPVLRWIGYKGLEKRVIDMQRMRDEYLQRLIDDIRMKNIDSSGSVVEKFLKLQESEPEFYADDVIKGIIVLMFNGGTDTSPVAMEWAVSLLLNHPDKLEKLREEIKSNVKHKGLIQDSDLSSLPYLRCVIYETLRLYPAAPLLLPHCSSKRFNLGNYEIPENIMLLVNAWAVHRDGELWEEANVFKPERFEGFVGDRDGFRFLPFGVGRRACPAAGLGMRVVSLAVGALVQCFEWEKVEAGDIDMRPVFGVAMAKAEPLVALPKPWSEMVPILSQL

SEQ ID NO: 31188 - protein, 500 aa, Arabidopsis thaliana
  misc_feature (1)..(500): Ceres Seq. ID no. 13578965
MEDLWFIFFSFLTATLIFFITKKFLWSLNSKLPPSPTPLPIIGHLHLIKKYPLPQALRHLSSNYGPVLFLKFGCRNVLTLSSPDSIEECFTNHDVTLANRPKTITSDHFSYGYKNFGFAPYGDLWRTLRRLSTLEVFSSASLQKNSSIRNEEVSNLCLIIFRLSRDSRIVDLKYQFTLLTAHIMLRLVSGKRGVKKSDPESEKRFLDDFKLRFFSSMSMNVCDYFPVLRWIGYKGLEKRVIDMQRMRDEYLQRLIDDIRMKNIDSSGSVVEKFLKLQESEPEFYADDVIKGIIVLMFNGGTDTSPVAMEWAVSLLLNHPDKLEKLREEIKSNVKHKGLIQDSDLSSLPYLRCVIYETLRLYPAAPLLLPHCSSKRFNLGNYEIPENIMLLVNAWAVHRDGELWEEANVFKPERFEGFVGDRDGFRFLPFGVGRRACPAAGLGMRVVSLAVGALVQCFEWEKVEAGDIDMRPVFGVAMAKAEPLVALPKPWSEMVPILSQL

SEQ ID NO: 31189 - protein, 317 aa, Arabidopsis thaliana
  misc_feature (1)..(317): Ceres Seq. ID no. 13578966
MLRLVSGKRGVKKSDPESEKRFLDDFKLRFFSSMSMNVCDYFPVLRWIGYKGLEKRVIDMQRMRDEYLQRLIDDIRMKNIDSSGSVVEKFLKLQESEPEFYADDVIKGIIVLMFNGGTDTSPVAMEWAVSLLLNHPDKLEKLREEIKSNVKHKGLIQDSDLSSLPYLRCVIYETLRLYPAAPLLLPHCSSKRFNLGNYEIPENIMLLVNAWAVHRDGELWEEANVFKPERFEGFVGDRDGFRFLPFGVGRRACPAAGLGMRVVSLAVGALVQCFEWEKVEAGDIDMRPVFGVAMAKAEPLVALPKPWSEMVPILSQL

SEQ ID NO: 31190 - DNA, 2985 bp, Arabidopsis thaliana
  misc_feature (1)..(2985): Ceres Seq. ID no. 13578967
atggatcaaggaaggcaagtgttttcagtagatcttctcgagagatatgcgacaaagaatcgtggcatgattacatgtatggctgctgggaatgatgtaattgttcttggaacaagtaaaggatggattatccggtatgatttcggagttgggagttctaatgatattgatctcgctgttggtcgaactggggagcaatcaattcacaaggtttttgttgatcctggtggtagtcattgcattgctacagtcactggtgttggaggagctgaaactttttatactcatgcaaagtggcttaagccgcgtgtgttgagccgtttgaaaggtttgctcgttaatgccgtggcttggaatagacagcagataactgaagtttctactaaggagatcattctgggcactcaggatgggcagctgtttgagatggccgtggatgagaaggataagagagagaagtacatcaagtttttgtttgaattagaagaacttcctgaagccttcaaggctttgcagatggaaacggccaacataagcagtgggatgaggtactatgtgatggctgtaacccctactcgactctactcgtttacagggattggaacattagaatctgtttttgctagttataaagaacgagcagttcattttatggaacttcctggtgaaataccaaataggcaagtgcttgattaccttaggctcattttgcgtattaaagaaatcacaaagtgtaactctaccctcttaacatggacaggaatttatcatggtggcctaaattttggagctcagcacagttatccaaatggcgatgagaactttgtggagaacaaagcactcttggactactcaaaactgagtgatggaactgaagcagtcaagcctggttcgatggcactctctgagtatcatttcttgcttcttattgggaataaggttaaggttgtcaatcggataagtgaacaaatcattgaagagctccagtttgatatcacctcagattcagtttcaaggggcataattggactttgcagtgatgcctctgctaacgttttctatgcatatgatcaaaattcgatattccaggtttctgtgattgacgaaggacgagatatgtggaaggtttacctggacttgaaagtctatgctgcagctttagcaaactgtcgtgaccctctccagagagaccaagtttatttagttcaggcagaatctgcattcaccgacaaggaatatctgcgagcagcatcattctacgccaaaatcaattatgtaatatcttttgaggaggtcactttgaagtttattagtatcaacgaaccggaagctttgaggacgttcttgttgcataagcttgataatctttcaaaggatgataaatgccaaataacgatgatatcaacatgggcaactgagctatatctggacaagataaatcggctgcttttggaagatgacactgctatagaaaatcgtgactcggagtatcactcagtcattcaagaattccgtgctttcatgagcgattgcaaggatgaattggacgaggcaaccacagtgaaaattctggagagttatggtcgggttgaggaattggtatattttgcaaacttgaaggagcagtatgaaattgtagttctccattatattcagcaaggggaagcaaagaaagcattggaagtgctccaaaaatcttcagtttcagttgaactccagtatcaatttgcgccagaacttattatgcttgacgcatatgaaaccgtggaatcatggatggccaacaaaaatcttaatccaaggagattaattactgcaatgatgcgttactcgagcggacctcatgcaaagaacgagacacatgaggtcatcaaatatcttgagttttgcgtccaccgtctgcataacgaggatccagggattcacagtttacttctctcattatatgccaagcaggaagatgacggtgccctcctccgttttctgcaatgcaaatttgggaaaggacgagagaatggtcccgaatttttctatgatcccaaatatgcattgcgcctatgtctcaaggaaaggagaacccgtgcctgtgtccatatatacagcatgatgtctatgcatgaagaggcagtagcccttgctcttcagattgatccggaacttgctatggctgaggctgataaggtcgaagatgatgaagacttgagaaagaagctgtggctgatggttgcaaagcatgtcgtcaagcaggaaaagggagctaaaagggaaaacatacgaaaagctattgcctttctcaaggaaactgatggccttctaaagattgaagatattttgcctttctttccggactttgccttaattgatgacttcaaggaagcgatttgctcatctctcgaggattacaacaagcaaatagaacaactgaaagaggagatgaatgatgccacacgtggtgcagataacattagaaatgatattagtgcgctaactcaaagatatgccgttattgaccgcgacgaggaatgtggggtttgtaaacgtaaaatcttgatgatgagcggtgatttcagaatggcccagggatattcttcagcgggaccattggctcctttttatgtctttccttgtgggcactctttccatgcacagtgcctgatcacacacgtcacaagctgtgcacacgaagagcaagccgagcatatactcgatctgcagaagcaactgacattgcttggaagcgaaacccggagggatataaatggtaaccgatctgatgaacccataacaagcacaacaactgcagacaagcttcgatcagagctagatgatgctattgccagcgaatgcccgttctgtggagaattaatgatcaatgagatcactctgccttttattaaacctgaggattcacagtattctacttcatgggacctccgatcagagaccaacttagcaaaccagaggaccatttctttgcctgtttga

SEQ ID NO: 31191 - protein, 994 aa, Arabidopsis thaliana
  misc_feature (1)..(994): Ceres Seq. ID no. 13578968
MDQGRQVFSVDLLERYATKNRGMITCMAAGNDVIVLGTSKGWIIRYDFGVGSSNDIDLAVGRTGEQSIHKVFVDPGGSHCIATVTGVGGAETFYTHAKWLKPRVLSRLKGLLVNAVAWNRQQITEVSTKEIILGTQDGQLFEMAVDEKDKREKYIKFLFELEELPEAFKALQMETANISSGMRYYVMAVTPTRLYSFTGIGTLESVFASYKERAVHFMELPGEIPNRQVLDYLRLILRIKEITKCNSTLLTWTGIYHGGLNFGAQHSYPNGDENFVENKALLDYSKLSDGTEAVKPGSMALSEYHFLLLIGNKVKVVNRISEQIIEELQFDITSDSVSRGIIGLCSDASANVFYAYDQNSIFQVSVIDEGRDMWKVYLDLKVYAAALANCRDPLQRDQVYLVQAESAFTDKEYLRAASFYAKINYVISFEEVTLKFISINEPEALRTFLLHKLDNLSKDDKCQITMISTWATELYLDKINRLLLEDDTAIENRDSEYHSVIQEFRAFMSDCKDELDEATTVKILESYGRVEELVYFANLKEQYEIVVLHYIQQGEAKKALEVLQKSSVSVELQYQFAPELIMLDAYETVESWMANKNLNPRRLITAMMRYSSGPHAKNETHEVIKYLEFCVHRLHNEDPGIHSLLLSLYAKQEDDGALLRFLQCKFGKGRENGPEFFYDPKYALRLCLKERRTRACVHIYSMMSMHEEAVALALQIDPELAMAEADKVEDDEDLRKKLWLMVAKHVVKQEKGAKRENIRKAIAFLKETDGLLKIEDILPFFPDFALIDDFKEAICSSLEDYNKQIEQLKEEMNDATRGADNIRNDISALTQRYAVIDRDEECGVCKRKILMMSGDFRMAQGYSSAGPLAPFYVFPCGHSFHAQCLITHVTSCAHEEQAEHILDLQKQLTLLGSETRRDINGNRSDEPITSTTTADKLRSELDDAIASECPFCGELMINEITLPFIKPEDSQYSTSWDLRSETNLANQRTISLPV

SEQ ID NO: 31192 - protein, 972 aa, Arabidopsis thaliana
  misc_feature (1)..(972): Ceres Seq. ID no. 13578969
MITCMAAGNDVIVLGTSKGWIIRYDFGVGSSNDIDLAVGRTGEQSIHKVFVDPGGSHCIATVTGVGGAETFYTHAKWLKPRVLSRLKGLLVNAVAWNRQQITEVSTKEIILGTQDGQLFEMAVDEKDKREKYIKFLFELEELPEAFKALQMETANISSGMRYYVMAVTPTRLYSFTGIGTLESVFASYKERAVHFMELPGEIPNRQVLDYLRLILRIKEITKCNSTLLTWTGIYHGGLNFGAQHSYPNGDENFVENKALLDYSKLSDGTEAVKPGSMALSEYHFLLLIGNKVKVVNRISEQIIEELQFDITSDSVSRGIIGLCSDASANVFYAYDQNSIFQVSVIDEGRDMWKVYLDLKVYAAALANCRDPLQRDQVYLVQAESAFTDKEYLRAASFYAKINYVISFEEVTLKFISINEPEALRTFLLHKLDNLSKDDKCQITMISTWATELYLDKINRLLLEDDTAIENRDSEYHSVIQEFRAFMSDCKDELDEATTVKILESYGRVEELVYFANLKEQYEIVVLHYIQQGEAKKALEVLQKSSVSVELQYQFAPELIMLDAYETVESWMANKNLNPRRLITAMMRYSSGPHAKNETHEVIKYLEFCVHRLHNEDPGIHSLLLSLYAKQEDDGALLRFLQCKFGKGRENGPEFFYDPKYALRLCLKERRTRACVHIYSMMSMHEEAVALALQIDPELAMAEADKVEDDEDLRKKLWLMVAKHVVKQEKGAKRENIRKAIAFLKETDGLLKIEDILPFFPDFALIDDFKEAICSSLEDYNKQIEQLKEEMNDATRGADNIRNDISALTQRYAVIDRDEECGVCKRKILMMSGDFRMAQGYSSAGPLAPFYVFPCGHSFHAQCLITHVTSCAHEEQAEHILDLQKQLTLLGSETRRDINGNRSDEPITSTTTADKLRSELDDAIASECPFCGELMINEITLPFIKPEDSQYSTSWDLRSETNLANQRTISLPV

SEQ ID NO: 31193 - protein, 968 aa, Arabidopsis thaliana
  misc_feature (1)..(968): Ceres Seq. ID no. 13578970
MAAGNDVIVLGTSKGWIIRYDFGVGSSNDIDLAVGRTGEQSIHKVFVDPGGSHCIATVTGVGGAETFYTHAKWLKPRVLSRLKGLLVNAVAWNRQQITEVSTKEIILGTQDGQLFEMAVDEKDKREKYIKFLFELEELPEAFKALQMETANISSGMRYYVMAVTPTRLYSFTGIGTLESVFASYKERAVHFMELPGEIPNRQVLDYLRLILRIKEITKCNSTLLTWTGIYHGGLNFGAQHSYPNGDENFVENKALLDYSKLSDGTEAVKPGSMALSEYHFLLLIGNKVKVVNRISEQIIEELQFDITSDSVSRGIIGLCSDASANVFYAYDQNSIFQVSVIDEGRDMWKVYLDLKVYAAALANCRDPLQRDQVYLVQAESAFTDKEYLRAASFYAKINYVISFEEVTLKFISINEPEALRTFLLHKLDNLSKDDKCQITMISTWATELYLDKINRLLLEDDTAIENRDSEYHSVIQEFRAFMSDCKDELDEATTVKILESYGRVEELVYFANLKEQYEIVVLHYIQQGEAKKALEVLQKSSVSVELQYQFAPELIMLDAYETVESWMANKNLNPRRLITAMMRYSSGPHAKNETHEVIKYLEFCVHRLHNEDPGIHSLLLSLYAKQEDDGALLRFLQCKFGKGRENGPEFFYDPKYALRLCLKERRTRACVHIYSMMSMHEEAVALALQIDPELAMAEADKVEDDEDLRKKLWLMVAKHVVKQEKGAKRENIRKAIAFLKETDGLLKIEDILPFFPDFALIDDFKEAICSSLEDYNKQIEQLKEEMNDATRGADNIRNDISALTQRYAVIDRDEECGVCKRKILMMSGDFRMAQGYSSAGPLAPFYVFPCGHSFHAQCLITHVTSCAHEEQAEHILDLQKQLTLLGSETRRDINGNRSDEPITSTTTADKLRSELDDAIASECPFCGELMINEITLPFIKPEDSQYSTSWDLRSETNLANQRTISLPV

SEQ ID NO: 31194 - DNA, 2721 bp, Arabidopsis thaliana
  misc_feature (1)..(2721): Ceres Seq. ID no. 13578971
  misc_feature (85)..(85): n is a, c, t, g, unknown, or other
gaaaataatttctcgaaagagaaaaaaagagagagagagagagagatggagcttctacagtactaaaagctgagtgaatcccaanaaatctccgccaacggaatattttttttctgggagctgaaaatcgttggtgacgatggcggattctctttctagggtttacggaactctgtttagtggtgttaatatatctctcttctcggatccaccgttgaaaaccccctgaagagtgtttttttttccgggtttaaggtcttttacgtttcgttttttcttgagatttcgtcttccgctgtgagtttctgttctcgcggcgagtttttgtgtagatctgagggttttcaaggcaagagaaagtgtcggtgatgtcgattttctcactcgcgagctcttctgattcacaaagagatgacctaataatggcgttgaaggcggtggttattgtatattgtgtggtttctctcgtcagtgttcaattagctgatgctcaacatgaaggactgccagtttcaccaacgttatcaccttcaacttcaccagttatcactgatctgcccctaccagctgaatttccgcggtttcacagaaagtatttcgcaccacaacaagcagaagcacctcagcattctcccccttatagtcgtttggtcgcttctgatcatccccctaccagctcacatttctccaaaccttccatgaaaaggaatgctcagtctcctggagccggcttggctgatattgctccagcacaatctagcaatggtgttcttcctgatgccttaactcagccacctttgtcgccctccatttcaaattgttgcaaatcagatatggtgcttaaacgaagaagtattggttgccactgcgtgtatcctataaaactggacatccttctcttgaatgtttcagaaactcctagttggaacatgttcttgaacgaatttgctacccagcttggtctcctacctcaccaaatcgagctgattaacttctatgtgctaagcttatcaaggatgaacatatcgatggatatcacccctcattctggaattagtttctcagctagtcaggcatccgcaataaactcttcccttatcagccacaagattcaatttagccctactttggtgggagattacaaacttctaaaccttacttggtttgaggcccctgcaccttcgcaagcacctctagtggcttcttcacctcataaagcaccatcacaaggatcctcagcaactacgtcagtaagatctccagggaaaaagaggcatcccaatcttattcttatcttttctatagccgctggtgtgcttatacttgccataatcactgtacttgttatttgttcccgcgcactccgagaagagaaagctccagatcctcacaaagaagctgtaaaaccaaggaacctggacgctggttcatttgggggatctcttcctcacccagcaagtacacggtttctgtcatatgaagaactcaaagaggcaactagcaattttgaatctgctagcattctaggagaaggtgggtttggcaaggtttacagaggcatcttagccgatggtactgctgtagcgattaagaagctcacaagtggtgggccacaaggtgataaagaattccaggtggagattgatatgcttagccgtcttcatcatcgtaatcttgtgaaacttgtgggttactatagtagtcgagattcttctcagcacctactttgttatgagcttgttccaaatggcagcctcgaggcttggctccatgggcctctcgggttgaactgtcctcttgattgggacaccagaatgaagattgcacttgatgctgcaagaggacttgcataccttcatgaagactcgcaaccctccgttatacacagagattttaaagcctctaatatactccttgaaaacaacttcaacgccaaagttgcagattttggcctagccaaacaagctcctgaaggcaggggtaatcacttatctactcgtgttatgggcacatttggatatgttgcgcctgaatatgcaatgacgggacacctactcgtcaagagtgatgtttatagttacggtgtggtccttctcgaattgttaactggtagaaaacctgtggatatgtcacaaccttcaggccaagaaaatctcgtcacttggacaaggccagttttaagagacaaagaccggttagaagaactagtcgattcaagacttgaaggaaaatacccgaaagaagatttcataagagtatgcacaatcgctgcagcttgtgttgcacctgaagctagccagagaccaacgatgggcgaagtggttcagtcacttaaaatggttcaacgggtggttgagtatcaagacccggttttaaacacttcaaataaagctcgtcctaaccggagacaatcatcagctacgttcgagtcagaagtaacctcttctatgttctcttctggtccttattctggtctaagcgcttttgatcatgaaaatattacacgaacaactgttttctcagaagatcttcacgaaggccgatgatagaagccagggttttcttctttttatttgtttttctcccacttacggtgagaaaatttccaccagagaagcttttgagtttgggacattattacagctctttggattttggattctcctttattggaggatagaattttgtatatatttttgcgttaattaattaatatttgcc

SEQ ID NO: 31195 - protein, 725 aa, Arabidopsis thaliana
  misc_feature (1)..(725): Ceres Seq. ID no. 13578972
MSIFSLASSSDSQRDDLIMALKAVVIVYCVVSLVSVQLADAQHEGLPVSPTLSPSTSPVITDLPLPAEFPRFHRKYFAPQQAEAPQHSPPYSRLVASDHPPTSSHFSKPSMKRNAQSPGAGLADIAPAQSSNGVLPDALTQPPLSPSISNCCKSDMVLKRRSIGCHCVYPIKLDILLLNVSETPSWNMFLNEFATQLGLLPHQIELINFYVLSLSRMNISMDITPHSGISFSASQASAINSSLISHKIQFSPTLVGDYKLLNLTWFEAPAPSQAPLVASSPHKAPSQGSSATTSVRSPGKKRHPNLILIFSIAAGVLILAIITVLVICSRALREEKAPDPHKEAVKPRNLDAGSFGGSLPHPASTRFLSYEELKEATSNFESASILGEGGFGKVYRGILADGTAVAIKKLTSGGPQGDKEFQVEIDMLSRLHHRNLVKLVGYYSSRDSSQHLLCYELVPNGSLEAWLHGPLGLNCPLDWDTRMKIALDAARGLAYLHEDSQPSVIHRDFKASNILLENNFNAKVADFGLAKQAPEGRGNHLSTRVMGTFGYVAPEYAMTGHLLVKSDVYSYGVVLLELLTGRKPVDMSQPSGQENLVTWTRPVLRDKDRLEELVDSRLEGKYPKEDFIRVCTIAAACVAPEASQRPTMGEVVQSLKMVQRVVEYQDPVLNTSNKARPNRRQSSATFESEVTSSMFSSGPYSGLSAFDHENITRTTVFSEDLHEGR

SEQ ID NO: 31196 - protein, 707 aa, Arabidopsis thaliana
  misc_feature (1)..(707): Ceres Seq. ID no. 13578973
MALKAVVIVYCVVSLVSVQLADAQHEGLPVSPTLSPSTSPVITDLPLPAEFPRFHRKYFAPQQAEAPQHSPPYSRLVASDHPPTSSHFSKPSMKRNAQSPGAGLADIAPAQSSNGVLPDALTQPPLSPSISNCCKSDMVLKRRSIGCHCVYPIKLDILLLNVSETPSWNMFLNEFATQLGLLPHQIELINFYVLSLSRMNISMDITPHSGISFSASQASAINSSLISHKIQFSPTLVGDYKLLNLTWFEAPAPSQAPLVASSPHKAPSQGSSATTSVRSPGKKRHPNLILIFSIAAGVLILAIITVLVICSRALREEKAPDPHKEAVKPRNLDAGSFGGSLPHPASTRFLSYEELKEATSNFESASILGEGGFGKVYRGILADGTAVAIKKLTSGGPQGDKEFQVEIDMLSRLHHRNLVKLVGYYSSRDSSQHLLCYELVPNGSLEAWLHGPLGLNCPLDWDTRMKIALDAARGLAYLHEDSQPSVIHRDFKASNILLENNFNAKVADFGLAKQAPEGRGNHLSTRVMGTFGYVAPEYAMTGHLLVKSDVYSYGVVLLELLTGRKPVDMSQPSGQENLVTWTRPVLRDKDRLEELVDSRLEGKYPKEDFIRVCTIAAACVAPEASQRPTMGEVVQSLKMVQRVVEYQDPVLNTSNKARPNRRQSSATFESEVTSSMFSSGPYSGLSAFDHENITRTTVFSEDLHEGR

SEQ ID NO: 31197 - protein, 615 aa, Arabidopsis thaliana
  misc_feature (1)..(615): Ceres Seq. ID no. 13578974
MKRNAQSPGAGLADIAPAQSSNGVLPDALTQPPLSPSISNCCKSDMVLKRRSIGCHCVYPIKLDILLLNVSETPSWNMFLNEFATQLGLLPHQIELINFYVLSLSRMNISMDITPHSGISFSASQASAINSSLISHKIQFSPTLVGDYKLLNLTWFEAPAPSQAPLVASSPHKAPSQGSSATTSVRSPGKKRHPNLILIFSIAAGVLILAIITVLVICSRALREEKAPDPHKEAVKPRNLDAGSFGGSLPHPASTRFLSYEELKEATSNFESASILGEGGFGKVYRGILADGTAVAIKKLTSGGPQGDKEFQVEIDMLSRLHHRNLVKLVGYYSSRDSSQHLLCYELVPNGSLEAWLHGPLGLNCPLDWDTRMKIALDAARGLAYLHEDSQPSVIHRDFKASNILLENNFNAKVADFGLAKQAPEGRGNHLSTRVMGTFGYVAPEYAMTGHLLVKSDVYSYGVVLLELLTGRKPVDMSQPSGQENLVTWTRPVLRDKDRLEELVDSRLEGKYPKEDFIRVCTIAAACVAPEASQRPTMGEVVQSLKMVQRVVEYQDPVLNTSNKARPNRRQSSATFESEVTSSMFSSGPYSGLSAFDHENITRTTVFSEDLHEGR

SEQ ID NO: 31198 - DNA, 1560 bp, Arabidopsis thaliana
  misc_feature (1)..(1560): Ceres Seq. ID no. 13578975
aacaaaacttctccggccatggatcctggcgacccaacttcaataatcttttcaaagatcagaactttcgaacttgagaacgcttccagagtcattgactattttctcttgcaagacatggaacaaagagatttgattcgaattgcttttggtcctgactctctcatacagactttctgtcagaaagctaaagtcgatttaggtttttcctcgaacggtttctcgagacccatcaatatccatggccagtcattgtcctcgtcttctcccagaaatgggttcttagagttctcgagaaaccctagtaaccctttgtcttcttcgttaactttgaacacactcagagataataagcctaacttcaattctagtccttttcgtgaaagttcatcactttttgcctcttcttccggcgatgagcagcagcaacaacaattcagtaacaactttctgttcacaaacgacgaggacccatttgccaattctcacaagaggagtttctctgctaacgatgcttgttttgagtcagaggaaccatggtttggaggaggaaatggttgtcatcaatttccacaaggcggtttagttgatggttttggttcctctggtgtctttggatcgccgagtgagatggattacatgcttgaggggatgatgaggatgaagttagctcagcaaaagagcatggttgctgctcagtttatggcggcttgtggctctccaatgttgcatagacacggatcaggacattttggagaagaatgtggtaactattttagtcaaggaaggcatgaaagagaggattcagtctctaaacagatttacttgacatttccatctgaaagctccttcactgatgaagacgtctcaacctatttcagagattttggacttgtggatgatgtgaggattccatatcagcagcaaaggatgtatgggtttgtaacttttgctaaggctgaaactgtgagaaccatattagctcgtggaaaccctcatttcatatgtgactcacgtgtgctcgttaaaccatacaaggagaaaggaaaaatccttcaaaagaggcagcagcaacaactacacgagttgttggagagagggaactattcaccttcttcaagtccgtctggaaaggactcgagggaactatatgaatgtcgcttaggaccaaggatgttttcaaagaagacacaggagatgttgcgaagaaaaaccgagcaagctgatttacaacatgccatagaacgtagtccttctattggttctccctctcatttcccacctcgattcaatcatagtcttctctttcaatcaggaaacaacaacgaagaaatcatggaaggcgacagtgatagaagtgagaaagatcttcaacaagtagcaaccagcaacgaagaacgtggttacaataacggtttctacaaagggcaagagacgagtctggagaatactctccctgatagcttgtttggttctccaaaaaaatctggcgaaacctaccaaaccgagtctgataccgagcataataataaggaagcctcatcaaatcagttagcgtag

SEQ ID NO: 31199 - protein, 519 aa, Arabidopsis thaliana
  misc_feature (1)..(519): Ceres Seq. ID no. 13578976
NKTSPAMDPGDPTSIIFSKIRTFELENASRVIDYFLLQDMEQRDLIRIAFGPDSLIQTFCQKAKVDLGFSSNGFSRPINIHGQSLSSSSPRNGFLEFSRNPSNPLSSSLTLNTLRDNKPNFNSSPFRESSSLFASSSGDEQQQQQFSNNFLFTNDEDPFANSHKRSFSANDACFESEEPWFGGGNGCHQFPQGGLVDGFGSSGVFGSPSEMDYMLEGMMRMKLAQQKSMVAAQFMAACGSPMLHRHGSGHFGEECGNYFSQGRHEREDSVSKQIYLTFPSESSFTDEDVSTYFRDFGLVDDVRIPYQQQRMYGFVTFAKAETVRTILARGNPHFICDSRVLVKPYKEKGKILQKRQQQQLHELLERGNYSPSSSPSGKDSRELYECRLGPRMFSKKTQEMLRRKTEQADLQHAIERSPSIGSPSHFPPRFNHSLLFQSGNNNEEIMEGDSDRSEKDLQQVATSNEERGYNNGFYKGQETSLENTLPDSLFGSPKKSGETYQTESDTEHNNKEASSNQLA

SEQ ID NO: 31200 - protein, 513 aa, Arabidopsis thaliana
  misc_feature (1)..(513): Ceres Seq. ID no. 13578977
MDPGDPTSIIFSKIRTFELENASRVIDYFLLQDMEQRDLIRIAFGPDSLIQTFCQKAKVDLGFSSNGFSRPINIHGQSLSSSSPRNGFLEFSRNPSNPLSSSLTLNTLRDNKPNFNSSPFRESSSLFASSSGDEQQQQQFSNNFLFTNDEDPFANSHKRSFSANDACFESEEPWFGGGNGCHQFPQGGLVDGFGSSGVFGSPSEMDYMLEGMMRMKLAQQKSMVAAQFMAACGSPMLHRHGSGHFGEECGNYFSQGRHEREDSVSKQIYLTFPSESSFTDEDVSTYFRDFGLVDDVRIPYQQQRMYGFVTFAKAETVRTILARGNPHFICDSRVLVKPYKEKGKILQKRQQQQLHELLERGNYSPSSSPSGKDSRELYECRLGPRMFSKKTQEMLRRKTEQADLQHAIERSPSIGSPSHFPPRFNHSLLFQSGNNNEEIMEGDSDRSEKDLQQVATSNEERGYNNGFYKGQETSLENTLPDSLFGSPKKSGETYQTESDTEHNNKEASSNQLA

SEQ ID NO: 31201 - protein, 480 aa, Arabidopsis thaliana
  misc_feature (1)..(480): Ceres Seq. ID no. 13578978
MEQRDLIRIAFGPDSLIQTFCQKAKVDLGFSSNGFSRPINIHGQSLSSSSPRNGFLEFSRNPSNPLSSSLTLNTLRDNKPNFNSSPFRESSSLFASSSGDEQQQQQFSNNFLFTNDEDPFANSHKRSFSANDACFESEEPWFGGGNGCHQFPQGGLVDGFGSSGVFGSPSEMDYMLEGMMRMKLAQQKSMVAAQFMAACGSPMLHRHGSGHFGEECGNYFSQGRHEREDSVSKQIYLTFPSESSFTDEDVSTYFRDFGLVDDVRIPYQQQRMYGFVTFAKAETVRTILARGNPHFICDSRVLVKPYKEKGKILQKRQQQQLHELLERGNYSPSSSPSGKDSRELYECRLGPRMFSKKTQEMLRRKTEQADLQHAIERSPSIGSPSHFPPRFNHSLLFQSGNNNEEIMEGDSDRSEKDLQQVATSNEERGYNNGFYKGQETSLENTLPDSLFGSPKKSGETYQTESDTEHNNKEASSNQLA

SEQ ID NO: 31202 - DNA, 2598 bp, Arabidopsis thaliana
  misc_feature (1)..(2598): Ceres Seq. ID no. 13578980
ggtagaagagctactacttcatcaaccacaaccactatctcctcaaaatctctctctaccgatcgatggaagcagcagtgccacgtctcgtcaattgcggaccggagccaattcgattctccgtctcctcccgccgctccttcgtctccgggattcctcaccgtaataaacgctctcgccagattctagccgtcgctactgatcctaaacctacacagactagtccacccaagtccaccaccgtaaacggatcttcttctccatcgtctgcgtcaaaagtagtcaacaacaatgtttccactagaattaacgatgtatcaaaagagattaaaagagtacgagctcaaatggaagaagatgaacagttatctgtgttgatgagagggcttcgtggccagaatttgaaggattcggtttttgctgatgataatattcagctaaggcttgttgagactggtgaaagcagtgagttcttacctttggtatatgatccggagaccatttctgcctattgggggaaacggcctcgtgctgttgcttctcgagttatccagttgctttcggttgctggagggtttctatcgcgtattgcaggggatgtaataaacaagaaagttaaagagaatgaggttgctagggcaattgaattgagggaaattgtaacttccttgggtccagcatacattaaacttgggcaagctttgagtattcgaccagatatattgtcacccgctgcaatgacagagctacaaaagttgtgtgataaggtcccttcatatcctgatgatgtagcaatggctctaattgaggaggagcttgggaagccatggtacgacgtttattccgagctctctccttccccaatcgctgctgcatccctgggacaagtttataagggaagactaaaggaaaatggggatctagtggcagtaaaagtacagaggcctttcgttctcgagactgtgactgttgacttgtttgtgatacggaatttaggtctatttctgcggaagttccctcaggtgtcagtagatgttgttggactggttgatgaatgggctgctcgcttttttgaggagctggattatgttaacgagggagaaaatggaacatattttgcagaaatgatgaagaaagatcttccacaagttgttgtacctaaaacctaccaaaagtacacgtcaaggaaggttcttacaacctcatggattgatggtgagaaactgtcacaaagtattgagagtgatgtcggcgaacttgtgaatgttggtgttatttgttacctaaagcagttgctcgatactgggtttttccatgctgaccctcatcctggaaatatgatccgtaccccagacgggaaactagccatcctcgattttggtcttgttaccaagttgactgatgatcagaagtacggaatgattgaagccattgcacacttaattcaccgagattatgatgccatagtaaaagattttgttaaactcggtttcatccctgatggggtcaatctggctcctatattacctgtcctggccaaggtttttgatcaggcgctcgaaggtggtggagcaaaaaacatcaattttcaagagttggcagcagatttggcacagataacttttgactatcctttcagaattcccccttatttcgccctaattattagggcaattggtgtgctagaaggtatagctctagtggggaatcctgaatttgctattgtggatgaggcttatccttatatcgctcagcggctccttacggatgaatcacctcgcttgagagaggctttacgctacacaatatatgggaagactggcgtttttgatgctgaaagattcatcgatgtgatgcaagcctttgagactttcattacagcagccaaaagtggaggaggggaagatatgaatggaggcatggcagagatggctcttatgcaaagtaagacaagcagtttggttcctatgtttccagctagtgcatcccaaccggaccagccagttcaaacaagagtcgctttgtcttttctgctttcggagaaagggaacttcttccgcgagtttctattggatgagatagtaaaaggtatcgatgcaatcacaagagaacagctggtgcaagcaatggcggtattcggattcagaaacgcgacaccaatcttcggtatgttaccaccaacactgggacccttcaagcctgcagcacttcttccatccgtgacggaagaagacaaggtcatcttgaacaatgttcagaaagtaatcgagttccttaccgcaagaagctccatgtcgaataatcctgatcaggtagtagatgtatctcaagttgttcgggaactgcttccagtgttgcctggaatctctgccacagtactgcctgagattttgagtcggcttgggtcaagggtcatggcgagaatagtccgggatgcgtttttgtgaatattggattaaactttgtacaattgtgcatataagttgcattttaaagttactacaaagaaatatatagctgattaagttgcattattaacacatatacacttgatgttatatacacagttgcaatggaacaatgactttgccttcctta

SEQ ID NO: 31203 - protein, 793 aa, Arabidopsis thaliana
  misc_feature (1)..(793): Ceres Seq. ID no. 13578981
MEAAVPRLVNCGPEPIRFSVSSRRSFVSGIPHRNKRSRQILAVATDPKPTQTSPPKSTTVNGSSSPSSASKVVNNNVSTRINDVSKEIKRVRAQMEEDEQLSVLMRGLRGQNLKDSVFADDNIQLRLVETGESSEFLPLVYDPETISAYWGKRPRAVASRVIQLLSVAGGFLSRIAGDVINKKVKENEVARAIELREIVTSLGPAYIKLGQALSIRPDILSPAAMTELQKLCDKVPSYPDDVAMALIEEELGKPWYDVYSELSPSPIAAASLGQVYKGRLKENGDLVAVKVQRPFVLETVTVDLFVIRNLGLFLRKFPQVSVDVVGLVDEWAARFFEELDYVNEGENGTYFAEMMKKDLPQVVVPKTYQKYTSRKVLTTSWIDGEKLSQSIESDVGELVNVGVICYLKQLLDTGFFHADPHPGNMIRTPDGKLAILDFGLVTKLTDDQKYGMIEAIAHLIHRDYDAIVKDFVKLGFIPDGVNLAPILPVLAKVFDQALEGGGAKNINFQELAADLAQITFDYPFRIPPYFALIIRAIGVLEGIALVGNPEFAIVDEAYPYIAQRLLTDESPRLREALRYTIYGKTGVFDAERFIDVMQAFETFITAAKSGGGEDMNGGMAEMALMQSKTSSLVPMFPASASQPDQPVQTRVALSFLLSEKGNFFREFLLDEIVKGIDAITREQLVQAMAVFGFRNATPIFGMLPPTLGPFKPAALLPSVTEEDKVILNNVQKVIEFLTARSSMSNNPDQVVDVSQVVRELLPVLPGISATVLPEILSRLGSRVMARIVRDAFL

SEQ ID NO: 31204 - protein, 699 aa, Arabidopsis thaliana
  misc_feature (1)..(699): Ceres Seq. ID no. 13578982
MEEDEQLSVLMRGLRGQNLKDSVFADDNIQLRLVETGESSEFLPLVYDPETISAYWGKRPRAVASRVIQLLSVAGGFLSRIAGDVINKKVKENEVARAIELREIVTSLGPAYIKLGQALSIRPDILSPAAMTELQKLCDKVPSYPDDVAMALIEEELGKPWYDVYSELSPSPIAAASLGQVYKGRLKENGDLVAVKVQRPFVLETVTVDLFVIRNLGLFLRKFPQVSVDVVGLVDEWAARFFEELDYVNEGENGTYFAEMMKKDLPQVVVPKTYQKYTSRKVLTTSWIDGEKLSQSIESDVGELVNVGVICYLKQLLDTGFFHADPHPGNMIRTPDGKLAILDFGLVTKLTDDQKYGMIEAIAHLIHRDYDAIVKDFVKLGFIPDGVNLAPILPVLAKVFDQALEGGGAKNINFQELAADLAQITFDYPFRIPPYFALIIRAIGVLEGIALVGNPEFAIVDEAYPYIAQRLLTDESPRLREALRYTIYGKTGVFDAERFIDVMQAFETFITAAKSGGGEDMNGGMAEMALMQSKTSSLVPMFPASASQPDQPVQTRVALSFLLSEKGNFFREFLLDEIVKGIDAITREQLVQAMAVFGFRNATPIFGMLPPTLGPFKPAALLPSVTEEDKVILNNVQKVIEFLTARSSMSNNPDQVVDVSQVVRELLPVLPGISATVLPEILSRLGSRVMARIVRDAFL

SEQ ID NO: 31205 - protein, 689 aa, Arabidopsis thaliana
  misc_feature (1)..(689): Ceres Seq. ID no. 13578983
MRGLRGQNLKDSVFADDNIQLRLVETGESSEFLPLVYDPETISAYWGKRPRAVASRVIQLLSVAGGFLSRIAGDVINKKVKENEVARAIELREIVTSLGPAYIKLGQALSIRPDILSPAAMTELQKLCDKVPSYPDDVAMALIEEELGKPWYDVYSELSPSPIAAASLGQVYKGRLKENGDLVAVKVQRPFVLETVTVDLFVIRNLGLFLRKFPQVSVDVVGLVDEWAARFFEELDYVNEGENGTYFAEMMKKDLPQVVVPKTYQKYTSRKVLTTSWIDGEKLSQSIESDVGELVNVGVICYLKQLLDTGFFHADPHPGNMIRTPDGKLAILDFGLVTKLTDDQKYGMIEAIAHLIHRDYDAIVKDFVKLGFIPDGVNLAPILPVLAKVFDQALEGGGAKNINFQELAADLAQITFDYPFRIPPYFALIIRAIGVLEGIALVGNPEFAIVDEAYPYIAQRLLTDESPRLREALRYTIYGKTGVFDAERFIDVMQAFETFITAAKSGGGEDMNGGMAEMALMQSKTSSLVPMFPASASQPDQPVQTRVALSFLLSEKGNFFREFLLDEIVKGIDAITREQLVQAMAVFGFRNATPIFGMLPPTLGPFKPAALLPSVTEEDKVILNNVQKVIEFLTARSSMSNNPDQVVDVSQVVRELLPVLPGISATVLPEILSRLGSRVMARIVRDAFL

SEQ ID NO: 31206 - DNA, 1381 bp, Arabidopsis thaliana
  misc_feature (1)..(1381): Ceres Seq. ID no. 13579012
gacaagactacaaagcaaagacacaaatcaaggagaaaacttccacaaattgtctctctttctttcctacacaccaatttgttttgtgattctttcgattgcattcttctttttcgaattcccgatcactggattttcccgtttaaccggaaaatccagtggattagattttacccagtgttatctttttggattggattcgatgactgttacggaggacgaaaaaccggttcttgagctgctggtgagagttgaagacgacgatgagaaagggccttatgtgaaattgagtgaggttttagagaaaggtcaagaatcagagcaggagaaggaagaagaaaagactgattcgtcgcggttttggttttgggtcaagctttctcttttattcgcctttcttgctgcattggctgttgtgggttacatttggatcggtccattgatcatggataaggagcttataccgcttatacaatgggagatacgaacttttacacatcctgtgtgtggtcttcttgtttttgcatcagtggcgatatttccaactatacttcttccatctacaccatcaatgtggattgctgggatgacttttggttatggctatggctttctacttattatctcagctgcagctgttggtgtttcgctaccttactttattggacaactcttctgccacaaaattcaaggatggctagaaagatatcctgatcaagcagccgtattaagagctgctggtgaagggaattggcttcaccaatttctattagtaaccttaatccggatttctccattcccttacattctttataactactgttctgtagcaactcgtgttaagtatggtccttacatcacgggctctctcttaggcatggtgcctgaggtttttgtcgcaatctacacagggatacttgtaaggacattagcagaagcatcttctgcagaagaacagggtctctcggtaacacaggtgattctcaacattctcggctttttagcaacagtggctacaacgattctcatcacaaagtatgcgaaaagacagctggagacgatgaagaaagaggacgaagcattgttgcagtaaaactgtaaaaccacgtgacaaactctgagctgcttttgtctctctgctactttatctgaaacaccccttgtcttcttacacagtacaggtctcaggtctgttcctagatgtgaaagagctctggtttttttgtccttgcttcttttaatctcatttattaacagccttaaaatttgagaagagaaaaatggttaacaaggaaaaatctaacacattactttttttttgtaattattgtagtcaagttttatgtttggcatgaatgagagaactgagaagaatattcgt

SEQ ID NO: 31207 - protein, 363 aa, Arabidopsis thaliana
  misc_feature (1)..(363): Ceres Seq. ID no. 13579013
TRLQSKDTNQGENFHKLSLFLSYTPICFVILSIAFFFFEFPITGFSRLTGKSSGLDFTQCYLFGLDSMTVTEDEKPVLELLVRVEDDDEKGPYVKLSEVLEKGQESEQEKEEEKTDSSRFWFWVKLSLLFAFLAALAVVGYIWIGPLIMDKELIPLIQWEIRTFTHPVCGLLVFASVAIFPTILLPSTPSMWIAGMTFGYGYGFLLIISAAAVGVSLPYFIGQLFCHKIQGWLERYPDQAAVLRAAGEGNWLHQFLLVTLIRISPFPYILYNYCSVATRVKYGPYITGSLLGMVPEVFVAIYTGILVRTLAEASSAEEQGLSVTQVILNILGFLATVATTILITKYAKRQLETMKKEDEALLQ

SEQ ID NO: 31208 - protein, 296 aa, Arabidopsis thaliana
  misc_feature (1)..(296): Ceres Seq. ID no. 13579014
MTVTEDEKPVLELLVRVEDDDEKGPYVKLSEVLEKGQESEQEKEEEKTDSSRFWFWVKLSLLFAFLAALAVVGYIWIGPLIMDKELIPLIQWEIRTFTHPVCGLLVFASVAIFPTILLPSTPSMWIAGMTFGYGYGFLLIISAAAVGVSLPYFIGQLFCHKIQGWLERYPDQAAVLRAAGEGNWLHQFLLVTLIRISPFPYILYNYCSVATRVKYGPYITGSLLGMVPEVFVAIYTGILVRTLAEASSAEEQGLSVTQVILNILGFLATVATTILITKYAKRQLETMKKEDEALLQ

SEQ ID NO: 31209 - protein, 215 aa, Arabidopsis thaliana
  misc_feature (1)..(215): Ceres Seq. ID no. 13579015
MDKELIPLIQWEIRTFTHPVCGLLVFASVAIFPTILLPSTPSMWIAGMTFGYGYGFLLIISAAAVGVSLPYFIGQLFCHKIQGWLERYPDQAAVLRAAGEGNWLHQFLLVTLIRISPFPYILYNYCSVATRVKYGPYITGSLLGMVPEVFVAIYTGILVRTLAEASSAEEQGLSVTQVILNILGFLATVATTILITKYAKRQLETMKKEDEALLQ

SEQ ID NO: 31210 - DNA, 1140 bp, Arabidopsis thaliana
  misc_feature (1)..(1140): Ceres Seq. ID no. 13579027
atgatgaaagggatctcttcagtttctcaatcgatcaattataatccatacatcgaattcaatcgaccgcagcttcagatcagtactgtgaatcccaatccagctcaatctcgattttcccgccctcgatccctccgtgttctctcactctccgccgatccatcggcaaatcggaatcctaaatcagccgttgacgcacacgcgccgccactggtggttgtgggatctgcgaacgccgatatctatgtggagatcgagagattacccaaggaaggggaaacgatttcggccaagacagggcaaacgctcgccggaggaaaaggcgcgaatcaggcggcgtgtggagcgaagctaatgtatccgacttacttcgttggtcgtttgggagaggacgcgcacgggaagctaatagctgaggcgttgggcgatgatgggtgtggggttcacttggactacgtgagatctgtgaataatgagccgacgggacacgcggtggtgatgcttcagtcggacggtcagaattcgatcattatcgttggtggtgcaaatatgaaagcttggcctgagattatgagcgatgatgatcttgagattgtgaggaatgctggtattgtgcttctgcaaagggagatcccagattccatcaatattcaagttgctaaggctgtgaagaaagcaggtgttccagtcatccttgatgtgggaggaatggatacgcctataccaaatgagctattggattccattgatatcttgagccccaatgaaactgagctcagtcgcttgacaggaatgccaactgaaacttttgaacagattagccaagctgttgcaaagtgccataagttgggagttaagcaagttctagtaaaactcgggtccaaaggatctgcactattcatacaaggggaaaaaccaatccagcagtctatcataccggctgcacaagtggttgatactacaggagctggggatactttcactgcagcatttgcagtcgctatggtagagggcaagtcccatgaggaatgcttgagatttgctgctgcagctgcctctctttgtgtccaagtaaagggtgcaataccgagcatgcctgaccgaaaatctgttttgaagctccttaaatttagtatctaa

SEQ ID NO: 31211 - protein, 379 aa, Arabidopsis thaliana
  misc_feature (1)..(379): Ceres Seq. ID no. 13579028
MMKGISSVSQSINYNPYIEFNRPQLQISTVNPNPAQSRFSRPRSLRVLSLSADPSANRNPKSAVDAHAPPLVVVGSANADIYVEIERLPKEGETISAKTGQTLAGGKGANQAACGAKLMYPTYFVGRLGEDAHGKLIAEALGDDGCGVHLDYVRSVNNEPTGHAVVMLQSDGQNSIIIVGGANMKAWPEIMSDDDLEIVRNAGIVLLQREIPDSINIQVAKAVKKAGVPVILDVGGMDTPIPNELLDSIDILSPNETELSRLTGMPTETFEQISQAVAKCHKLGVKQVLVKLGSKGSALFIQGEKPIQQSIIPAAQVVDTTGAGDTFTAAFAVAMVEGKSHEECLRFAAAAASLCVQVKGAIPSMPDRKSVLKLLKFSI

SEQ ID NO: 31212 - protein, 378 aa, Arabidopsis thaliana
  misc_feature (1)..(378): Ceres Seq. ID no. 13579029
MKGISSVSQSINYNPYIEFNRPQLQISTVNPNPAQSRFSRPRSLRVLSLSADPSANRNPKSAVDAHAPPLVVVGSANADIYVEIERLPKEGETISAKTGQTLAGGKGANQAACGAKLMYPTYFVGRLGEDAHGKLIAEALGDDGCGVHLDYVRSVNNEPTGHAVVMLQSDGQNSIIIVGGANMKAWPEIMSDDDLEIVRNAGIVLLQREIPDSINIQVAKAVKKAGVPVILDVGGMDTPIPNELLDSIDILSPNETELSRLTGMPTETFEQISQAVAKCHKLGVKQVLVKLGSKGSALFIQGEKPIQQSIIPAAQVVDTTGAGDTFTAAFAVAMVEGKSHEECLRFAAAAASLCVQVKGAIPSMPDRKSVLKLLKFSI

SEQ ID NO: 31213 - protein, 261 aa, Arabidopsis thaliana
  misc_feature (1)..(261): Ceres Seq. ID no. 13579030
MYPTYFVGRLGEDAHGKLIAEALGDDGCGVHLDYVRSVNNEPTGHAVVMLQSDGQNSIIIVGGANMKAWPEIMSDDDLEIVRNAGIVLLQREIPDSINIQVAKAVKKAGVPVILDVGGMDTPIPNELLDSIDILSPNETELSRLTGMPTETFEQISQAVAKCHKLGVKQVLVKLGSKGSALFIQGEKPIQQSIIPAAQVVDTTGAGDTFTAAFAVAMVEGKSHEECLRFAAAAASLCVQVKGAIPSMPDRKSVLKLLKFSI

SEQ ID NO: 31214 - DNA, 1208 bp, Arabidopsis thaliana
  misc_feature (1)..(1208): Ceres Seq. ID no. 13579031
aaaagtcagcttaaagctctcgcatggcgtctcaagattgtcatatgttattgagcttctttatatctacttttttaatcactgtcgtgacctcgcaaactcgatgccgaaatttcaagtcgatcatcagtttcggcgactcgattactgatactggaaacttactcggcctctctagtcctaacgatcttcctgagtcagcctttccgccatacggagaaaccttcttccaccatccgtctggtcgtttctccgatggccgcctcatcatcgacttcattgctgaattcttagggattccacatgtgcctccgttttatggatctaaaaatggaaactttgagaaaggagttaattttgcggtgggaggagcaacagcactagaatgttctgttcttgaggagaaaggaactcattgttctcaaagcaatattagtttaggaaaccagcttaagagcttcaaagagagtttaccatatctttgtggctcctcatcaccagattgtagagatatgattgaaaatgcatttattctcattggagaaattggagggaatgattacaacttcccattatttgatcgcaagaacattgaggaagtcaaagagctggttccccttgtgatcactactatttcttcggcgatctcggagttggttgatatgggagcaagaacattcctagttcctggaaattttccacttggatgctctgtagcctatttgacgttatacgaaacaccaaacaaagaagaatacaatcctctaacaggatgtttgacatggctgaacgacttttcagtataccacaacgagcagcttcaagcagaactcaaaagacttaggaatctttaccctcatgtcaacatcatatatggtgactactacaatactctgttgcgccttatgcaagaaccatccaaattcgggctcatggacagacctttgcccgcttgttgcgggttaggaggaccatacaacttcacctttagtataaaatgtgggagtaaaggagttgaatattgtagtgatccttcgaagtatgtgaattgggacggcattcatatgactgaggctgcatacaaatggatatccgagggcgtactaacagggccatatgcgattcctcctttcaattggtcatgcctcgactctaagattaagaacaatgagtcattacacacacaatattctttgatgaacagctga

SEQ ID NO: 31215 - protein, 394 aa, Arabidopsis thaliana
  misc_feature (1)..(394): Ceres Seq. ID no. 13579032
MASQDCHMLLSFFISTFLITVVTSQTRCRNFKSIISFGDSITDTGNLLGLSSPNDLPESAFPPYGETFFHHPSGRFSDGRLIIDFIAEFLGIPHVPPFYGSKNGNFEKGVNFAVGGATALECSVLEEKGTHCSQSNISLGNQLKSFKESLPYLCGSSSPDCRDMIENAFILIGEIGGNDYNFPLFDRKNIEEVKELVPLVITTISSAISELVDMGARTFLVPGNFPLGCSVAYLTLYETPNKEEYNPLTGCLTWLNDFSVYHNEQLQAELKRLRNLYPHVNIIYGDYYNTLLRLMQEPSKFGLMDRPLPACCGLGGPYNFTFSIKCGSKGVEYCSDPSKYVNWDGIHMTEAAYKWISEGVLTGPYAIPPFNWSCLDSKIKNNESLHTQYSLMNS

SEQ ID NO: 31216 - protein, 387 aa, Arabidopsis thaliana
  misc_feature (1)..(387): Ceres Seq. ID no. 13579033
MLLSFFISTFLITVVTSQTRCRNFKSIISFGDSITDTGNLLGLSSPNDLPESAFPPYGETFFHHPSGRFSDGRLIIDFIAEFLGIPHVPPFYGSKNGNFEKGVNFAVGGATALECSVLEEKGTHCSQSNISLGNQLKSFKESLPYLCGSSSPDCRDMIENAFILIGEIGGNDYNFPLFDRKNIEEVKELVPLVITTISSAISELVDMGARTFLVPGNFPLGCSVAYLTLYETPNKEEYNPLTGCLTWLNDFSVYHNEQLQAELKRLRNLYPHVNIIYGDYYNTLLRLMQEPSKFGLMDRPLPACCGLGGPYNFTFSIKCGSKGVEYCSDPSKYVNWDGIHMTEAAYKWISEGVLTGPYAIPPFNWSCLDSKIKNNESLHTQYSLMNS

SEQ ID NO: 31217 - protein, 231 aa, Arabidopsis thaliana
  misc_feature (1)..(231): Ceres Seq. ID no. 13579034
MIENAFILIGEIGGNDYNFPLFDRKNIEEVKELVPLVITTISSAISELVDMGARTFLVPGNFPLGCSVAYLTLYETPNKEEYNPLTGCLTWLNDFSVYHNEQLQAELKRLRNLYPHVNIIYGDYYNTLLRLMQEPSKFGLMDRPLPACCGLGGPYNFTFSIKCGSKGVEYCSDPSKYVNWDGIHMTEAAYKWISEGVLTGPYAIPPFNWSCLDSKIKNNESLHTQYSLMNS

SEQ ID NO: 31218 - DNA, 1437 bp, Arabidopsis thaliana
  misc_feature (1)..(1437): Ceres Seq. ID no. 13579035
gaacacaaaagaaactctcacattctcaagagtttctttcttctttcaatggctttactaactttcttgccggagaacgcagaggcgccacaaaaacacaagccaacgtctagcaaacgaaagaaacgcgataatcccaccgaccaaacgcagacacagaaacataaaccgcagaaaccgaagaaagcagtacctccgaagcagccatcttcatgggaccaaatcaagaacctattgacttgcaaacaaatcgaagggtcaagagtccatgatccttccaagaactctcaatctggtccgtccatgacaactaacttatctccttccaagcttggctcgtcgtgcagctccatttgcagctttagagacgtggctcacggcaacactcgtgtggttcatagagctgatcactcaccagacgtaggtaactcggctactcctaactcggagactcggcttctgactcggaaacctggtcaacacggttcttcttcgtctcggtctcttacatctggctcaacgagatctaacgccagtgggagttacacgtcatcgtcaacgacttcgtttagagccatgcagttccgtaaactctccggatgttacgaatgtcacatgatcgttgacccgagcaggtatccgatttcgcctagggtttgtgcttgttcccaatgtggagaagttttccccaagcttgaaagcttagagcttcatcaagcagttcgtcacgcagtttcggagttaggtccggaggattcgggtcgaaacatagtggagatcatattcaaatcaagctggcttaaaaaagacagtcccatctgtcagatcgaacggatattaaaagtccacaacactcaacgtacgatccaacggtttgaggattgccgagacgcagtgaaggcgcgtgcacttcaagcaaccagaaaagatgctcgttgtgccgccgacggcaacgagctcttacgttttcactgcaccactctcacttgttcactcggagctcgtggctcttcttctctctgctctaacctccctgtttgtggcgtctgcaccgtgattcgccacggtttccaaggaaaatctggtggcggaggagccaacgtcgcaaacgccggtgtgaggacgacggcgagcagcggaagagctgatgatttgctgaggtgtagcgatgatgcgaggagagtgatgcttgtgtgccgtgtgatcgctgggagagttaagcgagttgatttaccggcggcggatgcttcggctacagcggagaagaagtcaacggtggaggataactcggtggttggagtttcttcgagtggtggtacgtttgactcggtggcggtcaatgctggagtttattcgaatcttgaggagcttgtggtttataacccgagagctatattaccttgcttcgtggttatttacaaagttttagaatcttga

SEQ ID NO: 31219 - protein, 478 aa, Arabidopsis thaliana
  misc_feature (1)..(478): Ceres Seq. ID no. 13579036
EHKRNSHILKSFFLLSMALLTFLPENAEAPQKHKPTSSKRKKRDNPTDQTQTQKHKPQKPKKAVPPKQPSSWDQIKNLLTCKQIEGSRVHDPSKNSQSGPSMTTNLSPSKLGSSCSSICSFRDVAHGNTRVVHRADHSPDVGNSATPNSETRLLTRKPGQHGSSSSRSLTSGSTRSNASGSYTSSSTTSFRAMQFRKLSGCYECHMIVDPSRYPISPRVCACSQCGEVFPKLESLELHQAVRHAVSELGPEDSGRNIVEIIFKSSWLKKDSPICQIERILKVHNTQRTIQRFEDCRDAVKARALQATRKDARCAADGNELLRFHCTTLTCSLGARGSSSLCSNLPVCGVCTVIRHGFQGKSGGGGANVANAGVRTTASSGRADDLLRCSDDARRVMLVCRVIAGRVKRVDLPAADASATAEKKSTVEDNSVVGVSSSGGTFDSVAVNAGVYSNLEELVVYNPRAILPCFVVIYKVLES

SEQ ID NO: 31220 - protein, 462 aa, Arabidopsis thaliana
  misc_feature (1)..(462): Ceres Seq. ID no. 13579037
MALLTFLPENAEAPQKHKPTSSKRKKRDNPTDQTQTQKHKPQKPKKAVPPKQPSSWDQIKNLLTCKQIEGSRVHDPSKNSQSGPSMTTNLSPSKLGSSCSSICSFRDVAHGNTRVVHRADHSPDVGNSATPNSETRLLTRKPGQHGSSSSRSLTSGSTRSNASGSYTSSSTTSFRAMQFRKLSGCYECHMIVDPSRYPISPRVCACSQCGEVFPKLESLELHQAVRHAVSELGPEDSGRNIVEIIFKSSWLKKDSPICQIERILKVHNTQRTIQRFEDCRDAVKARALQATRKDARCAADGNELLRFHCTTLTCSLGARGSSSLCSNLPVCGVCTVIRHGFQGKSGGGGANVANAGVRTTASSGRADDLLRCSDDARRVMLVCRVIAGRVKRVDLPAADASATAEKKSTVEDNSVVGVSSSGGTFDSVAVNAGVYSNLEELVVYNPRAILPCFVVIYKVLES

SEQ ID NO: 31221 - protein, 377 aa, Arabidopsis thaliana
  misc_feature (1)..(377): Ceres Seq. ID no. 13579038
MTTNLSPSKLGSSCSSICSFRDVAHGNTRVVHRADHSPDVGNSATPNSETRLLTRKPGQHGSSSSRSLTSGSTRSNASGSYTSSSTTSFRAMQFRKLSGCYECHMIVDPSRYPISPRVCACSQCGEVFPKLESLELHQAVRHAVSELGPEDSGRNIVEIIFKSSWLKKDSPICQIERILKVHNTQRTIQRFEDCRDAVKARALQATRKDARCAADGNELLRFHCTTLTCSLGARGSSSLCSNLPVCGVCTVIRHGFQGKSGGGGANVANAGVRTTASSGRADDLLRCSDDARRVMLVCRVIAGRVKRVDLPAADASATAEKKSTVEDNSVVGVSSSGGTFDSVAVNAGVYSNLEELVVYNPRAILPCFVVIYKVLES

SEQ ID NO: 31222 - DNA, 1959 bp, Arabidopsis thaliana
  misc_feature (1)..(1959): Ceres Seq. ID no. 13579047
gtgttctgaaaactttttccgatacacaaaatcggaggaagaagaagatgaagctcaaagtgtatgcggataggatgtcacagccatctcgtgctgtcctcatattctgcaaggttaacgaaatccaattcgacgagattttgatttccttggggaaacgtcaacagttatcccctgaattcaaagaaattaacccaatggggaaagttccagctattgttgatggcagacttaagctatttgagagtcacgctatattgatatatctttcctcagcatacgcaagtgtagttgatcattggtacccgaatgatctttccaaaagagccaagattcactccgttttggattggcatcacaccaatttacgccctggtgcatctggatatgttctgaatagcgttctagctccagctcttggtcttccactgaatccgaaagcagctgctgaagctgagaacatactaacaaactctctgtccactctagagactttttggcttaagggcagtgccaagtttttactcgggggcaagcaaccatctatagctgatctcagccttgtatgtgaacttatgcagctgcaggttttggatgacaaagatcgtcttagattgcttagccctcataagaaagttgaacaatggattgagagtacgagaaaagcgacaatgcctcactctgatgaggtccatgaggtccttttcagagccaaagatagatttcagaagcagcgagagatggcaaccgcatctaaaccgggtcctcaatctaagattatccaatttagtagtattggtgggacgagtgatggtccaaacctcgttcaagacacaaccgatcgtaaagctcgaagacgcaaatggagtccacctgacgatgtcattctcattagtgcttggttaaatactagtaaggatcgtaaagttgtcgtttatgatgaacaacaagcacatactttttggaagagaattggtgcacatgtttcaaatagcgcttcacttgcaaatctaccaaagcgagagtggaatcactgcaggcaaagatggaggaaaattaacgactacgtctgcaaatttgttggatgttatgatcaagctttgaatcaaagagctagtggtcaatctgaagatgatgttttccaagttgcataccaattgtactacaacaattacatgagtaatttcaaacttgagcatgcatggcgggagctccgacacaataaaaaatggtgtagtacatacacctctgaaaattctaaggggggtggaagctcaaagagaacaaagttgaatggaggtggtgtatattcttcaagctgtaatccggagagtgtgcctatagctctagatggagaggagcaagttatggatcgccctcttggtgtgaagtcgtcaaagcaaaaagagaagaaagttgctactaaaacaatgcttgaagaaagggaggccgattctagatcaagacttgagaacttgtgggtactagatgaagaggagcaagttatggatcttcctcttggtgtgaagtcatcgaagcagaaagagaggaaagttgctactaaaacaatgattgaagaaagggaggcagccaattttcgatcaagacttgggaacttgtggctactaaaggagaaagaagaaagggaggcagattcccgatcaagacttgagaacttgtgggcactgaaggagaaagacatagaagagcaaaagaaactaacaaggatggaagtccttaaaagtcttcttggaagaagaacaggtgaaacttctgaaaaggaagaaactttgaagaacaagctcattgatgagatgctctaatctctatgttctcgttgtatttatctctttattttctctatgtttatctcactatcaacttagtgacaggctatagacggcttttctagaaatagatactaactgaatcttccttaactatgttcaacgtttgttt

SEQ ID NO: 31223 - protein, 606 aa, Arabidopsis thaliana
  misc_feature (1)..(606): Ceres Seq. ID no. 13579048
VLKTFSDTQNRRKKKMKLKVYADRMSQPSRAVLIFCKVNEIQFDEILISLGKRQQLSPEFKEINPMGKVPAIVDGRLKLFESHAILIYLSSAYASVVDHWYPNDLSKRAKIHSVLDWHHTNLRPGASGYVLNSVLAPALGLPLNPKAAAEAENILTNSLSTLETFWLKGSAKFLLGGKQPSIADLSLVCELMQLQVLDDKDRLRLLSPHKKVEQWIESTRKATMPHSDEVHEVLFRAKDRFQKQREMATASKPGPQSKIIQFSSIGGTSDGPNLVQDTTDRKARRRKWSPPDDVILISAWLNTSKDRKVVVYDEQQAHTFWKRIGAHVSNSASLANLPKREWNHCRQRWRKINDYVCKFVGCYDQALNQRASGQSEDDVFQVAYQLYYNNYMSNFKLEHAWRELRHNKKWCSTYTSENSKGGGSSKRTKLNGGGVYSSSCNPESVPIALDGEEQVMDRPLGVKSSKQKEKKVATKTMLEEREADSRSRLENLWVLDEEEQVMDLPLGVKSSKQKERKVATKTMIEEREAANFRSRLGNLWLLKEKEEREADSRSRLENLWALKEKDIEEQKKLTRMEVLKSLLGRRTGETSEKEETLKNKLIDEML

SEQ ID NO: 31224 - protein, 591 aa, Arabidopsis thaliana
  misc_feature (1)..(591): Ceres Seq. ID no. 13579049
MKLKVYADRMSQPSRAVLIFCKVNEIQFDEILISLGKRQQLSPEFKEINPMGKVPAIVDGRLKLFESHAILIYLSSAYASVVDHWYPNDLSKRAKIHSVLDWHHTNLRPGASGYVLNSVLAPALGLPLNPKAAAEAENILTNSLSTLETFWLKGSAKFLLGGKQPSIADLSLVCELMQLQVLDDKDRLRLLSPHKKVEQWIESTRKATMPHSDEVHEVLFRAKDRFQKQREMATASKPGPQSKIIQFSSIGGTSDGPNLVQDTTDRKARRRKWSPPDDVILISAWLNTSKDRKVVVYDEQQAHTFWKRIGAHVSNSASLANLPKREWNHCRQRWRKINDYVCKFVGCYDQALNQRASGQSEDDVFQVAYQLYYNNYMSNFKLEHAWRELRHNKKWCSTYTSENSKGGGSSKRTKLNGGGVYSSSCNPESVPIALDGEEQVMDRPLGVKSSKQKEKKVATKTMLEEREADSRSRLENLWVLDEEEQVMDLPLGVKSSKQKERKVATKTMIEEREAANFRSRLGNLWLLKEKEEREADSRSRLENLWALKEKDIEEQKKLTRMEVLKSLLGRRTGETSEKEETLKNKLIDEML

SEQ ID NO: 31225 - protein, 582 aa, Arabidopsis thaliana
  misc_feature (1)..(582): Ceres Seq. ID no. 13579050
MSQPSRAVLIFCKVNEIQFDEILISLGKRQQLSPEFKEINPMGKVPAIVDGRLKLFESHAILIYLSSAYASVVDHWYPNDLSKRAKIHSVLDWHHTNLRPGASGYVLNSVLAPALGLPLNPKAAAEAENILTNSLSTLETFWLKGSAKFLLGGKQPSIADLSLVCELMQLQVLDDKDRLRLLSPHKKVEQWIESTRKATMPHSDEVHEVLFRAKDRFQKQREMATASKPGPQSKIIQFSSIGGTSDGPNLVQDTTDRKARRRKWSPPDDVILISAWLNTSKDRKVVVYDEQQAHTFWKRIGAHVSNSASLANLPKREWNHCRQRWRKINDYVCKFVGCYDQALNQRASGQSEDDVFQVAYQLYYNNYMSNFKLEHAWRELRHNKKWCSTYTSENSKGGGSSKRTKLNGGGVYSSSCNPESVPIALDGEEQVMDRPLGVKSSKQKEKKVATKTMLEEREADSRSRLENLWVLDEEEQVMDLPLGVKSSKQKERKVATKTMIEEREAANFRSRLGNLWLLKEKEEREADSRSRLENLWALKEKDIEEQKKLTRMEVLKSLLGRRTGETSEKEETLKNKLIDEML

SEQ ID NO: 31226 - DNA, 3234 bp, Arabidopsis thaliana
  misc_feature (1)..(3234): Ceres Seq. ID no. 13579066
ggatgtgatcgaaacaaaaagctctttgcttcttcttcgtccatttctcgtagcacacttttcacaaagaagatgggttcttcacaatctacgcaaatggaagacgaagaagaagaagaagaggaaactgacaatgaagaagaagaagaagaagataatggcagatcaaacacaagacaattagacaatctcctagtaaagaaagttctagaacaagagcctgagatgttaccatgtcacgcttcagcttcaccactctcaccacaactatcatctctcggtactccaaggcttggaccatcgattaaagtctgggatccttacaacgtcctctctccgccgccgcaaccgccgtctatcttctctcgaatcgtgtctggtgatgaagatcgagctgtgacagaggtttatctgattagccatggtgagtctgatcttaatcttaaacctgatttgattggtgggagatgtcatgtagctgctcttactgctaatggtaaacgtcaagctagggctcttgctgttttcttcaaatctcaaggtgttcggtttaattcggtttattcgtcacctctagatcgagctagatccatggctgtttctgtttgtcaggaaatgagttttccggaggagcatgtacaatcttcggatgctgttattgagatgagtttaggggattgggaaggctgtaatcaagcagagatttatagtcctgaaactttgagtttgattgaaaggtgccaacctgatttcacagctccatctggagaatcactgaggcaagtagagtttcgaatggttcagtttctaaacgggacagtctcaggagttgcagagaagcttaggtcagattattcttccactacgaatcacaatgaaactcatgagcgtgatggtggtgtgtcacttgcttcgactaactgggacttactacacaagcatcgtcccagtcttacaaggaagaaatctggtaaaagcaggcttcaagtgatgactaatcacgaacctgacgatggaaactccccaagggaagaagttaatcataatcacactgacctaagtgattcgtcttccttaatctcgaattgtgtcggggttttcacgcattctttgcctataaagtgtcttttaaccggaatcctcggttgcagtccggtaatgactcataagatctgtgtagaagactcttcagtgactgtgttacaacattcatggagaaacgggtggcagatcaaacgaatgaatgatactgctcatcttagattgtttaaaaaagcactgttttgttccgtctctcgtcttctccacacggagagacacacagagagacaaaacctaacaacgctgttcaacagatatgtcgacaaaacagatgttttctcatggaactctgtcatcgccgacctcgctcgtagcggtgattctgctgaagctcttctcgctttttcctcaatgcggaagctttctctatacccaactcgctctagctttccttgcgccattaaagcatgttcgtctctttttgatatcttctccggcaaacagacccatcagcaagcttttgtcttcggttatcaatccgacatctttgtgtcttcggctttgatcgttatgtattcaacttgtgggaaactggaggatgcacggaaagtgttcgacgaaattcccaagagaaatattgtatcttggacttcgatgattcgagggtatgatcttaacggtaatgcccttgatgctgtttctcttttcaaggatctattggtcgatgaaaatgatgatgacgatgcaatgtttcttgattctatgggtttggtttcggtaatctctgcttgttctcgtgttcctgctaagggtttaacggaatctattcatagctttgtgattaagagaggttttgatagaggagtgagtgttggtaatactcttttggatgcttatgctaagggtggagaaggaggtgttgctgtggcgagaaaaatctttgatcagattgtggataaggatcgtgtttcgtataattcgattatgagtgtgtatgctcagagtgggatgtctaatgaggcttttgaggtttttcgtagacttgttaagaataaagttgtgacctttaacgccattacattgtctactgtgttgttggcggtctcgcattcaggtgctctgcgtattggaaagtgtatacatgatcaggtaataaggatgggtcttgaggatgatgtgatagtggggacgtcgataattgatatgtattgcaaatgcggaagagttgagacggcgagaaaagcatttgatcgaatgaaaaacaagaatgttaggtcgtggaccgccatgattgctggatatggaatgcacggccacgcggctaaagcgttagagttattccctgctatgatcgattcaggggttcgaccaaattacattacttttgtatcagtgttagctgcttgcagtcatgcgggtcttcatgtggaaggctggcgctggtttaacgcaatgaaggggagatttggtgtggaaccagggttagaacactacggttgtatggttgatcttctaggtagagctgggtttcttcagaaagcttatgatttgattcagagaatgaagatgaagccggactctatcatctggagctcacttcttgcagcttgtagaattcacaagaacgtggagctagctgagatatccgtggcgcgtttgtttgaattggactcttcgaattgcggttactacatgctgctttcgcatatctacgctgatgcgggtcgttggaaagatgttgagagggtgagaatgatcatgaagaatcgcggattggtgaaaccgccaggttttagtctactcgagttgaatggtgaggttcatgtgttcttgatcggagacgaagagcatcctcagcgtgagaagatttacgagtttttagcagaactgaacaggaagctgttagaggcaggttacgtatcgaacacgtcatctgtatgtcatgatgttgatgaggaagagaaagagatgacactgagagttcacagcgagaaactagcgattgcgtttgggatcatgaacacggttcctggctcgacggttaatgtggtcaagaatctgagagtttgcagcgattgtcacaatgtgatcaagttgatttcaaagattgttgatagagagtttgtggttagagatgcgaagaggtttcaccatttcaaagatggtggatgttcctgtggagattactggtga

SEQ ID NO: 31227 - protein, 1077 aa, Arabidopsis thaliana
  misc_feature (1)..(1077): Ceres Seq. ID no. 13579067
GCDRNKKLFASSSSISRSTLFTKKMGSSQSTQMEDEEEEEEETDNEEEEEEDNGRSNTRQLDNLLVKKVLEQEPEMLPCHASASPLSPQLSSLGTPRLGPSIKVWDPYNVLSPPPQPPSIFSRIVSGDEDRAVTEVYLISHGESDLNLKPDLIGGRCHVAALTANGKRQARALAVFFKSQGVRFNSVYSSPLDRARSMAVSVCQEMSFPEEHVQSSDAVIEMSLGDWEGCNQAEIYSPETLSLIERCQPDFTAPSGESLRQVEFRMVQFLNGTVSGVAEKLRSDYSSTTNHNETHERDGGVSLASTNWDLLHKHRPSLTRKKSGKSRLQVMTNHEPDDGNSPREEVNHNHTDLSDSSSLISNCVGVFTHSLPIKCLLTGILGCSPVMTHKICVEDSSVTVLQHSWRNGWQIKRMNDTAHLRLFKKALFCSVSRLLHTERHTERQNLTTLFNRYVDKTDVFSWNSVIADLARSGDSAEALLAFSSMRKLSLYPTRSSFPCAIKACSSLFDIFSGKQTHQQAFVFGYQSDIFVSSALIVMYSTCGKLEDARKVFDEIPKRNIVSWTSMIRGYDLNGNALDAVSLFKDLLVDENDDDDAMFLDSMGLVSVISACSRVPAKGLTESIHSFVIKRGFDRGVSVGNTLLDAYAKGGEGGVAVARKIFDQIVDKDRVSYNSIMSVYAQSGMSNEAFEVFRRLVKNKVVTFNAITLSTVLLAVSHSGALRIGKCIHDQVIRMGLEDDVIVGTSIIDMYCKCGRVETARKAFDRMKNKNVRSWTAMIAGYGMHGHAAKALELFPAMIDSGVRPNYITFVSVLAACSHAGLHVEGWRWFNAMKGRFGVEPGLEHYGCMVDLLGRAGFLQKAYDLIQRMKMKPDSIIWSSLLAACRIHKNVELAEISVARLFELDSSNCGYYMLLSHIYADAGRWKDVERVRMIMKNRGLVKPPGFSLLELNGEVHVFLIGDEEHPQREKIYEFLAELNRKLLEAGYVSNTSSVCHDVDEEEKEMTLRVHSEKLAIAFGIMNTVPGSTVNVVKNLRVCSDCHNVIKLISKIVDREFVVRDAKRFHHFKDGGCSCGDYW

SEQ ID NO: 31228 - protein, 1053 aa, Arabidopsis thaliana
  misc_feature (1)..(1053): Ceres Seq. ID no. 13579068
MGSSQSTQMEDEEEEEEETDNEEEEEEDNGRSNTRQLDNLLVKKVLEQEPEMLPCHASASPLSPQLSSLGTPRLGPSIKVWDPYNVLSPPPQPPSIFSRIVSGDEDRAVTEVYLISHGESDLNLKPDLIGGRCHVAALTANGKRQARALAVFFKSQGVRFNSVYSSPLDRARSMAVSVCQEMSFPEEHVQSSDAVIEMSLGDWEGCNQAEIYSPETLSLIERCQPDFTAPSGESLRQVEFRMVQFLNGTVSGVAEKLRSDYSSTTNHNETHERDGGVSLASTNWDLLHKHRPSLTRKKSGKSRLQVMTNHEPDDGNSPREEVNHNHTDLSDSSSLISNCVGVFTHSLPIKCLLTGILGCSPVMTHKICVEDSSVTVLQHSWRNGWQIKRMNDTAHLRLFKKALFCSVSRLLHTERHTERQNLTTLFNRYVDKTDVFSWNSVIADLARSGDSAEALLAFSSMRKLSLYPTRSSFPCAIKACSSLFDIFSGKQTHQQAFVFGYQSDIFVSSALIVMYSTCGKLEDARKVFDEIPKRNIVSWTSMIRGYDLNGNALDAVSLFKDLLVDENDDDDAMFLDSMGLVSVISACSRVPAKGLTESIHSFVIKRGFDRGVSVGNTLLDAYAKGGEGGVAVARKIFDQIVDKDRVSYNSIMSVYAQSGMSNEAFEVFRRLVKNKVVTFNAITLSTVLLAVSHSGALRIGKCIHDQVIRMGLEDDVIVGTSIIDMYCKCGRVETARKAFDRMKNKNVRSWTAMIAGYGMHGHAAKALELFPAMIDSGVRPNYITFVSVLAACSHAGLHVEGWRWFNAMKGRFGVEPGLEHYGCMVDLLGRAGFLQKAYDLIQRMKMKPDSIIWSSLLAACRIHKNVELAEISVARLFELDSSNCGYYMLLSHIYADAGRWKDVERVRMIMKNRGLVKPPGFSLLELNGEVHVFLIGDEEHPQREKIYEFLAELNRKLLEAGYVSNTSSVCHDVDEEEKEMTLRVHSEKLAIAFGIMNTVPGSTVNVVKNLRVCSDCHNVIKLISKIVDREFVVRDAKRFHHFKDGGCSCGDYW

SEQ ID NO: 31229 - protein, 1045 aa, Arabidopsis thaliana
  misc_feature (1)..(1045): Ceres Seq. ID no. 13579069
MEDEEEEEEETDNEEEEEEDNGRSNTRQLDNLLVKKVLEQEPEMLPCHASASPLSPQLSSLGTPRLGPSIKVWDPYNVLSPPPQPPSIFSRIVSGDEDRAVTEVYLISHGESDLNLKPDLIGGRCHVAALTANGKRQARALAVFFKSQGVRFNSVYSSPLDRARSMAVSVCQEMSFPEEHVQSSDAVIEMSLGDWEGCNQAEIYSPETLSLIERCQPDFTAPSGESLRQVEFRMVQFLNGTVSGVAEKLRSDYSSTTNHNETHERDGGVSLASTNWDLLHKHRPSLTRKKSGKSRLQVMTNHEPDDGNSPREEVNHNHTDLSDSSSLISNCVGVFTHSLPIKCLLTGILGCSPVMTHKICVEDSSVTVLQHSWRNGWQIKRMNDTAHLRLFKKALFCSVSRLLHTERHTERQNLTTLFNRYVDKTDVFSWNSVIADLARSGDSAEALLAFSSMRKLSLYPTRSSFPCAIKACSSLFDIFSGKQTHQQAFVFGYQSDIFVSSALIVMYSTCGKLEDARKVFDEIPKRNIVSWTSMIRGYDLNGNALDAVSLFKDLLVDENDDDDAMFLDSMGLVSVISACSRVPAKGLTESIHSFVIKRGFDRGVSVGNTLLDAYAKGGEGGVAVARKIFDQIVDKDRVSYNSIMSVYAQSGMSNEAFEVFRRLVKNKVVTFNAITLSTVLLAVSHSGALRIGKCIHDQVIRMGLEDDVIVGTSIIDMYCKCGRVETARKAFDRMKNKNVRSWTAMIAGYGMHGHAAKALELFPAMIDSGVRPNYITFVSVLAACSHAGLHVEGWRWFNAMKGRFGVEPGLEHYGCMVDLLGRAGFLQKAYDLIQRMKMKPDSIIWSSLLAACRIHKNVELAEISVARLFELDSSNCGYYMLLSHIYADAGRWKDVERVRMIMKNRGLVKPPGFSLLELNGEVHVFLIGDEEHPQREKIYEFLAELNRKLLEAGYVSNTSSVCHDVDEEEKEMTLRVHSEKLAIAFGIMNTVPGSTVNVVKNLRVCSDCHNVIKLISKIVDREFVVRDAKRFHHFKDGGCSCGDYW

SEQ ID NO: 31230 - DNA, 1312 bp, Arabidopsis thaliana
  misc_feature (1)..(1312): Ceres Seq. ID no. 13579070
gcatccaccatctttcttcccaatatctaattgagttttttccttctgcgcttgaaaagaaatgtcgaattctaggatgaatggtgttgagaagctaagcagcaaatccacaaggcgtgtcgcaaatgccggaaaggcaacactgcttgctcttggcaaagccttcccaagccaagtcgttcctcaggagaatctagtggaaggatttctacgagacaccaaatgtgatgacgcgtttatcaaagaaaagctggaacacttgtgcaaaacgacaaccgtgaagacgcgatacactgtgttgacgcgagagatactggctaaataccctgagctaacaacagagggttcaccaacaatcaagcaaagacttgaaattgcaaacgaggcggttgtggaaatggcattggaagccagtttaggttgcatcaaggaatggggaaggccagtggaagacatcactcacattgtctacgtttcctcaagcgagatccgtttacccggtggtgacctttacctctcagcaaagctaggcctgaggaatgacgtgaacagagtgatgctgtattttctgggatgctacggaggtgtgactggcctccgtgtggccaaagacattgctgagaacaaccccggaagccgtgttctgctcacaacctctgaaaccaccattctcggatttcggccaccaaacaaagcgcgtccgtacgacctagttggagctgctctgtttggagatggtgcagctgctgtgatcatcggagctgacccgagagagtgtgaagctcctttcatggagctgcactatgcggttcagcagttcttgccggggacacagaacgtgatcgacgggaggttgactgaggaaggcataaacttcaagcttggacgagacctcccgcagaagatagaggagaacatagaagagttctgcaagaagctgatgggaaaggctggcgatgagtcgatggagttcaatgacatgttctgggctgttcatccaggaggacctgcgattctgaaccgtctggagacaaaactgaagctggagaaagagaagctggagagcagcagaagggcgttggtggattacgggaacgtgagcagcaacacgatactgtatgtgatggagtatatgagagatgagctgaagaagaaaggtgacgcagcacaagagtggggacttggcttagctttcggacctggaatcaccttcgaaggccttctcatccgcagcctcacctcttcctaattgttataatttacatttgggttataaacatattgtaagcatgaaatgagagtattatttgtc

SEQ ID NO: 31231 - protein, 395 aa, Arabidopsis thaliana
  misc_feature (1)..(395): Ceres Seq. ID no. 13579071
MSNSRMNGVEKLSSKSTRRVANAGKATLLALGKAFPSQVVPQENLVEGFLRDTKCDDAFIKEKLEHLCKTTTVKTRYTVLTREILAKYPELTTEGSPTIKQRLEIANEAVVEMALEASLGCIKEWGRPVEDITHIVYVSSSEIRLPGGDLYLSAKLGLRNDVNRVMLYFLGCYGGVTGLRVAKDIAENNPGSRVLLTTSETTILGFRPPNKARPYDLVGAALFGDGAAAVIIGADPRECEAPFMELHYAVQQFLPGTQNVIDGRLTEEGINFKLGRDLPQKIEENIEEFCKKLMGKAGDESMEFNDMFWAVHPGGPAILNRLETKLKLEKEKLESSRRALVDYGNVSSNTILYVMEYMRDELKKKGDAAQEWGLGLAFGPGITFEGLLIRSLTSS

SEQ ID NO: 31232 - protein, 390 aa, Arabidopsis thaliana
  misc_feature (1)..(390): Ceres Seq. ID no. 13579072
MNGVEKLSSKSTRRVANAGKATLLALGKAFPSQVVPQENLVEGFLRDTKCDDAFIKEKLEHLCKTTTVKTRYTVLTREILAKYPELTTEGSPTIKQRLEIANEAVVEMALEASLGCIKEWGRPVEDITHIVYVSSSEIRLPGGDLYLSAKLGLRNDVNRVMLYFLGCYGGVTGLRVAKDIAENNPGSRVLLTTSETTILGFRPPNKARPYDLVGAALFGDGAAAVIIGADPRECEAPFMELHYAVQQFLPGTQNVIDGRLTEEGINFKLGRDLPQKIEENIEEFCKKLMGKAGDESMEFNDMFWAVHPGGPAILNRLETKLKLEKEKLESSRRALVDYGNVSSNTILYVMEYMRDELKKKGDAAQEWGLGLAFGPGITFEGLLIRSLTSS

SEQ ID NO: 31233 - protein, 283 aa, Arabidopsis thaliana
  misc_feature (1)..(283): Ceres Seq. ID no. 13579073
MALEASLGCIKEWGRPVEDITHIVYVSSSEIRLPGGDLYLSAKLGLRNDVNRVMLYFLGCYGGVTGLRVAKDIAENNPGSRVLLTTSETTILGFRPPNKARPYDLVGAALFGDGAAAVIIGADPRECEAPFMELHYAVQQFLPGTQNVIDGRLTEEGINFKLGRDLPQKIEENIEEFCKKLMGKAGDESMEFNDMFWAVHPGGPAILNRLETKLKLEKEKLESSRRALVDYGNVSSNTILYVMEYMRDELKKKGDAAQEWGLGLAFGPGITFEGLLIRSLTSS

SEQ ID NO: 31234 - DNA, 2410 bp, Arabidopsis thaliana
  misc_feature (1)..(2410): Ceres Seq. ID no. 13579078
  misc_feature (2299)..(2299): n is a, c, t, g, unknown, or other
ccacgcgtccgattctactaaagagtttgttgagcaatgaagggagcgactctcgttgctctcgccgccacaatcggcaatttcttacaaggatgggacaatgccaccattgctggagctatggtttatatcaacaaagacttgaatctaccaacctctgttcaaggtcttgtcgttgctatgtcattgatcggtgcaacggtcatcacgacttgctcaggaccgatatctgattggctcggcagacgccccatgctcattttatcatcagttatgtatttcgtctgcggtttgataatgttgtggtctcccaatgtctatgttctgtgctttgctaggcttcttaatgggtttggtgccgggctcgcggttacacttgtccctgtttacatttctgaaaccgctcctccggagatcagaggacagttaaatactctccctcagtttcttggctctggtggaatgtttttgtcatactgtatggttttcactatgtccctgagtgactcccctagctggagagccatgctcggtgtcctctcgatcccttctcttctttatttgtttctcacggtgttttatttgcccgagtctcctcgttggctggttagtaaaggaagaatggacgaggctaagcgagttcttcaacagttatgtggcagagaagatgttaccgatgagatggctttactagttgaaggactagatataggaggagaaaaaacaatggaagatctcttagtaactttggaggatcatgaaggtgatgatacacttgaaaccgttgatgaggatggacaaatgcggctttatggaacccacgagaatcaatcgtaccttgctagacctgtcccagaacaaaatagctcacttgggctacgctctcgccacggaagcttagcaaaccaaagcatgatccttaaagatccgctcgtcaatctttttggcagtctccacgagaagatgccagaagcaggcggaaacactcggagtgggattttccctcatttcggaagcatgttcagtactactgccgatgcgcctcacggtaaaccggctcattgggaaaaggacatagagagccattacaacaaagacaatgatgactatgcgactgatgatggtgcgggtgatgatgatgactcggacaacgatttgcgtagccccttaatgtcgcgccagaccacaagcatggacaaggatatgatcccacatcctacaagtggaagcactttaagcatgagacgacacagtacgcttatgcaaggcaacggcgaaagtagcatgggaattggtggtggttggcatatgggatatagatacgaaaacgatgaatacaagaggtattatcttaaagaagatggagctgaatctcgccgtggctcgatcatctctattcccggaggtccggatggtggaggcagctacattcacgcttctgcccttgtaagcagatctgttcttggtcctaaatcagttcatggatccgccatggttcccccggagaaaattgctgcctctggaccactctggtctgctcttcttgaacctggtgttaagcgtgccttggttgttggtgtcggcattcaaatactgcagcagttttcaggtatcaatggagttctctactacactcctcagattctcgaacgggctggcgtagatattcttctttcgagcctcggactaagttccatctctgcgtcattcctcatcagcggtttaacaacattactcatgctcccagccattgtcgttgccatgagactcatggatgtatccggaagaaggtcattacttctctggacaatcccagttctcattgtctcacttgtcgtccttgtcatcagcgagctcatccacatcagcaaagtcgtgaacgcagcactctccacaggttgtgtcgtgctctacttctgcttcttcgtgatgggttacggtcccattccaaacatcctctgttctgaaatcttcccaacaagagtccgtggtctctgcatcgccatatgtgctatggtcttttggattggagacattattgtcacgtactcacttcccgttctcctcagctcgatcggactagttggtgttttcagcatttacgctgcggtttgcgttatctcatggatcttcgtttacatgaaagtcccggagactaaaggcatgcctttggaagttatcacagactactttgcctttggagctcaagctcaagcttctgctccttctaaggatatataacttgtaactttcttcttcgtcaattgctctgtgtacctaaagattctcttcatccccnttttgttttgtttttcagatacccttcatatcgtttttgtttcttttgttttttttctttttcctttgtttcgttgtcaaaatcaatctaataagtactcaattttctctc

SEQ ID NO: 31235 - protein, 734 aa, Arabidopsis thaliana
  misc_feature (1)..(734): Ceres Seq. ID no. 13579079
MKGATLVALAATIGNFLQGWDNATIAGAMVYINKDLNLPTSVQGLVVAMSLIGATVITTCSGPISDWLGRRPMLILSSVMYFVCGLIMLWSPNVYVLCFARLLNGFGAGLAVTLVPVYISETAPPEIRGQLNTLPQFLGSGGMFLSYCMVFTMSLSDSPSWRAMLGVLSIPSLLYLFLTVFYLPESPRWLVSKGRMDEAKRVLQQLCGREDVTDEMALLVEGLDIGGEKTMEDLLVTLEDHEGDDTLETVDEDGQMRLYGTHENQSYLARPVPEQNSSLGLRSRHGSLANQSMILKDPLVNLFGSLHEKMPEAGGNTRSGIFPHFGSMFSTTADAPHGKPAHWEKDIESHYNKDNDDYATDDGAGDDDDSDNDLRSPLMSRQTTSMDKDMIPHPTSGSTLSMRRHSTLMQGNGESSMGIGGGWHMGYRYENDEYKRYYLKEDGAESRRGSIISIPGGPDGGGSYIHASALVSRSVLGPKSVHGSAMVPPEKIAASGPLWSALLEPGVKRALVVGVGIQILQQFSGINGVLYYTPQILERAGVDILLSSLGLSSISASFLISGLTTLLMLPAIVVAMRLMDVSGRRSLLLWTIPVLIVSLVVLVISELIHISKVVNAALSTGCVVLYFCFFVMGYGPIPNILCSEIFPTRVRGLCIAICAMVFWIGDIIVTYSLPVLLSSIGLVGVFSIYAAVCVISWIFVYMKVPETKGMPLEVITDYFAFGAQAQASAPSKDI

SEQ ID NO: 31236 - protein, 706 aa, Arabidopsis thaliana
  misc_feature (1)..(706): Ceres Seq. ID no. 13579080
MVYINKDLNLPTSVQGLVVAMSLIGATVITTCSGPISDWLGRRPMLILSSVMYFVCGLIMLWSPNVYVLCFARLLNGFGAGLAVTLVPVYISETAPPEIRGQLNTLPQFLGSGGMFLSYCMVFTMSLSDSPSWRAMLGVLSIPSLLYLFLTVFYLPESPRWLVSKGRMDEAKRVLQQLCGREDVTDEMALLVEGLDIGGEKTMEDLLVTLEDHEGDDTLETVDEDGQMRLYGTHENQSYLARPVPEQNSSLGLRSRHGSLANQSMILKDPLVNLFGSLHEKMPEAGGNTRSGIFPHFGSMFSTTADAPHGKPAHWEKDIESHYNKDNDDYATDDGAGDDDDSDNDLRSPLMSRQTTSMDKDMIPHPTSGSTLSMRRHSTLMQGNGESSMGIGGGWHMGYRYENDEYKRYYLKEDGAESRRGSIISIPGGPDGGGSYIHASALVSRSVLGPKSVHGSAMVPPEKIAASGPLWSALLEPGVKRALVVGVGIQILQQFSGINGVLYYTPQILERAGVDILLSSLGLSSISASFLISGLTTLLMLPAIVVAMRLMDVSGRRSLLLWTIPVLIVSLVVLVISELIHISKVVNAALSTGCVVLYFCFFVMGYGPIPNILCSEIFPTRVRGLCIAICAMVFWIGDIIVTYSLPVLLSSIGLVGVFSIYAAVCVISWIFVYMKVPETKGMPLEVITDYFAFGAQAQASAPSKDI

SEQ ID NO: 31237 - protein, 686 aa, Arabidopsis thaliana
  misc_feature (1)..(686): Ceres Seq. ID no. 13579081
MSLIGATVITTCSGPISDWLGRRPMLILSSVMYFVCGLIMLWSPNVYVLCFARLLNGFGAGLAVTLVPVYISETAPPEIRGQLNTLPQFLGSGGMFLSYCMVFTMSLSDSPSWRAMLGVLSIPSLLYLFLTVFYLPESPRWLVSKGRMDEAKRVLQQLCGREDVTDEMALLVEGLDIGGEKTMEDLLVTLEDHEGDDTLETVDEDGQMRLYGTHENQSYLARPVPEQNSSLGLRSRHGSLANQSMILKDPLVNLFGSLHEKMPEAGGNTRSGIFPHFGSMFSTTADAPHGKPAHWEKDIESHYNKDNDDYATDDGAGDDDDSDNDLRSPLMSRQTTSMDKDMIPHPTSGSTLSMRRHSTLMQGNGESSMGIGGGWHMGYRYENDEYKRYYLKEDGAESRRGSIISIPGGPDGGGSYIHASALVSRSVLGPKSVHGSAMVPPEKIAASGPLWSALLEPGVKRALVVGVGIQILQQFSGINGVLYYTPQILERAGVDILLSSLGLSSISASFLISGLTTLLMLPAIVVAMRLMDVSGRRSLLLWTIPVLIVSLVVLVISELIHISKVVNAALSTGCVVLYFCFFVMGYGPIPNILCSEIFPTRVRGLCIAICAMVFWIGDIIVTYSLPVLLSSIGLVGVFSIYAAVCVISWIFVYMKVPETKGMPLEVITDYFAFGAQAQASAPSKDI

SEQ ID NO: 31238 - DNA, 4491 bp, Arabidopsis thaliana
  misc_feature (1)..(4491): Ceres Seq. ID no. 13579090
atggatccttcaagacgaccaccgaaggactctccttacgcgaatctattcgatctcgagccgttgatgaagtttagaattccgaaacctgaagatgaagttgattattatgggagtagtagccaggatgaaagtagaagcactcaaggtggggtagtggcaaactacagcaatgggtctaaatcgagaatgaatgcgagctccaagaagagaaagcggtggacagaagctgaggatgcagaggacgatgatgatctctacaatcaacatgttactgaggagcactaccgatcaatgcttggggagcatgtacaaaaattcaaaaataggtccaaggagactcaagggaatcctcctcatctgatgggttttccggtgctaaagagcaatgtgggcagttacagaggtaggaaaccagggaatgattaccatgggaggttctatgacatggacaactctccaaattttgcagctgatgtgaccccacataggcgaggaagctaccatgatcgtgatattacacccaagatagcatatgaaccttcgtatttggacattggtgatggtgtcatctacaaaatccccccaagttatgacaagctggtggcatcattaaacttaccgagcttttcagacattcatgtggaagaattttacttgaaaggaactctggatctgagatcattagcagaactgatggcaagtgataaaaggtctggagtaagaagccgtaatggaatgggtgagcctcgacctcaatatgaatctcttcaagctagaatgaaggccctgtcaccttcaaactccaccccaaattttagcctcaaggtgtcagaagctgcaatgaattctgccattccagaaggatctgctggaagtactgcacggacaattctgtctgagggtggtgttttacaggtccattacgtgaagattctggagaagggggatacatacgagattgttaaacgaagtctaccgaagaagctgaaagcaaagaatgatcctgcagtcattgagaaaacagaaagggataaaattagaaaagcctggatcaatattgtcagaagagatatagcaaaacaccatagaattttcactacttttcatcgtaaactatcaattgatgccaagaggtttgcagatggttgccaaagagaggtgagaatgaaggtgggtagatcatacaaaatcccaagaactgcaccaattcgcactaggaagatatccagagacatgctgctattctggaagcgatatgacaagcagatggcagaagagaggaaaaagcaagaaaaggaagctgcagaggcttttaaacgtgaacaggagcagcgagagtcaaaaaggcagcaacaaaggctcaatttccttattaaacagactgagctttacagtcacttcatgcaaaacaagaccgattcgaatccttccgaagccttaccaataggtgatgaaaatccgattgacgaagtgctcccagaaacttcagcggcagaaccttctgaggtagaggatcctgaagaggctgaactgaaggaaaaggtcttgagagctgcccaagatgcggtgtctaagcagaagcaaataacagatgcatttgacactgaatatatgaagctacgccaaacttctgaaatggaaggtcctttaaatgatatatcagtttctggctcgagcaatatagatttgcataacccatctacaatgcctgttacatcaacagttcagactccagagttatttaaaggaacccttaaagaataccaaatgaaaggccttcagtggctagtcaattgttatgagcagggtttgaatggcatacttgctgatgaaatgggcttgggtaagactattcaagctatggcgttcttggcacatttggctgaggaaaagaacatttggggtccatttcttgttgttgcccctgcctctgttcttaacaattgggctgatgaaatcagtcgtttctgtcctgacttgaaaactcttccatattggggaggattacaagaacgaacaattttaagaaagaatatcaatcccaagcgtatgtaccgaagggatgctggctttcatattttgattactagctatcagctattagtcactgatgaaaagtattttcgccgggtgaagtggcaatatatggtgctagatgaggcccaagcaatcaagagttcctccagtataagatggaaaacccttcttagttttaactgtcggaaccgattgcttctgactggtactccaattcagaacaacatggcagagttatgggccctgctgcatttcatcatgccaatgttgtttgacaaccatgatcaatttaatgaatggttctcaaaaggaattgagaatcatgctgaacacggaggcactttaaatgagcaccagcttaacagactgcatgcgatcttgaaaccgttcatgcttcgacgggtaaaaaaggatgtggtttctgagctaactacaaagacggaagttacagtacactgcaagctcagttctcgacaacaagctttttatcaggctattaagaacaaaatttctctggctgagttgtttgatagcaaccgcggacaatttactgataagaaagtattgaatttaatgaatattgtcattcaactaaggaaggtttgcaaccatccagagttgttcgaaaggaatgaagggagctcgtatctctactttggagtgacttccaattctcttttgccccatccctttggtgagctagaggatgtacattattctggtggtcaaaatccgataatatacaagatacctaagctactacaccaagaggtgctccaaaattctgaaacattttgttcttctgtcgggcgtggcatctcaagagaatcttttctgaagcattttaatatatattcacctgagtatattcttaagtcaatattcccatctgatagtggggtagatcaagtggttagtggaagtggagcatttggcttttcacgcttgatggatctatcaccatcagaagttggatatctggctctgtgttctgttgcagaaaggctattattttctatactgaggtgggagcggcaatttttggatgaattagttaactctcttatggagtccaaggatggtgatcttagtgacaataacatcgagagagttaaaaccaaagctgtcacaagaatgttgctgatgccatcaaaagttgaaacgaattttcagaaaaggagactaagcacagggcctacccgtccttcatttgaagcgctagtgatctctcatcaggataggtttctttcaagtatcaaactcctgcattctgcatatacttatatcccaaaagccagagctccacctgtaagcattcattgctcggacagaaattcggcatacagagttacagaagaattacatcaaccatggcttaagagactattaatcggttttgcacgaacgtcagaagctaatggacccaggaagcctaacagctttccacatcctttaatccaagaaattgattcagaacttccagttgtgcagcctgcgcttcaactgacacacagaatatttggttcttgccctccaatgcaaagttttgacccagcaaagttgctcacggactctgggaagctgcagacacttgatatattattgaagcggcttcgagctggaaatcacagggtgctcctgtttgcacaaatgacaaagatgctgaacattctcgaggattatatgaactatagaaagtacaagtacctcaggcttgatggatcctccaccatcatggatcgccgagatatggttagggattttcagcataggagcgatatttttgtattcttgctgagcaccagagctggaggacttggtatcaacttgacggctgcagacactgtcattttctatgaaagtgattggaatcccaccttggatttacaagctatggacagggctcatcgtcttggacagacaaaagatgagacggtggaagagaaaattttgcacagggcaagtcagaaaaatacagttcaacagcttgttatgactggagggcatgttcagggtgatgattttcttggagctgcggatgtggtatctctgctaatggatgatgcggaggcagcacaactggagcagaaattcagagaactaccattacaggacaggcagaagaaaaagacgaaacgtatcagaatagatgctgaaggagatgcaactttggaagagttagaagatgttgaccgacaggataacggacaggaacctttggaagaaccggaaaagccaaaatccagtaataaaaagaggagagctgcttcaaatccgaaagctagagctcctcagaaagcaaaggaagaagcaaatggtgaagatactcctcagaggacaaaaagggtaaagagacaaacaaagagcataaacgaaagtcttgaacctgtattctctgcctctgtaacagaatcaaataaaggattcgatccaagtagctccgctaactaa

SEQ ID NO: 31239 - protein, 1496 aa, Arabidopsis thaliana
  misc_feature (1)..(1496): Ceres Seq. ID no. 13579091
MDPSRRPPKDSPYANLFDLEPLMKFRIPKPEDEVDYYGSSSQDESRSTQGGVVANYSNGSKSRMNASSKKRKRWTEAEDAEDDDDLYNQHVTEEHYRSMLGEHVQKFKNRSKETQGNPPHLMGFPVLKSNVGSYRGRKPGNDYHGRFYDMDNSPNFAADVTPHRRGSYHDRDITPKIAYEPSYLDIGDGVIYKIPPSYDKLVASLNLPSFSDIHVEEFYLKGTLDLRSLAELMASDKRSGVRSRNGMGEPRPQYESLQARMKALSPSNSTPNFSLKVSEAAMNSAIPEGSAGSTARTILSEGGVLQVHYVKILEKGDTYEIVKRSLPKKLKAKNDPAVIEKTERDKIRKAWINIVRRDIAKHHRIFTTFHRKLSIDAKRFADGCQREVRMKVGRSYKIPRTAPIRTRKISRDMLLFWKRYDKQMAEERKKQEKEAAEAFKREQEQRESKRQQQRLNFLIKQTELYSHFMQNKTDSNPSEALPIGDENPIDEVLPETSAAEPSEVEDPEEAELKEKVLRAAQDAVSKQKQITDAFDTEYMKLRQTSEMEGPLNDISVSGSSNIDLHNPSTMPVTSTVQTPELFKGTLKEYQMKGLQWLVNCYEQGLNGILADEMGLGKTIQAMAFLAHLAEEKNIWGPFLVVAPASVLNNWADEISRFCPDLKTLPYWGGLQERTILRKNINPKRMYRRDAGFHILITSYQLLVTDEKYFRRVKWQYMVLDEAQAIKSSSSIRWKTLLSFNCRNRLLLTGTPIQNNMAELWALLHFIMPMLFDNHDQFNEWFSKGIENHAEHGGTLNEHQLNRLHAILKPFMLRRVKKDVVSELTTKTEVTVHCKLSSRQQAFYQAIKNKISLAELFDSNRGQFTDKKVLNLMNIVIQLRKVCNHPELFERNEGSSYLYFGVTSNSLLPHPFGELEDVHYSGGQNPIIYKIPKLLHQEVLQNSETFCSSVGRGISRESFLKHFNIYSPEYILKSIFPSDSGVDQVVSGSGAFGFSRLMDLSPSEVGYLALCSVAERLLFSILRWERQFLDELVNSLMESKDGDLSDNNIERVKTKAVTRMLLMPSKVETNFQKRRLSTGPTRPSFEALVISHQDRFLSSIKLLHSAYTYIPKARAPPVSIHCSDRNSAYRVTEELHQPWLKRLLIGFARTSEANGPRKPNSFPHPLIQEIDSELPVVQPALQLTHRIFGSCPPMQSFDPAKLLTDSGKLQTLDILLKRLRAGNHRVLLFAQMTKMLNILEDYMNYRKYKYLRLDGSSTIMDRRDMVRDFQHRSDIFVFLLSTRAGGLGINLTAADTVIFYESDWNPTLDLQAMDRAHRLGQTKDETVEEKILHRASQKNTVQQLVMTGGHVQGDDFLGAADVVSLLMDDAEAAQLEQKFRELPLQDRQKKKTKRIRIDAEGDATLEELEDVDRQDNGQEPLEEPEKPKSSNKKRRAASNPKARAPQKAKEEANGEDTPQRTKRVKRQTKSINESLEPVFSASVTESNKGFDPSSSAN

SEQ ID NO: 31240 - protein, 1474 aa, Arabidopsis thaliana
  misc_feature (1)..(1474): Ceres Seq. ID no. 13579092
MKFRIPKPEDEVDYYGSSSQDESRSTQGGVVANYSNGSKSRMNASSKKRKRWTEAEDAEDDDDLYNQHVTEEHYRSMLGEHVQKFKNRSKETQGNPPHLMGFPVLKSNVGSYRGRKPGNDYHGRFYDMDNSPNFAADVTPHRRGSYHDRDITPKIAYEPSYLDIGDGVIYKIPPSYDKLVASLNLPSFSDIHVEEFYLKGTLDLRSLAELMASDKRSGVRSRNGMGEPRPQYESLQARMKALSPSNSTPNFSLKVSEAAMNSAIPEGSAGSTARTILSEGGVLQVHYVKILEKGDTYEIVKRSLPKKLKAKNDPAVIEKTERDKIRKAWINIVRRDIAKHHRIFTTFHRKLSIDAKRFADGCQREVRMKVGRSYKIPRTAPIRTRKISRDMLLFWKRYDKQMAEERKKQEKEAAEAFKREQEQRESKRQQQRLNFLIKQTELYSHFMQNKTDSNPSEALPIGDENPIDEVLPETSAAEPSEVEDPEEAELKEKVLRAAQDAVSKQKQITDAFDTEYMKLRQTSEMEGPLNDISVSGSSNIDLHNPSTMPVTSTVQTPELFKGTLKEYQMKGLQWLVNCYEQGLNGILADEMGLGKTIQAMAFLAHLAEEKNIWGPFLVVAPASVLNNWADEISRFCPDLKTLPYWGGLQERTILRKNINPKRMYRRDAGFHILITSYQLLVTDEKYFRRVKWQYMVLDEAQAIKSSSSIRWKTLLSFNCRNRLLLTGTPIQNNMAELWALLHFIMPMLFDNHDQFNEWFSKGIENHAEHGGTLNEHQLNRLHAILKPFMLRRVKKDVVSELTTKTEVTVHCKLSSRQQAFYQAIKNKISLAELFDSNRGQFTDKKVLNLMNIVIQLRKVCNHPELFERNEGSSYLYFGVTSNSLLPHPFGELEDVHYSGGQNPIIYKIPKLLHQEVLQNSETFCSSVGRGISRESFLKHFNIYSPEYILKSIFPSDSGVDQVVSGSGAFGFSRLMDLSPSEVGYLALCSVAERLLFSILRWERQFLDELVNSLMESKDGDLSDNNIERVKTKAVTRMLLMPSKVETNFQKRRLSTGPTRPSFEALVISHQDRFLSSIKLLHSAYTYIPKARAPPVSIHCSDRNSAYRVTEELHQPWLKRLLIGFARTSEANGPRKPNSFPHPLIQEIDSELPVVQPALQLTHRIFGSCPPMQSFDPAKLLTDSGKLQTLDILLKRLRAGNHRVLLFAQMTKMLNILEDYMNYRKYKYLRLDGSSTIMDRRDMVRDFQHRSDIFVFLLSTRAGGLGINLTAADTVIFYESDWNPTLDLQAMDRAHRLGQTKDETVEEKILHRASQKNTVQQLVMTGGHVQGDDFLGAADVVSLLMDDAEAAQLEQKFRELPLQDRQKKKTKRIRIDAEGDATLEELEDVDRQDNGQEPLEEPEKPKSSNKKRRAASNPKARAPQKAKEEANGEDTPQRTKRVKRQTKSINESLEPVFSASVTESNKGFDPSSSAN

SEQ ID NO: 31241 - protein, 1433 aa, Arabidopsis thaliana
  misc_feature (1)..(1433): Ceres Seq. ID no. 13579093
MNASSKKRKRWTEAEDAEDDDDLYNQHVTEEHYRSMLGEHVQKFKNRSKETQGNPPHLMGFPVLKSNVGSYRGRKPGNDYHGRFYDMDNSPNFAADVTPHRRGSYHDRDITPKIAYEPSYLDIGDGVIYKIPPSYDKLVASLNLPSFSDIHVEEFYLKGTLDLRSLAELMASDKRSGVRSRNGMGEPRPQYESLQARMKALSPSNSTPNFSLKVSEAAMNSAIPEGSAGSTARTILSEGGVLQVHYVKILEKGDTYEIVKRSLPKKLKAKNDPAVIEKTERDKIRKAWINIVRRDIAKHHRIFTTFHRKLSIDAKRFADGCQREVRMKVGRSYKIPRTAPIRTRKISRDMLLFWKRYDKQMAEERKKQEKEAAEAFKREQEQRESKRQQQRLNFLIKQTELYSHFMQNKTDSNPSEALPIGDENPIDEVLPETSAAEPSEVEDPEEAELKEKVLRAAQDAVSKQKQITDAFDTEYMKLRQTSEMEGPLNDISVSGSSNIDLHNPSTMPVTSTVQTPELFKGTLKEYQMKGLQWLVNCYEQGLNGILADEMGLGKTIQAMAFLAHLAEEKNIWGPFLVVAPASVLNNWADEISRFCPDLKTLPYWGGLQERTILRKNINPKRMYRRDAGFHILITSYQLLVTDEKYFRRVKWQYMVLDEAQAIKSSSSIRWKTLLSFNCRNRLLLTGTPIQNNMAELWALLHFIMPMLFDNHDQFNEWFSKGIENHAEHGGTLNEHQLNRLHAILKPFMLRRVKKDVVSELTTKTEVTVHCKLSSRQQAFYQAIKNKISLAELFDSNRGQFTDKKVLNLMNIVIQLRKVCNHPELFERNEGSSYLYFGVTSNSLLPHPFGELEDVHYSGGQNPIIYKIPKLLHQEVLQNSETFCSSVGRGISRESFLKHFNIYSPEYILKSIFPSDSGVDQVVSGSGAFGFSRLMDLSPSEVGYLALCSVAERLLFSILRWERQFLDELVNSLMESKDGDLSDNNIERVKTKAVTRMLLMPSKVETNFQKRRLSTGPTRPSFEALVISHQDRFLSSIKLLHSAYTYIPKARAPPVSIHCSDRNSAYRVTEELHQPWLKRLLIGFARTSEANGPRKPNSFPHPLIQEIDSELPVVQPALQLTHRIFGSCPPMQSFDPAKLLTDSGKLQTLDILLKRLRAGNHRVLLFAQMTKMLNILEDYMNYRKYKYLRLDGSSTIMDRRDMVRDFQHRSDIFVFLLSTRAGGLGINLTAADTVIFYESDWNPTLDLQAMDRAHRLGQTKDETVEEKILHRASQKNTVQQLVMTGGHVQGDDFLGAADVVSLLMDDAEAAQLEQKFRELPLQDRQKKKTKRIRIDAEGDATLEELEDVDRQDNGQEPLEEPEKPKSSNKKRRAASNPKARAPQKAKEEANGEDTPQRTKRVKRQTKSINESLEPVFSASVTESNKGFDPSSSAN

SEQ ID NO: 31242 - DNA, 2889 bp, Arabidopsis thaliana
  misc_feature (1)..(2889): Ceres Seq. ID no. 13579098
atgtttaggggaaaaatatttgtgttatcattattttctatttacgtcctctcatcagcggctgaaaaaaatacatcattttctgcgctttttgcttttggtgattcagtcttagatacgggaaacaataattttcttcttactcttctcaaaggaaattattggccatatggtttgagttttgactataaatttccgacgggaagattcggaaatggaagagttttcaccgatatagttgccgaaggtttacagatcaaaagacttgtaccagcttatagcaagattcgtcgcatcagttctgaagaccttaagactggcgtttgttttgcatcaggtggttcaggaattgacgatcttacatcccgaacactgagagttttatcggcaggtgaccaagtaaaagactttaaagactatttgaagaaactaagaagagtagtgaaacgtaagaaaaaagtaaaagaaatagtttcaaacgctgtgtttcttatttctgaaggaaataatgatcttggatactttgtcgctcccgctcttcttcgattacagtccacaacaacatacaccagtaaaatggttgtttggaccagaaagtttctaaaagatttatacgatcttggagcgagaaaatttgcggtgatgggagtgatgcctgtgggatgtttgcctatccatcgagcctcattcggtggggtattcggatggtgtaacttcctcttgaatagaattacggaggacttcaacatgaaattgcagaaaggtcttacaagttacgcagtagaatatgatttcaaagatgcaaagtttgtttacgtcgacatatacggtactcttatggatcttgtcaaaaatcctatggcctatgggtttacagaagcgaaaaaagcttgttgttgtatgccgaatgcaataataccatgcttccatccagataaatacgtcttctatgactttgctcacccttcccagaaagcctacgaacaaaaatcccttccaacatatttgccatttacacttcttcaagttttccatatactaatggggaggtttcataaatttcctctcctaggtttagttctgttcctcggtctgaccggctcacttatcgccgccaatgagtatgcctgttctagtaccgatatacactttactcgtgccaatttccctaaaggtttcatttttggtaccgcaactgctgcttttcaggttgaaggagctgtaaatgaaggatgtagaggtccaagcatgtgggacgtatacaccaagaaattcccacataaatgtaattatcacaatgccgacgttgctgtcgatttctaccatcgttacaaggaagatatcaagttgatgaaaaatctgaacactgatggctttagattttccattgcatggcccagaatattcccccatggtaggatggagaaaggaataagcaaagcaggtgtgcagtattaccacgatctgatcgatgagctcctcgcaaatggtataacaccattagtaactgtttttcactgggacactcctcaagacttagaagatgaatatggtggctttttaagcgaccgcataataaaggattttacggagtatgcaaacttcacattccaagagtacggagacaaagtgaagcattggatcacatttaacgaaccatgggtgttcagtcgagctggctacgacattgggaacaaagcaccgggacgttgttctaagtacatcaaagaacatggagagatgtgtcacgatggacggtcaggacacgaagcttatatcgttagtcataacatgctcttggcacatgccgatgccgttgatgcctttaggaaatgcgacaagtgcaaaggtggtaaaattgggattgctcacagtccagcttggtttgaggctcatgagctctcggatgaagagcacgaaactcctgtaactggcctgattgacttcatattgggatggcatttgcatccgaccacatatggagattatccacaatcaatgaaggatcacatcggacatcgactgccgaaattcacagaggcacagaaagagaagttgaaaaattcagctgattttgtaggaatcaactattacacatcagtgtttgcattgcacgacgaagagccagatccttcgcaaccaagttggcagagtgattctctcgtggactgggaaccaaggtatgtggataaattcaatgcttttgctaacaagcctgatgttgctaaagtggaagtctacgcaaagggtttgaggagcctcttgaaatatatcaaggacaaatacggcaatcctgaaatcatgatcaccgagaatggatacggagaggatctaggtgagcaagacacaagccttgtagtggcgctgtcagatcagcacagaacatactatatccagaaacatctcttgagcttgcacgaagcaatttgcgatgataaagtaaacgttacagggtattttcattggtcattgatggacaattttgaatggcaagatggatacaaggcgagatttgggctctactacgtcgattacaaaaataatttgacgcgccacgaaaaattatcagcccagtggtactcgagtttcctccacgatggatcaaaagagttcgaaatcgagcacgagttcgaacacgatgagttgtagagtgaattctctacaaacagactttgaaaatttgagtcatatatatattatatattcataaactatttgtttacagtttgctgcagtgaatgcatttccatattcaagtaaataaatcagatactcaatatacagacaagtaaagtttggattgtgttgtagtaagtatttggatagttgaatattgagatcaagggtattcacgaagattccgtactagttattgatattttctattgc

SEQ ID NO: 31243 - protein, 882 aa, Arabidopsis thaliana
  misc_feature (1)..(882): Ceres Seq. ID no. 13579099
MFRGKIFVLSLFSIYVLSSAAEKNTSFSALFAFGDSVLDTGNNNFLLTLLKGNYWPYGLSFDYKFPTGRFGNGRVFTDIVAEGLQIKRLVPAYSKIRRISSEDLKTGVCFASGGSGIDDLTSRTLRVLSAGDQVKDFKDYLKKLRRVVKRKKKVKEIVSNAVFLISEGNNDLGYFVAPALLRLQSTTTYTSKMVVWTRKFLKDLYDLGARKFAVMGVMPVGCLPIHRASFGGVFGWCNFLLNRITEDFNMKLQKGLTSYAVEYDFKDAKFVYVDIYGTLMDLVKNPMAYGFTEAKKACCCMPNAIIPCFHPDKYVFYDFAHPSQKAYEQKSLPTYLPFTLLQVFHILMGRFHKFPLLGLVLFLGLTGSLIAANEYACSSTDIHFTRANFPKGFIFGTATAAFQVEGAVNEGCRGPSMWDVYTKKFPHKCNYHNADVAVDFYHRYKEDIKLMKNLNTDGFRFSIAWPRIFPHGRMEKGISKAGVQYYHDLIDELLANGITPLVTVFHWDTPQDLEDEYGGFLSDRIIKDFTEYANFTFQEYGDKVKHWITFNEPWVFSRAGYDIGNKAPGRCSKYIKEHGEMCHDGRSGHEAYIVSHNMLLAHADAVDAFRKCDKCKGGKIGIAHSPAWFEAHELSDEEHETPVTGLIDFILGWHLHPTTYGDYPQSMKDHIGHRLPKFTEAQKEKLKNSADFVGINYYTSVFALHDEEPDPSQPSWQSDSLVDWEPRYVDKFNAFANKPDVAKVEVYAKGLRSLLKYIKDKYGNPEIMITENGYGEDLGEQDTSLVVALSDQHRTYYIQKHLLSLHEAICDDKVNVTGYFHWSLMDNFEWQDGYKARFGLYYVDYKNNLTRHEKLSAQWYSSFLHDGSKEFEIEHEFEHDEL

SEQ ID NO: 31244 - protein, 690 aa, Arabidopsis thaliana
  misc_feature (1)..(690): Ceres Seq. ID no. 13579100
MVVWTRKFLKDLYDLGARKFAVMGVMPVGCLPIHRASFGGVFGWCNFLLNRITEDFNMKLQKGLTSYAVEYDFKDAKFVYVDIYGTLMDLVKNPMAYGFTEAKKACCCMPNAIIPCFHPDKYVFYDFAHPSQKAYEQKSLPTYLPFTLLQVFHILMGRFHKFPLLGLVLFLGLTGSLIAANEYACSSTDIHFTRANFPKGFIFGTATAAFQVEGAVNEGCRGPSMWDVYTKKFPHKCNYHNADVAVDFYHRYKEDIKLMKNLNTDGFRFSIAWPRIFPHGRMEKGISKAGVQYYHDLIDELLANGITPLVTVFHWDTPQDLEDEYGGFLSDRIIKDFTEYANFTFQEYGDKVKHWITFNEPWVFSRAGYDIGNKAPGRCSKYIKEHGEMCHDGRSGHEAYIVSHNMLLAHADAVDAFRKCDKCKGGKIGIAHSPAWFEAHELSDEEHETPVTGLIDFILGWHLHPTTYGDYPQSMKDHIGHRLPKFTEAQKEKLKNSADFVGINYYTSVFALHDEEPDPSQPSWQSDSLVDWEPRYVDKFNAFANKPDVAKVEVYAKGLRSLLKYIKDKYGNPEIMITENGYGEDLGEQDTSLVVALSDQHRTYYIQKHLLSLHEAICDDKVNVTGYFHWSLMDNFEWQDGYKARFGLYYVDYKNNLTRHEKLSAQWYSSFLHDGSKEFEIEHEFEHDEL

SEQ ID NO: 31245 - protein, 668 aa, Arabidopsis thaliana
  misc_feature (1)..(668): Ceres Seq. ID no. 13579101
MGVMPVGCLPIHRASFGGVFGWCNFLLNRITEDFNMKLQKGLTSYAVEYDFKDAKFVYVDIYGTLMDLVKNPMAYGFTEAKKACCCMPNAIIPCFHPDKYVFYDFAHPSQKAYEQKSLPTYLPFTLLQVFHILMGRFHKFPLLGLVLFLGLTGSLIAANEYACSSTDIHFTRANFPKGFIFGTATAAFQVEGAVNEGCRGPSMWDVYTKKFPHKCNYHNADVAVDFYHRYKEDIKLMKNLNTDGFRFSIAWPRIFPHGRMEKGISKAGVQYYHDLIDELLANGITPLVTVFHWDTPQDLEDEYGGFLSDRIIKDFTEYANFTFQEYGDKVKHWITFNEPWVFSRAGYDIGNKAPGRCSKYIKEHGEMCHDGRSGHEAYIVSHNMLLAHADAVDAFRKCDKCKGGKIGIAHSPAWFEAHELSDEEHETPVTGLIDFILGWHLHPTTYGDYPQSMKDHIGHRLPKFTEAQKEKLKNSADFVGINYYTSVFALHDEEPDPSQPSWQSDSLVDWEPRYVDKFNAFANKPDVAKVEVYAKGLRSLLKYIKDKYGNPEIMITENGYGEDLGEQDTSLVVALSDQHRTYYIQKHLLSLHEAICDDKVNVTGYFHWSLMDNFEWQDGYKARFGLYYVDYKNNLTRHEKLSAQWYSSFLHDGSKEFEIEHEFEHDEL

SEQ ID NO: 31246 - DNA, 6236 bp, Arabidopsis thaliana
  misc_feature (1)..(6236): Ceres Seq. ID no. 13579113
atggattatgatgacagtgactttcaaaaccagaatctccatttagctggtgaagccaacaacaaatttccaccagttttacagccttatgctcttccaaagtttgattttgatgatacactcaacacgcatctgaggtttgatagtttaggtgaatctgaagcttttcttggtattgagggtaacgaagataataactggattgaggatttctctcgtggaagtagtggtatagtgtttagttcaggtgcaacggagtcctgtgccatttctaggcacaataatgtttggtctgaggctacttcgtcggaatctgttgcaatgcttttgaattcagttggacaggacgaagttattgtaagagaggatactatcaagaaatctgacacttctcatgaactaggctgcacaatggaaacagtagagcctggtcagacatcccatgaaagaagtctttccaaagaggaaacggtgaacttacaacccaacccctctgtggatgatactccaggagagtcctctgtggtaaagacagatgatggacaggagcaggttctggttaaagatgactcaccaacggctgtagaagaggcatctgtggaggaaaagaattccatcttgacttctaataccgcgacggtagaggctatagatactactgatcttggtaaaataggaactgagacgacggataatcttcttgaccaaacagaagagaaagccaatgtagaatcaaggatggaagatgattgtagcgatgggaatgtacagactattattacttgtagcggtgagttgaataatcagagcactttacttccagagacttccaatgatgaaaatgttatcagcgaccacattcaaagtagttataaccgcaatgatctaactgcagatgcacggtcaattttggttgaaggtcattctgatagccatatagactcagcttccgaagttgaaaaagtggaagctgaaaatattggcaaaactgcaaagcctgatttgaaggagatagagctatctgatgtcacagtactagaaagaggggaccaagctccctctactcttgaggtaggtggacaagatgtttctgggaccgaatgccaagatctccttgtcagcactgttcatactagcgtagctgttgaagcgtctttggaacttgctggggaattgacaactataacaaacagtgtttccattgagaagcccgagttgcttagtcatcaacatatggaagttattacaagtgaacatgagtctacttttcagatagagactgagacatatccgcagatacacgtatttgaaacttcagagagtgtttatatttcaacgatggactcaatggttgaagctagagaaggtggtgtgtctaagaagagtgacaatgaaggtagtgctcgcacttctaatctcgagcaaagcatggaactgcctgtcaatgccaatgatagagatcaagatgtcaagaactctcagatcctatctgaaagcgttgtgtctggttctgttggctatgtttcaggaggctctacttcagagttggcggagtcagaatctcaatctgacagcattccaacagacaagtcagagactatgattgacagttctctcaatctcgaagaattacaacctctaagtcaagatggagcacctgctgtcagtctcacatcttcaatagatttacatatggtaaagacatcctctgatgacagtgaccaaggcagttactctgaaaccaagaaggtttatggtgaacctgaaaatggtcaaaccgttccacctgtggatgcaagttgttcagggagtcagatggaccaagaagctaggaagcgtgctgaaggtactaagcaaagtacatactctgttgaaggctgtcctcgctctgaagggtcaaaggatgcagtagatgctgatggtgttggacaagttttgcagcagcagtctgaggaattaatttttgaagagaatgtagtaacagaagctgtaaaagctcctgctgggactcctgttacacaccccaaaggtgatgcaatcgtactaggagactcccgtgcttctacatgttctgagtcttctgtaaagtcttatgtaactgcaatagaagatgctgctactaatttaaagactcctcttgattctttccccactgttaagacttccgaacttcaatttaataacacagagacaaacagtgtcaaaaagccagaagatcagaatatttcgggttttatgtctgctggatctccggtcttgaatagaaatgagacctccagcagtgaaatgaacttaactcctgatcagctgaaagcagggaaaatttccaaagctgttatattttcacaagctacccttgtctccccgattgtggtgggatctccttcaacatctagcttagataaaacagctgcaaagtcttccaaagcaaaatctgagcggaaacccaggcgaacatctaaatctgtaggaaaagagacttctagaaaaggaactagtgtaaaaggggctacacctattgaacagtttcaaagtggaggcaaaacaaatgctgttaatcaaagtttggcttctcatattcagatcacacaatctactgagaaacagcgaagtcttcagagccctgctctaaaagcttttgggtccctttcaacccctacggcaagtctaccggatttgaactcttctgctctctcaagtattctgcgtcgacctttcacggacttgcaacaagtgcaactacgtgcacagatttttgtatacggggctctgatccaaggaacagcaccggatgaagcttatatgatatctgcatttggtggtgcagatggtgggaagggcagctgggagaaatcatggcgtacttgtgttgtaagggctcagaaatcgcttgttgctactcctgaaacgccactgcaatcacgtccagggaagacagagaccccttcagcaggtcacaccaatagcaaagagagttcagggacaaaccccatgattccactctcatcacctttatggagtttatcaacttccgtagatactttacaatcaagtagcgttcagagaggttcagctgctactcaccagccattgctttctgcatcgcatgctcaccaaactccaccaactcagaatattgttggacataataccccttggatgtcgcctctccctttccgtaacgcttggcttgcttctcagcaaaccagtggatttgatgttggttcccgtttccccgtctatccaatcactgaccctgtaaaattgactcccatgaaagaatcatccatgactctttctggcgcaaaacatgttcagagtggaacttctagcaatgtttccaaagtgacaccaacacttgagcctactagtacagttgtagcacctgctcaacattctacaagggtaaaatcaaggaaacggaagaagatgccagtctctgtggagtctggtccaaacattttgaattcgttaaagcagacagaattagctgcctcacctcttgtgccttttacacctactccggctaatctgggttataatgctggcaccctgcccagtgttgtttctatgactgcagtccctatggacctggtatctacgttccccgggaagaaaataaaatcatctttcccatctccaatttttggtggtaaccttgtacgtgaagtaaagcagagatctgtcttgtcagaggatactattgaaaaacttaaggaggctaagatgcatgcagaggatgcatctgctcttgctactgcagctgttagtcatagcgaatatgtatggaagcagatagagcaacaaagtcatgctggcctccagccagaaactcaagacagattagcttcggctgctgttgccatagctgctgcagctgcggtggcaaaagctgcagctgctgccgccaatgttgcagctaatgctgcattgcaggccaagttaatggctgaagaagcatcccttccaaatgcttctgatcagggactcccaaagtcatatgatagcatattacccggtcagggtacccctgcttctatcttgaagggtgaaggtgcagtggtgaactccagttcggttcttattgctgcgagagaggcatctaagaagagggttgaagctgctacagcggccaccaagcgtgctgaaaatatggactccattgtaaaagcagcagaattggcatcagaggctgtttctcaagctggaatacttgtttcaatgggtcatcctccgttgctcaataagctggtggaggcgggtccaagtaattactggaggcaggctcaagaatctcaggaagtacagccctgtaaaacggttgtcttagaaaaagaaactgtgtctactagtgagggaacttttgctggtcccaaaattgtgcagactgagtttggtggctctgtgaatacggcagatggtgtgtccggtccagttcctgccactggaaagttaaagggacaggagggtgataaatatgcagacttggctaaaaacaatgatgtggtttttgaaccagaagttgggtcaaaattttcaattgacgcccaacagactatcaaagcaacaaagaatgaggacatcaaggagggttctaatgtagaggttttcaaagaagaacctggattaagaaccgcatggtactctgccaatgtattgagcttagaggatgataaagcttacgtgttgttcagtgacctatctgtagaacaaggaacagacaagcttaaggagtgggtagccctcaaaggggaaggtgatcaggcccctaaaataagacctgctcgttctgttactgccttgccatatgaaggaaccaggaagagacgtagagctgctcttggggatcatatttggaaaattggggatagggtagactcgtgggtgcatgacagttggttggagggtgttatcacagagaagaacaagaaagatgaaaacacagtgactgtgcattttcctgcggaagaagaaactttgacgatcaaagcttggaatcttcgtccttctcttgtgtggaaagatggaaagtggattgaatgttctagttcaggagaaactatcagctcgtcacatgagggtgatactccaaaggagaagcgtcctagattaggaactcccgctcttgtggctgaagtaaaagacacgagtatgaagattgttgatgatccagacttggggaaaccgcctcagactggtgttcttaacctcggtgtttcagagaatacttttaacattggaaagagtaccagagaggagaacaaacccgatccactccgaatgaagagaaccggtttgcaaaagcaaggatcaaaagtgatttttggtgtccctaaacctggaaagaaaaggaagttcatggacgtgagcaaacactatgtttcagaggcaagcactaaaactcaggaaaggaaggaaccagttaagcctgtgagatcaattgtgccccaaaattctggaataggtagctggaaaatgccttctaaaactatctccatagagaaacagacaacaatatctaggcccaagactttcaaacctgcgcccaagcccaaagagaaaccgggtgctacggctaggataattccccgcaaggactcgcgtaatacaacagcatcagatatggaatctgatgagagtgcagaaaacaggggtcctggatctggtgtttcatttaagggaacagtagaagagcaaaccacatcatcctctcatgatactggttcgaagaatagttcctccttgagcactaataaagggagagtggctcctactgcaggaaggttagccaaaatcgaagaggacaaggcgttggctgaaaattcttcaaaaacatcagagggaatggagccacgtagatctatccgcaggatccagccaacttctagactactcgaaggtctgcaaacgtcgatgatgacctcgaagattccttcggtatcacacagcaaaagtcacctaagtcaaagcaaaaagtagcagtagaggcaagtgaaaaggagcagaagaagcaagtgcacataaacgcaagtggaggaaacaaaagcagagcagtatcggctgctattaggttgtttgtaattttagtttcatgcttttgaaaaaaataactctttgttggttgggagagactaaaaaaagtaggggaagagaagaagaaaaatctacatatatatttttggtagactttttggccaaaaatccgttaactatttactaataacatttaggtcctt

SEQ ID NO: 31247 - protein, 1992 aa, Arabidopsis thaliana
  misc_feature (1)..(1992): Ceres Seq. ID no. 13579114
MDYDDSDFQNQNLHLAGEANNKFPPVLQPYALPKFDFDDTLNTHLRFDSLGESEAFLGIEGNEDNNWIEDFSRGSSGIVFSSGATESCAISRHNNVWSEATSSESVAMLLNSVGQDEVIVREDTIKKSDTSHELGCTMETVEPGQTSHERSLSKEETVNLQPNPSVDDTPGESSVVKTDDGQEQVLVKDDSPTAVEEASVEEKNSILTSNTATVEAIDTTDLGKIGTETTDNLLDQTEEKANVESRMEDDCSDGNVQTIITCSGELNNQSTLLPETSNDENVISDHIQSSYNRNDLTADARSILVEGHSDSHIDSASEVEKVEAENIGKTAKPDLKEIELSDVTVLERGDQAPSTLEVGGQDVSGTECQDLLVSTVHTSVAVEASLELAGELTTITNSVSIEKPELLSHQHMEVITSEHESTFQIETETYPQIHVFETSESVYISTMDSMVEAREGGVSKKSDNEGSARTSNLEQSMELPVNANDRDQDVKNSQILSESVVSGSVGYVSGGSTSELAESESQSDSIPTDKSETMIDSSLNLEELQPLSQDGAPAVSLTSSIDLHMVKTSSDDSDQGSYSETKKVYGEPENGQTVPPVDASCSGSQMDQEARKRAEGTKQSTYSVEGCPRSEGSKDAVDADGVGQVLQQQSEELIFEENVVTEAVKAPAGTPVTHPKGDAIVLGDSRASTCSESSVKSYVTAIEDAATNLKTPLDSFPTVKTSELQFNNTETNSVKKPEDQNISGFMSAGSPVLNRNETSSSEMNLTPDQLKAGKISKAVIFSQATLVSPIVVGSPSTSSLDKTAAKSSKAKSERKPRRTSKSVGKETSRKGTSVKGATPIEQFQSGGKTNAVNQSLASHIQITQSTEKQRSLQSPALKAFGSLSTPTASLPDLNSSALSSILRRPFTDLQQVQLRAQIFVYGALIQGTAPDEAYMISAFGGADGGKGSWEKSWRTCVVRAQKSLVATPETPLQSRPGKTETPSAGHTNSKESSGTNPMIPLSSPLWSLSTSVDTLQSSSVQRGSAATHQPLLSASHAHQTPPTQNIVGHNTPWMSPLPFRNAWLASQQTSGFDVGSRFPVYPITDPVKLTPMKESSMTLSGAKHVQSGTSSNVSKVTPTLEPTSTVVAPAQHSTRVKSRKRKKMPVSVESGPNILNSLKQTELAASPLVPFTPTPANLGYNAGTLPSVVSMTAVPMDLVSTFPGKKIKSSFPSPIFGGNLVREVKQRSVLSEDTIEKLKEAKMHAEDASALATAAVSHSEYVWKQIEQQSHAGLQPETQDRLASAAVAIAAAAAVAKAAAAAANVAANAALQAKLMAEEASLPNASDQGLPKSYDSILPGQGTPASILKGEGAVVNSSSVLIAAREASKKRVEAATAATKRAENMDSIVKAAELASEAVSQAGILVSMGHPPLLNKLVEAGPSNYWRQAQESQEVQPCKTVVLEKETVSTSEGTFAGPKIVQTEFGGSVNTADGVSGPVPATGKLKGQEGDKYADLAKNNDVVFEPEVGSKFSIDAQQTIKATKNEDIKEGSNVEVFKEEPGLRTAWYSANVLSLEDDKAYVLFSDLSVEQGTDKLKEWVALKGEGDQAPKIRPARSVTALPYEGTRKRRRAALGDHIWKIGDRVDSWVHDSWLEGVITEKNKKDENTVTVHFPAEEETLTIKAWNLRPSLVWKDGKWIECSSSGETISSSHEGDTPKEKRPRLGTPALVAEVKDTSMKIVDDPDLGKPPQTGVLNLGVSENTFNIGKSTREENKPDPLRMKRTGLQKQGSKVIFGVPKPGKKRKFMDVSKHYVSEASTKTQERKEPVKPVRSIVPQNSGIGSWKMPSKTISIEKQTTISRPKTFKPAPKPKEKPGATARIIPRKDSRNTTASDMESDESAENRGPGSGVSFKGTVEEQTTSSSHDTGSKNSSSLSTNKGRVAPTAGRLAKIEEDKALAENSSKTSEGMEPRRSIRRIQPTSRLLEGLQTSMMTSKIPSVSHSKSHLSQSKK

SEQ ID NO: 31248 - protein, 1885 aa, Arabidopsis thaliana
  misc_feature (1)..(1885): Ceres Seq. ID no. 13579115
MLLNSVGQDEVIVREDTIKKSDTSHELGCTMETVEPGQTSHERSLSKEETVNLQPNPSVDDTPGESSVVKTDDGQEQVLVKDDSPTAVEEASVEEKNSILTSNTATVEAIDTTDLGKIGTETTDNLLDQTEEKANVESRMEDDCSDGNVQTIITCSGELNNQSTLLPETSNDENVISDHIQSSYNRNDLTADARSILVEGHSDSHIDSASEVEKVEAENIGKTAKPDLKEIELSDVTVLERGDQAPSTLEVGGQDVSGTECQDLLVSTVHTSVAVEASLELAGELTTITNSVSIEKPELLSHQHMEVITSEHESTFQIETETYPQIHVFETSESVYISTMDSMVEAREGGVSKKSDNEGSARTSNLEQSMELPVNANDRDQDVKNSQILSESVVSGSVGYVSGGSTSELAESESQSDSIPTDKSETMIDSSLNLEELQPLSQDGAPAVSLTSSIDLHMVKTSSDDSDQGSYSETKKVYGEPENGQTVPPVDASCSGSQMDQEARKRAEGTKQSTYSVEGCPRSEGSKDAVDADGVGQVLQQQSEELIFEENVVTEAVKAPAGTPVTHPKGDAIVLGDSRASTCSESSVKSYVTAIEDAATNLKTPLDSFPTVKTSELQFNNTETNSVKKPEDQNISGFMSAGSPVLNRNETSSSEMNLTPDQLKAGKISKAVIFSQATLVSPIVVGSPSTSSLDKTAAKSSKAKSERKPRRTSKSVGKETSRKGTSVKGATPIEQFQSGGKTNAVNQSLASHIQITQSTEKQRSLQSPALKAFGSLSTPTASLPDLNSSALSSILRRPFTDLQQVQLRAQIFVYGALIQGTAPDEAYMISAFGGADGGKGSWEKSWRTCVVRAQKSLVATPETPLQSRPGKTETPSAGHTNSKESSGTNPMIPLSSPLWSLSTSVDTLQSSSVQRGSAATHQPLLSASHAHQTPPTQNIVGHNTPWMSPLPFRNAWLASQQTSGFDVGSRFPVYPITDPVKLTPMKESSMTLSGAKHVQSGTSSNVSKVTPTLEPTSTVVAPAQHSTRVKSRKRKKMPVSVESGPNILNSLKQTELAASPLVPFTPTPANLGYNAGTLPSVVSMTAVPMDLVSTFPGKKIKSSFPSPIFGGNLVREVKQRSVLSEDTIEKLKEAKMHAEDASALATAAVSHSEYVWKQIEQQSHAGLQPETQDRLASAAVAIAAAAAVAKAAAAAANVAANAALQAKLMAEEASLPNASDQGLPKSYDSILPGQGTPASILKGEGAVVNSSSVLIAAREASKKRVEAATAATKRAENMDSIVKAAELASEAVSQAGILVSMGHPPLLNKLVEAGPSNYWRQAQESQEVQPCKTVVLEKETVSTSEGTFAGPKIVQTEFGGSVNTADGVSGPVPATGKLKGQEGDKYADLAKNNDVVFEPEVGSKFSIDAQQTIKATKNEDIKEGSNVEVFKEEPGLRTAWYSANVLSLEDDKAYVLFSDLSVEQGTDKLKEWVALKGEGDQAPKIRPARSVTALPYEGTRKRRRAALGDHIWKIGDRVDSWVHDSWLEGVITEKNKKDENTVTVHFPAEEETLTIKAWNLRPSLVWKDGKWIECSSSGETISSSHEGDTPKEKRPRLGTPALVAEVKDTSMKIVDDPDLGKPPQTGVLNLGVSENTFNIGKSTREENKPDPLRMKRTGLQKQGSKVIFGVPKPGKKRKFMDVSKHYVSEASTKTQERKEPVKPVRSIVPQNSGIGSWKMPSKTISIEKQTTISRPKTFKPAPKPKEKPGATARIIPRKDSRNTTASDMESDESAENRGPGSGVSFKGTVEEQTTSSSHDTGSKNSSSLSTNKGRVAPTAGRLAKIEEDKALAENSSKTSEGMEPRRSIRRIQPTSRLLEGLQTSMMTSKIPSVSHSKSHLSQSKK

SEQ ID NO: 31249 - protein, 1855 aa, Arabidopsis thaliana
  misc_feature (1)..(1855): Ceres Seq. ID no. 13579116
METVEPGQTSHERSLSKEETVNLQPNPSVDDTPGESSVVKTDDGQEQVLVKDDSPTAVEEASVEEKNSILTSNTATVEAIDTTDLGKIGTETTDNLLDQTEEKANVESRMEDDCSDGNVQTIITCSGELNNQSTLLPETSNDENVISDHIQSSYNRNDLTADARSILVEGHSDSHIDSASEVEKVEAENIGKTAKPDLKEIELSDVTVLERGDQAPSTLEVGGQDVSGTECQDLLVSTVHTSVAVEASLELAGELTTITNSVSIEKPELLSHQHMEVITSEHESTFQIETETYPQIHVFETSESVYISTMDSMVEAREGGVSKKSDNEGSARTSNLEQSMELPVNANDRDQDVKNSQILSESVVSGSVGYVSGGSTSELAESESQSDSIPTDKSETMIDSSLNLEELQPLSQDGAPAVSLTSSIDLHMVKTSSDDSDQGSYSETKKVYGEPENGQTVPPVDASCSGSQMDQEARKRAEGTKQSTYSVEGCPRSEGSKDAVDADGVGQVLQQQSEELIFEENVVTEAVKAPAGTPVTHPKGDAIVLGDSRASTCSESSVKSYVTAIEDAATNLKTPLDSFPTVKTSELQFNNTETNSVKKPEDQNISGFMSAGSPVLNRNETSSSEMNLTPDQLKAGKISKAVIFSQATLVSPIVVGSPSTSSLDKTAAKSSKAKSERKPRRTSKSVGKETSRKGTSVKGATPIEQFQSGGKTNAVNQSLASHIQITQSTEKQRSLQSPALKAFGSLSTPTASLPDLNSSALSSILRRPFTDLQQVQLRAQIFVYGALIQGTAPDEAYMISAFGGADGGKGSWEKSWRTCVVRAQKSLVATPETPLQSRPGKTETPSAGHTNSKESSGTNPMIPLSSPLWSLSTSVDTLQSSSVQRGSAATHQPLLSASHAHQTPPTQNIVGHNTPWMSPLPFRNAWLASQQTSGFDVGSRFPVYPITDPVKLTPMKESSMTLSGAKHVQSGTSSNVSKVTPTLEPTSTVVAPAQHSTRVKSRKRKKMPVSVESGPNILNSLKQTELAASPLVPFTPTPANLGYNAGTLPSVVSMTAVPMDLVSTFPGKKIKSSFPSPIFGGNLVREVKQRSVLSEDTIEKLKEAKMHAEDASALATAAVSHSEYVWKQIEQQSHAGLQPETQDRLASAAVAIAAAAAVAKAAAAAANVAANAALQAKLMAEEASLPNASDQGLPKSYDSILPGQGTPASILKGEGAVVNSSSVLIAAREASKKRVEAATAATKRAENMDSIVKAAELASEAVSQAGILVSMGHPPLLNKLVEAGPSNYWRQAQESQEVQPCKTVVLEKETVSTSEGTFAGPKIVQTEFGGSVNTADGVSGPVPATGKLKGQEGDKYADLAKNNDVVFEPEVGSKFSIDAQQTIKATKNEDIKEGSNVEVFKEEPGLRTAWYSANVLSLEDDKAYVLFSDLSVEQGTDKLKEWVALKGEGDQAPKIRPARSVTALPYEGTRKRRRAALGDHIWKIGDRVDSWVHDSWLEGVITEKNKKDENTVTVHFPAEEETLTIKAWNLRPSLVWKDGKWIECSSSGETISSSHEGDTPKEKRPRLGTPALVAEVKDTSMKIVDDPDLGKPPQTGVLNLGVSENTFNIGKSTREENKPDPLRMKRTGLQKQGSKVIFGVPKPGKKRKFMDVSKHYVSEASTKTQERKEPVKPVRSIVPQNSGIGSWKMPSKTISIEKQTTISRPKTFKPAPKPKEKPGATARIIPRKDSRNTTASDMESDESAENRGPGSGVSFKGTVEEQTTSSSHDTGSKNSSSLSTNKGRVAPTAGRLAKIEEDKALAENSSKTSEGMEPRRSIRRIQPTSRLLEGLQTSMMTSKIPSVSHSKSHLSQSKK

SEQ ID NO: 31250 - DNA, 2543 bp, Arabidopsis thaliana
  misc_feature (1)..(2543): Ceres Seq. ID no. 13579120
ataaatagcccatcaaacccctacaacggattagggctataacattccaccaaacacaaaagatacaagtttaagaccatgaagaagcttacttctctcttccctctcctctttctcattcccctcttagcctcatgtgctgaagaaaaacaggtgtatattgtctattttggagaacataaaggtgataaagcctttcatgaaattgaagaacatcatcattcttatcttcaatcggttaaagaatccgaagaagacgctagagcatcgctcttgtatagctacaaacatagcatcaatggcttcgcggctgagctaacccctgaccaagcctctaaactagaaaaattagcagaggttgtttcagtattcaagagccatccaagaaaatatgaagcacatacgacacggtcatgggaatttgtaggattggaggaggaagaaaccgacagtgatgttccacgtcgaaaaaatgatgccgatgatcggtttcgtgtgggaagaaattttttgaagaaggcaaagcatggtgatggaatcatcgtcggtgttctcgacagtggtgtgtggccagaatcaaagagtttcaatgacaaaggaatgggaccagttccaaaatcatggaaaggaatctgccaaaccggagttgcctttaactcttctcactgtaaccggaaaattattggagcgaggtattacgtgaaagggtacgaaagatattacggagcgttcaacgctacagcaaacaaagacttcttgtctccaagagatcccgacggacatgggtcccacacagcttctactgccgttggccgtcgagttctcggtgcatccgcacttggcggtttcgccaagggctcggcatcgggcggtgcaccgttagctcgtctagctatttacaaagcttgttgggccaagcccaatgcggaaaaagttgaaggaaatatctgtctagaagaggacatgcttgccgcgatcgatgacgccatcgctgatggcgttcacgtcatcagcatttccatcggaacgaccgagccttttccatttacacaagatggaatcgcgatgggggcgttgcatgcggttaagaggaatattgtggttgctgctagcgctgggaattcagggccaaagccgggaactttgtcgaatctggcaccgtggattataactgtcggagctagtactcttgatcgggctttcgttggcggtcttgttcttggcaatggctatacaatcaagacggattcgataacggcatttaaaatggacaaatttgcccctcttgtttacgcttctaacgtggttgttcccggcattgcattgaacgagacatcgcaatgtttaccaaattcactaaaaccggagcttgtgagtggtaaagtggtcttgtgtttaagaggagccggttcaagaatcggtaaaggcatggaggtaaaacgagctggaggagccggtatgattctcggaaatatcgcagctaacggcaatgaagttccttcagactctcattttgttccgactgccggggttaccccaaccgtggtcgataaaattctggagtacatcaaaaccgataaaaacccgaaggcttttatcaaaccggggaaaacggtttacaaataccaagcagctccttccatgaccgggttttctagccgcggcccaaacgttgtagaccccaacattctaaagccggatataaccgccccaggactgtacatactggctgcatggagcggagcagattcaccgagcaaaatgtcagtagatcaaagagttgcaggttataacatctactcaggaacttcaatgtcttgtcctcatgtcgctggtgcaattgctcttctcaaagccattcatcccaaatggagtagcgctgctataagatcagctcttatgaccactgcttggatgactaacgacaagaagaaaccgatccaagacactactggtttaccagcaaacccatttgcacttgggtcaggacatttcagaccaacaaaagctgcagatcccggtttagtctatgatgcatcataccgagcttaccttctctatggctgctcggttaacatcaccaatattgacccgacattcaaatgtcctagtaaaattccgcccggttataatcacaattacccgtcaatcgcggtcccgaatctcaagaagacggtgaccgttaaaagaacagttacaaatgttggaactggtaactcaacaagcacatacttattcagcgttaaaccgccatcgggtatttcggttaaggctataccgaatatattgtcctttaaccggattggtcagaagcagcggtttaaaatcgttattaaaccactgaagaaccaggtgatgaatgcgactgaaaagggtcaataccaatttggatggtttagttggacagataaagtccatgttgtgaggagtccaattgctgtttccttagcttgattgttgtttgcttatttgggatggttttattagtcggtttggatgttatagaggtcaaagtgaaagaaatagaaaatatttttctgatc

SEQ ID NO: 31251 - protein, 791 aa, Arabidopsis thaliana
  misc_feature (1)..(791): Ceres Seq. ID no. 13579121
MKKLTSLFPLLFLIPLLASCAEEKQVYIVYFGEHKGDKAFHEIEEHHHSYLQSVKESEEDARASLLYSYKHSINGFAAELTPDQASKLEKLAEVVSVFKSHPRKYEAHTTRSWEFVGLEEEETDSDVPRRKNDADDRFRVGRNFLKKAKHGDGIIVGVLDSGVWPESKSFNDKGMGPVPKSWKGICQTGVAFNSSHCNRKIIGARYYVKGYERYYGAFNATANKDFLSPRDPDGHGSHTASTAVGRRVLGASALGGFAKGSASGGAPLARLAIYKACWAKPNAEKVEGNICLEEDMLAAIDDAIADGVHVISISIGTTEPFPFTQDGIAMGALHAVKRNIVVAASAGNSGPKPGTLSNLAPWIITVGASTLDRAFVGGLVLGNGYTIKTDSITAFKMDKFAPLVYASNVVVPGIALNETSQCLPNSLKPELVSGKVVLCLRGAGSRIGKGMEVKRAGGAGMILGNIAANGNEVPSDSHFVPTAGVTPTVVDKILEYIKTDKNPKAFIKPGKTVYKYQAAPSMTGFSSRGPNVVDPNILKPDITAPGLYILAAWSGADSPSKMSVDQRVAGYNIYSGTSMSCPHVAGAIALLKAIHPKWSSAAIRSALMTTAWMTNDKKKPIQDTTGLPANPFALGSGHFRPTKAADPGLVYDASYRAYLLYGCSVNITNIDPTFKCPSKIPPGYNHNYPSIAVPNLKKTVTVKRTVTNVGTGNSTSTYLFSVKPPSGISVKAIPNILSFNRIGQKQRFKIVIKPLKNQVMNATEKGQYQFGWFSWTDKVHVVRSPIAVSLA

SEQ ID NO: 31252 - protein, 617 aa, Arabidopsis thaliana
  misc_feature (1)..(617): Ceres Seq. ID no. 13579122
MGPVPKSWKGICQTGVAFNSSHCNRKIIGARYYVKGYERYYGAFNATANKDFLSPRDPDGHGSHTASTAVGRRVLGASALGGFAKGSASGGAPLARLAIYKACWAKPNAEKVEGNICLEEDMLAAIDDAIADGVHVISISIGTTEPFPFTQDGIAMGALHAVKRNIVVAASAGNSGPKPGTLSNLAPWIITVGASTLDRAFVGGLVLGNGYTIKTDSITAFKMDKFAPLVYASNVVVPGIALNETSQCLPNSLKPELVSGKVVLCLRGAGSRIGKGMEVKRAGGAGMILGNIAANGNEVPSDSHFVPTAGVTPTVVDKILEYIKTDKNPKAFIKPGKTVYKYQAAPSMTGFSSRGPNVVDPNILKPDITAPGLYILAAWSGADSPSKMSVDQRVAGYNIYSGTSMSCPHVAGAIALLKAIHPKWSSAAIRSALMTTAWMTNDKKKPIQDTTGLPANPFALGSGHFRPTKAADPGLVYDASYRAYLLYGCSVNITNIDPTFKCPSKIPPGYNHNYPSIAVPNLKKTVTVKRTVTNVGTGNSTSTYLFSVKPPSGISVKAIPNILSFNRIGQKQRFKIVIKPLKNQVMNATEKGQYQFGWFSWTDKVHVVRSPIAVSLA

SEQ ID NO: 31253 - protein, 496 aa, Arabidopsis thaliana
  misc_feature (1)..(496): Ceres Seq. ID no. 13579123
MLAAIDDAIADGVHVISISIGTTEPFPFTQDGIAMGALHAVKRNIVVAASAGNSGPKPGTLSNLAPWIITVGASTLDRAFVGGLVLGNGYTIKTDSITAFKMDKFAPLVYASNVVVPGIALNETSQCLPNSLKPELVSGKVVLCLRGAGSRIGKGMEVKRAGGAGMILGNIAANGNEVPSDSHFVPTAGVTPTVVDKILEYIKTDKNPKAFIKPGKTVYKYQAAPSMTGFSSRGPNVVDPNILKPDITAPGLYILAAWSGADSPSKMSVDQRVAGYNIYSGTSMSCPHVAGAIALLKAIHPKWSSAAIRSALMTTAWMTNDKKKPIQDTTGLPANPFALGSGHFRPTKAADPGLVYDASYRAYLLYGCSVNITNIDPTFKCPSKIPPGYNHNYPSIAVPNLKKTVTVKRTVTNVGTGNSTSTYLFSVKPPSGISVKAIPNILSFNRIGQKQRFKIVIKPLKNQVMNATEKGQYQFGWFSWTDKVHVVRSPIAVSLA

SEQ ID NO: 31254 - DNA, 1480 bp, Arabidopsis thaliana
  misc_feature (1)..(1480): Ceres Seq. ID no. 13579138
gaaaggaagcattaaacacaagaatagagagagaagaaagaagaagacgatgaaagcagaagcagagatcatcttcgttacatatccatcccctggtcatcttcttgtctccattgaattcgctaaatctctcatcaaacgtgatgatcgcatccacaccatcaccatcctctactgggctttacctctcgctcctcaagcccaccttttcgctaagtccctcgttgcttcacagcctcgaatccgtctccttgcgttgcctgatgttcaaaaccctccaccattggaactcttctttaaagctcccgaagcttatattcttgagtccaccaagaaaacagttcctttagtcagagacgctctctccactctagtttcttcacgtaaagaatccggttcggttcgtgtagtcggtttggttatcgattttttttgtgttccaatgatcgaagtggcaaacgagcttaaccttccttcttacatcttcctaacgtgtaacgctgggtttttaagtatgatgaagtatctccctgagagacatcgcataaccacttctgagctagatttaagctccggcaacgtagaacatccaattcctggctacgtctgctccgtgccgacgaaggttttgcctccaggtctattcgtgagagagtcctacgaggcttgggtcgagattgcagagaagttccctggagccaagggcattttggtaaactcagtcacatgtcttgagcagaatgcatttgattacttcgctcgtcttgatgagaactatcctccggtttacccggtcggaccggttcttagtttgaaggatcgtccgtctccaaatctggacgcatcggaccgggatcggatcatgagatggctcgaggaccagccggagtcgtcaattgtgtatatctgcttcggaagcctcggaatcattggcaagctgcagattgaagagatagctgaagccttggaactcaccggccacaggtttctttggtcaatacgtacaaatccgacggagaaagcgagcccgtacgatctgttgccggagggatttctcgatcggacggccagtaagggattggtgtgtgattgggccccgcaagtagaagttctggcccataaagcgctcggaggattcgtgtctcactgcggttggaactctgtactggagagcttatggttcggtgttccgatcgccacgtggccaatgtacgctgagcaacagttaaacgcattctcgatggtgaaggagttagggttagccgtggagctgcgtttagactacgtttcggcgtacggagagatagtaaaagctgaggagatcgcgggagccatacgatcattgatggacggtgaggatacgccgaggaagagagtgaaggagatggcggaagcggcgaggaatgctttgatggacggaggatcttcgtttgttgcggttaaacgatttctcgacgagttgatcggcggagatgtttag

SEQ ID NO: 31255 - protein, 492 aa, Arabidopsis thaliana
  misc_feature (1)..(492): Ceres Seq. ID no. 13579139
KGSIKHKNRERRKKKTMKAEAEIIFVTYPSPGHLLVSIEFAKSLIKRDDRIHTITILYWALPLAPQAHLFAKSLVASQPRIRLLALPDVQNPPPLELFFKAPEAYILESTKKTVPLVRDALSTLVSSRKESGSVRVVGLVIDFFCVPMIEVANELNLPSYIFLTCNAGFLSMMKYLPERHRITTSELDLSSGNVEHPIPGYVCSVPTKVLPPGLFVRESYEAWVEIAEKFPGAKGILVNSVTCLEQNAFDYFARLDENYPPVYPVGPVLSLKDRPSPNLDASDRDRIMRWLEDQPESSIVYICFGSLGIIGKLQIEEIAEALELTGHRFLWSIRTNPTEKASPYDLLPEGFLDRTASKGLVCDWAPQVEVLAHKALGGFVSHCGWNSVLESLWFGVPIATWPMYAEQQLNAFSMVKELGLAVELRLDYVSAYGEIVKAEEIAGAIRSLMDGEDTPRKRVKEMAEAARNALMDGGSSFVAVKRFLDELIGGDV

SEQ ID NO: 31256 - protein, 476 aa, Arabidopsis thaliana
  misc_feature (1)..(476): Ceres Seq. ID no. 13579140
MKAEAEIIFVTYPSPGHLLVSIEFAKSLIKRDDRIHTITILYWALPLAPQAHLFAKSLVASQPRIRLLALPDVQNPPPLELFFKAPEAYILESTKKTVPLVRDALSTLVSSRKESGSVRVVGLVIDFFCVPMIEVANELNLPSYIFLTCNAGFLSMMKYLPERHRITTSELDLSSGNVEHPIPGYVCSVPTKVLPPGLFVRESYEAWVEIAEKFPGAKGILVNSVTCLEQNAFDYFARLDENYPPVYPVGPVLSLKDRPSPNLDASDRDRIMRWLEDQPESSIVYICFGSLGIIGKLQIEEIAEALELTGHRFLWSIRTNPTEKASPYDLLPEGFLDRTASKGLVCDWAPQVEVLAHKALGGFVSHCGWNSVLESLWFGVPIATWPMYAEQQLNAFSMVKELGLAVELRLDYVSAYGEIVKAEEIAGAIRSLMDGEDTPRKRVKEMAEAARNALMDGGSSFVAVKRFLDELIGGDV

SEQ ID NO: 31257 - protein, 345 aa, Arabidopsis thaliana
  misc_feature (1)..(345): Ceres Seq. ID no. 13579141
MIEVANELNLPSYIFLTCNAGFLSMMKYLPERHRITTSELDLSSGNVEHPIPGYVCSVPTKVLPPGLFVRESYEAWVEIAEKFPGAKGILVNSVTCLEQNAFDYFARLDENYPPVYPVGPVLSLKDRPSPNLDASDRDRIMRWLEDQPESSIVYICFGSLGIIGKLQIEEIAEALELTGHRFLWSIRTNPTEKASPYDLLPEGFLDRTASKGLVCDWAPQVEVLAHKALGGFVSHCGWNSVLESLWFGVPIATWPMYAEQQLNAFSMVKELGLAVELRLDYVSAYGEIVKAEEIAGAIRSLMDGEDTPRKRVKEMAEAARNALMDGGSSFVAVKRFLDELIGGDV

SEQ ID NO: 31258 - DNA, 1379 bp, Arabidopsis thaliana
  misc_feature (1)..(1379): Ceres Seq. ID no. 13579157
acattctcgactttgctatttcattgagcttgaataaccaattttaagacgccattgctaaaacatgaaagctctatcatcttcttctccaatattaggtgctagccagccggcgacggcgactgcgcttatcgcgcgatctggtcgttctgaatggcagagctcctgcgctattctaacaagcaaggttatttctcaagaagaatctgaatccttacctgtgcctccagtttccggcggagttgatcatctcaacggccataacagcgccgccgcacgagttccaggaatgaatcttgttccgattgagaaatctgatagcaatccgttggttccacagcatcgtcataatccactgaaaccccttagcatgacggatctctcgccggctccgatgcacggatctaatctacgcgtcgcttatcaaggtgttcccggtgcttactctgaagcagccgctggtaaagcttatcctaattgtcaagctataccttgcgatcaatttgaggttgcgtttcaagcggtggagctttggatcgcagatcgtgctgttttaccggtggagaactctctcggcggttctatccaccgtaattacgatctcctcctccgtcaccgtcttcatatagtcggcgaagttcaactccctgttcatcactgtttactggctcttcccggcgttcgtaaagagtttctcacacgtgtgatctcacaccctcaaggtctcgctcagtgtgagcacacgctcacaaagctcggacttaatgtcgcacgtgaggcagttgatgacaccgcaggagccgctgagttcatcgcctctaacaacctccgcgacacagccgctatcgcgagtgcacgcgccgccgagatatacgggttggagattttggaagatgggattcaggacgacgtgagtaacgtgacgcgcttcgtgatgctggcgcgtgagccaatcatacctagaacagatagaccgttcaagactagcattgtctttgcgcacgagaaaggaaccagcgtgcttttcaaggtgctctctgctttcgccttcagagacattagcttgacgaagatcgaatcgaggccgaatcacaaccgtccgatcagggtcgtggatgatgccaatgtcgggacggcgaagcattttgagtacatgttttatgttgacttcgaggcctcgatggcggaggcgcgtgctcagaacgcgcttgccgaggttcaggagtttacatcgttcttgcgggtgcttgggagttatcccatggatatgactccttggtcaccaacatcatcaacttcatcgtaaccatactatagtctatacacacatgaaaatgtaaattttggagaagataacaaagttttatatttactgatcc

SEQ ID NO: 31259 - protein, 413 aa, Arabidopsis thaliana
  misc_feature (1)..(413): Ceres Seq. ID no. 13579158
MKALSSSSPILGASQPATATALIARSGRSEWQSSCAILTSKVISQEESESLPVPPVSGGVDHLNGHNSAAARVPGMNLVPIEKSDSNPLVPQHRHNPLKPLSMTDLSPAPMHGSNLRVAYQGVPGAYSEAAAGKAYPNCQAIPCDQFEVAFQAVELWIADRAVLPVENSLGGSIHRNYDLLLRHRLHIVGEVQLPVHHCLLALPGVRKEFLTRVISHPQGLAQCEHTLTKLGLNVAREAVDDTAGAAEFIASNNLRDTAAIASARAAEIYGLEILEDGIQDDVSNVTRFVMLAREPIIPRTDRPFKTSIVFAHEKGTSVLFKVLSAFAFRDISLTKIESRPNHNRPIRVVDDANVGTAKHFEYMFYVDFEASMAEARAQNALAEVQEFTSFLRVLGSYPMDMTPWSPTSSTSS

SEQ ID NO: 31260 - protein, 338 aa, Arabidopsis thaliana
  misc_feature (1)..(338): Ceres Seq. ID no. 13579159
MNLVPIEKSDSNPLVPQHRHNPLKPLSMTDLSPAPMHGSNLRVAYQGVPGAYSEAAAGKAYPNCQAIPCDQFEVAFQAVELWIADRAVLPVENSLGGSIHRNYDLLLRHRLHIVGEVQLPVHHCLLALPGVRKEFLTRVISHPQGLAQCEHTLTKLGLNVAREAVDDTAGAAEFIASNNLRDTAAIASARAAEIYGLEILEDGIQDDVSNVTRFVMLAREPIIPRTDRPFKTSIVFAHEKGTSVLFKVLSAFAFRDISLTKIESRPNHNRPIRVVDDANVGTAKHFEYMFYVDFEASMAEARAQNALAEVQEFTSFLRVLGSYPMDMTPWSPTSSTSS

SEQ ID NO: 31261 - protein, 311 aa, Arabidopsis thaliana
  misc_feature (1)..(311): Ceres Seq. ID no. 13579160
MTDLSPAPMHGSNLRVAYQGVPGAYSEAAAGKAYPNCQAIPCDQFEVAFQAVELWIADRAVLPVENSLGGSIHRNYDLLLRHRLHIVGEVQLPVHHCLLALPGVRKEFLTRVISHPQGLAQCEHTLTKLGLNVAREAVDDTAGAAEFIASNNLRDTAAIASARAAEIYGLEILEDGIQDDVSNVTRFVMLAREPIIPRTDRPFKTSIVFAHEKGTSVLFKVLSAFAFRDISLTKIESRPNHNRPIRVVDDANVGTAKHFEYMFYVDFEASMAEARAQNALAEVQEFTSFLRVLGSYPMDMTPWSPTSSTSS

SEQ ID NO: 31262 - DNA, 2126 bp, Arabidopsis thaliana
  misc_feature (1)..(2126): Ceres Seq. ID no. 13579167
aacatcttttaagcttctcccgcaaaattcagcaaagctttcggaggaatctcctaacagtcaccaccaccaccaccgtctaggncaaatctcgtcttcctcacgctctatttctccatagaanatttcctaactcctcctccgggttatcgattttttcaatttttctagggtttcgcgccgggatctaaaaaatcacaatcatgccggtgagtttgactccgaacgcaatcacggcgatacatgacggcgacgtgaatttgaagccgttgttacaggttttagaaatcaaaatgataggaagaagtcaagagagaagccaggagaggtatcgtttcctcatttcagatggtgtttctgctcaacatgctatggtcgcggttcagcttaatgatcgagtcaagtcaggacaatttgagaaaggatctatcgttcagctgattgattacatttgtagcgacgttaaaggccgcaagcttattgtggtgctgaacatggagacgatagtacaacagtctgaaaccattgggaaccctacaatatttggagaaacagatacagaagcccagaagacattttcaggtacgggcaatataccgcctccgaacagggttgtttttaatgaaccaatggttcagcattctgttaatagagcacctcccaggggtgtaaacattcaaaatcaagccaacaatactccaagcttcaggccatctgttcaaccttcatatcaaccgcctgcaagttacagaaatcatggacccatcatgaagaacgaggctccagctcgagtcatccctattgctgctctcaatccataccaaggtcgatgggctattaaggctagagtaactgcgaaaggagatatcagacgatataacaatgcaaaaggagatggaaaggttttctcgtttgatctgcttgactatgatggaggggagattcgggttacgtgctttaatgctcttgttgaccgtttctatgatgttactgaggttggtaaggtatatttgatttcaaagggaagtttgaagcctgcacagaaaaatttcaaccacttaaagaatgaatgggaaattttcttggagtcaacatcgactgtggagctttgccctgatgaagatggctccataccaaagcagcaattctccttccgcccaataagtgacattgagaacgctgagaacaataccatactcgatgtcattggtgtggtgacttctgtgaacccctcggtgccaatcttgagaaagaacgggatggaaacccataggaggatcctgaatctaaaggatgaatcaggaaaggctgtagaggtaacactttggggagaattctgtaaccgagatggtcggcaactggaagagatggttgattcagcttttcacccggttttagcaataaaagctggaaaagtaagcgacttcagtgggaaatcagtagggacaatatcttcaacacagctcttcataaatccagatttccctgaagctcataaactacggacctggttcgattacgggggaaaagacactgcttccttctccatctccagggacactatgcctggaggagtttccaggaacgagataaggaaaaatgtttctcagatcaaagaggaaggtcttggaagatcagataagcctgactggatcactgtgaaagcaaccatatcattcatcaaaacagatagcttctgttatacagcttgtcctttgatgatcggggataaacaatgcaacaagaaggttacacggtctggaacaaacaggtggctctgtgaccggtgcaaccaagagtctgatgaatgcgactatagataccttcttcaggtacagattcaagaccacactgggttgacttggataaccgcgtttcaagaaacaggagaagaaataatgggatgtccggctaagaagctttacgcaatgaaatacgaattggagaaggaggaagagttcgcagagattgttagagacagactgtttcatcagtacatgttgaagctgaagatcaaagaggaatcgtatggggatgaacaaagagtgaagatgactgttgtgaaggttgataaggtgaattatacatccgagagtaaatacatgcttgatttgctcgtaaggtaa

SEQ ID NO: 31263 - protein, 640 aa, Arabidopsis thaliana
  misc_feature (1)..(640): Ceres Seq. ID no. 13579168
MPVSLTPNAITAIHDGDVNLKPLLQVLEIKMIGRSQERSQERYRFLISDGVSAQHAMVAVQLNDRVKSGQFEKGSIVQLIDYICSDVKGRKLIVVLNMETIVQQSETIGNPTIFGETDTEAQKTFSGTGNIPPPNRVVFNEPMVQHSVNRAPPRGVNIQNQANNTPSFRPSVQPSYQPPASYRNHGPIMKNEAPARVIPIAALNPYQGRWAIKARVTAKGDIRRYNNAKGDGKVFSFDLLDYDGGEIRVTCFNALVDRFYDVTEVGKVYLISKGSLKPAQKNFNHLKNEWEIFLESTSTVELCPDEDGSIPKQQFSFRPISDIENAENNTILDVIGVVTSVNPSVPILRKNGMETHRRILNLKDESGKAVEVTLWGEFCNRDGRQLEEMVDSAFHPVLAIKAGKVSDFSGKSVGTISSTQLFINPDFPEAHKLRTWFDYGGKDTASFSISRDTMPGGVSRNEIRKNVSQIKEEGLGRSDKPDWITVKATISFIKTDSFCYTACPLMIGDKQCNKKVTRSGTNRWLCDRCNQESDECDYRYLLQVQIQDHTGLTWITAFQETGEEIMGCPAKKLYAMKYELEKEEEFAEIVRDRLFHQYMLKLKIKEESYGDEQRVKMTVVKVDKVNYTSESKYMLDLLVR

SEQ ID NO: 31264 - protein, 610 aa, Arabidopsis thaliana
  misc_feature (1)..(610): Ceres Seq. ID no. 13579169
MIGRSQERSQERYRFLISDGVSAQHAMVAVQLNDRVKSGQFEKGSIVQLIDYICSDVKGRKLIVVLNMETIVQQSETIGNPTIFGETDTEAQKTFSGTGNIPPPNRVVFNEPMVQHSVNRAPPRGVNIQNQANNTPSFRPSVQPSYQPPASYRNHGPIMKNEAPARVIPIAALNPYQGRWAIKARVTAKGDIRRYNNAKGDGKVFSFDLLDYDGGEIRVTCFNALVDRFYDVTEVGKVYLISKGSLKPAQKNFNHLKNEWEIFLESTSTVELCPDEDGSIPKQQFSFRPISDIENAENNTILDVIGVVTSVNPSVPILRKNGMETHRRILNLKDESGKAVEVTLWGEFCNRDGRQLEEMVDSAFHPVLAIKAGKVSDFSGKSVGTISSTQLFINPDFPEAHKLRTWFDYGGKDTASFSISRDTMPGGVSRNEIRKNVSQIKEEGLGRSDKPDWITVKATISFIKTDSFCYTACPLMIGDKQCNKKVTRSGTNRWLCDRCNQESDECDYRYLLQVQIQDHTGLTWITAFQETGEEIMGCPAKKLYAMKYELEKEEEFAEIVRDRLFHQYMLKLKIKEESYGDEQRVKMTVVKVDKVNYTSESKYMLDLLVR

SEQ ID NO: 31265 - protein, 584 aa, Arabidopsis thaliana
  misc_feature (1)..(584): Ceres Seq. ID no. 13579170
MVAVQLNDRVKSGQFEKGSIVQLIDYICSDVKGRKLIVVLNMETIVQQSETIGNPTIFGETDTEAQKTFSGTGNIPPPNRVVFNEPMVQHSVNRAPPRGVNIQNQANNTPSFRPSVQPSYQPPASYRNHGPIMKNEAPARVIPIAALNPYQGRWAIKARVTAKGDIRRYNNAKGDGKVFSFDLLDYDGGEIRVTCFNALVDRFYDVTEVGKVYLISKGSLKPAQKNFNHLKNEWEIFLESTSTVELCPDEDGSIPKQQFSFRPISDIENAENNTILDVIGVVTSVNPSVPILRKNGMETHRRILNLKDESGKAVEVTLWGEFCNRDGRQLEEMVDSAFHPVLAIKAGKVSDFSGKSVGTISSTQLFINPDFPEAHKLRTWFDYGGKDTASFSISRDTMPGGVSRNEIRKNVSQIKEEGLGRSDKPDWITVKATISFIKTDSFCYTACPLMIGDKQCNKKVTRSGTNRWLCDRCNQESDECDYRYLLQVQIQDHTGLTWITAFQETGEEIMGCPAKKLYAMKYELEKEEEFAEIVRDRLFHQYMLKLKIKEESYGDEQRVKMTVVKVDKVNYTSESKYMLDLLVR

SEQ ID NO: 31266 - DNA, 3647 bp, Arabidopsis thaliana
  misc_feature (1)..(3647): Ceres Seq. ID no. 13579175
tcgtctcttttaaatctccgagttttcttcctccttctctaaaagaacatggcgtttcttaccgcattgttcctgtttctcttcttctctttttcgagttccgccattgttgatcttagctcggaaacaacttctctcatctccttcaagcgctcactagaaaacccatctctcctttcttcatggaacgtttcgtcttccgcgtctcactgcgattgggttggcgttacgtgtctgcttggacgagtcaactcgctctccttaccgtctttgtctctgagaggccagattccgaaggaaatttcgagtttgaagaaccttagagagctttgtcttgccggaaatcaattctccgggaagattccgcctgagatttggaatctaaaacatctccaaacccttgacctctcaggaaattctctcaccggacttctcccgaggctactcagtgagttacctcagcttctctacctcgaccttagtgacaaccacttctccggttcacttcctccatcgttcttcatcagcttacctgcactgtcttctcttgacgtctccaacaactctctctccggcgaaatccctcctgaaatcgggaaactgagtaacctctccaatctttacatgggactcaactcattttccggtcaaattccgtcggagattggtaacatctcgttgctgaagaactttgctgcaccttcttgcttcttcaatggaccgttaccaaaggagatttcgaaactgaaacacttagcaaagctcgacctttcttataatccactcaagtgttccattcccaaatcgtttggagagttgcataatctgagtatactaaatcttgtctccgcagagcttattggattgatcccaccagagcttggtaattgtaaaagcctcaagtcactgatgctgtctttcaattctctctctggacctttgccattggagctttcagagattcctctgttgacgttttctgctgaaaggaatcagctttcgggttcattgccttcatggatggggaaatggaaggtactggactcacttctgttagctaacaatcggttttcaggtgaaatccctcatgagattgaggattgtccaatgttgaaacatctcagtctagctagcaacttgttaagtggttcgattcctagggagctctgtggttcaggttcgttggaggcgattgatctctctgggaatttgctttctggaacaattgaggaggtctttgatggatgttcctctcttggagagttgttacttactaataatcagatcaatggctctattcctgaggatctttggaagcttccattgatggcacttgacttggattccaacaacttcacaggagaaatcccaaagagtctctggaaatcaacgaacttgatggagtttacagcttcttataatcgtctagaaggttatttgcctgcagagattggtaatgcagcttcactgaagcggttggttctcagtgataatcagttaacaggtgaaatcccaagagagattggaaaactcacatctttgtctgtcttgaatctgaatgcaaacatgtttcaagggaagataccagttgagctcggtgattgtacttctttgactacattggatctaggcagcaacaatcttcaaggacagattccagacaaaatcactgctctcgctcagcttcagtgcctggttctctcttacaacaatctctccgggtcaattccatcaaaaccctctgcttatttccatcagattgagatgcctgatctcagctttcttcagcaccatgggatatttgatctctcctacaatagattgtctggccctataccagaagaacttggcgagtgtttggtattggtagagatttcactgagcaacaaccatctctctggagagattccagcttcactctctcgtttgaccaacctcacaatcctggatctatctggaaatgcactgactggatctattccaaaggagatgggcaactctcttaagttgcagggattaaacttggcgaataatcagctcaatggccatattccagaaagctttggcttgttaggtagcttggtgaagctaaacttgactaagaacaagcttgatggaccggttcctgcttctcttgggaacttgaaagagcttacacacatggacttgagctttaacaacctaagtggcgagctttcatcagaactgtctacaatggaaaaacttgtcggcctctacattgagcagaataagttcaccggggaaataccttcagaacttggtaatcttacgcagctggagtaccttgatgtttctgagaacttgttatctggagagataccaacaaagatctgtggattgcccaatctggagttcttgaatctagccaagaacaatctgcgaggagaggtgccgagtgatggtgtttgtcaggatccttccaaggcattgctttcagggaacaaagagttgtgtggcagagtggttggatcagattgcaagatcgagggaactaagttgaggagtgcttgggggattgcaggactcatgcttggctttacgatcatcgtttttgtgtttgttttctctctgcgcagatgggctatgacaaagagagtgaagcaaagagatgatccagagcgaatggaggaaagcagattgaaagggtttgttgatcagaacctgtatttcttaagtggaagcagatcaagggagcctttaagcatcaatatagcaatgttcgagcagccgcttctgaaggtgcgtttaggagatattgtcgaggctacagatcatttctctaagaagaacattataggagacggtggttttgggacggtttacaaagcttgtttaccaggtgagaaaacagtagcggtgaagaagctaagtgaagccaaaacgcagggaaaccgagaattcatggcagagatggagactctagggaaagtgaagcatccgaatcttgtgtctttgcttggatattgctctttcagtgaagagaagcttctggtatatgagtatatggtaaatggaagcttagatcactggttaaggaaccaaactgggatgctagaggttctggactggtcaaaacgcctcaaaatcgcagttggagctgcaagaggtctagctttcctacatcacggtttcatccctcacattatacacagggacatcaaagcgagcaacattctgttagatggtgattttgaaccaaaggtggcggattttgggctagcaagactaattagtgcctgtgaatcccatgttagtacagtcatagcagggactttcgggtatatcccaccggagtatggtcagagtgcccgagccacaaccaaaggagatgtctatagctttggcgtgatactattggagcttgtcacagggaaagagccaaccggtccagactttaaggagagtgaaggagggaacttggttggttgggcgattcagaagatcaaccaagggaaagctgtggatgttattgatccactgctcgtatctgtggctttgaagaactctcagcttcgtctgcttcagatagctatgctttgtcttgctgaaacgccagctaagcgccctaacatgcttgatgtgttgaaggctcttaaggagatatgagccatataaccttaaatgtt

SEQ ID NO: 31267 - protein, 1192 aa, Arabidopsis thaliana
  misc_feature (1)..(1192): Ceres Seq. ID no. 13579176
MAFLTALFLFLFFSFSSSAIVDLSSETTSLISFKRSLENPSLLSSWNVSSSASHCDWVGVTCLLGRVNSLSLPSLSLRGQIPKEISSLKNLRELCLAGNQFSGKIPPEIWNLKHLQTLDLSGNSLTGLLPRLLSELPQLLYLDLSDNHFSGSLPPSFFISLPALSSLDVSNNSLSGEIPPEIGKLSNLSNLYMGLNSFSGQIPSEIGNISLLKNFAAPSCFFNGPLPKEISKLKHLAKLDLSYNPLKCSIPKSFGELHNLSILNLVSAELIGLIPPELGNCKSLKSLMLSFNSLSGPLPLELSEIPLLTFSAERNQLSGSLPSWMGKWKVLDSLLLANNRFSGEIPHEIEDCPMLKHLSLASNLLSGSIPRELCGSGSLEAIDLSGNLLSGTIEEVFDGCSSLGELLLTNNQINGSIPEDLWKLPLMALDLDSNNFTGEIPKSLWKSTNLMEFTASYNRLEGYLPAEIGNAASLKRLVLSDNQLTGEIPREIGKLTSLSVLNLNANMFQGKIPVELGDCTSLTTLDLGSNNLQGQIPDKITALAQLQCLVLSYNNLSGSIPSKPSAYFHQIEMPDLSFLQHHGIFDLSYNRLSGPIPEELGECLVLVEISLSNNHLSGEIPASLSRLTNLTILDLSGNALTGSIPKEMGNSLKLQGLNLANNQLNGHIPESFGLLGSLVKLNLTKNKLDGPVPASLGNLKELTHMDLSFNNLSGELSSELSTMEKLVGLYIEQNKFTGEIPSELGNLTQLEYLDVSENLLSGEIPTKICGLPNLEFLNLAKNNLRGEVPSDGVCQDPSKALLSGNKELCGRVVGSDCKIEGTKLRSAWGIAGLMLGFTIIVFVFVFSLRRWAMTKRVKQRDDPERMEESRLKGFVDQNLYFLSGSRSREPLSINIAMFEQPLLKVRLGDIVEATDHFSKKNIIGDGGFGTVYKACLPGEKTVAVKKLSEAKTQGNREFMAEMETLGKVKHPNLVSLLGYCSFSEEKLLVYEYMVNGSLDHWLRNQTGMLEVLDWSKRLKIAVGAARGLAFLHHGFIPHIIHRDIKASNILLDGDFEPKVADFGLARLISACESHVSTVIAGTFGYIPPEYGQSARATTKGDVYSFGVILLELVTGKEPTGPDFKESEGGNLVGWAIQKINQGKAVDVIDPLLVSVALKNSQLRLLQIAMLCLAETPAKRPNMLDVLKALKEI

SEQ ID NO: 31268 - protein, 1000 aa, Arabidopsis thaliana
  misc_feature (1)..(1000): Ceres Seq. ID no. 13579177
MGLNSFSGQIPSEIGNISLLKNFAAPSCFFNGPLPKEISKLKHLAKLDLSYNPLKCSIPKSFGELHNLSILNLVSAELIGLIPPELGNCKSLKSLMLSFNSLSGPLPLELSEIPLLTFSAERNQLSGSLPSWMGKWKVLDSLLLANNRFSGEIPHEIEDCPMLKHLSLASNLLSGSIPRELCGSGSLEAIDLSGNLLSGTIEEVFDGCSSLGELLLTNNQINGSIPEDLWKLPLMALDLDSNNFTGEIPKSLWKSTNLMEFTASYNRLEGYLPAEIGNAASLKRLVLSDNQLTGEIPREIGKLTSLSVLNLNANMFQGKIPVELGDCTSLTTLDLGSNNLQGQIPDKITALAQLQCLVLSYNNLSGSIPSKPSAYFHQIEMPDLSFLQHHGIFDLSYNRLSGPIPEELGECLVLVEISLSNNHLSGEIPASLSRLTNLTILDLSGNALTGSIPKEMGNSLKLQGLNLANNQLNGHIPESFGLLGSLVKLNLTKNKLDGPVPASLGNLKELTHMDLSFNNLSGELSSELSTMEKLVGLYIEQNKFTGEIPSELGNLTQLEYLDVSENLLSGEIPTKICGLPNLEFLNLAKNNLRGEVPSDGVCQDPSKALLSGNKELCGRVVGSDCKIEGTKLRSAWGIAGLMLGFTIIVFVFVFSLRRWAMTKRVKQRDDPERMEESRLKGFVDQNLYFLSGSRSREPLSINIAMFEQPLLKVRLGDIVEATDHFSKKNIIGDGGFGTVYKACLPGEKTVAVKKLSEAKTQGNREFMAEMETLGKVKHPNLVSLLGYCSFSEEKLLVYEYMVNGSLDHWLRNQTGMLEVLDWSKRLKIAVGAARGLAFLHHGFIPHIIHRDIKASNILLDGDFEPKVADFGLARLISACESHVSTVIAGTFGYIPPEYGQSARATTKGDVYSFGVILLELVTGKEPTGPDFKESEGGNLVGWAIQKINQGKAVDVIDPLLVSVALKNSQLRLLQIAMLCLAETPAKRPNMLDVLKALKEI

SEQ ID NO: 31269 - protein, 905 aa, Arabidopsis thaliana
  misc_feature (1)..(905): Ceres Seq. ID no. 13579178
MLSFNSLSGPLPLELSEIPLLTFSAERNQLSGSLPSWMGKWKVLDSLLLANNRFSGEIPHEIEDCPMLKHLSLASNLLSGSIPRELCGSGSLEAIDLSGNLLSGTIEEVFDGCSSLGELLLTNNQINGSIPEDLWKLPLMALDLDSNNFTGEIPKSLWKSTNLMEFTASYNRLEGYLPAEIGNAASLKRLVLSDNQLTGEIPREIGKLTSLSVLNLNANMFQGKIPVELGDCTSLTTLDLGSNNLQGQIPDKITALAQLQCLVLSYNNLSGSIPSKPSAYFHQIEMPDLSFLQHHGIFDLSYNRLSGPIPEELGECLVLVEISLSNNHLSGEIPASLSRLTNLTILDLSGNALTGSIPKEMGNSLKLQGLNLANNQLNGHIPESFGLLGSLVKLNLTKNKLDGPVPASLGNLKELTHMDLSFNNLSGELSSELSTMEKLVGLYIEQNKFTGEIPSELGNLTQLEYLDVSENLLSGEIPTKICGLPNLEFLNLAKNNLRGEVPSDGVCQDPSKALLSGNKELCGRVVGSDCKIEGTKLRSAWGIAGLMLGFTIIVFVFVFSLRRWAMTKRVKQRDDPERMEESRLKGFVDQNLYFLSGSRSREPLSINIAMFEQPLLKVRLGDIVEATDHFSKKNIIGDGGFGTVYKACLPGEKTVAVKKLSEAKTQGNREFMAEMETLGKVKHPNLVSLLGYCSFSEEKLLVYEYMVNGSLDHWLRNQTGMLEVLDWSKRLKIAVGAARGLAFLHHGFIPHIIHRDIKASNILLDGDFEPKVADFGLARLISACESHVSTVIAGTFGYIPPEYGQSARATTKGDVYSFGVILLELVTGKEPTGPDFKESEGGNLVGWAIQKINQGKAVDVIDPLLVSVALKNSQLRLLQIAMLCLAETPAKRPNMLDVLKALKEI

SEQ ID NO: 31270 - DNA, 4878 bp, Arabidopsis thaliana
  misc_feature (1)..(4878): Ceres Seq. ID no. 13579187
atgaagcgacacagtttaaagcgtagcacaaaagagagccctcttggaaacttcaccaacatagaagcgaggtttggcggagaaagagtctcagtagcaaagcggaaatggactcaaagtcggttactccagaaccaaccaaccccttctacgcttcttcggggcaatcagggttttaatcggaaggatattttgttatcaggaaaaacctatgcttctgttgtcgccgccgctgctgctgcagccgccgataaggaggatggtggtgctgtgagtagtgccaaggagttggattcctcatcggaggctgtgtctggtaattcggataaggttggagctgatgatttatctgactccgagaaggagaagccgaatttggtgggtgatgggaaggtttccgacgaggtggatggttctttaaaggaggattctactactcctgaggctactccgaagcctgaggtggtttctggtgagacaattggtgtagatgatgtttcatcgttatctccgaagccggaggctgtttctgatggtgtaggggttgtggaggagaataagaaggttaaggaggacgtggaggatattaaagacgatggtgagagtaagattgaaaatgggagtgttgatgttgatgtgaaacaggcttccacagatggggagagtgagagtaaagtgaaggatgtggaagaagaagatgttggaacaaaaaaagatgatgagggggagagtgagttgggtggaaaagttgatgttgacgataaaagtgataatgttattgaagaagagggtgtggagttaactgataaaggagacgtcattgtgaactcgtcccctgtagaatcagtgcatgttgatgtggcaaaaccaggggtggttgttgtaggagacgcagagggaagtgaggagttgaagattaatgctgatgctgaaactcttgaagtggctaataagtttgatcaaattggggatgatgatagtggtgaatttgaacctgtgtctgacaaggccattgaggaggtagaagaaaaatttactagcgaatcagactctattgcagactcctctaagttagaatctgtggataccagtgctgtagagccagaggttgtagctgccgagagtgggagtgaaccaaaggatgtggaaaaagccaacggattggagaagggtatgacttatgctgaagtaatcaaggcagctagtgcagtagctgacaatggaaccaaagaggaggagagtgtgctcggtggcatagtcgatgatgcagaagaaggtgttaagttaaacaacaaaggagactttgtggtggactcatctgctattgaagctgtgaatgtagatgtggcaaagccaggggttgttgttgttggagacgtagaggtgagtgaggtgctggaaactgatggcaacatccctgatgtgcataataagtttgatccaattggccaaggtgaaggtggtgaagttgaacttgaatccgataaagccacagaggagggaggaggaaagttggttagtgaaggagactctatggttgactcctctgtggtggactctgttgatgctgatatcaatgttgcagagccaggggttgtggttgtcggggcggctaaggaggctgtaattaaggaagatgataaagatgatgaggttgacaagaccatctcaaatattgaggaacctgatgacctgactgctgcatatgatggaaattttgaattggctgttaaggaaatatcagaggctgccaaagtagagccagacgaaccaaaagtaggtgtggaagtagaagaattgcctgtttctgaaagtttaaaagtgggttcagttgatgcagaagaggattcaattcctgcagctgagtcacagtttgaggttcggaaagttgtcgaaggggacagtgctgaagaggatgaaaacaagctcccagtcgaagacattgtttcttctcgtgagtttagctttggaggcaaggaagtggaccaggaaccttctggcgaaggtgttaccagggttgatgggtctgaaagtgaagaagaaactgaagagatgatatttgggagttctgaagctgcaaaacagttcttagcagagttggaaaaggcttcttctggtatagaggcacattctgatgaagcaaacatttctaacaatatgtcagataggattgatggccagattgtcaccgattctgacgaggatgtagacacagaggatgaaggtgaggagaaaatgtttgatactgcagctttggctgcgcttttgaaggcagccactggtggtggaagttcagaaggtggcaattttaccataacatctcaggatggcacgaagcttttctctatggatcgacctgctggtttgagttcatcgttaaggcccttgaagcctgcagcagctccacgtgcaaaccgttccaacatcttttccaattctaatgtcacaatggcagatgagactgagattaacttgagcgaggaagagaaacagaaattagaaaagttgcaaagcctccgtgtgaagtttttgcggcttttgcaaaggttgggtcattcggcagaagattcaattgcagcgcaggttctttaccgtcttgcactacttgctgggagacaagcagggcagttattcagtcttgatgctgcaaagaagaaggctgtggagtctgaggctgagggcaacgaagaattgatcttctccctaaacatactggtccttggaaaagccggggtgggaaaaagtgctactataaattccattttgggaaaccagattgcgtccattgatgcttttgggctctcaaccacttcggttagagaaatttctggaacggtgaatggtgtcaagattacctttattgatactccgggtttgaagtctgctgcgatggatcaaagtacaaatgcaaaaatgttgtcctctgtaaagaaggtaatgaagaagtgtccccctgatattgtactatatgtagatcgtcttgacacccagaccagggacttgaacaatttgcccttgctaaggacgattactgcttctcttggtacatccatatggaaaaacgctatagtgacattgacccatgcggcttctgcccctcctgatggcccatctggcaccccattgagctatgatgtgtttgtagcgcagtgctcacatattgtgcaacagtctataggacaggctgttggagatctacgcttgatgaatccaagtctgatgaatccagtttcacttgttgagaatcaccccttgtgtaggaagaaccgggagggagtgaaggttctcccgaatggccaaacttggagatctcagctgttgctattgtgttactccctgaaggttttgtcagaaacaaattctctattgaggcctcaagaaccattggaccatcgtaaagtatttggtttccgagttagatccccgcctctcccttacttgttgtcttggctgttgcagtcccgtgcacatcctaagctccctggagaccaaggtggtgatagtgttgactctgatatcgaaattgatgatgtgtctgattctgagcaggaagatggggaagatgatgagtatgaccagctgccaccatttaagcctcttcgaaaaacccaacttgcaaagctctcaaatgaacagagaaaggcatatttcgaggagtatgattaccgtgtaaagctcctgcagaagaagcaatggagagaggaattaaagaggatgaaagaaatgaagaaaaacgggaagaagctgggtgaaagtgagtttggttatccgggagaagaagatgatccagaaaacggggctccagctgcagtgccagttccattacccgatatggttttgccaccttcatttgatagtgataactcagcttaccgataccgatatctggaacccacttcacaactcctaaccaggccagtgttggatacccatggttgggaccatgactgtggatatgacggcgtcaatgcagaacacagtcttgctctagctagccggttccctgccacagctactgtccaagtcaccaaggacaagaaagagttcaacattcatctggactcctctgtgtctgctaagcacggggagaatggatccaccatggcagggttcgatattcagaatgtaggcaagcagctggcatatgtggtcagaggagaaaccaaattcaagaatttgaggaagaacaagacaactgttggagggtcagtgacattcttgggagagaacatcgccactggggtcaaactcgaggaccaaatagcactggggaaaaggttggtgcttgtgggcagcactgggacaatgcgatcacagggagattcggcctatggtgcgaacctcgaggtcaggcttagggaagctgatttcccaattggacaggaccaatcttcttttgggctgtctctggtaaagtggagaggcgatttagcccttggagccaatctccaatctcaagtctctgttggaaggaactcaaagattgcgcttcgtgcaggacttaacaacaagatgagcggacagatcacagtcagaaccagcagctcggatcagttgcaaatcgctctcacagccattcttccaattgccatgtccatctacaagagcattcgacccgaagcgacgaacgacaagtacagcatgtactaaatatgctgatgaatgctgcagaatgatcttttcttttattactggtttttagttcatgtttttcccccactttaataaaaactttgttgaagtttatcaaagttgtattttggttctgttgagaggttcccatcggatttaatttatcatgtatcagtaattcttcactttcattagcccttctcagcttctcttgctgttcttcagataatggaatctagttcagtc

SEQ ID NO: 31271 - protein, 1549 aa, Arabidopsis thaliana
  misc_feature (1)..(1549): Ceres Seq. ID no. 13579188
MKRHSLKRSTKESPLGNFTNIEARFGGERVSVAKRKWTQSRLLQNQPTPSTLLRGNQGFNRKDILLSGKTYASVVAAAAAAAADKEDGGAVSSAKELDSSSEAVSGNSDKVGADDLSDSEKEKPNLVGDGKVSDEVDGSLKEDSTTPEATPKPEVVSGETIGVDDVSSLSPKPEAVSDGVGVVEENKKVKEDVEDIKDDGESKIENGSVDVDVKQASTDGESESKVKDVEEEDVGTKKDDEGESELGGKVDVDDKSDNVIEEEGVELTDKGDVIVNSSPVESVHVDVAKPGVVVVGDAEGSEELKINADAETLEVANKFDQIGDDDSGEFEPVSDKAIEEVEEKFTSESDSIADSSKLESVDTSAVEPEVVAAESGSEPKDVEKANGLEKGMTYAEVIKAASAVADNGTKEEESVLGGIVDDAEEGVKLNNKGDFVVDSSAIEAVNVDVAKPGVVVVGDVEVSEVLETDGNIPDVHNKFDPIGQGEGGEVELESDKATEEGGGKLVSEGDSMVDSSVVDSVDADINVAEPGVVVVGAAKEAVIKEDDKDDEVDKTISNIEEPDDLTAAYDGNFELAVKEISEAAKVEPDEPKVGVEVEELPVSESLKVGSVDAEEDSIPAAESQFEVRKVVEGDSAEEDENKLPVEDIVSSREFSFGGKEVDQEPSGEGVTRVDGSESEEETEEMIFGSSEAAKQFLAELEKASSGIEAHSDEANISNNMSDRIDGQIVTDSDEDVDTEDEGEEKMFDTAALAALLKAATGGGSSEGGNFTITSQDGTKLFSMDRPAGLSSSLRPLKPAAAPRANRSNIFSNSNVTMADETEINLSEEEKQKLEKLQSLRVKFLRLLQRLGHSAEDSIAAQVLYRLALLAGRQAGQLFSLDAAKKKAVESEAEGNEELIFSLNILVLGKAGVGKSATINSILGNQIASIDAFGLSTTSVREISGTVNGVKITFIDTPGLKSAAMDQSTNAKMLSSVKKVMKKCPPDIVLYVDRLDTQTRDLNNLPLLRTITASLGTSIWKNAIVTLTHAASAPPDGPSGTPLSYDVFVAQCSHIVQQSIGQAVGDLRLMNPSLMNPVSLVENHPLCRKNREGVKVLPNGQTWRSQLLLLCYSLKVLSETNSLLRPQEPLDHRKVFGFRVRSPPLPYLLSWLLQSRAHPKLPGDQGGDSVDSDIEIDDVSDSEQEDGEDDEYDQLPPFKPLRKTQLAKLSNEQRKAYFEEYDYRVKLLQKKQWREELKRMKEMKKNGKKLGESEFGYPGEEDDPENGAPAAVPVPLPDMVLPPSFDSDNSAYRYRYLEPTSQLLTRPVLDTHGWDHDCGYDGVNAEHSLALASRFPATATVQVTKDKKEFNIHLDSSVSAKHGENGSTMAGFDIQNVGKQLAYVVRGETKFKNLRKNKTTVGGSVTFLGENIATGVKLEDQIALGKRLVLVGSTGTMRSQGDSAYGANLEVRLREADFPIGQDQSSFGLSLVKWRGDLALGANLQSQVSVGRNSKIALRAGLNNKMSGQITVRTSSSDQLQIALTAILPIAMSIYKSIRPEATNDKYSMY

SEQ ID NO: 31272 - protein, 1158 aa, Arabidopsis thaliana
  misc_feature (1)..(1158): Ceres Seq. ID no. 13579189
MTYAEVIKAASAVADNGTKEEESVLGGIVDDAEEGVKLNNKGDFVVDSSAIEAVNVDVAKPGVVVVGDVEVSEVLETDGNIPDVHNKFDPIGQGEGGEVELESDKATEEGGGKLVSEGDSMVDSSVVDSVDADINVAEPGVVVVGAAKEAVIKEDDKDDEVDKTISNIEEPDDLTAAYDGNFELAVKEISEAAKVEPDEPKVGVEVEELPVSESLKVGSVDAEEDSIPAAESQFEVRKVVEGDSAEEDENKLPVEDIVSSREFSFGGKEVDQEPSGEGVTRVDGSESEEETEEMIFGSSEAAKQFLAELEKASSGIEAHSDEANISNNMSDRIDGQIVTDSDEDVDTEDEGEEKMFDTAALAALLKAATGGGSSEGGNFTITSQDGTKLFSMDRPAGLSSSLRPLKPAAAPRANRSNIFSNSNVTMADETEINLSEEEKQKLEKLQSLRVKFLRLLQRLGHSAEDSIAAQVLYRLALLAGRQAGQLFSLDAAKKKAVESEAEGNEELIFSLNILVLGKAGVGKSATINSILGNQIASIDAFGLSTTSVREISGTVNGVKITFIDTPGLKSAAMDQSTNAKMLSSVKKVMKKCPPDIVLYVDRLDTQTRDLNNLPLLRTITASLGTSIWKNAIVTLTHAASAPPDGPSGTPLSYDVFVAQCSHIVQQSIGQAVGDLRLMNPSLMNPVSLVENHPLCRKNREGVKVLPNGQTWRSQLLLLCYSLKVLSETNSLLRPQEPLDHRKVFGFRVRSPPLPYLLSWLLQSRAHPKLPGDQGGDSVDSDIEIDDVSDSEQEDGEDDEYDQLPPFKPLRKTQLAKLSNEQRKAYFEEYDYRVKLLQKKQWREELKRMKEMKKNGKKLGESEFGYPGEEDDPENGAPAAVPVPLPDMVLPPSFDSDNSAYRYRYLEPTSQLLTRPVLDTHGWDHDCGYDGVNAEHSLALASRFPATATVQVTKDKKEFNIHLDSSVSAKHGENGSTMAGFDIQNVGKQLAYVVRGETKFKNLRKNKTTVGGSVTFLGENIATGVKLEDQIALGKRLVLVGSTGTMRSQGDSAYGANLEVRLREADFPIGQDQSSFGLSLVKWRGDLALGANLQSQVSVGRNSKIALRAGLNNKMSGQITVRTSSSDQLQIALTAILPIAMSIYKSIRPEATNDKYSMY

SEQ ID NO: 31273 - protein, 1038 aa, Arabidopsis thaliana
  misc_feature (1)..(1038): Ceres Seq. ID no. 13579190
MVDSSVVDSVDADINVAEPGVVVVGAAKEAVIKEDDKDDEVDKTISNIEEPDDLTAAYDGNFELAVKEISEAAKVEPDEPKVGVEVEELPVSESLKVGSVDAEEDSIPAAESQFEVRKVVEGDSAEEDENKLPVEDIVSSREFSFGGKEVDQEPSGEGVTRVDGSESEEETEEMIFGSSEAAKQFLAELEKASSGIEAHSDEANISNNMSDRIDGQIVTDSDEDVDTEDEGEEKMFDTAALAALLKAATGGGSSEGGNFTITSQDGTKLFSMDRPAGLSSSLRPLKPAAAPRANRSNIFSNSNVTMADETEINLSEEEKQKLEKLQSLRVKFLRLLQRLGHSAEDSIAAQVLYRLALLAGRQAGQLFSLDAAKKKAVESEAEGNEELIFSLNILVLGKAGVGKSATINSILGNQIASIDAFGLSTTSVREISGTVNGVKITFIDTPGLKSAAMDQSTNAKMLSSVKKVMKKCPPDIVLYVDRLDTQTRDLNNLPLLRTITASLGTSIWKNAIVTLTHAASAPPDGPSGTPLSYDVFVAQCSHIVQQSIGQAVGDLRLMNPSLMNPVSLVENHPLCRKNREGVKVLPNGQTWRSQLLLLCYSLKVLSETNSLLRPQEPLDHRKVFGFRVRSPPLPYLLSWLLQSRAHPKLPGDQGGDSVDSDIEIDDVSDSEQEDGEDDEYDQLPPFKPLRKTQLAKLSNEQRKAYFEEYDYRVKLLQKKQWREELKRMKEMKKNGKKLGESEFGYPGEEDDPENGAPAAVPVPLPDMVLPPSFDSDNSAYRYRYLEPTSQLLTRPVLDTHGWDHDCGYDGVNAEHSLALASRFPATATVQVTKDKKEFNIHLDSSVSAKHGENGSTMAGFDIQNVGKQLAYVVRGETKFKNLRKNKTTVGGSVTFLGENIATGVKLEDQIALGKRLVLVGSTGTMRSQGDSAYGANLEVRLREADFPIGQDQSSFGLSLVKWRGDLALGANLQSQVSVGRNSKIALRAGLNNKMSGQITVRTSSSDQLQIALTAILPIAMSIYKSIRPEATNDKYSMY

SEQ ID NO: 31274 - DNA, 2394 bp, Arabidopsis thaliana
  misc_feature (1)..(2394): Ceres Seq. ID no. 13579221
atttgtttatttcatcgtccaaatttttgacagtatttttttgtttgttagagaagggcgagagagagtgactttttttgtttgcctttgttaatggcttgtgtgtgagattcattgaattttttgaaaattctgacgaataaaaaccatatctaccaatcacaaaccctagatttttgttatcttcttcatccgaagattctctttgatctgtgtctccttccttctgattctcccatttcatttcattgattcttttgattcgattctattcgagctcaattttgtagatcagaacccagaatcgaatttgggataacttgaacaatatccttggtaacttgttgatctgaatttgagtgaagaagacatcgaattcaagtttggtgtgggagattttttttaatggagtgatgatgatttaaaggggaaggtaaagggaacgatgactggattgggtgttcgatccagtagctatggttccttggagaagacgggacttaacggcgtcgttttacctatccagatcactaccacgacgcgtaccaaaccatctaagatgcagaaagatagagaaggtattgtacattggatctgcaaattcgctggtcgtaagaaggttggcatgttgcttctcttcttaatctccgccgtcgtcttccttcgcgtcctttacgtcggaaaaggtgaagatagtcaggaaggtcaaggtcctccgagtcttcatttcaatggcagttcaggcgtaaattattcaaatatgttacaaacaaatgaagagctaaacatgaatattggaaatatatcgttcaaggcaaaagaagttattgtgttccctcctcctcctatacattttcttggttattcgcttcctcaaggtcatccttgtaacagtttcactttacctcccccaccagcagacaggaaaagaacaggaccacgcccatgcccggtatgttaccttccagtagaagaagcagttgccttgatgccaaatgccccatcattttcccctgttcttaagaacttaacgtatatatatgaagaaccgttaaacagagagacagagtttggagggtcagattttggtggttatcctactttgaaacataggaatgattcttttgacattaaagaaacaatgagtgtacattgtgggtttgtcaaaggacctcaacctggtcgaaatacaggatttgacattgatgaggcagatcttcttgaaatgaagcagtgtcgtgggatagttgttgcttcagcagtatttgatgcttttgatgatgtaaaagccccacaaaatatcagtaaatatgcggaggaaacagtttgcttctacatgtttgttgatgaagagactgaatcaattttgaagagagaacgaggccttgatggcaataagaaagtagggatatggagagttgttgttgttcataatctcccctattcagatggaaggcgcaatggaaaggtgcccaagcttcttgtccataggatgtttccaaatgctcgctattctttatggattgacggaaaactagaacttgtcgtcgatccatatcaaattcttgaaagattcttgtggaggaaaaatgctacttttgctatttctagacattacaaacgatttgatgtcttagtggaagccgaagcaaataaagctgctggtaaatatgataatgcttctatcgactttcaagtggatttttacaagaacgaagggttaaccccttattctgtcgcaaagctcccaatcacaagcgacgtacccgagggttgtgtcattttaagagagcatgttcccataagcaacctcttcacttgtctttggttcaacgaagttgaccgattcacttctagagatcaaatcagtttctcaacagtaagagataagatcgcagcaaaaacaaactggacagtaagcatgttccttgattgtgaaagacgcaattttgtagttcagagatatcaccgagcagaacaagaaagatttgcaaggcaacgacctccggtgcctaattttcctcctccaccaccttcgccgcctccaccagttttaatcagcagcgatttgcctagaaaaatgtcaagtggaagagcaacgccgcctagaagacgaggaagagacagacggtctggtcaaaggggtcacaggaaagctaacttgccagtaagattaccagattcagcttaagagttggcgtccgtcttcttcttcttcttcatggtcactctcatcaccaacatcacattccaattttaccacacagtatgtttattttttttgtttctctatttgattctaaggattcaaaatcaattttttaatgtatatatatacacgaacattttgtacttggataataaattatagtttcgaatttttgaagttcaaaa

SEQ ID NO: 31275 - protein, 581 aa, Arabidopsis thaliana
  misc_feature (1)..(581): Ceres Seq. ID no. 13579222
MTGLGVRSSSYGSLEKTGLNGVVLPIQITTTTRTKPSKMQKDREGIVHWICKFAGRKKVGMLLLFLISAVVFLRVLYVGKGEDSQEGQGPPSLHFNGSSGVNYSNMLQTNEELNMNIGNISFKAKEVIVFPPPPIHFLGYSLPQGHPCNSFTLPPPPADRKRTGPRPCPVCYLPVEEAVALMPNAPSFSPVLKNLTYIYEEPLNRETEFGGSDFGGYPTLKHRNDSFDIKETMSVHCGFVKGPQPGRNTGFDIDEADLLEMKQCRGIVVASAVFDAFDDVKAPQNISKYAEETVCFYMFVDEETESILKRERGLDGNKKVGIWRVVVVHNLPYSDGRRNGKVPKLLVHRMFPNARYSLWIDGKLELVVDPYQILERFLWRKNATFAISRHYKRFDVLVEAEANKAAGKYDNASIDFQVDFYKNEGLTPYSVAKLPITSDVPEGCVILREHVPISNLFTCLWFNEVDRFTSRDQISFSTVRDKIAAKTNWTVSMFLDCERRNFVVQRYHRAEQERFARQRPPVPNFPPPPPSPPPPVLISSDLPRKMSSGRATPPRRRGRDRRSGQRGHRKANLPVRLPDSA

SEQ ID NO: 31276 - protein, 543 aa, Arabidopsis thaliana
  misc_feature (1)..(543): Ceres Seq. ID no. 13579223
MQKDREGIVHWICKFAGRKKVGMLLLFLISAVVFLRVLYVGKGEDSQEGQGPPSLHFNGSSGVNYSNMLQTNEELNMNIGNISFKAKEVIVFPPPPIHFLGYSLPQGHPCNSFTLPPPPADRKRTGPRPCPVCYLPVEEAVALMPNAPSFSPVLKNLTYIYEEPLNRETEFGGSDFGGYPTLKHRNDSFDIKETMSVHCGFVKGPQPGRNTGFDIDEADLLEMKQCRGIVVASAVFDAFDDVKAPQNISKYAEETVCFYMFVDEETESILKRERGLDGNKKVGIWRVVVVHNLPYSDGRRNGKVPKLLVHRMFPNARYSLWIDGKLELVVDPYQILERFLWRKNATFAISRHYKRFDVLVEAEANKAAGKYDNASIDFQVDFYKNEGLTPYSVAKLPITSDVPEGCVILREHVPISNLFTCLWFNEVDRFTSRDQISFSTVRDKIAAKTNWTVSMFLDCERRNFVVQRYHRAEQERFARQRPPVPNFPPPPPSPPPPVLISSDLPRKMSSGRATPPRRRGRDRRSGQRGHRKANLPVRLPDSA

SEQ ID NO: 31277 - protein, 521 aa, Arabidopsis thaliana
  misc_feature (1)..(521): Ceres Seq. ID no. 13579224
MLLLFLISAVVFLRVLYVGKGEDSQEGQGPPSLHFNGSSGVNYSNMLQTNEELNMNIGNISFKAKEVIVFPPPPIHFLGYSLPQGHPCNSFTLPPPPADRKRTGPRPCPVCYLPVEEAVALMPNAPSFSPVLKNLTYIYEEPLNRETEFGGSDFGGYPTLKHRNDSFDIKETMSVHCGFVKGPQPGRNTGFDIDEADLLEMKQCRGIVVASAVFDAFDDVKAPQNISKYAEETVCFYMFVDEETESILKRERGLDGNKKVGIWRVVVVHNLPYSDGRRNGKVPKLLVHRMFPNARYSLWIDGKLELVVDPYQILERFLWRKNATFAISRHYKRFDVLVEAEANKAAGKYDNASIDFQVDFYKNEGLTPYSVAKLPITSDVPEGCVILREHVPISNLFTCLWFNEVDRFTSRDQISFSTVRDKIAAKTNWTVSMFLDCERRNFVVQRYHRAEQERFARQRPPVPNFPPPPPSPPPPVLISSDLPRKMSSGRATPPRRRGRDRRSGQRGHRKANLPVRLPDSA

SEQ ID NO: 31278 - DNA, 2509 bp, Arabidopsis thaliana
  misc_feature (1)..(2509): Ceres Seq. ID no. 13579233
gaacgtgattcgcccttttctctttgcccaagagctatacgacaatacctccaccacaccccacacacacacacgagagacagagagagagagagaggaaatttgctactgagagatacattcagtgagtgtgtgtctgtcaccgtggaggagaaacggaaggaggatagatgaaaccgaccggagaaggaggaggggaagtcgccggagcggtggcggaaggttcggcgttgttaattgtaggagtaaagccagatgaatggagtagagaggttcttacatggtctttggtgaatgtagcgcgtcctggagatcgaatcgttgctcttcatgttctcgattattctctagagggctcaacgtcgcttatttcgttggttaggaattttgatactatgcttggtgtttatgaaagcttctgcaacttaaaacaggtagatttgaagttgaaggttttcagagggaagtcagctaggaaagttcttgtacaagaagttaaatcgtgtggagctacaagtttaatcgttggttcctctaggaaacatcacactatccgttcttcagcttctttagccaagtattgtgccaggaatcttgccaaggatgtctctgtttttgctgttaaaagtggcaagattatgttccgcagagtacctaataccaatggtgcagatggtccacagatgaatattccctctttagtttgtggatcaccagatattgctattgaagcggcaaagattggaaacagttttagccctgctagaacgagctcacgctggacaagaactagtcgtagttcgtcattgcagtctcctgacagcttaggtgtagacaatttgttggctttagtgccagtacaaacaaatgagactgattctggttcccttgagtcaggaccaggttggcattttcttcgcgggctttacggtaataatcgaaaaagctggaccaaagtttctgctaagaaggctgtacttcagtgggtttcgaggctgcgaggtcggcattcagaaactgtaatctatctggataggaaacggagtgactctggttgtgatgaagattgctcttctagtattgatggtgaagatgtttctatatcacggtttggttctgagcttatgcagtcacctctttctcctttcattggatcaaacaacattccagaagagctggaaggtctacatgaaaagtactcttccacatgtagattattcacatacgaggaagtcttgtcaattacctcaaactttgcatctgagaacttggttggagaaggtggtaatagttatgtttatagaggagatctaccagatggcagggaattagctgtcaaaatattgaaaccttgtctggatgtgttgaaggaatttatactggaaattgaagtcattaccagtgtacatcacaaaaatatagtatctctctttggtttctgtttcgagaataataatttgatgctggtatacgattatctaccacgaggaagccttgaagagaaccttcatggcaatagaaaggatgcaaagaaatttggctggatggagagatataaggtggcagtgggtgttgccgaggcgttagactatctgcataatactcatgatccagaagtaattcaccgggatgtcaaatcttctaatgttcttttggcagatgattttgagccacagctctcagatttcggattcgccagcttggcttcaagtacctcacagcatgtagcgggtggggatattgccgggacatttggttacctagcaccagagtacttcatgcacggtaaagtaaccgacaagattgatgtctatgcttttggtgttgtattgctcgagctcatatcgggtagaaaaccaatctgcgtcgaccagtctaaaggccaggagagccttgtcttgtgggcaaacccaattctagatagtggaaagtttgctcagttactggatcccagtctagaaaatgataacagtaacgatctaatcgagaaactattgttagctgccacgctatgcatcaaacgcacacctcatgaccgtccgcaaattggccttgtcctaaagatattacaaggggaagaagaagcaacagagtggggaaagcaacaagtgagagcctcagaagacgtgagcgcatatttgacaaatatagaatcacacataaacctcgcattgcttgatttggaagatgatgcagcttctgatagcagccctgaagctagtagtatctctgttgaggaatacttgaaagggcgatggagccgcactgctagcttcaacttcaactaataatttttactagtttaaccccgaaaatcccaaaatttgacgatattgtaagttgtgtaaattgtaatcgattttctgagattctcaagctttaagttgtgtcaatttaggaagagtgaatagctcttgtagagaggacttaagttggaatttgtcttctttgttttgtcagagcagaaaatgtttcaagtgttccactttcatatcggttttaaaagttt

SEQ ID NO: 31279 - protein, 705 aa, Arabidopsis thaliana
  misc_feature (1)..(705): Ceres Seq. ID no. 13579234
MKPTGEGGGEVAGAVAEGSALLIVGVKPDEWSREVLTWSLVNVARPGDRIVALHVLDYSLEGSTSLISLVRNFDTMLGVYESFCNLKQVDLKLKVFRGKSARKVLVQEVKSCGATSLIVGSSRKHHTIRSSASLAKYCARNLAKDVSVFAVKSGKIMFRRVPNTNGADGPQMNIPSLVCGSPDIAIEAAKIGNSFSPARTSSRWTRTSRSSSLQSPDSLGVDNLLALVPVQTNETDSGSLESGPGWHFLRGLYGNNRKSWTKVSAKKAVLQWVSRLRGRHSETVIYLDRKRSDSGCDEDCSSSIDGEDVSISRFGSELMQSPLSPFIGSNNIPEELEGLHEKYSSTCRLFTYEEVLSITSNFASENLVGEGGNSYVYRGDLPDGRELAVKILKPCLDVLKEFILEIEVITSVHHKNIVSLFGFCFENNNLMLVYDYLPRGSLEENLHGNRKDAKKFGWMERYKVAVGVAEALDYLHNTHDPEVIHRDVKSSNVLLADDFEPQLSDFGFASLASSTSQHVAGGDIAGTFGYLAPEYFMHGKVTDKIDVYAFGVVLLELISGRKPICVDQSKGQESLVLWANPILDSGKFAQLLDPSLENDNSNDLIEKLLLAATLCIKRTPHDRPQIGLVLKILQGEEEATEWGKQQVRASEDVSAYLTNIESHINLALLDLEDDAASDSSPEASSISVEEYLKGRWSRTASFNFN

SEQ ID NO: 31280 - protein, 630 aa, Arabidopsis thaliana
  misc_feature (1)..(630): Ceres Seq. ID no. 13579235
MLGVYESFCNLKQVDLKLKVFRGKSARKVLVQEVKSCGATSLIVGSSRKHHTIRSSASLAKYCARNLAKDVSVFAVKSGKIMFRRVPNTNGADGPQMNIPSLVCGSPDIAIEAAKIGNSFSPARTSSRWTRTSRSSSLQSPDSLGVDNLLALVPVQTNETDSGSLESGPGWHFLRGLYGNNRKSWTKVSAKKAVLQWVSRLRGRHSETVIYLDRKRSDSGCDEDCSSSIDGEDVSISRFGSELMQSPLSPFIGSNNIPEELEGLHEKYSSTCRLFTYEEVLSITSNFASENLVGEGGNSYVYRGDLPDGRELAVKILKPCLDVLKEFILEIEVITSVHHKNIVSLFGFCFENNNLMLVYDYLPRGSLEENLHGNRKDAKKFGWMERYKVAVGVAEALDYLHNTHDPEVIHRDVKSSNVLLADDFEPQLSDFGFASLASSTSQHVAGGDIAGTFGYLAPEYFMHGKVTDKIDVYAFGVVLLELISGRKPICVDQSKGQESLVLWANPILDSGKFAQLLDPSLENDNSNDLIEKLLLAATLCIKRTPHDRPQIGLVLKILQGEEEATEWGKQQVRASEDVSAYLTNIESHINLALLDLEDDAASDSSPEASSISVEEYLKGRWSRTASFNFN

SEQ ID NO: 31281 - protein, 549 aa, Arabidopsis thaliana
  misc_feature (1)..(549): Ceres Seq. ID no. 13579236
MFRRVPNTNGADGPQMNIPSLVCGSPDIAIEAAKIGNSFSPARTSSRWTRTSRSSSLQSPDSLGVDNLLALVPVQTNETDSGSLESGPGWHFLRGLYGNNRKSWTKVSAKKAVLQWVSRLRGRHSETVIYLDRKRSDSGCDEDCSSSIDGEDVSISRFGSELMQSPLSPFIGSNNIPEELEGLHEKYSSTCRLFTYEEVLSITSNFASENLVGEGGNSYVYRGDLPDGRELAVKILKPCLDVLKEFILEIEVITSVHHKNIVSLFGFCFENNNLMLVYDYLPRGSLEENLHGNRKDAKKFGWMERYKVAVGVAEALDYLHNTHDPEVIHRDVKSSNVLLADDFEPQLSDFGFASLASSTSQHVAGGDIAGTFGYLAPEYFMHGKVTDKIDVYAFGVVLLELISGRKPICVDQSKGQESLVLWANPILDSGKFAQLLDPSLENDNSNDLIEKLLLAATLCIKRTPHDRPQIGLVLKILQGEEEATEWGKQQVRASEDVSAYLTNIESHINLALLDLEDDAASDSSPEASSISVEEYLKGRWSRTASFNFN

SEQ ID NO: 31282 - DNA, 2765 bp, Arabidopsis thaliana
  misc_feature (1)..(2765): Ceres Seq. ID no. 13579248
atggagcagaagagcgtgttgttgtcagctttaggtgttggtgttgggttagggattgggttagcatcaggtcaaagtttgggaagatgggcaaacgggtcaggttctgttgaagatggactcaccggagaacagattgagcaagagttgattagacaaattgttgatggtagagaaagtactgtcacttttgaagagtttccgtatttcttaagcaagagaactcgagaattgttgacaagtgttgcatatgttcatttaaaagagtatgatatatcgaagcacactcggaatcttgcacctgcaagtaaagccattctactttctggtcctgcggaattttatcagcaaatgcttgcaaaagctttgtctcattactttgaatcaaagctattgttgttagatataactgacttctctattaagatacagagtaaatatggatgcaccaagagagaaccttttcacaagaggtctatttctgagttaacattagataaagtgtcgagtttgatgggttccttctctatgctctctcaacgcgaagttgaaccaagagggacattgcgtcgacacaccagtggaaatgatcttaaatcaaggagtactgagagctctaatcgtcttccaagacacaagagaaatgcttctgctgcttctgatatcagtagcatatcttcccgctcttcgagttctgtttcagcttccagaaaacgcactacaaatctatgtttcgacgagaaacttttcctgcaatcactttacaaggtcttgagttctgtatcggaaacaactccgctaatcatatacttgagagatgttgagaagcttcttgagtcagaaagattctacaagttgttccaaaggctcttgaacaagctctctggtcctgtcttaattcttggctcaagagtattagaacctgaagatgattgccaagaagtagacgaaagtatttccgctctatttccttacaacatcgagatcagaccaccagaagatgaatctcagctcgtgagctggaaatctcggttagaagacgacatgaaaatgattcagtttcaagacaacaagaaccacattgcagaggttcttgctgctaatgatatccaatgcgatgacttgtcttcgatatgccacgcagatacaatgtgtttgagtaaccatattgaggaaattgtggtttctgcaatcacttatcatttgatacacaccaaagaaccagaatacagaaacggaaagcttgtaatatcttccaaaagtttgtctcatggactaagtatattccaagaaggtggaaacagatcatttgaagactcgttgaagctagatacaaacactgactctaagcgaaaaggaggagaagtatgttcaaagagtgagtcaaaatctggtcctgaaaacaaaaacgagtcagaaatatcacttccttcaaacaagaatgacaatccattacctccaaaagcacctgaggttgttcctgataatgagtttgagaagcgtataagaccagaagttataccagcaaatgagattggtgtgacatttgcagatattggttctctagacgaaacaaaagattcgcttcaagaacttgtaatgcttccacttagaagaccggatctttttcaaggcggtcttctcaagccatgtagaggaatcctattattcggtccacctggtactggcaaaacaatgcttgcaaaagcaattgcaaatgaagctggagctagtttcatcaatgtctccatgtctacaatcacttcaaaatggtttggagaagacgaaaagaatgtgagagctctgtttactttagcagctaaagtatctccaacgattatatttgtggatgaagttgatagtatgttgggacaaaggacaagagttggagagcatgaagctatgaggaagattaagaatgagtttatgacacattgggatgggctaatgacgaaacccggtgaaaggattctcgttcttgcagcgacaaacagaccgtttgatcttgatgaagctatcattaggaggtttgagagaagaataatggtgggacttccttcgattgagagcagagagaagatcttgagaactttgttgtcgaaagagaaaacagagaatcttgatttccatgagcttgggcagataacagaaggctacagtggaagtgatctcaagaacttatgcatcacagctgcttatagaccagttagagagctgattcagcaggaaagattgaaagatcaggagaggaagaagagagaagaagcaggaaaaggcacagaagaatcaaaagaagaagaagcagaagcttctgaggaaagagttattacattgagacctttgaacatggaagacatgagaaaagctaaaaaccaggtagctgcgagttttgcatcagaaggagcaggaatgaatgagctaaagcaatggaatgatttgtatggagaaggaggctcaaggaaaaaggaacagctcacttacttcctctgaaaattgcaaacagatattgatgtgtgtttcttgatgcacacgatatatatataacaaagagatcccgcatatcacaaagaaagagtcttcaattacttgttaggccattccatttttagataactttttaggtttcatcttattctctttctttttgtgttttatagaattttctacaaaactatgatttttttttatatgttcatatttatgtcattgtgaatgtgtagttaatgtagtaaagatattttataaaaatattatgattgtttgtt

SEQ ID NO: 31283 - protein, 829 aa, Arabidopsis thaliana
  misc_feature (1)..(829): Ceres Seq. ID no. 13579249
MEQKSVLLSALGVGVGLGIGLASGQSLGRWANGSGSVEDGLTGEQIEQELIRQIVDGRESTVTFEEFPYFLSKRTRELLTSVAYVHLKEYDISKHTRNLAPASKAILLSGPAEFYQQMLAKALSHYFESKLLLLDITDFSIKIQSKYGCTKREPFHKRSISELTLDKVSSLMGSFSMLSQREVEPRGTLRRHTSGNDLKSRSTESSNRLPRHKRNASAASDISSISSRSSSSVSASRKRTTNLCFDEKLFLQSLYKVLSSVSETTPLIIYLRDVEKLLESERFYKLFQRLLNKLSGPVLILGSRVLEPEDDCQEVDESISALFPYNIEIRPPEDESQLVSWKSRLEDDMKMIQFQDNKNHIAEVLAANDIQCDDLSSICHADTMCLSNHIEEIVVSAITYHLIHTKEPEYRNGKLVISSKSLSHGLSIFQEGGNRSFEDSLKLDTNTDSKRKGGEVCSKSESKSGPENKNESEISLPSNKNDNPLPPKAPEVVPDNEFEKRIRPEVIPANEIGVTFADIGSLDETKDSLQELVMLPLRRPDLFQGGLLKPCRGILLFGPPGTGKTMLAKAIANEAGASFINVSMSTITSKWFGEDEKNVRALFTLAAKVSPTIIFVDEVDSMLGQRTRVGEHEAMRKIKNEFMTHWDGLMTKPGERILVLAATNRPFDLDEAIIRRFERRIMVGLPSIESREKILRTLLSKEKTENLDFHELGQITEGYSGSDLKNLCITAAYRPVRELIQQERLKDQERKKREEAGKGTEESKEEEAEASEERVITLRPLNMEDMRKAKNQVAASFASEGAGMNELKQWNDLYGEGGSRKKEQLTYFL

SEQ ID NO: 31284 - protein, 712 aa, Arabidopsis thaliana
  misc_feature (1)..(712): Ceres Seq. ID no. 13579250
MLAKALSHYFESKLLLLDITDFSIKIQSKYGCTKREPFHKRSISELTLDKVSSLMGSFSMLSQREVEPRGTLRRHTSGNDLKSRSTESSNRLPRHKRNASAASDISSISSRSSSSVSASRKRTTNLCFDEKLFLQSLYKVLSSVSETTPLIIYLRDVEKLLESERFYKLFQRLLNKLSGPVLILGSRVLEPEDDCQEVDESISALFPYNIEIRPPEDESQLVSWKSRLEDDMKMIQFQDNKNHIAEVLAANDIQCDDLSSICHADTMCLSNHIEEIVVSAITYHLIHTKEPEYRNGKLVISSKSLSHGLSIFQEGGNRSFEDSLKLDTNTDSKRKGGEVCSKSESKSGPENKNESEISLPSNKNDNPLPPKAPEVVPDNEFEKRIRPEVIPANEIGVTFADIGSLDETKDSLQELVMLPLRRPDLFQGGLLKPCRGILLFGPPGTGKTMLAKAIANEAGASFINVSMSTITSKWFGEDEKNVRALFTLAAKVSPTIIFVDEVDSMLGQRTRVGEHEAMRKIKNEFMTHWDGLMTKPGERILVLAATNRPFDLDEAIIRRFERRIMVGLPSIESREKILRTLLSKEKTENLDFHELGQITEGYSGSDLKNLCITAAYRPVRELIQQERLKDQERKKREEAGKGTEESKEEEAEASEERVITLRPLNMEDMRKAKNQVAASFASEGAGMNELKQWNDLYGEGGSRKKEQLTYFL

SEQ ID NO: 31285 - protein, 658 aa, Arabidopsis thaliana
  misc_feature (1)..(658): Ceres Seq. ID no. 13579251
MGSFSMLSQREVEPRGTLRRHTSGNDLKSRSTESSNRLPRHKRNASAASDISSISSRSSSSVSASRKRTTNLCFDEKLFLQSLYKVLSSVSETTPLIIYLRDVEKLLESERFYKLFQRLLNKLSGPVLILGSRVLEPEDDCQEVDESISALFPYNIEIRPPEDESQLVSWKSRLEDDMKMIQFQDNKNHIAEVLAANDIQCDDLSSICHADTMCLSNHIEEIVVSAITYHLIHTKEPEYRNGKLVISSKSLSHGLSIFQEGGNRSFEDSLKLDTNTDSKRKGGEVCSKSESKSGPENKNESEISLPSNKNDNPLPPKAPEVVPDNEFEKRIRPEVIPANEIGVTFADIGSLDETKDSLQELVMLPLRRPDLFQGGLLKPCRGILLFGPPGTGKTMLAKAIANEAGASFINVSMSTITSKWFGEDEKNVRALFTLAAKVSPTIIFVDEVDSMLGQRTRVGEHEAMRKIKNEFMTHWDGLMTKPGERILVLAATNRPFDLDEAIIRRFERRIMVGLPSIESREKILRTLLSKEKTENLDFHELGQITEGYSGSDLKNLCITAAYRPVRELIQQERLKDQERKKREEAGKGTEESKEEEAEASEERVITLRPLNMEDMRKAKNQVAASFASEGAGMNELKQWNDLYGEGGSRKKEQLTYFL

SEQ ID NO: 31286 - DNA, 3951 bp, Arabidopsis thaliana
  misc_feature (1)..(3951): Ceres Seq. ID no. 13579256
accttctctctatttctctctctctctctctctctctatctctaacttctgcggtggtgatctagaaaatgggagatgggactgagtttgtggttaggtcagatagggaagataagaagcttgctgaggatagaattagtgatgagcaagtagtgaagaatgagttggtgagatctgatgaagtaagggatgataacgaggacgaggtttttgaggaagcgattggttcagagaatgatgagcaggaggaggaggaggatccaaaacgtgaattgtttgaatctgatgatttgcctttagtggaaactcttaaaagttctatggttgagcatgaagtggaggattttgaagaggcagtgggtgatttggatgaaacgagtagcaatgaagggggtgttaaagattttacggctgttggagagagccatggtgcgggagaggctgaatttgatgttttggctactaaaatgaatggtgataagggggaaggaggtggaggtggttcttatgataaagttgaatcgagcttggatgttgttgataccactgagaatgctacatcaactaatactaatggttccaatttagcagctgagcatgtgggtattgaaaacggaaagactcattcttttttgggaaatggaatcgcctctcctaaaaataaagaagtggtggctgaagttatccctaaagatgatgggattgaggaaccatggaatgatggcattgaagtcgataattgggaggaaagagttgatggcatacagacagaacaagaggttgaggaaggtgaaggaacaactgaaaatcaatttgagaaacggacagaagaagaggttgtagaaggtgaaggaacaagtaagaatctatttgagaaacagacagaacaagatgttgtggaaggtgaaggaacaagtaaggatctatttgagaatggttcagtatgtatggacagtgagtccgaggcagaaagaaatggtgagactggtgccgcctacacaagtaatatcgttactaatgcttcaggtgacaatgaagtatcaagtgctgtgacttcatctccattggaggaatctagttccggggaaaagggagagactgaaggggacagtacttgtttaaaaccagagcaacacttggcttcttcgccgcactcatatcctgagtcaactgaagttcacagcaatagtggctcccctggggtaactagtagagaacacaaaccagttcaaagtgctaatggaggacatgatgttcagagtcctcaaccaaataaggagcttgagaagcagcaaagcagcagagtacatgtagatccagagattacagaaaattcacatgtggaaacagaacctgaggtagtaagttctgtttcaccaacagagtctagaagtaatcctgcggcattaccacctgctcgtccagcaggtcttggtcgtgcttctcctcttttggaacctgcatcacgtgctcctcaacagtctcgcgtcaatgggaatgggtctcacaatcagtttcagcaagctgaagactctaccactacagaggctgatgagcatgatgagacccgcgagaagctccagttgatcagggtaaaatttttgaggcttgcacatagactagggcaaaccccgcataatgttgttgttgctcaggttttatacaggcttggattggctgagcagttgaggggcagaaatggaagccgtgttggtgcttttagttttgatcgcgctagtgccatggcagaacagcttgaggctgctggacaggatccacttgatttttcttgtacgattatggttctcggaaaaagtggggttggtaaaagtgcaacgatcaattctatatttgatgaagtgaaattttgtactgatgcattccagatggggacaaagagggttcaagatgttgagggtttggttcagggaattaaggtacgggtgattgacactcccggtctcttaccttcctggtctgatcaagccaagaatgagaagatcctgaattctgttaaggctttcatcaagaagaatccacctgacattgtactatatcttgataggttggatatgcaaagcagagattctggtgacatgcctctcctgcgcaccataagtgatgtttttggtccttcgatatggtttaatgccattgtgggtttgactcatgccgcttctgttccaccagatggcccaaatggcactgcttctagctatgatatgtttgttacacaacgttctcatgtcatccagcaggccattcgccaagcagctggagatatgaggctcatgaaccctgtttctttagttgagaatcactcagcttgcaggactaatcgggcaggccagagagtattaccgaatggccaagtgtggaagccacatttgttgctactctcatttgcatctaagattctagcagaagcaaatgctcttttgaagttgcaagataatattccagggagaccatttgcagctcggtccaaggctccgccattaccatttctcctttcatcgcttctgcaatcaagaccacaacctaagcttcctgaacagcagtatggtgatgaagaagatgaagatgatttagaagaatcatcagattcagacgaagaatcagagtatgatcagcttcctccgtttaagagtttgactaaagctcagatggctacgcttagtaaatctcagaagaagcagtatctcgatgaaatggagtaccgagagaaacttttaatgaagaagcaaatgaaagaggaaagaaagagacgtaagatgtttaagaaatttgctgcagagattaaagatttgcctgatgggtatagtgaaaatgtggaagaggagagtggtggacctgcatcagttccagttcctatgccagatttatctctacctgcgtcttttgactctgataaccctactcaccgctaccggtaccttgattcctccaatcagtggcttgttaggccagtcctggaaactcatgggtgggatcatgatattggttatgaaggtgtgaatgcagaacggctctttgttgtaaaagaaaaaataccaatatctgtctcaggtcaagtgacaaaagacaagaaggatgcaaatgtgcagctagaaatggccagctcggttaaacatggagagggtaaatcaacttccctaggtttcgacatgcaaactgttggaaaggaattggcttatactcttcgaagcgaaacgagatttaacaatttcaggagaaacaaggctgcagctggtctttctgtaacacacttgggtgattcggtttctgcggggttgaaagtcgaagataagtttattgctagtaaatggttcagaatcgtaatgtctggtggagctatgactagtcggggagattttgcttatggtggtactttggaagctcagttgagagataaagattatccgcttggtcggtttttgactactcttggactttctgtaatggattggcacggtgatcttgctattggagggaacatacagtctcaggttcccattggacgttcctctaatttaattgctcgtgctaatctgaacaatagaggagcagggcaagtaagtgttcgtgttaacagctccgagcagctccaacttgctatggttgcgattgttcctctcttcaagaagctacttagttattattacccgcaaacgcaatatggacaatgattaagaaacatttaggctgatttcacttccatccctttgcactggagtattaggaatcgattagtcacaagaacatgttagagtgagttgaaaaggatctgtctggtagcaagagaccaattgttggaggaaagtttgtgtcttgaaatagccagaacataacacgttccttgtctgatatataatagctcagtggtttgtttttcttctatttctaagaccttgtgatctcccttatgaatgaagcatatctacttttgtc

SEQ ID NO: 31287 - protein, 1206 aa, Arabidopsis thaliana
  misc_feature (1)..(1206): Ceres Seq. ID no. 13579257
MGDGTEFVVRSDREDKKLAEDRISDEQVVKNELVRSDEVRDDNEDEVFEEAIGSENDEQEEEEDPKRELFESDDLPLVETLKSSMVEHEVEDFEEAVGDLDETSSNEGGVKDFTAVGESHGAGEAEFDVLATKMNGDKGEGGGGGSYDKVESSLDVVDTTENATSTNTNGSNLAAEHVGIENGKTHSFLGNGIASPKNKEVVAEVIPKDDGIEEPWNDGIEVDNWEERVDGIQTEQEVEEGEGTTENQFEKRTEEEVVEGEGTSKNLFEKQTEQDVVEGEGTSKDLFENGSVCMDSESEAERNGETGAAYTSNIVTNASGDNEVSSAVTSSPLEESSSGEKGETEGDSTCLKPEQHLASSPHSYPESTEVHSNSGSPGVTSREHKPVQSANGGHDVQSPQPNKELEKQQSSRVHVDPEITENSHVETEPEVVSSVSPTESRSNPAALPPARPAGLGRASPLLEPASRAPQQSRVNGNGSHNQFQQAEDSTTTEADEHDETREKLQLIRVKFLRLAHRLGQTPHNVVVAQVLYRLGLAEQLRGRNGSRVGAFSFDRASAMAEQLEAAGQDPLDFSCTIMVLGKSGVGKSATINSIFDEVKFCTDAFQMGTKRVQDVEGLVQGIKVRVIDTPGLLPSWSDQAKNEKILNSVKAFIKKNPPDIVLYLDRLDMQSRDSGDMPLLRTISDVFGPSIWFNAIVGLTHAASVPPDGPNGTASSYDMFVTQRSHVIQQAIRQAAGDMRLMNPVSLVENHSACRTNRAGQRVLPNGQVWKPHLLLLSFASKILAEANALLKLQDNIPGRPFAARSKAPPLPFLLSSLLQSRPQPKLPEQQYGDEEDEDDLEESSDSDEESEYDQLPPFKSLTKAQMATLSKSQKKQYLDEMEYREKLLMKKQMKEERKRRKMFKKFAAEIKDLPDGYSENVEEESGGPASVPVPMPDLSLPASFDSDNPTHRYRYLDSSNQWLVRPVLETHGWDHDIGYEGVNAERLFVVKEKIPISVSGQVTKDKKDANVQLEMASSVKHGEGKSTSLGFDMQTVGKELAYTLRSETRFNNFRRNKAAAGLSVTHLGDSVSAGLKVEDKFIASKWFRIVMSGGAMTSRGDFAYGGTLEAQLRDKDYPLGRFLTTLGLSVMDWHGDLAIGGNIQSQVPIGRSSNLIARANLNNRGAGQVSVRVNSSEQLQLAMVAIVPLFKKLLSYYYPQTQYGQ

SEQ ID NO: 31288 - protein, 1122 aa, Arabidopsis thaliana
  misc_feature (1)..(1122): Ceres Seq. ID no. 13579258
MVEHEVEDFEEAVGDLDETSSNEGGVKDFTAVGESHGAGEAEFDVLATKMNGDKGEGGGGGSYDKVESSLDVVDTTENATSTNTNGSNLAAEHVGIENGKTHSFLGNGIASPKNKEVVAEVIPKDDGIEEPWNDGIEVDNWEERVDGIQTEQEVEEGEGTTENQFEKRTEEEVVEGEGTSKNLFEKQTEQDVVEGEGTSKDLFENGSVCMDSESEAERNGETGAAYTSNIVTNASGDNEVSSAVTSSPLEESSSGEKGETEGDSTCLKPEQHLASSPHSYPESTEVHSNSGSPGVTSREHKPVQSANGGHDVQSPQPNKELEKQQSSRVHVDPEITENSHVETEPEVVSSVSPTESRSNPAALPPARPAGLGRASPLLEPASRAPQQSRVNGNGSHNQFQQAEDSTTTEADEHDETREKLQLIRVKFLRLAHRLGQTPHNVVVAQVLYRLGLAEQLRGRNGSRVGAFSFDRASAMAEQLEAAGQDPLDFSCTIMVLGKSGVGKSATINSIFDEVKFCTDAFQMGTKRVQDVEGLVQGIKVRVIDTPGLLPSWSDQAKNEKILNSVKAFIKKNPPDIVLYLDRLDMQSRDSGDMPLLRTISDVFGPSIWFNAIVGLTHAASVPPDGPNGTASSYDMFVTQRSHVIQQAIRQAAGDMRLMNPVSLVENHSACRTNRAGQRVLPNGQVWKPHLLLLSFASKILAEANALLKLQDNIPGRPFAARSKAPPLPFLLSSLLQSRPQPKLPEQQYGDEEDEDDLEESSDSDEESEYDQLPPFKSLTKAQMATLSKSQKKQYLDEMEYREKLLMKKQMKEERKRRKMFKKFAAEIKDLPDGYSENVEEESGGPASVPVPMPDLSLPASFDSDNPTHRYRYLDSSNQWLVRPVLETHGWDHDIGYEGVNAERLFVVKEKIPISVSGQVTKDKKDANVQLEMASSVKHGEGKSTSLGFDMQTVGKELAYTLRSETRFNNFRRNKAAAGLSVTHLGDSVSAGLKVEDKFIASKWFRIVMSGGAMTSRGDFAYGGTLEAQLRDKDYPLGRFLTTLGLSVMDWHGDLAIGGNIQSQVPIGRSSNLIARANLNNRGAGQVSVRVNSSEQLQLAMVAIVPLFKKLLSYYYPQTQYGQ

SEQ ID NO: 31289 - protein, 1073 aa, Arabidopsis thaliana
  misc_feature (1)..(1073): Ceres Seq. ID no. 13579259
MNGDKGEGGGGGSYDKVESSLDVVDTTENATSTNTNGSNLAAEHVGIENGKTHSFLGNGIASPKNKEVVAEVIPKDDGIEEPWNDGIEVDNWEERVDGIQTEQEVEEGEGTTENQFEKRTEEEVVEGEGTSKNLFEKQTEQDVVEGEGTSKDLFENGSVCMDSESEAERNGETGAAYTSNIVTNASGDNEVSSAVTSSPLEESSSGEKGETEGDSTCLKPEQHLASSPHSYPESTEVHSNSGSPGVTSREHKPVQSANGGHDVQSPQPNKELEKQQSSRVHVDPEITENSHVETEPEVVSSVSPTESRSNPAALPPARPAGLGRASPLLEPASRAPQQSRVNGNGSHNQFQQAEDSTTTEADEHDETREKLQLIRVKFLRLAHRLGQTPHNVVVAQVLYRLGLAEQLRGRNGSRVGAFSFDRASAMAEQLEAAGQDPLDFSCTIMVLGKSGVGKSATINSIFDEVKFCTDAFQMGTKRVQDVEGLVQGIKVRVIDTPGLLPSWSDQAKNEKILNSVKAFIKKNPPDIVLYLDRLDMQSRDSGDMPLLRTISDVFGPSIWFNAIVGLTHAASVPPDGPNGTASSYDMFVTQRSHVIQQAIRQAAGDMRLMNPVSLVENHSACRTNRAGQRVLPNGQVWKPHLLLLSFASKILAEANALLKLQDNIPGRPFAARSKAPPLPFLLSSLLQSRPQPKLPEQQYGDEEDEDDLEESSDSDEESEYDQLPPFKSLTKAQMATLSKSQKKQYLDEMEYREKLLMKKQMKEERKRRKMFKKFAAEIKDLPDGYSENVEEESGGPASVPVPMPDLSLPASFDSDNPTHRYRYLDSSNQWLVRPVLETHGWDHDIGYEGVNAERLFVVKEKIPISVSGQVTKDKKDANVQLEMASSVKHGEGKSTSLGFDMQTVGKELAYTLRSETRFNNFRRNKAAAGLSVTHLGDSVSAGLKVEDKFIASKWFRIVMSGGAMTSRGDFAYGGTLEAQLRDKDYPLGRFLTTLGLSVMDWHGDLAIGGNIQSQVPIGRSSNLIARANLNNRGAGQVSVRVNSSEQLQLAMVAIVPLFKKLLSYYYPQTQYGQ

SEQ ID NO: 31290 - DNA, 2895 bp, Arabidopsis thaliana
  misc_feature (1)..(2895): Ceres Seq. ID no. 13579276
atgatgataccggaactagggagaagaccgatgcatagaggtaacgaagattcatcttttggggatgattacgagaaagagattggagtattgcttggtgagcagcagagaaggcaagtagaggcggatgagcttgagagagagcttaacttgtatagaagtggctctgctccaccgactgttgatggttctcttagtgctgccggagggctttttagcggcggaggtggggcttcttttctggaatttggtggagttaataagggtaatgggtttggtggtgatgatgaggagtttaggaaagatccagcttacttgtcttattactatgctaatatgaagttgaatccgaggttgccacctcctttgatgtctagggaggatttgagggttgctcagaggcttaaagggagtaataatgtgttaggtggtgttggggataggagaaaagtgaatgacagtcggtctttgttctctatgccacctggttttgaggctggaaaacctggtgcttctgcttctgagtgggatgctaatggattgattggtttgggacttggaggcaagcagaagagttttgctgatatctttcaggcggatatggggcatcctgttgtacagcagccctcacgtcctgctagtcgtaatacctttgatgagaatgttgactctaataataacctgtctccatctgcatcacaaggcattggagcgccatctccatactgctatgcagctgttctgggttcatctttgtctagaaatggaactccagatccacagggcattgctagggtgcctagtccttgccttactcccattggcagtggaagagtgagttcaaatgataagaggaacacaagtaatcaaagcccgttcaacggtgttacatctggtctcaacgagtcttctgatcttgtcaatgctttatccggcttgaacctgtcaggcactggcgggctagatgaacgtggtcaggctgagcaagatgtcgaaaaggtcaggaactatatgtttggactgcaagatgggcataatgaagtcaatccacatgggttcccaaacagatctgatcaagctaggggaactgcttcgtgcaggaattcacaaatgagagggtcacaaggatctgcatataatagtggaagtggagtagctaatccttaccagcatcatgatagcccaaactattacgcattaaatccagctgtagcttctatgatggctaaccaacttggaactaataactattctccaatgtatgaaaatgcttctgccactttgggatattctgcaatggactccagacttcatggtggaagttttgtttcttctggtcaaaacctctctgaatcacgaaatattggcagggtcggtaatcgaatgatggaaggaggtacgggtcacccgtcacatcttgcagacccgatgtatcatcagtatgcaaggttctctgaaaatgctgattcgtttgatcttcttaatgacccttcaatggacaggaactatggtaattcatacatgaatatgcttgaaattcagagggcttatctcggatctcagaaatcacagtatggtcttccttacaaatcagggagccctaacagccatagctattatggcagtccaacatttgggtctaatatgtcatatcctggcagcccattggctcatcatggtatgccaaactctcttatgtcaccttacagccctatgagacgaggtgaagtaaatatgcgatatcccgctgcaacaagaaactatactggaggggtaatgggttcttggcacatggatgctagtttggatgaaggatttggatcttcaatgcttgaagagttcaaaagtaacaaaacaagagggttcgaactttctgaaatagctggccatgttgtagagttcagttcggatcagtatggaagccggtttattcagcagaaactcgagacagcaacaactgatgagaaaaacatggtttatgaggagatcatgccaaaagctcttgccctgatgactgacgtttttggaaactatgtgattcagaagttctttgagcatggactcccaccacagagaagagaattgggagagaaactcattgacaatgttttgcctcttagcttacagatgtatggttgtcgtgtcatccagaaggcaattgaggtggttgatctagaccagaaaatccaaatggtcaaagaacttgatggacatgtgatgcgatgtgtacgtgatcagaatgggaaccatgtggttcaaaagtgtattgaatgtgtgcctgaagaaaacattgagtttattatttcaactttctttggccatgtggtgaccctctccactcacccatacgggtgccgtgttattcagagagtattggaacactgccataaccctgatacacagagtaaggttatggaagaaatcctgtccactgttagtatgctgacccaagatcagtatggaaactatgttgttcagcatgtactggagcatggaaagcctgatgagcgcactgtgataatcaaagagttagcggggaagattgttcagatgagccaacagaagtttgcatcaaacgttgttgagaagtgtttgacttttggaggtcctgaggaacgggaattgctggtgaatgagatgctgggcacaactgatgaaaacgagcctcttcaggcgatgatgaaggatcagtttgcaaactatgtagtgcaaaaagtcctggagacatgtgatgaccaacagcgtgaactgatactgactcgtattaaagtgcatctgaatgctctaaagaaatacacttacggaaagcatatcgttgcccgtgttgaaaaactcgttgctgctggagagaggagaatggctttgcagtcattaccccagcctctggtggcgtaa

SEQ ID NO: 31291 - protein, 964 aa, Arabidopsis thaliana
  misc_feature (1)..(964): Ceres Seq. ID no. 13579277
MMIPELGRRPMHRGNEDSSFGDDYEKEIGVLLGEQQRRQVEADELERELNLYRSGSAPPTVDGSLSAAGGLFSGGGGASFLEFGGVNKGNGFGGDDEEFRKDPAYLSYYYANMKLNPRLPPPLMSREDLRVAQRLKGSNNVLGGVGDRRKVNDSRSLFSMPPGFEAGKPGASASEWDANGLIGLGLGGKQKSFADIFQADMGHPVVQQPSRPASRNTFDENVDSNNNLSPSASQGIGAPSPYCYAAVLGSSLSRNGTPDPQGIARVPSPCLTPIGSGRVSSNDKRNTSNQSPFNGVTSGLNESSDLVNALSGLNLSGTGGLDERGQAEQDVEKVRNYMFGLQDGHNEVNPHGFPNRSDQARGTASCRNSQMRGSQGSAYNSGSGVANPYQHHDSPNYYALNPAVASMMANQLGTNNYSPMYENASATLGYSAMDSRLHGGSFVSSGQNLSESRNIGRVGNRMMEGGTGHPSHLADPMYHQYARFSENADSFDLLNDPSMDRNYGNSYMNMLEIQRAYLGSQKSQYGLPYKSGSPNSHSYYGSPTFGSNMSYPGSPLAHHGMPNSLMSPYSPMRRGEVNMRYPAATRNYTGGVMGSWHMDASLDEGFGSSMLEEFKSNKTRGFELSEIAGHVVEFSSDQYGSRFIQQKLETATTDEKNMVYEEIMPKALALMTDVFGNYVIQKFFEHGLPPQRRELGEKLIDNVLPLSLQMYGCRVIQKAIEVVDLDQKIQMVKELDGHVMRCVRDQNGNHVVQKCIECVPEENIEFIISTFFGHVVTLSTHPYGCRVIQRVLEHCHNPDTQSKVMEEILSTVSMLTQDQYGNYVVQHVLEHGKPDERTVIIKELAGKIVQMSQQKFASNVVEKCLTFGGPEERELLVNEMLGTTDENEPLQAMMKDQFANYVVQKVLETCDDQQRELILTRIKVHLNALKKYTYGKHIVARVEKLVAAGERRMALQSLPQPLVA

SEQ ID NO: 31292 - protein, 963 aa, Arabidopsis thaliana
  misc_feature (1)..(963): Ceres Seq. ID no. 13579278
MIPELGRRPMHRGNEDSSFGDDYEKEIGVLLGEQQRRQVEADELERELNLYRSGSAPPTVDGSLSAAGGLFSGGGGASFLEFGGVNKGNGFGGDDEEFRKDPAYLSYYYANMKLNPRLPPPLMSREDLRVAQRLKGSNNVLGGVGDRRKVNDSRSLFSMPPGFEAGKPGASASEWDANGLIGLGLGGKQKSFADIFQADMGHPVVQQPSRPASRNTFDENVDSNNNLSPSASQGIGAPSPYCYAAVLGSSLSRNGTPDPQGIARVPSPCLTPIGSGRVSSNDKRNTSNQSPFNGVTSGLNESSDLVNALSGLNLSGTGGLDERGQAEQDVEKVRNYMFGLQDGHNEVNPHGFPNRSDQARGTASCRNSQMRGSQGSAYNSGSGVANPYQHHDSPNYYALNPAVASMMANQLGTNNYSPMYENASATLGYSAMDSRLHGGSFVSSGQNLSESRNIGRVGNRMMEGGTGHPSHLADPMYHQYARFSENADSFDLLNDPSMDRNYGNSYMNMLEIQRAYLGSQKSQYGLPYKSGSPNSHSYYGSPTFGSNMSYPGSPLAHHGMPNSLMSPYSPMRRGEVNMRYPAATRNYTGGVMGSWHMDASLDEGFGSSMLEEFKSNKTRGFELSEIAGHVVEFSSDQYGSRFIQQKLETATTDEKNMVYEEIMPKALALMTDVFGNYVIQKFFEHGLPPQRRELGEKLIDNVLPLSLQMYGCRVIQKAIEVVDLDQKIQMVKELDGHVMRCVRDQNGNHVVQKCIECVPEENIEFIISTFFGHVVTLSTHPYGCRVIQRVLEHCHNPDTQSKVMEEILSTVSMLTQDQYGNYVVQHVLEHGKPDERTVIIKELAGKIVQMSQQKFASNVVEKCLTFGGPEERELLVNEMLGTTDENEPLQAMMKDQFANYVVQKVLETCDDQQRELILTRIKVHLNALKKYTYGKHIVARVEKLVAAGERRMALQSLPQPLVA

SEQ ID NO: 31293 - protein, 954 aa, Arabidopsis thaliana
  misc_feature (1)..(954): Ceres Seq. ID no. 13579279
MHRGNEDSSFGDDYEKEIGVLLGEQQRRQVEADELERELNLYRSGSAPPTVDGSLSAAGGLFSGGGGASFLEFGGVNKGNGFGGDDEEFRKDPAYLSYYYANMKLNPRLPPPLMSREDLRVAQRLKGSNNVLGGVGDRRKVNDSRSLFSMPPGFEAGKPGASASEWDANGLIGLGLGGKQKSFADIFQADMGHPVVQQPSRPASRNTFDENVDSNNNLSPSASQGIGAPSPYCYAAVLGSSLSRNGTPDPQGIARVPSPCLTPIGSGRVSSNDKRNTSNQSPFNGVTSGLNESSDLVNALSGLNLSGTGGLDERGQAEQDVEKVRNYMFGLQDGHNEVNPHGFPNRSDQARGTASCRNSQMRGSQGSAYNSGSGVANPYQHHDSPNYYALNPAVASMMANQLGTNNYSPMYENASATLGYSAMDSRLHGGSFVSSGQNLSESRNIGRVGNRMMEGGTGHPSHLADPMYHQYARFSENADSFDLLNDPSMDRNYGNSYMNMLEIQRAYLGSQKSQYGLPYKSGSPNSHSYYGSPTFGSNMSYPGSPLAHHGMPNSLMSPYSPMRRGEVNMRYPAATRNYTGGVMGSWHMDASLDEGFGSSMLEEFKSNKTRGFELSEIAGHVVEFSSDQYGSRFIQQKLETATTDEKNMVYEEIMPKALALMTDVFGNYVIQKFFEHGLPPQRRELGEKLIDNVLPLSLQMYGCRVIQKAIEVVDLDQKIQMVKELDGHVMRCVRDQNGNHVVQKCIECVPEENIEFIISTFFGHVVTLSTHPYGCRVIQRVLEHCHNPDTQSKVMEEILSTVSMLTQDQYGNYVVQHVLEHGKPDERTVIIKELAGKIVQMSQQKFASNVVEKCLTFGGPEERELLVNEMLGTTDENEPLQAMMKDQFANYVVQKVLETCDDQQRELILTRIKVHLNALKKYTYGKHIVARVEKLVAAGERRMALQSLPQPLVA

SEQ ID NO: 31294 - DNA, 2290 bp, Arabidopsis thaliana
  misc_feature (1)..(2290): Ceres Seq. ID no. 13579309
atcactttgaaatctcaaaagacaccaagcaaaaaaacaaagacagacaaaaaaaaaagagacagaaagaaaaagaaaaaaagtaaattgtccgaactaccttcttatcctttttatcatctcaatgttagaaaatatgatcaattctctagaattagatcggcatagttttcctgatgatttcatctttgggacagctgcctcggcgtttcagtacgaaggtgcaacaagtgaaggtggcaagtctccaactatatgggatcacttcaccctctcgtatccagaaaggaccaaaatgcataatgcagatgtagcaattgatttttatcatcgttacaaggatggcataaaattgatgaaggagctaaacatggacgctttccgattttcaatctcgtgggcaagattaatacccagtggaaagctaaaggatggagtaaacaaagaaggtgtacaattctacaaggatctcatagacgaacttcttgctaatgacatacaaccttcgatgacgctctatcattgggaccacccacaatctttggaggacgaatatggtggctttctaagccctaaaatcgtagaagattttcgagattttgccagaatttgttttgaagagtttggagataaagttaagatgtggacaacaatcaacgaaccttatataatgactgttgcgggttatgatcaaggtaacaaggcggctggacgatgctcaaaatgggtaaacgaaaagtgtcaggctggagattcgagaaccgagccttacattgtttcacatcacactcttcttgcccatgccgctgcagtggaagaaattcgaaaatgtgaaaaaacttcgcatgatggccaaattgggatagtactatcaccaagatggttcgagccttatcattccgattcaactgacgataaagaagcagctgaacgagctcttgcctttgaaattggatggcatcttgatccagtcattcacggagattatccagagattgtaaaaaagtacgcgggaaataaattaccttcatttactgttgaacaatcaaagatgttacaaaattcatcagatttcgttagaattaattactacacggctcgcttcgctgctcatcttcctcacatagaccctgaaaaacctcgtttcaaaactgaccaccatgtggaatggaaactgactaatcacagtggtcacatcatcggacctggggtacgtatttacgtctttttttcataactatcaatttcaaaagctacatgtaatcattctaagatattttaaattttgtattatatatcctcaggaagaaaggggcttcttattttcacacccggaaggcttacgaaaagttcttaactatattaaagagagatacaataacatgccagtctacatcaaagaaaatggtcaaaaactctttccttttcttttttttgctaaagcagaaagtttttttttgttaactagaaattcagaaaactttttagtacgtagttatttaactaaagatttttttatttttttattttttaactctaccacacattaataatatcctagcagtgaattgaaactgaagtttgatttaaatatatttccctaaccagttcaacaaactgatttaaaaaaaaaaaaaaatggtgtgactattaataatttacgttgattactgaattacaggaattaatgacaacgacgacggtacaaaaccaagagaagaaattgtgaaggacacatttaggattgaataccataagacacatttcgaagaacttcacaaagctatagtggaagatgggtgtgacgtaagaggatattacgcatggtcattgatggacaattttgaatgggagcatggatacactgcaagatttggtctatactatgttgattttgtcaatggtctcaaacgttatccaaaagattcggtcaaatggtttaagcggttccttaagaaatcggtcgtcggagagagtaacaaagaggaggtagaggagatgtcacgcgcggaagggaataagacttttaagggtttcgaagaatcggcgggtttctttgcatctttcatggcaatgaaccaatcgaggagagatgaggagaataatcgttgctcctttgattttcctcatactcattttggtgttttgcaaggcatagagaacccatcttcattttattgatttcaaatcccttatgtttttaaattccttatggttggacatgtagttaattagaatttagctcatgttaatatatgaacattttcatggtaatatttttcttcttggg

SEQ ID NO: 31295 - protein, 370 aa, Arabidopsis thaliana
  misc_feature (1)..(370): Ceres Seq. ID no. 13579310
MLENMINSLELDRHSFPDDFIFGTAASAFQYEGATSEGGKSPTIWDHFTLSYPERTKMHNADVAIDFYHRYKDGIKLMKELNMDAFRFSISWARLIPSGKLKDGVNKEGVQFYKDLIDELLANDIQPSMTLYHWDHPQSLEDEYGGFLSPKIVEDFRDFARICFEEFGDKVKMWTTINEPYIMTVAGYDQGNKAAGRCSKWVNEKCQAGDSRTEPYIVSHHTLLAHAAAVEEIRKCEKTSHDGQIGIVLSPRWFEPYHSDSTDDKEAAERALAFEIGWHLDPVIHGDYPEIVKKYAGNKLPSFTVEQSKMLQNSSDFVRINYYTARFAAHLPHIDPEKPRFKTDHHVEWKLTNHSGHIIGPGVRIYVFFS

SEQ ID NO: 31296 - protein, 366 aa, Arabidopsis thaliana
  misc_feature (1)..(366): Ceres Seq. ID no. 13579311
MINSLELDRHSFPDDFIFGTAASAFQYEGATSEGGKSPTIWDHFTLSYPERTKMHNADVAIDFYHRYKDGIKLMKELNMDAFRFSISWARLIPSGKLKDGVNKEGVQFYKDLIDELLANDIQPSMTLYHWDHPQSLEDEYGGFLSPKIVEDFRDFARICFEEFGDKVKMWTTINEPYIMTVAGYDQGNKAAGRCSKWVNEKCQAGDSRTEPYIVSHHTLLAHAAAVEEIRKCEKTSHDGQIGIVLSPRWFEPYHSDSTDDKEAAERALAFEIGWHLDPVIHGDYPEIVKKYAGNKLPSFTVEQSKMLQNSSDFVRINYYTARFAAHLPHIDPEKPRFKTDHHVEWKLTNHSGHIIGPGVRIYVFFS

SEQ ID NO: 31297 - protein, 313 aa, Arabidopsis thaliana
  misc_feature (1)..(313): Ceres Seq. ID no. 13579312
MHNADVAIDFYHRYKDGIKLMKELNMDAFRFSISWARLIPSGKLKDGVNKEGVQFYKDLIDELLANDIQPSMTLYHWDHPQSLEDEYGGFLSPKIVEDFRDFARICFEEFGDKVKMWTTINEPYIMTVAGYDQGNKAAGRCSKWVNEKCQAGDSRTEPYIVSHHTLLAHAAAVEEIRKCEKTSHDGQIGIVLSPRWFEPYHSDSTDDKEAAERALAFEIGWHLDPVIHGDYPEIVKKYAGNKLPSFTVEQSKMLQNSSDFVRINYYTARFAAHLPHIDPEKPRFKTDHHVEWKLTNHSGHIIGPGVRIYVFFS

SEQ ID NO: 31298 - DNA, 1443 bp, Arabidopsis thaliana
  misc_feature (1)..(1443): Ceres Seq. ID no. 13579328
atcaaagtttgggataatagtcttatctctttcatccacactaatataaataggatacatacacaacacattacaagaagataaatccaaacttttctttctctctctttcgtttcccattttttctcttattactcatagatcctgattgatctgaaaaaatggtgaagaagcaatcgccattacacgttgtcggtgtgtctgttttgatggtgttgttatgcagtgttaattacagtctctgtgaaaagatcaaaacgtataagctcacaagaggaagcttaagtgttactttcactaactatggtgctgtcatgacctctcttctcctccctgacagacatggaaaacaagacgatgttgttcttggatttgatactgttgatggttacaagaatgatacaacatattttggagcaattgtgggaagagtggctaatagaataggaggtgctaaattcaagttaaatggtcatctctacaaaaccgatcccaacgaaggccgtaacactctccatggtggttcaaagggatttagtgatgtgatttggtcagtccaaaagtatgttcccactagtcacattactttcacatacgatagcttcgacggtgaagaaggttttccgggcaatgtgacggtgaaagtgacgtacatgttgatcggagaaaacaaactcggtgtaaaaatggaagcaaagccactcaacaaacctacaccaatcaacttagctctccacacttactggaacctccacagccacaactccgggaacatcctctcccacaaaattcaactcctcgccggaaaaatcactcccgtcgacgacaaactcattcccaccggagaaatcacctccattaccggaactccttacgatttcctcgagccacgtgagatcggtagccggatccacgaattacccggcggttacgacatcaattacgtgatcgacggaccgatcgggaaacatctgaggaaaactgcggttgtgacggagcaagtcaccgggaggaagatggagctgtggacgaatcagcctggtgttcagttttacacgagtaatatgatgaaacgtgtcgtcggtaaaggtaaagccgtttatgagaaatacggtggcttgtgtttggagactcaaggcttcccagattccgtcaatcacaagaactttccgtcgcagattgttaatcccggcgagagttatttgcatgttatgctcttcagattcactgctcactaatcgggtcgggtcgggtcgggtggggtcgggttattagggcttaatatttccgaataaactcgccaacatcgttgtaatgcaaaattgcaaatgccaataaaaatattcgacttttgcaggaagttgttaaaagttgtttattctcaatggttcgttttgcaaattgttaaaaatattatttttcacaagaaagttctaaatgttt

SEQ ID NO: 31299 - protein, 358 aa, Arabidopsis thaliana
  misc_feature (1)..(358): Ceres Seq. ID no. 13579329
MVKKQSPLHVVGVSVLMVLLCSVNYSLCEKIKTYKLTRGSLSVTFTNYGAVMTSLLLPDRHGKQDDVVLGFDTVDGYKNDTTYFGAIVGRVANRIGGAKFKLNGHLYKTDPNEGRNTLHGGSKGFSDVIWSVQKYVPTSHITFTYDSFDGEEGFPGNVTVKVTYMLIGENKLGVKMEAKPLNKPTPINLALHTYWNLHSHNSGNILSHKIQLLAGKITPVDDKLIPTGEITSITGTPYDFLEPREIGSRIHELPGGYDINYVIDGPIGKHLRKTAVVTEQVTGRKMELWTNQPGVQFYTSNMMKRVVGKGKAVYEKYGGLCLETQGFPDSVNHKNFPSQIVNPGESYLHVMLFRFTAH

SEQ ID NO: 31300 - protein, 342 aa, Arabidopsis thaliana
  misc_feature (1)..(342): Ceres Seq. ID no. 13579330
MVLLCSVNYSLCEKIKTYKLTRGSLSVTFTNYGAVMTSLLLPDRHGKQDDVVLGFDTVDGYKNDTTYFGAIVGRVANRIGGAKFKLNGHLYKTDPNEGRNTLHGGSKGFSDVIWSVQKYVPTSHITFTYDSFDGEEGFPGNVTVKVTYMLIGENKLGVKMEAKPLNKPTPINLALHTYWNLHSHNSGNILSHKIQLLAGKITPVDDKLIPTGEITSITGTPYDFLEPREIGSRIHELPGGYDINYVIDGPIGKHLRKTAVVTEQVTGRKMELWTNQPGVQFYTSNMMKRVVGKGKAVYEKYGGLCLETQGFPDSVNHKNFPSQIVNPGESYLHVMLFRFTAH

SEQ ID NO: 31301 - protein, 307 aa, Arabidopsis thaliana
  misc_feature (1)..(307): Ceres Seq. ID no. 13579331
MTSLLLPDRHGKQDDVVLGFDTVDGYKNDTTYFGAIVGRVANRIGGAKFKLNGHLYKTDPNEGRNTLHGGSKGFSDVIWSVQKYVPTSHITFTYDSFDGEEGFPGNVTVKVTYMLIGENKLGVKMEAKPLNKPTPINLALHTYWNLHSHNSGNILSHKIQLLAGKITPVDDKLIPTGEITSITGTPYDFLEPREIGSRIHELPGGYDINYVIDGPIGKHLRKTAVVTEQVTGRKMELWTNQPGVQFYTSNMMKRVVGKGKAVYEKYGGLCLETQGFPDSVNHKNFPSQIVNPGESYLHVMLFRFTAH

SEQ ID NO: 31302 - DNA, 797 bp, Arabidopsis thaliana
  misc_feature (1)..(797): Ceres Seq. ID no. 13579340
aatttctcctatttccaaaatcttctatttctctctaaaaaaatgtcgaagaacgtttcgagaaactgcttaggatcaatggaagacatcaagaaagtattccaacgattcgacaaaaacaacgatgggaaaatctctatcgatgagcttaaagacgtgataggagctctctctccaaacgcttcacaagaagaaaccaaagcaatgatgaaagagtttgatcttgacggtaatggtttcattgatttggatgagtttgttgctttgtttcaaatcagtgatcaaagtagcaacaatagtgcgattagagatttgaaagaagcttttgatttgtatgatttggatcgtaatggaaggatctcggctaatgagttacactcggttatgaagaatcttggtgagaagtgttcgattcaagattgtcaaaggatgattaataaagttgattctgatggtgatggttgtgttgattttgaagagtttaagaagatgatgatgattaatggtagtgcttgatagaatcgatttagaatttggaaaagtgatatccattttttgtttgtaaatattgtgttttatgatttcgttaatctaatcttttttaggatttaggttaattaggagtttttaattttttaggttttatcgattaatctagaagaatctctatgttgcttctttaatggctctctgacctaatgttagggaatattgttgatgaccttaaataatcgattaacaatacaaaaaaaaaccttttttaaagacatttattaataaggttggtttggtttggt

SEQ ID NO: 31303 - protein, 171 aa, Arabidopsis thaliana
  misc_feature (1)..(171): Ceres Seq. ID no. 13579341
NFSYFQNLLFLSKKMSKNVSRNCLGSMEDIKKVFQRFDKNNDGKISIDELKDVIGALSPNASQEETKAMMKEFDLDGNGFIDLDEFVALFQISDQSSNNSAIRDLKEAFDLYDLDRNGRISANELHSVMKNLGEKCSIQDCQRMINKVDSDGDGCVDFEEFKKMMMINGSA

SEQ ID NO: 31304 - protein, 157 aa, Arabidopsis thaliana
  misc_feature (1)..(157): Ceres Seq. ID no. 13579342
MSKNVSRNCLGSMEDIKKVFQRFDKNNDGKISIDELKDVIGALSPNASQEETKAMMKEFDLDGNGFIDLDEFVALFQISDQSSNNSAIRDLKEAFDLYDLDRNGRISANELHSVMKNLGEKCSIQDCQRMINKVDSDGDGCVDFEEFKKMMMINGSA

SEQ ID NO: 31305 - protein, 145 aa, Arabidopsis thaliana
  misc_feature (1)..(145): Ceres Seq. ID no. 13579343
MEDIKKVFQRFDKNNDGKISIDELKDVIGALSPNASQEETKAMMKEFDLDGNGFIDLDEFVALFQISDQSSNNSAIRDLKEAFDLYDLDRNGRISANELHSVMKNLGEKCSIQDCQRMINKVDSDGDGCVDFEEFKKMMMINGSA

SEQ ID NO: 31306 - DNA, 1812 bp, Arabidopsis thaliana
  misc_feature (1)..(1812): Ceres Seq. ID no. 13579397
ggttttggcacattaccctctttcctgttaaagttgtctcgtctccttctcgtctccttcctcaagcatattctctgcgcttaaagtactttgatggcattgggacacttgtgcagcatccactgtttccttaaaatagggaaacaagaagagcttcttgtcctagatattggtttgcctattcccagtttcttcctcattaactttattggtagcagagcctcatccatctggtgaacttgtgaagcttcctctgtgattcttttggcgattggttagaaatatggtttcttctcagtgttctgttgcaaacaaaaaccagactgggaagccgtttcagaaacatctatctttatccatcagccctccaaaatctgtcttgggtgataaccttgagcttcaattctctgatgtctttggaccaatgcctgaagctaactctgaagaggcctgtgatgttgcttacgacgagcctgctgttgtctacagtcgatcccactcattggttggcccgtctttggttgttagccattctttgaagatgaacaagctcactttacgagaaactgaggactcagttgacttggtggagtgtgttgaaggtgaatcgataaaagagaacgatgaattctctggtaatgatgacactgacagtgagaaatctccagaggaggtctcaggtgtagtaggcattgaggactttgaggtattgaaggttgtgggacaaggtgcatttggaaaagtgtaccaggtgaggaaaaaagacacgtctgagatatacgcgatgaaggtcatgagaaaagataaaattgttgagaagaatcatgctgaatacatgaaagccgagcgcgatattctaaccaaaatcgatcatcctttcattgtgcaacttaaatactcttttcagaccaaatacagattgtatcttgttcttgactttataaacggaggtcatcttttcttccagctctatcaccaagggcttttcagggaggacttggctcgtgtgtacactgcagaaatcgtctctgcagtttcccatctccatgagaaaggcataatgcatagagatcttaaacctgaaaacatactcatggacgtagatggccatgtgatgttaactgattttggtttagcaaaagaatttgaagaaaacacaagatcaaactccatgtgtgggactacggagtatatggcccctgagattgttcgtggaaaaggacatgataaggctgccgactggtggagtgtaggaatccttctgtatgagatgctcactggaaagccgccgtttctcgggagcaaaggaaagatacagcagaaaatcgttaaggacaagatcaagcttccacagtttctgtctaatgaagctcatgccttgctgaaagggctgctgcaaaaagagccagaaaggagactgggaagtggaccgagcggagcagaggagataaaaaaacacaaatggttcaaggcgataaactggaagaagctggaggctagagaagtacaaccaagtttcaagccggcggtttcgggaagacaatgcatagctaattttgacaagtgttggactgacatgtctgttttggattctccagcaagtagtcccaactctgatgctaaggcgaacccttttacaaacttcacatacgtcaggcctcctcattcattccttcatcggaccacatccaacttgtagatgaactataatatgttacccccgcttctgtttttgtaatccgaaacatatgaacatgcacaaaatcaacggttgtttgaagaaacctatttctcgatttaatatattatact

SEQ ID NO: 31307 - protein, 471 aa, Arabidopsis thaliana
  misc_feature (1)..(471): Ceres Seq. ID no. 13579398
MVSSQCSVANKNQTGKPFQKHLSLSISPPKSVLGDNLELQFSDVFGPMPEANSEEACDVAYDEPAVVYSRSHSLVGPSLVVSHSLKMNKLTLRETEDSVDLVECVEGESIKENDEFSGNDDTDSEKSPEEVSGVVGIEDFEVLKVVGQGAFGKVYQVRKKDTSEIYAMKVMRKDKIVEKNHAEYMKAERDILTKIDHPFIVQLKYSFQTKYRLYLVLDFINGGHLFFQLYHQGLFREDLARVYTAEIVSAVSHLHEKGIMHRDLKPENILMDVDGHVMLTDFGLAKEFEENTRSNSMCGTTEYMAPEIVRGKGHDKAADWWSVGILLYEMLTGKPPFLGSKGKIQQKIVKDKIKLPQFLSNEAHALLKGLLQKEPERRLGSGPSGAEEIKKHKWFKAINWKKLEAREVQPSFKPAVSGRQCIANFDKCWTDMSVLDSPASSPNSDAKANPFTNFTYVRPPHSFLHRTTSNL

SEQ ID NO: 31308 - protein, 424 aa, Arabidopsis thaliana
  misc_feature (1)..(424): Ceres Seq. ID no. 13579399
MPEANSEEACDVAYDEPAVVYSRSHSLVGPSLVVSHSLKMNKLTLRETEDSVDLVECVEGESIKENDEFSGNDDTDSEKSPEEVSGVVGIEDFEVLKVVGQGAFGKVYQVRKKDTSEIYAMKVMRKDKIVEKNHAEYMKAERDILTKIDHPFIVQLKYSFQTKYRLYLVLDFINGGHLFFQLYHQGLFREDLARVYTAEIVSAVSHLHEKGIMHRDLKPENILMDVDGHVMLTDFGLAKEFEENTRSNSMCGTTEYMAPEIVRGKGHDKAADWWSVGILLYEMLTGKPPFLGSKGKIQQKIVKDKIKLPQFLSNEAHALLKGLLQKEPERRLGSGPSGAEEIKKHKWFKAINWKKLEAREVQPSFKPAVSGRQCIANFDKCWTDMSVLDSPASSPNSDAKANPFTNFTYVRPPHSFLHRTTSNL

SEQ ID NO: 31309 - protein, 385 aa, Arabidopsis thaliana
  misc_feature (1)..(385): Ceres Seq. ID no. 13579400
MNKLTLRETEDSVDLVECVEGESIKENDEFSGNDDTDSEKSPEEVSGVVGIEDFEVLKVVGQGAFGKVYQVRKKDTSEIYAMKVMRKDKIVEKNHAEYMKAERDILTKIDHPFIVQLKYSFQTKYRLYLVLDFINGGHLFFQLYHQGLFREDLARVYTAEIVSAVSHLHEKGIMHRDLKPENILMDVDGHVMLTDFGLAKEFEENTRSNSMCGTTEYMAPEIVRGKGHDKAADWWSVGILLYEMLTGKPPFLGSKGKIQQKIVKDKIKLPQFLSNEAHALLKGLLQKEPERRLGSGPSGAEEIKKHKWFKAINWKKLEAREVQPSFKPAVSGRQCIANFDKCWTDMSVLDSPASSPNSDAKANPFTNFTYVRPPHSFLHRTTSNL

SEQ ID NO: 31310 - DNA, 439 bp, Arabidopsis thaliana
  misc_feature (1)..(439): Ceres Seq. ID no. 13579417
aaaaaaaaaaacgcaaaaaccaaagatgggtgagatgatcaaagccagacgcatactcctcttctccatcgtattcctcttcttcttctctcaggcctttcttttgtgttcagctgagggtgagcatggctcaagaaatctcgcagtggtgatgaagaaaagggtgaaatacagaggacctcgcaacacaacaacatcctctgcagcctcaactattatgttcccaggctccttccatattggtgctgcttcctctttactccttgctcttcttttataagctcccttgtagtgatcattattgtactgtttgacaatgattcatgtaatttgcttttctcgattgattttgtagaaatttctcaaatggtctaaaattctgtttgtaaattatttgctctgtttcagtattgtgaaagttaataagatatttgaagct

SEQ ID NO: 31311 - protein, 92 aa, Arabidopsis thaliana
  misc_feature (1)..(92): Ceres Seq. ID no. 13579418
KKKTQKPKMGEMIKARRILLFSIVFLFFFSQAFLLCSAEGEHGSRNLAVVMKKRVKYRGPRNTTTSSAASTIMFPGSFHIGAASSLLLALLL

SEQ ID NO: 31312 - protein, 84 aa, Arabidopsis thaliana; identical to SEQ ID NO: 29533
  misc_feature (1)..(84): Ceres Seq. ID no. 13579419

SEQ ID NO: 31313 - protein, 81 aa, Arabidopsis thaliana; identical to SEQ ID NO: 29534
  misc_feature (1)..(81): Ceres Seq. ID no. 13579420

SEQ ID NO: 31314 - DNA, 1904 bp, Arabidopsis thaliana
  misc_feature (1)..(1904): Ceres Seq. ID no. 13579424
gcaaagaacaaaccagtgaaggaaaaatggagatatggttacttatcttgggctctctcttcctctctctccttctcaatttactcctctttcgccgccgtgactcctcctctcttccgttaccacctgaccctaacttcttccctttccttggaaccctccaatggctccggcaaggcttaggtggactcaacaactatctccgctccgtccaccaccgtctcggtcccatcatcacccttcgcatcacttcccgccccgctatcttcgtcgccgatcgttctcttgctcaccaggctctcgttttgaacggtgccgttttcgctgatcgtccaccggctgctccgatcagtaagattatttcgagtaaccaacataacatcagctctagtttatatggagccacgtggcgtcttcttcgccggaatctcacttctgagattcttcacccctcgcgcgtgagatcttactctcacgcgcggcgttgggttcttgagattctttttgatcgatttggtaaaagcagaggtgaagaaccgattgttgttgttgatcatcttcactatgcaatgtttgcgcttcttgttctcatgtgttttggagataagcttgacgagaaacaaatcaaacaggtggaatatgttcagagacgacagcttcttggcttttccagattcaatattctcaatctctggcctaagtttactaaattgattttgcgaaagagatgggaagagtttttccagatgcggagagagcagcatgacgttttgcttccgttgattcgtgctcggagaaagattgttgaagagagaaagaatagatcatcagaggaagaagaagacaacaaagtgtatgtacaatcatacgttgatactctgcttgagctggagcttccagatgagaagaggaagctgaacgaagatgagattgttagtttgtgttcggagtttctcaacggtgggactgatacaacggccaccgcgttgcaatggatcatggcgaacttggtgaaaaacccggagattcagaagaggttatacgaggagatcaaaagcgtagttggggaagaagcaaaggaagtagaggaagaagacgcgcaaaagatgccgtatctaaaggcagtggtgatggagggtctccggagacatcctccgggacattttgtactcccgcacagtgtaactgaggacactgtgttgggaggatacaaagtcccgaagaagggaacaattaatttcatggtggcagagattgggagggatccaatggtgtgggaggaaccaatggcgtttaagccagagaggtttatgggagaagaagaagcggtggacataaccggaagcagagggataaagatgatgccgttcggggcgggtagaaggatttgtccagggattgggctagcgatgctgcatcttgagtactatgtggcgaatatggtgagggagtttgagtggaaagaggtccaaggtcatgaagtggacttgacggagaagtttgagtttaccgtagtcatgaagcattcgcttaaggctcttgctgttcttaggagaagtcactagttgtctacttcttaaacttcagtttagtattcaccaaagactaggtgatgtatgaagaattgaagttatgggcattttgttagctgaagtcaactatggaactatcttttttattaaagtacattttgtaccttggaataaatgatagaaacaacaatccttttattttgtattaaaaggaatcttttatgacgagtgtttttacaagaaaggtacataggtctagaaaagtgtgggatttctagtgtttagtgactagatgatttagaaaagtgtgggattttgatggttgttgatacttttgttgggagaaatcgaaagagtaaaagcmtttgtggt

SEQ ID NO: 31315 - protein, 520 aa, Arabidopsis thaliana
  misc_feature (1)..(520): Ceres Seq. ID no. 15222681
KEQTSEGKMEIWLLILGSLFLSLLLNLLLFRRRDSSSLPLPPDPNFFPFLGTLQWLRQGLGGLNNYLRSVHHRLGPIITLRITSRPAIFVADRSLAHQALVLNGAVFADRPPAAPISKIISSNQHNISSSLYGATWRLLRRNLTSEILHPSRVRSYSHARRWVLEILFDRFGKSRGEEPIVVVDHLHYAMFALLVLMCFGDKLDEKQIKQVEYVQRRQLLGFSRFNILNLWPKFTKLILRKRWEEFFQMRREQHDVLLPLIRARRKIVEERKNRSSEEEEDNKVYVQSYVDTLLELELPDEKRKLNEDEIVSLCSEFLNGGTDTTATALQWIMANLVKNPEIQKRLYEEIKSVVGEEAKEVEEEDAQKMPYLKAVVMEGLRRHPPGHFVLPHSVTEDTVLGGYKVPKKGTINFMVAEIGRDPMVWEEPMAFKPERFMGEEEAVDITGSRGIKMMPFGAGRRICPGIGLAMLHLEYYVANMVREFEWKEVQGHEVDLTEKFEFTVVMKHSLKALAVLRRSH

SEQ ID NO: 31316 - protein, 512 aa, Arabidopsis thaliana
  misc_feature (1)..(512): Ceres Seq. ID no. 15222682
MEIWLLILGSLFLSLLLNLLLFRRRDSSSLPLPPDPNFFPFLGTLQWLRQGLGGLNNYLRSVHHRLGPIITLRITSRPAIFVADRSLAHQALVLNGAVFADRPPAAPISKIISSNQHNISSSLYGATWRLLRRNLTSEILHPSRVRSYSHARRWVLEILFDRFGKSRGEEPIVVVDHLHYAMFALLVLMCFGDKLDEKQIKQVEYVQRRQLLGFSRFNILNLWPKFTKLILRKRWEEFFQMRREQHDVLLPLIRARRKIVEERKNRSSEEEEDNKVYVQSYVDTLLELELPDEKRKLNEDEIVSLCSEFLNGGTDTTATALQWIMANLVKNPEIQKRLYEEIKSVVGEEAKEVEEEDAQKMPYLKAVVMEGLRRHPPGHFVLPHSVTEDTVLGGYKVPKKGTINFMVAEIGRDPMVWEEPMAFKPERFMGEEEAVDITGSRGIKMMPFGAGRRICPGIGLAMLHLEYYVANMVREFEWKEVQGHEVDLTEKFEFTVVMKHSLKALAVLRRSH

SEQ ID NO: 31317 - protein, 331 aa, Arabidopsis thaliana
  misc_feature (1)..(331): Ceres Seq. ID no. 15222683
MFALLVLMCFGDKLDEKQIKQVEYVQRRQLLGFSRFNILNLWPKFTKLILRKRWEEFFQMRREQHDVLLPLIRARRKIVEERKNRSSEEEEDNKVYVQSYVDTLLELELPDEKRKLNEDEIVSLCSEFLNGGTDTTATALQWIMANLVKNPEIQKRLYEEIKSVVGEEAKEVEEEDAQKMPYLKAVVMEGLRRHPPGHFVLPHSVTEDTVLGGYKVPKKGTINFMVAEIGRDPMVWEEPMAFKPERFMGEEEAVDITGSRGIKMMPFGAGRRICPGIGLAMLHLEYYVANMVREFEWKEVQGHEVDLTEKFEFTVVMKHSLKALAVLRRSH

SEQ ID NO: 31318 - DNA, 2967 bp, Arabidopsis thaliana
  misc_feature (1)..(2967): Ceres Seq. ID no. 13579425
atgtctttcgatgagcttctaagatttgtgagtgaagtccaaggagaacggcacgcagggttggactacgtgcaagatatcttccacagcgttaaacaccacaacgtttttcatcaccatggacttgttcatctcaacgccttctatcgctacctcttcagcgataccaactctcctcttcccatgtctggccaggtgcatcatgacatgaaggcgccgttatcgcattactttgtgtacacgggacataactcttacttgactgggaaccaagtgaacagcagaagcagcgtagaaccgatcgtgcaggctctcagaaaaggcgtaaaagtgatcgagctcgacttatggcctaatccttcagggaacgctgctgaagttcgtcatggcaggacgcttacttcgcatgaagatttgcagaaatgtctaaccgccattaaggataacgcgtttcatgtgtctgactatccagtcatcatcactctcgaagatcatttgccacccaagcttcaagcgcaagttgctaagatgttaactaaaacatacagagggatgctgtttcgtcgtgtctcagagagttttaagcattttccatcaccagaagaacttaaggggaagatcctgatctctacgaagcctccaaaggagtatcttgagagcaaaactgtacacaccacaagaactccaacggttaaagagacttcgtggaacagagtagcgaacaagattcttgaagaatataaagatatggagagtgaagctgtaggatatagagacttgatagcaatccacgctgcaaactgcaaagatccttcaaaggattgcttgagtgatgatccagagaagcctatacgggtcagcatggacgagcagtggctagacactatggttaggaccagaggaacggatcttgtcaggtttacacagaggaatctggtgaggatatatccaaagggcacaagagtggactcgtcaaactacgatcctcatgttgggtggacacacggtgctcaaatggttgcttttaacatgcaaggacatgggaagcaactatggataatgcaaggaatgttcagggggaatggtggatgtgggtacgttaaaaagcctcgcatcttgctagacgagcacacactcttcgacccttgcaaaaggtttcccattaagaccactcttaaggttaagatttacactggcgaaggatgggatttggatttccatcatacacactttgatcaatactctcctccagatttcttcgtcaagattggaatagcaggagtaccgagagacacggtctcatacagaacggaaacagctgtcgatcagtggtttcctatatggggcaacgacgagttcctgtttcagctgtctgttccagaactggcgcttctgtggttcaaagtccaagactacgacaatgacacccagaatgatttcgcaggacagacatgtcttcctctgccggaactgaagtccggagttagagccgtccggcttcacgatcgaacaggcaaggcctacaagaacacgaggcttctcgtcagcttcgccttggatcctccttatacgtttcatcatcaacgcaccatggaagaagaaggcagcccagatatcatcatcgttggcgccggtatctccggcctttccaccgctgttggactacacaggcttgggatcagaagcatggtgctggaatcttcggagacactgagagcgacaggatttgcatttaccacttggttcaatgcttggaaggccatggaagctctcggcgtttctcagcatattcgcagtctccatgatcgccttgaaggatgggtggttggaacaatttctgcaggaactcctcccacagagatgctgtttccagaatccgaagaatatgagtctcgatgcgtacagaggaagctgttgttagaggctctagcaggtgagttgcctgaagagaccatcaggttttcgtctaaggttgttcatattgaattgtctggatgctacaagaaggttcatctctccgacgggaccattctcaaaaccaaggttttggtagggtgcgatggagtgtactcagtggttggtaagtggctaggcttcaaaaatcccgctacaactgcccggttagcaatccgagggctcacacattttccggaaggccatggatttgggaaaaggttcttccagttttatggagacggcgttcgttccggttttatcccatgtgaccacaacactgtctactggttcctaacccacacctccactgatatagatgaggagacaaattcggaaatcctcaaagagtttgtgctgaacaagatcaaagacttgcctgaaaacattaagaatgtggtggagaccactgatcttgatagcatggtgatgtctcaactgaagtaccgacctccatgggaactgctatggtcaaacatcacaaaagacaacgtgtgcgttgcaggagatgcacttcacccaatgactcctgatatcggacaaggaggttgctcagccatggaggatggagttatccttgctcgttgtctaggtgaagcgataaaggcaaagagtctgaaaggtgaaacagaagaaaatgaagaagagggttataagaggattgaagaaggtttgaagaagtatgcaggagaaaggaaatggagaagcattgatcttataacaacggcatatacagtaggattcatacagcagagcagagggaagtggatgaacatgttcagagacaggttcctgtcgtcttacctttctaggatgctgctgaaaaagtcccatttcgattgcggaagccttgtcccatgatgattctcaaacataagtcaaaagcttgtgattcttcttgtcatcaccaactgcagaacagttttcacctttggtttgcttcaaagactatctatctgtttagtgttatttcatataacaaactcagaattaataaagtaagtttgtgtagtg

SEQ ID NO: 31319 - protein, 937 aa, Arabidopsis thaliana
  misc_feature (1)..(937): Ceres Seq. ID no. 13579426
MSFDELLRFVSEVQGERHAGLDYVQDIFHSVKHHNVFHHHGLVHLNAFYRYLFSDTNSPLPMSGQVHHDMKAPLSHYFVYTGHNSYLTGNQVNSRSSVEPIVQALRKGVKVIELDLWPNPSGNAAEVRHGRTLTSHEDLQKCLTAIKDNAFHVSDYPVIITLEDHLPPKLQAQVAKMLTKTYRGMLFRRVSESFKHFPSPEELKGKILISTKPPKEYLESKTVHTTRTPTVKETSWNRVANKILEEYKDMESEAVGYRDLIAIHAANCKDPSKDCLSDDPEKPIRVSMDEQWLDTMVRTRGTDLVRFTQRNLVRIYPKGTRVDSSNYDPHVGWTHGAQMVAFNMQGHGKQLWIMQGMFRGNGGCGYVKKPRILLDEHTLFDPCKRFPIKTTLKVKIYTGEGWDLDFHHTHFDQYSPPDFFVKIGIAGVPRDTVSYRTETAVDQWFPIWGNDEFLFQLSVPELALLWFKVQDYDNDTQNDFAGQTCLPLPELKSGVRAVRLHDRTGKAYKNTRLLVSFALDPPYTFHHQRTMEEEGSPDIIIVGAGISGLSTAVGLHRLGIRSMVLESSETLRATGFAFTTWFNAWKAMEALGVSQHIRSLHDRLEGWVVGTISAGTPPTEMLFPESEEYESRCVQRKLLLEALAGELPEETIRFSSKVVHIELSGCYKKVHLSDGTILKTKVLVGCDGVYSVVGKWLGFKNPATTARLAIRGLTHFPEGHGFGKRFFQFYGDGVRSGFIPCDHNTVYWFLTHTSTDIDEETNSEILKEFVLNKIKDLPENIKNVVETTDLDSMVMSQLKYRPPWELLWSNITKDNVCVAGDALHPMTPDIGQGGCSAMEDGVILARCLGEAIKAKSLKGETEENEEEGYKRIEEGLKKYAGERKWRSIDLITTAYTVGFIQQSRGKWMNMFRDRFLSSYLSRMLLKKSHFDCGSLVP

SEQ ID NO: 31320 - protein, 876 aa, Arabidopsis thaliana
  misc_feature (1)..(876): Ceres Seq. ID no. 13579427
MSGQVHHDMKAPLSHYFVYTGHNSYLTGNQVNSRSSVEPIVQALRKGVKVIELDLWPNPSGNAAEVRHGRTLTSHEDLQKCLTAIKDNAFHVSDYPVIITLEDHLPPKLQAQVAKMLTKTYRGMLFRRVSESFKHFPSPEELKGKILISTKPPKEYLESKTVHTTRTPTVKETSWNRVANKILEEYKDMESEAVGYRDLIAIHAANCKDPSKDCLSDDPEKPIRVSMDEQWLDTMVRTRGTDLVRFTQRNLVRIYPKGTRVDSSNYDPHVGWTHGAQMVAFNMQGHGKQLWIMQGMFRGNGGCGYVKKPRILLDEHTLFDPCKRFPIKTTLKVKIYTGEGWDLDFHHTHFDQYSPPDFFVKIGIAGVPRDTVSYRTETAVDQWFPIWGNDEFLFQLSVPELALLWFKVQDYDNDTQNDFAGQTCLPLPELKSGVRAVRLHDRTGKAYKNTRLLVSFALDPPYTFHHQRTMEEEGSPDIIIVGAGISGLSTAVGLHRLGIRSMVLESSETLRATGFAFTTWFNAWKAMEALGVSQHIRSLHDRLEGWVVGTISAGTPPTEMLFPESEEYESRCVQRKLLLEALAGELPEETIRFSSKVVHIELSGCYKKVHLSDGTILKTKVLVGCDGVYSVVGKWLGFKNPATTARLAIRGLTHFPEGHGFGKRFFQFYGDGVRSGFIPCDHNTVYWFLTHTSTDIDEETNSEILKEFVLNKIKDLPENIKNVVETTDLDSMVMSQLKYRPPWELLWSNITKDNVCVAGDALHPMTPDIGQGGCSAMEDGVILARCLGEAIKAKSLKGETEENEEEGYKRIEEGLKKYAGERKWRSIDLITTAYTVGFIQQSRGKWMNMFRDRFLSSYLSRMLLKKSHFDCGSLVP

SEQ ID NO: 31321 - protein, 868 aa, Arabidopsis thaliana
  misc_feature (1)..(868): Ceres Seq. ID no. 13579428
MKAPLSHYFVYTGHNSYLTGNQVNSRSSVEPIVQALRKGVKVIELDLWPNPSGNAAEVRHGRTLTSHEDLQKCLTAIKDNAFHVSDYPVIITLEDHLPPKLQAQVAKMLTKTYRGMLFRRVSESFKHFPSPEELKGKILISTKPPKEYLESKTVHTTRTPTVKETSWNRVANKILEEYKDMESEAVGYRDLIAIHAANCKDPSKDCLSDDPEKPIRVSMDEQWLDTMVRTRGTDLVRFTQRNLVRIYPKGTRVDSSNYDPHVGWTHGAQMVAFNMQGHGKQLWIMQGMFRGNGGCGYVKKPRILLDEHTLFDPCKRFPIKTTLKVKIYTGEGWDLDFHHTHFDQYSPPDFFVKIGIAGVPRDTVSYRTETAVDQWFPIWGNDEFLFQLSVPELALLWFKVQDYDNDTQNDFAGQTCLPLPELKSGVRAVRLHDRTGKAYKNTRLLVSFALDPPYTFHHQRTMEEEGSPDIIIVGAGISGLSTAVGLHRLGIRSMVLESSETLRATGFAFTTWFNAWKAMEALGVSQHIRSLHDRLEGWVVGTISAGTPPTEMLFPESEEYESRCVQRKLLLEALAGELPEETIRFSSKVVHIELSGCYKKVHLSDGTILKTKVLVGCDGVYSVVGKWLGFKNPATTARLAIRGLTHFPEGHGFGKRFFQFYGDGVRSGFIPCDHNTVYWFLTHTSTDIDEETNSEILKEFVLNKIKDLPENIKNVVETTDLDSMVMSQLKYRPPWELLWSNITKDNVCVAGDALHPMTPDIGQGGCSAMEDGVILARCLGEAIKAKSLKGETEENEEEGYKRIEEGLKKYAGERKWRSIDLITTAYTVGFIQQSRGKWMNMFRDRFLSSYLSRMLLKKSHFDCGSLVP

SEQ ID NO: 31322 - DNA, 1514 bp, Arabidopsis thaliana
  misc_feature (1)..(1514): Ceres Seq. ID no. 13579429
gtcgactgaagtgtgaaggtggagattatgtattcacttgttgatttggtatacattctatgtaaggttcaattatttacgttatataattataatggagtaatttacagtaattgggttaaaatggtttgattcggtcaggttgatacggtttggaagttaaacccggcctagatatgatgttacaaccagtccacatcttttatgattttagtggaacaaacgaagagttatttagacgatacaaacaaggtccgaataagtgtgagctgtcccaagtaagaccacgtaatactcacctcaacaagatagtgttcttaaagtgtgtcaaacacaatcacacacacacaaatcataaaacacaaagacgataatccatcgatccacagaatagacgccacgtggtagataggattctcactaaaaagttctcaccttttaatctttctccacgccatttccacaagccataatcctcaaaaatctcaactttatctcccaaaacacaaaacaaaaaaaaatggcttccactgctctctcaagcgccatcgtcggaacttcattcatccgtcgttccccagctccaatcagtctccgttcccttccatcagccaacacacaatccctcttcggtctcaaatcaggcaccgctcgtggtggacgtgtcacagccatggctacatacaaggtcaagttcatcacaccagaaggtgagctagaggttgagtgtgacgacgacgtctacgttcttgatgctgctgaggaagctggaatcgatttgccttactcttgccgtgctggttcttgttcgagctgtgctggtaaagttgtgtctggatctgttgatcagtctgaccagagtttccttgatgatgaacagattggtgaagggtttgttctcacttgtgctgcttaccctacctctgatgttaccattgaaacccacaaagaagaagacattgtttaagcctcacctactcaccagcttttgatggtttaaaaatcatgtctttataaatttcacattttgggttgagtttgttgttactaaaaactattgttatctgttgttattgttcctggtttggctcaccatcaatcgatgacattttaaactatgcaactgcaaattctgcaacactttcgatgagaatctaacattatcgtttaaacattggaaatacattttcttgaagtctagctagctttggtttgtagttcttattctgaactcaacaatcatcaaagtatcaagaaaaatccgatttgcgagcaattgtgaaatcttagattgataaattctctagaaagaactatacatgttatttgtagctatagaagaaactatggaatcttatactctaattaagcccaaatggcaagagaagacatgagtccagctcctaggaacaacattacataagatacaatttgaagcctaaagttacacctcatttttgtactcaagaaatcagcagctatgagatccactaaagccatgtacacaagaattc

SEQ ID NO: 31323 - protein, 148 aa, Arabidopsis thaliana
  misc_feature (1)..(148): Ceres Seq. ID no. 13579430
MASTALSSAIVGTSFIRRSPAPISLRSLPSANTQSLFGLKSGTARGGRVTAMATYKVKFITPEGELEVECDDDVYVLDAAEEAGIDLPYSCRAGSCSSCAGKVVSGSVDQSDQSFLDDEQIGEGFVLTCAAYPTSDVTIETHKEEDIV

SEQ ID NO: 31324 - protein, 97 aa, Arabidopsis thaliana
  misc_feature (1)..(97): Ceres Seq. ID no. 13579431
MATYKVKFITPEGELEVECDDDVYVLDAAEEAGIDLPYSCRAGSCSSCAGKVVSGSVDQSDQSFLDDEQIGEGFVLTCAAYPTSDVTIETHKEEDIV

SEQ ID NO: 31325 - protein, 79 aa, Arabidopsis thaliana
  misc_feature (1)..(79): Ceres Seq. ID no. 13579432
MLLRKLESICLTLAVLVLVRAVLVKLCLDLLISLTRVSLMMNRLVKGLFSLVLLTLPLMLPLKPTKKKTLFKPHLLTSF

SEQ ID NO: 31326 - DNA, 1205 bp, Arabidopsis thaliana
  misc_feature (1)..(1205): Ceres Seq. ID no. 13579447
ctcttatttactttagtcctctcgaatcccataaagtccacaactctctccttgtagagagagagattttatggcggtggagctcatgactcggaattacatctccggcgtcggagctgatagcttcgccgttcaagaagcagctgcttcaggactcaaaagtatcgaaaatttcatcggtttaatgtctcgtgatagctttaactctgatcagccatcttcttcttccgcctccgcctccgcctccgccgccgcagatcttgaatcagctcgtaacacaacggcggacgcggctgtttcaaagtttaaaagagtcatatctctcttagatcgaactcgaaccggacacgcccggtttagacgtgctccggttcatgttatttctccggttcttttacaagaagaaccaaaaacgacgccgtttcagtctcctcttcctcctccgccgcaaatgatccgaaaaggttcgttttcttcatcgatgaaaacgattgatttctcatctctctcctctgtaacaacggaatcagacaaccagaagaagattcatcatcatcaacgtccctctgaaacggcgccgtttgcgtctcaaactcaaagcctctccacgacggtctcgtctttctcaaaatcaacaaagagaaaatgtaactctgagaatcttctcaccggaaaatgcgcttccgcttcttcctccggtcgttgtcattgctcgaagaaaagaaagataaaacagaggagaataattagggttccggcgataagtgcaaaaatgtccgatgtaccaccggacgattattcatggaggaaatacggacaaaaaccaattaaaggatctccacatccaagaggatattataagtgtagtagcgtaagaggttgtccagcacgtaaacatgttgagagagcagctgatgattcgtccatgttgattgttacttatgaaggagatcataatcattctctctccgccgctgatctcgccggagccgccgttgctgatcttattttggaatcgtcttgaaaagaacaaatctttatttaaggcttttataatataaatttagatccttacttagtgaagtactcaaactatgaatgaaatcaatgtaatcaaaatcaaaaagcttttgctaaatttcgatttgttagttttttggattgttaaattataaattgtgatatattcatcatgtttacttgtt

SEQ ID NO: 31327 - protein, 317 aa, Arabidopsis thaliana
  misc_feature (1)..(317): Ceres Seq. ID no. 13579448
MAVELMTRNYISGVGADSFAVQEAAASGLKSIENFIGLMSRDSFNSDQPSSSSASASASAAADLESARNTTADAAVSKFKRVISLLDRTRTGHARFRRAPVHVISPVLLQEEPKTTPFQSPLPPPPQMIRKGSFSSSMKTIDFSSLSSVTTESDNQKKIHHHQRPSETAPFASQTQSLSTTVSSFSKSTKRKCNSENLLTGKCASASSSGRCHCSKKRKIKQRRIIRVPAISAKMSDVPPDDYSWRKYGQKPIKGSPHPRGYYKCSSVRGCPARKHVERAADDSSMLIVTYEGDHNHSLSAADLAGAAVADLILESS

SEQ ID NO: 31328 - protein, 312 aa, Arabidopsis thaliana
  misc_feature (1)..(312): Ceres Seq. ID no. 13579449
MTRNYISGVGADSFAVQEAAASGLKSIENFIGLMSRDSFNSDQPSSSSASASASAAADLESARNTTADAAVSKFKRVISLLDRTRTGHARFRRAPVHVISPVLLQEEPKTTPFQSPLPPPPQMIRKGSFSSSMKTIDFSSLSSVTTESDNQKKIHHHQRPSETAPFASQTQSLSTTVSSFSKSTKRKCNSENLLTGKCASASSSGRCHCSKKRKIKQRRIIRVPAISAKMSDVPPDDYSWRKYGQKPIKGSPHPRGYYKCSSVRGCPARKHVERAADDSSMLIVTYEGDHNHSLSAADLAGAAVADLILESS

SEQ ID NO: 31329 - protein, 279 aa, Arabidopsis thaliana
  misc_feature (1)..(279): Ceres Seq. ID no. 13579450
MSRDSFNSDQPSSSSASASASAAADLESARNTTADAAVSKFKRVISLLDRTRTGHARFRRAPVHVISPVLLQEEPKTTPFQSPLPPPPQMIRKGSFSSSMKTIDFSSLSSVTTESDNQKKIHHHQRPSETAPFASQTQSLSTTVSSFSKSTKRKCNSENLLTGKCASASSSGRCHCSKKRKIKQRRIIRVPAISAKMSDVPPDDYSWRKYGQKPIKGSPHPRGYYKCSSVRGCPARKHVERAADDSSMLIVTYEGDHNHSLSAADLAGAAVADLILESS

SEQ ID NO: 31330 - DNA, 2044 bp, Arabidopsis thaliana
  misc_feature (1)..(2044): Ceres Seq. ID no. 13579477
gaattcggcacgagcaaaaacaaaaactctaccaagtgaagaagaaagagaagtgtcacatctctctctctatctctttgatccaaacaaattccctcatatatctctgctctctcttcccaatattcttcctttttcttcaatcgagattttatcgctttttgattcgagaatttcgaaatcggaacccaccaccaccaccctccatcgtcgccaacagatccaacggttctctgattatttttatttgaaaattgtcttctttgttctccctctcgctgggtttgattctgagattgattaatctaaatgggtcgcatcgagatttagaagaaaagggaaatgttggcaatggagaaagaatttgattcaaagcttgttcttcaagggaactcatccaacggtgctaatgtttctagaagcaaaagcttctcctttaaagctcctcaagaaaatttcaccagccatgatttcgaatttggcaagatctatggtgttggttcttactctaaggttgttagggcaaagaagaaggaaactggaactgtgtatgctttaaagattatggacaaaaagtttatcaccaaggagaataaaactgcttatgtgaaattggaaaggattgttcttgatcaacttgaacatcctgggatcattaaactttacttcacgtttcaagacacatcctcactatatatggcacttgaatcttgtgagggtggcgagcttttcgaccaaataaccagaaaaggtcggctatcggaggatgaagctcggttctacactgcagaagttgtggatgctcttgagtatatacatagtatgggactgattcatcgagatattaagccggagaatctgttgctgacttcagatggacacattaagattgcggattttggaagtgtaaagccgatgcaggatagccagatcacagttctacctaatgcagcttctgacgataaggcgtgcacttttgtcgggactgctgcatatgttcctccagaagttctcaactcctctcccgcaactttcgggaatgatctttgggctctcggctgcactctctatcagatgctttcggggacttccccatttaaagatgcaagtgaatggctgattttccaaagaattatagccagagatataaagttcccaaatcatttttcagaagcagcaagagacctcatcgaccggttgctggataccgagccaagcagaaggccaggtgctggctcagaaggttatgttgctcttaagagacatcctttctttaatggagttgactggaagaatctaaggtcccagactcctccaaaactagctccagatcctgcgtctcagacagcatctcccgagagggatgacacacatggttctccatggaacctgacacatattggagattctttagccacacagaacgaggggcacagtgctcctcctacatcttctgaatcatcgggttccataactcgacttgcttcaatagactcttttgattcaagatggcaacagtttttagagccaggagaatcggttctgatgatatcagcggtgaagaagcttcagaaaataacgagcaagaaggtgcagctaatactcaccaacaaacccaagctgatctatgtcgacccgtcaaaactagttgtgaaaggaaacattatatggtctgataactcgaatgacctcaacgttgtagtcactagcccttcacatttcaagatttgcacgccaaagaaggttttatcatttgaagacgcaaaacagagagcttcagtgtggaaaaaggcaatcgagactcttcagaaccgctgagacaaactccactgaagaatggttctgttaatttcctcgttggtgttttgtctttccttcaagattttaaactgaccaaactccattcttcatatgttttttctatttcacgcatccttgaaaagaccagttggacacaaaactgaaaaactgctttttgaatcctttgtataagtcaaacaaatgtattacaaggttaaagttacatgagatactgaattcaagc

SEQ ID NO: 31331 - protein, 491 aa, Arabidopsis thaliana
  misc_feature (1)..(491): Ceres Seq. ID no. 13579478
MLAMEKEFDSKLVLQGNSSNGANVSRSKSFSFKAPQENFTSHDFEFGKIYGVGSYSKVVRAKKKETGTVYALKIMDKKFITKENKTAYVKLERIVLDQLEHPGIIKLYFTFQDTSSLYMALESCEGGELFDQITRKGRLSEDEARFYTAEVVDALEYIHSMGLIHRDIKPENLLLTSDGHIKIADFGSVKPMQDSQITVLPNAASDDKACTFVGTAAYVPPEVLNSSPATFGNDLWALGCTLYQMLSGTSPFKDASEWLIFQRIIARDIKFPNHFSEAARDLIDRLLDTEPSRRPGAGSEGYVALKRHPFFNGVDWKNLRSQTPPKLAPDPASQTASPERDDTHGSPWNLTHIGDSLATQNEGHSAPPTSSESSGSITRLASIDSFDSRWQQFLEPGESVLMISAVKKLQKITSKKVQLILTNKPKLIYVDPSKLVVKGNIIWSDNSNDLNVVVTSPSHFKICTPKKVLSFEDAKQRASVWKKAIETLQNR

SEQ ID NO: 31332 - protein, 488 aa, Arabidopsis thaliana
  misc_feature (1)..(488): Ceres Seq. ID no. 13579479
MEKEFDSKLVLQGNSSNGANVSRSKSFSFKAPQENFTSHDFEFGKIYGVGSYSKVVRAKKKETGTVYALKIMDKKFITKENKTAYVKLERIVLDQLEHPGIIKLYFTFQDTSSLYMALESCEGGELFDQITRKGRLSEDEARFYTAEVVDALEYIHSMGLIHRDIKPENLLLTSDGHIKIADFGSVKPMQDSQITVLPNAASDDKACTFVGTAAYVPPEVLNSSPATFGNDLWALGCTLYQMLSGTSPFKDASEWLIFQRIIARDIKFPNHFSEAARDLIDRLLDTEPSRRPGAGSEGYVALKRHPFFNGVDWKNLRSQTPPKLAPDPASQTASPERDDTHGSPWNLTHIGDSLATQNEGHSAPPTSSESSGSITRLASIDSFDSRWQQFLEPGESVLMISAVKKLQKITSKKVQLILTNKPKLIYVDPSKLVVKGNIIWSDNSNDLNVVVTSPSHFKICTPKKVLSFEDAKQRASVWKKAIETLQNR

SEQ ID NO: 31333 - protein, 417 aa, Arabidopsis thaliana
  misc_feature (1)..(417): Ceres Seq. ID no. 13579480
MDKKFITKENKTAYVKLERIVLDQLEHPGIIKLYFTFQDTSSLYMALESCEGGELFDQITRKGRLSEDEARFYTAEVVDALEYIHSMGLIHRDIKPENLLLTSDGHIKIADFGSVKPMQDSQITVLPNAASDDKACTFVGTAAYVPPEVLNSSPATFGNDLWALGCTLYQMLSGTSPFKDASEWLIFQRIIARDIKFPNHFSEAARDLIDRLLDTEPSRRPGAGSEGYVALKRHPFFNGVDWKNLRSQTPPKLAPDPASQTASPERDDTHGSPWNLTHIGDSLATQNEGHSAPPTSSESSGSITRLASIDSFDSRWQQFLEPGESVLMISAVKKLQKITSKKVQLILTNKPKLIYVDPSKLVVKGNIIWSDNSNDLNVVVTSPSHFKICTPKKVLSFEDAKQRASVWKKAIETLQNR

SEQ ID NO: 31334 - DNA, 1512 bp, Arabidopsis thaliana
  misc_feature (1)..(1512): Ceres Seq. ID no. 13579489
ttcgctttcaacttcaccttcccttctccgccattgttactttctcagaagcttccaagtcaaccaatagagacttacttgtttgacttcttcctctcttacctcataatcctccttttggacttttcaataaaaccgcctacttgaatctgtacgacttcttctcatttttccattctttaagtcttcccgttgattcattccgatctgaaatctctctctagatttctctatttttcgaattttaaatgaacgatttgttttccagctcattctctcgcttccgcagcggagaaccatcccctcgccgagacgttgccggcggtggcgacggagttcagatggcgaatcccgcgggatcaaccggtggtgtgaacctcgacaagttcttcgaagatgttgaatctgtgaaagaagagctaaaggagctagatcggctcaacgaaacactctcttcatgtcacgagcagagcaagacgcttcacaatgctaaagccgttaaagatctccggtctaaaatggacggtgacgttggagtcgcgttgaagaaggcgaagatgattaaagttaaactcgaggcgctagatcgtgccaatgctgctaatcggagtctccctggctgtggacctggttcttcctccgatcgaaccaggacctctgtcctcaatggtctcaggaagaaattgatggactctatggatagtttcaaccgattgagggagcttatctcgtccgagtatagagaaactgtacagaggaggtacttcaccgtcaccggcgagaatccggatgaacgaaccctagatcgactgatttccactggagagagtgagagattcttgcagaaagcaatacaagaacaaggaagaggaagggtgttagacaccattaacgagattcaagaaaggcatgatgcggttaaagacattgagaagaatctcagggagcttcaccaggtgtttctagacatggccgtgctggtagagcaccagggagctcagcttgatgacatcgagagtcatgtgggtcgagctagctcctttatcagaggcggaactgaccagctacaaaccgctcgggtttaccagaagaacacgcgaaaatggacatgtattgccattattattctcatcatcatcataactgttgtggttcttgctgttttaaaaccgtggaacaacagcagtggcggcggcggcggtggtggtggtgggggtaccactggaggaagtcaaccaaattcagggacaccaccaaatcctcctcaggcaaggcgtctattgcgttgaagttgaagttgaagttgagtttcgttatttgcatatatattctttctttgaaaaaccttattatcaaaccagctttgtgttactactttctactgctggtttgttgttaatctcccgtttatttggtttttgtgaaagaatttaaaatgtgggttagatgagaaaattagtacaacattctcttgtatctatgtttgctatatgggttatatttacttgatgt

SEQ ID NO: 31335 - protein, 346 aa, Arabidopsis thaliana
  misc_feature (1)..(346): Ceres Seq. ID no. 13579490
MNDLFSSSFSRFRSGEPSPRRDVAGGGDGVQMANPAGSTGGVNLDKFFEDVESVKEELKELDRLNETLSSCHEQSKTLHNAKAVKDLRSKMDGDVGVALKKAKMIKVKLEALDRANAANRSLPGCGPGSSSDRTRTSVLNGLRKKLMDSMDSFNRLRELISSEYRETVQRRYFTVTGENPDERTLDRLISTGESERFLQKAIQEQGRGRVLDTINEIQERHDAVKDIEKNLRELHQVFLDMAVLVEHQGAQLDDIESHVGRASSFIRGGTDQLQTARVYQKNTRKWTCIAIIILIIIITVVVLAVLKPWNNSSGGGGGGGGGGTTGGSQPNSGTPPNPPQARRLLR

SEQ ID NO: 31336 - protein, 315 aa, Arabidopsis thaliana
  misc_feature (1)..(315): Ceres Seq. ID no. 13579491
MANPAGSTGGVNLDKFFEDVESVKEELKELDRLNETLSSCHEQSKTLHNAKAVKDLRSKMDGDVGVALKKAKMIKVKLEALDRANAANRSLPGCGPGSSSDRTRTSVLNGLRKKLMDSMDSFNRLRELISSEYRETVQRRYFTVTGENPDERTLDRLISTGESERFLQKAIQEQGRGRVLDTINEIQERHDAVKDIEKNLRELHQVFLDMAVLVEHQGAQLDDIESHVGRASSFIRGGTDQLQTARVYQKNTRKWTCIAIIILIIIITVVVLAVLKPWNNSSGGGGGGGGGGTTGGSQPNSGTPPNPPQARRLLR

SEQ ID NO: 31337 - protein, 256 aa, Arabidopsis thaliana
  misc_feature (1)..(256): Ceres Seq. ID no. 13579492
MDGDVGVALKKAKMIKVKLEALDRANAANRSLPGCGPGSSSDRTRTSVLNGLRKKLMDSMDSFNRLRELISSEYRETVQRRYFTVTGENPDERTLDRLISTGESERFLQKAIQEQGRGRVLDTINEIQERHDAVKDIEKNLRELHQVFLDMAVLVEHQGAQLDDIESHVGRASSFIRGGTDQLQTARVYQKNTRKWTCIAIIILIIIITVVVLAVLKPWNNSSGGGGGGGGGGTTGGSQPNSGTPPNPPQARRLLR

SEQ ID NO: 31338 - DNA, 1506 bp, Arabidopsis thaliana
  misc_feature (1)..(1506): Ceres Seq. ID no. 13579493
acacctcttcttcttcttcttcttcttcttcttcttcaacctcttaaatctcaaaatctcaatcatcaagcttctccttcttcttcttctttccatcttcgcttcaacaacaatgtctaatttcacttatacatctgctttcaacttatccgacaactccccttttaatcccgccattggttcttcgtcttcttcttcctccgcgctcgtcgtagcttccgatgatgataataataccgatgatgcttgtagcatctgtctcgagcctttcaccctccaggatccttccactgtcaccagctgcaaacatgaatatcaccttcagtgcatcattgaatggtcacagagaagcaaagagtgtcctatttgctggcaattgtttgttttgagagaccctgctagccaagagcttttagctgctgtggaaaaggaaagacttttgaaaaccaggaatatatcttcatcctctccaatctctattcatcactctcatgacgattttcactctgaggaggaggaatcacagtttagcagctttgatgaacaattcttgaggcatcttactgaagctgcacatagacgttgtttgcttcgcagaagggatggtcaaatatcctctagtcttgtttcgtccagcgatcccactacgattcatcctactgatttggtcaatctttatcgtctctctgctatttcccatgttgaacatcaaaactcaaacccttgtccaagtcctggctcaatgactccatctcccgtctctggtcattcttccattcctgcagatagcaataacggatccagaatctctcctggcccttctccatctcgttcatctcaaagtccaaaatcacctgaagcatcctcgcttccggaagccattaaatcgaaactagctgctgcttctgcaaagtacaaggaatcgatctctaaaagtaaacaaggtcttaaagagaagctacttgctcgcaataactcagtgaaagaattgagcaaaggagtgcaacgtgagatgaatgcaggaatagctggtgttgcacgaatgatcgaacgcatggatttttcttcaaaacgttttggagggtctgctcatgtatcaacctccactgctactgcttctggattcaatttctcattcaaagggaaacgtgtagaagccaattctaagtctaacaacaatggagacaaaaccgaaccccaaaagctgcagggaggagaaacgtgctgaggcaatcagaaaaatggagagaggcctttaatgcaagcgatgtacgtttccattgaatcaacttacccgttggtcttcgcatcctgcattgttcagagctcacggtctcgtctctcgtctctctgttacctttgcgatgcgtacttttagatggctaaaataagcaactgagtaataattttattactcgattttgacggagccaaaactataatatttattaatttcaaaggataatgttttatgttttttcactaagaattggatcagtcctaacg

SEQ ID NO: 31339 - protein, 408 aa, Arabidopsis thaliana
  misc_feature (1)..(408): Ceres Seq. ID no. 13579494
HLFFFFFFFFFFNLLNLKISIIKLLLLLLLSIFASTTMSNFTYTSAFNLSDNSPFNPAIGSSSSSSSALVVASDDDNNTDDACSICLEPFTLQDPSTVTSCKHEYHLQCIIEWSQRSKECPICWQLFVLRDPASQELLAAVEKERLLKTRNISSSSPISIHHSHDDFHSEEEESQFSSFDEQFLRHLTEAAHRRCLLRRRDGQISSSLVSSSDPTTIHPTDLVNLYRLSAISHVEHQNSNPCPSPGSMTPSPVSGHSSIPADSNNGSRISPGPSPSRSSQSPKSPEASSLPEAIKSKLAAASAKYKESISKSKQGLKEKLLARNNSVKELSKGVQREMNAGIAGVARMIERMDFSSKRFGGSAHVSTSTATASGFNFSFKGKRVEANSKSNNNGDKTEPQKLQGGETC

SEQ ID NO: 31340 - protein, 371 aa, Arabidopsis thaliana
  misc_feature (1)..(371): Ceres Seq. ID no. 13579495
MSNFTYTSAFNLSDNSPFNPAIGSSSSSSSALVVASDDDNNTDDACSICLEPFTLQDPSTVTSCKHEYHLQCIIEWSQRSKECPICWQLFVLRDPASQELLAAVEKERLLKTRNISSSSPISIHHSHDDFHSEEEESQFSSFDEQFLRHLTEAAHRRCLLRRRDGQISSSLVSSSDPTTIHPTDLVNLYRLSAISHVEHQNSNPCPSPGSMTPSPVSGHSSIPADSNNGSRISPGPSPSRSSQSPKSPEASSLPEAIKSKLAAASAKYKESISKSKQGLKEKLLARNNSVKELSKGVQREMNAGIAGVARMIERMDFSSKRFGGSAHVSTSTATASGFNFSFKGKRVEANSKSNNNGDKTEPQKLQGGETC

SEQ ID NO: 31341 - DNA, 1128 bp, Arabidopsis thaliana
  misc_feature (1)..(1128): Ceres Seq. ID no. 13579496
tcttcttctctacaacaaacaaacaaaagatctgtttcaatggcggatcgtgttaaaggtccatggagtcaagaagaagatgagcagctacgaaggatggttgagaaatacggaccgaggaattggtctgcgattagcaaatcgattccaggtcgatctggtaaatcgtgtagattacggtggtgtaatcagttatctccggaggttgagcatcgtcctttctcgccggaggaagatgagactattgtaaccgcccgtgctcagtttggtaacaagtgggcgacgattgctcgtcttcttaacggtcgtacggataacgccgttaaaaatcactggaactctacgcttaagaggaaatgcagcggaggtgtggcggttacgacggtgacggagacggaggaagatcaggatcggccgaagaagaggagatctgttagctttgattctgcttttgctccggtggatactggattgtacatgagtcctgagagtcctaacggaatcgatgttagtgattctagcacgattccgtcaccgtcgtctcctgttgctcagctgtttaaaccaatgccgatttccggcggttttacggtggttccgcagccgttaccggttgaaatgtcttcgtcttcggaggatccacctacttcgttgagtttgtcactacctggagctgagaacacgagttcgagccataacaataacaacaacgcgttgatgtttccgagatttgagagtcagatgaagattaatgtagaggagagaggaggaggaggagaaggacgtagaggtgagtttatgacggtggtgcaggagatgataaaagctgaagtgaggagttacatggcggaaatgcagaaaacaagtggtggattcgtcgtcggaggtttatacgaatccggcggcaatggtggttttagggattgtggaataataacacctaaggttgagtagttttggtttagggttaaaacttgaatcgattggggattttcaagagcattcatttttggggtttatggtaaaattaaaaacaaaaaaaaaatgtacagaggaattaaaatttctatggaataatcttaaatctcaaatatttgttacttgttttggtgattcataaccaaaatc

SEQ ID NO: 31342 - protein, 317 aa, Arabidopsis thaliana
  misc_feature (1)..(317): Ceres Seq. ID no. 13579497
SSSLQQTNKRSVSMADRVKGPWSQEEDEQLRRMVEKYGPRNWSAISKSIPGRSGKSCRLRWCNQLSPEVEHRPFSPEEDETIVTARAQFGNKWATIARLLNGRTDNAVKNHWNSTLKRKCSGGVAVTTVTETEEDQDRPKKRRSVSFDSAFAPVDTGLYMSPESPNGIDVSDSSTIPSPSSPVAQLFKPMPISGGFTVVPQPLPVEMSSSSEDPPTSLSLSLPGAENTSSSHNNNNNALMFPRFESQMKINVEERGGGGEGRRGEFMTVVQEMIKAEVRSYMAEMQKTSGGFVVGGLYESGGNGGFRDCGIITPKVE

SEQ ID NO: 31343 - protein, 304 aa, Arabidopsis thaliana
  misc_feature (1)..(304): Ceres Seq. ID no. 13579498
MADRVKGPWSQEEDEQLRRMVEKYGPRNWSAISKSIPGRSGKSCRLRWCNQLSPEVEHRPFSPEEDETIVTARAQFGNKWATIARLLNGRTDNAVKNHWNSTLKRKCSGGVAVTTVTETEEDQDRPKKRRSVSFDSAFAPVDTGLYMSPESPNGIDVSDSSTIPSPSSPVAQLFKPMPISGGFTVVPQPLPVEMSSSSEDPPTSLSLSLPGAENTSSSHNNNNNALMFPRFESQMKINVEERGGGGEGRRGEFMTVVQEMIKAEVRSYMAEMQKTSGGFVVGGLYESGGNGGFRDCGIITPKVE

SEQ ID NO: 31344 - protein, 285 aa, Arabidopsis thaliana
  misc_feature (1)..(285): Ceres Seq. ID no. 13579499
MVEKYGPRNWSAISKSIPGRSGKSCRLRWCNQLSPEVEHRPFSPEEDETIVTARAQFGNKWATIARLLNGRTDNAVKNHWNSTLKRKCSGGVAVTTVTETEEDQDRPKKRRSVSFDSAFAPVDTGLYMSPESPNGIDVSDSSTIPSPSSPVAQLFKPMPISGGFTVVPQPLPVEMSSSSEDPPTSLSLSLPGAENTSSSHNNNNNALMFPRFESQMKINVEERGGGGEGRRGEFMTVVQEMIKAEVRSYMAEMQKTSGGFVVGGLYESGGNGGFRDCGIITPKVE

SEQ ID NO: 31345 - DNA, 1062 bp, Arabidopsis thaliana
  misc_feature (1)..(1062): Ceres Seq. ID no. 13579500
atggcttacgagaaagagcttgatgctgctaagaaagctgcttcactcgctgctcgtctctgtcagaaagttcaaaaggctttgttgcaatcagatgtgcaatcaaaatctgataaaagtccagtgaccgttgctgattatggttcacaagcagttgttagtttagtcttagaaaaagagctcagttctgaacccttttcattggtggctgaagaggactcaggcgatctacgcaaggatggttctcaggatactctggagcgcatcacaaaactcgtgaacgacactttggctaccgaggaatcgtttaatggctctactttgtctactgatgatctacttagagccattgactgtggaacatctgaaggtggtccaaatggtcgacactgggtcttggatccaattgatggcactaaaggatttctgaggggagatcaatacgcagtagcactaggattgctcgaggaagggaaagtagttttaggtgtgcttgcttgtccaaacttgccgttagcatccatagcaggaaacaacaagaacaaatcttcgtcagacgaaattggatgcctcttctttgctacaattggttcagggacatatatgcagctcctagattcaaaatcttctcctgtaaaagtgcaagtctctagtgttgagaatcctgaagaggcatcgttcttcgagtcattcgaaggagctcactctctacatgacttatccagctccattgccaataaactcggtgtcaaagctccaccagtccgtattgatagccaagcaaagtatggagctttatcaagaggagatggagctatatacttacggtttcctcataaaggataccgcgaaaagatttgggaccatgtcgctggtgctatagttgttacagaggcgggtggaatagtgacagatgcagcaggaaagccactggatttctcgaaagggaagtatcttgatttggacacaggcattatcgttgctaacgagaagctaatgcctctgcttttgaaagcagttcgtgactccatagctgagcaagagaaagcttcagctctctga

SEQ ID NO: 31346 - protein, 353 aa, Arabidopsis thaliana
  misc_feature (1)..(353): Ceres Seq. ID no. 13579501
MAYEKELDAAKKAASLAARLCQKVQKALLQSDVQSKSDKSPVTVADYGSQAVVSLVLEKELSSEPFSLVAEEDSGDLRKDGSQDTLERITKLVNDTLATEESFNGSTLSTDDLLRAIDCGTSEGGPNGRHWVLDPIDGTKGFLRGDQYAVALGLLEEGKVVLGVLACPNLPLASIAGNNKNKSSSDEIGCLFFATIGSGTYMQLLDSKSSPVKVQVSSVENPEEASFFESFEGAHSLHDLSSSIANKLGVKAPPVRIDSQAKYGALSRGDGAIYLRFPHKGYREKIWDHVAGAIVVTEAGGIVTDAAGKPLDFSKGKYLDLDTGIIVANEKLMPLLLKAVRDSIAEQEKASAL

SEQ ID NO: 31347 - DNA, 1168 bp, Arabidopsis thaliana
  misc_feature (1)..(1168): Ceres Seq. ID no. 13579510
gcacgagatttttttgtcgattcttcgtcgtcctcctttgaaattcacaccaatttgtctctcttcctagagaaacaaaagattattcgaaactcgggaaagtatcatccggtcaccggaaaattgattatttccgatgccaataggtgaccgtcagaatccgagtgtggagaagaagaagaacctcttcaggctatgtccgttttggcagaggagaagcaccacttcttcatcttcaacacagaatccaaaccaaaactaccgtagccgccatggaaatcggaatacagatatttccgccgtctctaagcctccgttgactatgtcttccgtcgccagatcacttcttccagctcgccgtcgtctccgactagatccttctagttatctgtatttcccttatgaacctggaaaacaagttcgcagcgcaataaagcttaagaacactagcaaatctcatactgcatttaagttccaaacaacggcacctaagagttgttatatgcgtcctcccggaggtgttttggctccaggagagagtgtttttgctactgtgttcaagtttgtggaacatccagagaacaatgaaaagcagccgttgaatcagaagagcaaggttaagtttaagattatgagcctgaaagttaaaccaggagtagagtatgtgcctgagttgtttgatgagcaaaaggatcaagtagcagtggagcaggttcttcgggtcatttttattgatgcggaccgcccaagtgctgcattggagaaactgaaacgtcaattggatgaagctgaagctgcagttgaagcaagaaagaagcctcccccagagacagggcctcgagttgtcggggagggtcttgtcatagacgaatggaaggagagaagagagaagtaccttgctcggcaacaagtcgaatccgtagattctttgtcctaaacgcagagagcaatgtggacttgttctgcagatcatgtacataatttattatccctcgattatgtatttatctctagacgattactttgtggttcttgtatgtctctgtttgttgtgtgattcatgccggttttttctccttcatcaaattttgtttcggtcgtttttagttgatctagaatcgaaccagagtttgttcagtatttagttacaaatgaaaaatcctgttat

SEQ ID NO: 31348 - protein, 266 aa, Arabidopsis thaliana
  misc_feature (1)..(266): Ceres Seq. ID no. 13579511
MPIGDRQNPSVEKKKNLFRLCPFWQRRSTTSSSSTQNPNQNYRSRHGNRNTDISAVSKPPLTMSSVARSLLPARRRLRLDPSSYLYFPYEPGKQVRSAIKLKNTSKSHTAFKFQTTAPKSCYMRPPGGVLAPGESVFATVFKFVEHPENNEKQPLNQKSKVKFKIMSLKVKPGVEYVPELFDEQKDQVAVEQVLRVIFIDADRPSAALEKLKRQLDEAEAAVEARKKPPPETGPRVVGEGLVIDEWKERREKYLARQQVESVDSLS

SEQ ID NO: 31349 - protein, 204 aa, Arabidopsis thaliana
  misc_feature (1)..(204): Ceres Seq. ID no. 13579512
MSSVARSLLPARRRLRLDPSSYLYFPYEPGKQVRSAIKLKNTSKSHTAFKFQTTAPKSCYMRPPGGVLAPGESVFATVFKFVEHPENNEKQPLNQKSKVKFKIMSLKVKPGVEYVPELFDEQKDQVAVEQVLRVIFIDADRPSAALEKLKRQLDEAEAAVEARKKPPPETGPRVVGEGLVIDEWKERREKYLARQQVESVDSLS

SEQ ID NO: 31350 - protein, 144 aa, Arabidopsis thaliana
  misc_feature (1)..(144): Ceres Seq. ID no. 13579513
MRPPGGVLAPGESVFATVFKFVEHPENNEKQPLNQKSKVKFKIMSLKVKPGVEYVPELFDEQKDQVAVEQVLRVIFIDADRPSAALEKLKRQLDEAEAAVEARKKPPPETGPRVVGEGLVIDEWKERREKYLARQQVESVDSLS

SEQ ID NO: 31351 - DNA, 1638 bp, Arabidopsis thaliana
  misc_feature (1)..(1638): Ceres Seq. ID no. 13579514
tgagtaatttaggaagtcaatgagaagaaaagaacgatttttttttttaattcccaacttgtgttcgatctctgagcagctcttatctgatacaaccatttttttggatataatatctaaatttgtagtctttagtttaattcagatcccaattataataatgcccttttgatctgatccacattgcgtatcaaaggctattattattttattcccagagttcaattatttagttggtagaatctctctgtgttgttgtgaatctgtctgtttatgtaaatcaattcaaaaggttgtgacttttgtgtttgacttaggaaaatggaagtgaaagctagagctcctgggaagatcatacttgcaggggaacacgctgttgttcatggatccaccgctgtagctgccgccattgatctctacacttacgttactctccgctttcctcttccatcagctgagaacaatgataggcttacacttcagctcaaggacatttccttggagttttcatggtccttagccagaatcaaagaagcgattccttatgattcaagcactctctgccgttctacgccggcttcatgttcagaggagacccttaaatcaattgcagttttggttgaagagcaaaatcttccaaaggaaaagatgtggctctcctctgggatctccacgtttctctggttatacaccagaattatagggttcaatccggctacagtagtcattaactctgagcttccatacgggtctggcctcggttcatcagcagctttatgtgtagctctcacagctgctctccttgcttcttctatttcagagaaaacccgtggtaacggttggtcatctctcgatgaaaccaatcttgagttgctaaataaatgggctttcgaaggcgaaaagatcatccatgggaaaccttctgggatagacaacaccgtcagtgcatacggcaacatgatcaagttctgctcaggcgagataactcggttacaatccaacatgcctctgagaatgctaattaccaacactagagttgggcgaaacacaaaagctctggtctctggtgtgtcacagagagcggtaagacatcctgatgcgatgaagtcagtgttcaacgccgtggattctataagcaaagagctcgctgcgatcattcagtctaaagacgagacctcagttacagaaaaagaagagagaataaaagaactcatggagatgaaccaaggtctgctcctgtcaatgggggttagccacagctcaatcgaggctgtgattctaaccacggtcaagcacaagcttgtctccaaacttacaggagctggtggcggcggctgcgtcctcactctattaccaaccgggacggtggtggacaaagtggtggaggagctcgagtccagcggttttcagtgtttcacggcattgattggtggtaacggagctcagatttgctattgatcaggtcggaaaaatcatatttggcctctcaccattcttaaacttgctgacgtgtacgtcaagaaggctgcaattagaaattcaaagagtcgattttttcttataaatgatgtgttgaatgtaaaattgctttattattataccatgtgacaaataattgaaaaaagctaaattactcac

SEQ ID NO: 31352 - protein, 378 aa, Arabidopsis thaliana
  misc_feature (1)..(378): Ceres Seq. ID no. 13579515
MEVKARAPGKIILAGEHAVVHGSTAVAAAIDLYTYVTLRFPLPSAENNDRLTLQLKDISLEFSWSLARIKEAIPYDSSTLCRSTPASCSEETLKSIAVLVEEQNLPKEKMWLSSGISTFLWLYTRIIGFNPATVVINSELPYGSGLGSSAALCVALTAALLASSISEKTRGNGWSSLDETNLELLNKWAFEGEKIIHGKPSGIDNTVSAYGNMIKFCSGEITRLQSNMPLRMLITNTRVGRNTKALVSGVSQRAVRHPDAMKSVFNAVDSISKELAAIIQSKDETSVTEKEERIKELMEMNQGLLLSMGVSHSSIEAVILTTVKHKLVSKLTGAGGGGCVLTLLPTGTVVDKVVEELESSGFQCFTALIGGNGAQICY

SEQ ID NO: 31353 - protein, 269 aa, Arabidopsis thaliana
  misc_feature (1)..(269): Ceres Seq. ID no. 13579516
MWLSSGISTFLWLYTRIIGFNPATVVINSELPYGSGLGSSAALCVALTAALLASSISEKTRGNGWSSLDETNLELLNKWAFEGEKIIHGKPSGIDNTVSAYGNMIKFCSGEITRLQSNMPLRMLITNTRVGRNTKALVSGVSQRAVRHPDAMKSVFNAVDSISKELAAIIQSKDETSVTEKEERIKELMEMNQGLLLSMGVSHSSIEAVILTTVKHKLVSKLTGAGGGGCVLTLLPTGTVVDKVVEELESSGFQCFTALIGGNGAQICY

SEQ ID NO: 31354 - DNA, 3946 bp, Arabidopsis thaliana
  misc_feature (1)..(3946): Ceres Seq. ID no. 13579790
atttttgctcacgactaagtcccattcctcgtctcttctttttcttctccttaattagtttgggcaacacgatcacagttgattccttcacaatcgatttgttaaattaagaaatcattttcttctctctctctctctctctgtctaaaatatctatcggttgaagaagatctgaagcttaactttgctctgttacagactctcagggatctgccggctacaaagtccggtggatagtgttattattagacaatggcgtctaataatcatttcatgaacagtagatccaatctatcaacaaactctgatgctgctgaagctgagaggcaccagcagcctgtgtcaaattctgtgacatttgcccgcaggactccctctggccgatatgtcaactactccagagatgatctcgatagcgaacttggaagtgttgatttaactggctattcggttcacattcctccaactccggataaccaacctatggatccgtccatctctcagaaggttgaggagcagtatgtctcgaattccttgttcacgggcggttttaacagcgtcactcgggctcatcttatggaaaaagtgatcgatactgagactagccatccgcagatggcaggtgctaaaggatcttcttgcgcggttcctggttgtgatgtcaaggtgatgagtgatgagagaggtcaagatcttcttccctgtgagtgtgatttcaaaatctgtagggattgctttatggatgctgtgaaaaccggtgggatgtgtcccgggtgtaaggagccttacaggaacacggatttggcggattttgctgataacaacaagcagcaacggcctatgcttccgccaccagcgggcgggtccaagatggacaggagattgtcattgatgaagtcaactaagtctggtttgatgaggagtcaaaccggggattttgatcacaatagatggttgtttgagactagtgggacttacggtttcggtaatgctttctggacaaaagacgggaatttcgggagtgacaaggatgggaatggccacggtatggggccgcaggatctgatgagcagaccgtggagaccacttactcggaaactgcagattcctgcagctgttattagtccttacaggcttttgatacttatccgaattgttgttcttgcgcttttcttgatgtggaggattaagcacaaaaacccagatgcaatatggctatggggaatgtctgtggtttgtgagctttggttcgccttatcttggctacttgatcagcttccaaagctgtgtccgattaacagagctacggatctcaatgttcttaaagaaaaatttgaaacacctacaccgagcaacccgactgggaaatctgatctcccaggactggatatgtttgtatctacagcagatccagagaaagaacctcctcttgtcacttccaacaccattttatcgattctcgctgctgactaccctgtagaaaagcttgcttgctatgtatcagatgatggaggagcgcttttgacattcgaagccatggctgaagcagcgagttttgcaaacatgtgggttcctttctgtcgtaaacacaatatcgagccgaggaatccggattcatactttagtcttaaaagagatccttacaagaacaaagtgaaggctgattttgttaaggatcgaagacgggtgaagcgtgagtatgatgagtttaaggttaggatcaacagcttgcctgactcgatcaggcgccgttctgatgcttatcacgcaagggaagagattaaggccatgaagctgcaaagacaaaacagagatgaagagatagtagagccagtcaagattcctaaagctacatggatggctgatggtactcattggcctggaacttggataaattctggtcctgaccattcccgtagtgaccatgctggtatcattcaggtgatgttgaagccgccaagtgatgagccattacatggagtgtctgaagggttcttagatcttacagatgttgacattcgtcttccgcttcttgtctatgtttcgcgtgagaagcgaccgggttatgatcataacaagaaagcaggagccatgaatgccctggtccgagcttctgcaattatgtccaacggtccattcatactcaatcttgattgtgatcattacatatacaactctcaagctttaagagaaggaatgtgtttcatgatggatcgaggtggtgaccggctttgctatgttcagttcccacaacggtttgaaggtattgacccatcagatcgttatgcgaatcacaacacagtcttctttgatgtgaacatgagagctcttgatgggttgatgggtcctgtttatgtcggaacgggttgtctctttagaagaatcgcgttgtacggattcgatccacctcgggctaaagaacaccatcccggattctgcagttgctgcttctctcgcaagaagaagaaaagccgtgtgccagaagaaaaccgatctttgagaatgggtggtgactcagatgatgatgaagagatgaatctttctttggttccgaagaaattcggaaactccactttccttatcgattcaatcccggttgccgagttccaaggtcgtcctcttgcggatcacccagctgtgcaaaacggacgaccacccggagctctcaccattcctcgcgagcttcttgatgcatcaactgtggcagaagccatagccgtcatctcttgttggtacgaggataaaaccgagtggggatctcggatcggttggatttatggatctgtcacggaagatgtggtcacaggttatagaatgcataaccgaggctggaaatcggtttactgtgtgaccaaaagggatgctttccgtggcacagctccaatcaacttgacggataggcttcaccaggttctccgatgggctactggctcggtagagatcttcttctcaagaaacaatgccttctttgctagcccgagaatgaaaatcctccagagaatcgcttacctaaacgttggaatctacccgttcacatcattcttcctcatagtctactgcttcctcccagctctctccctattctcaggccagttcatagtccaaacactcaatgtcacattccttgtctacctcttaatcatctccattacgctctgcttactcgctctcctcgagatcaaatggtcaggaatctcactcgaggaatggtggcgaaacgagcagttctggctcattggaggaacaagcgctcacttagccgcggttatccaagggctgctcaaagttgttgccggaatcgaaatctcattcacattgacatctaaatccggaggagaggatgtagacgacgaatttgcggatctctacattgtgaaatggacatccctcatgatcccaccaatcacaatcatgatggtgaacctaatcgccatcgcggtcgggtttagcaggacgatatacagtgtgattccgcagtggagtaagttgattggaggagtgttcttcagtttctgggtactggctcatctttatccattcgctaaagggcttatgggaagaagaggaaggactccgaccattgtatatgtctggtctggacttgttgccatcaccatatctctgctttgggttgccattaatccacctgctggttccactcaaatcggaggatctttcactttcccatgattcataggtttggtttctcaaaaattctctttctttagtcctttctaaagatggagacagagattggccaagaaacacacaagtatagttgagccaaaatatagagcaagtcaaagaacttctctcattgtcttttattttttgtttttttatttggttgggaaaggacattttttatttgtctttttaaattttgtaatcttttatctgttgatggaattatttatgctactactgttaattatttattcagttc

SEQ ID NO: 31355 - protein, 1145 aa, Arabidopsis thaliana
  misc_feature (1)..(1145): Ceres Seq. ID no. 13579791
MASNNHFMNSRSNLSTNSDAAEAERHQQPVSNSVTFARRTPSGRYVNYSRDDLDSELGSVDLTGYSVHIPPTPDNQPMDPSISQKVEEQYVSNSLFTGGFNSVTRAHLMEKVIDTETSHPQMAGAKGSSCAVPGCDVKVMSDERGQDLLPCECDFKICRDCFMDAVKTGGMCPGCKEPYRNTDLADFADNNKQQRPMLPPPAGGSKMDRRLSLMKSTKSGLMRSQTGDFDHNRWLFETSGTYGFGNAFWTKDGNFGSDKDGNGHGMGPQDLMSRPWRPLTRKLQIPAAVISPYRLLILIRIVVLALFLMWRIKHKNPDAIWLWGMSVVCELWFALSWLLDQLPKLCPINRATDLNVLKEKFETPTPSNPTGKSDLPGLDMFVSTADPEKEPPLVTSNTILSILAADYPVEKLACYVSDDGGALLTFEAMAEAASFANMWVPFCRKHNIEPRNPDSYFSLKRDPYKNKVKADFVKDRRRVKREYDEFKVRINSLPDSIRRRSDAYHAREEIKAMKLQRQNRDEEIVEPVKIPKATWMADGTHWPGTWINSGPDHSRSDHAGIIQVMLKPPSDEPLHGVSEGFLDLTDVDIRLPLLVYVSREKRPGYDHNKKAGAMNALVRASAIMSNGPFILNLDCDHYIYNSQALREGMCFMMDRGGDRLCYVQFPQRFEGIDPSDRYANHNTVFFDVNMRALDGLMGPVYVGTGCLFRRIALYGFDPPRAKEHHPGFCSCCFSRKKKKSRVPEENRSLRMGGDSDDDEEMNLSLVPKKFGNSTFLIDSIPVAEFQGRPLADHPAVQNGRPPGALTIPRELLDASTVAEAIAVISCWYEDKTEWGSRIGWIYGSVTEDVVTGYRMHNRGWKSVYCVTKRDAFRGTAPINLTDRLHQVLRWATGSVEIFFSRNNAFFASPRMKILQRIAYLNVGIYPFTSFFLIVYCFLPALSLFSGQFIVQTLNVTFLVYLLIISITLCLLALLEIKWSGISLEEWWRNEQFWLIGGTSAHLAAVIQGLLKVVAGIEISFTLTSKSGGEDVDDEFADLYIVKWTSLMIPPITIMMVNLIAIAVGFSRTIYSVIPQWSKLIGGVFFSFWVLAHLYPFAKGLMGRRGRTPTIVYVWSGLVAITISLLWVAINPPAGSTQIGGSFTFP

SEQ ID NO: 31356 - protein, 1138 aa, Arabidopsis thaliana
  misc_feature (1)..(1138): Ceres Seq. ID no. 13579792
MNSRSNLSTNSDAAEAERHQQPVSNSVTFARRTPSGRYVNYSRDDLDSELGSVDLTGYSVHIPPTPDNQPMDPSISQKVEEQYVSNSLFTGGFNSVTRAHLMEKVIDTETSHPQMAGAKGSSCAVPGCDVKVMSDERGQDLLPCECDFKICRDCFMDAVKTGGMCPGCKEPYRNTDLADFADNNKQQRPMLPPPAGGSKMDRRLSLMKSTKSGLMRSQTGDFDHNRWLFETSGTYGFGNAFWTKDGNFGSDKDGNGHGMGPQDLMSRPWRPLTRKLQIPAAVISPYRLLILIRIVVLALFLMWRIKHKNPDAIWLWGMSVVCELWFALSWLLDQLPKLCPINRATDLNVLKEKFETPTPSNPTGKSDLPGLDMFVSTADPEKEPPLVTSNTILSILAADYPVEKLACYVSDDGGALLTFEAMAEAASFANMWVPFCRKHNIEPRNPDSYFSLKRDPYKNKVKADFVKDRRRVKREYDEFKVRINSLPDSIRRRSDAYHAREEIKAMKLQRQNRDEEIVEPVKIPKATWMADGTHWPGTWINSGPDHSRSDHAGIIQVMLKPPSDEPLHGVSEGFLDLTDVDIRLPLLVYVSREKRPGYDHNKKAGAMNALVRASAIMSNGPFILNLDCDHYIYNSQALREGMCFMMDRGGDRLCYVQFPQRFEGIDPSDRYANHNTVFFDVNMRALDGLMGPVYVGTGCLFRRIALYGFDPPRAKEHHPGFCSCCFSRKKKKSRVPEENRSLRMGGDSDDDEEMNLSLVPKKFGNSTFLIDSIPVAEFQGRPLADHPAVQNGRPPGALTIPRELLDASTVAEAIAVISCWYEDKTEWGSRIGWIYGSVTEDVVTGYRMHNRGWKSVYCVTKRDAFRGTAPINLTDRLHQVLRWATGSVEIFFSRNNAFFASPRMKILQRIAYLNVGIYPFTSFFLIVYCFLPALSLFSGQFIVQTLNVTFLVYLLIISITLCLLALLEIKWSGISLEEWWRNEQFWLIGGTSAHLAAVIQGLLKVVAGIEISFTLTSKSGGEDVDDEFADLYIVKWTSLMIPPITIMMVNLIAIAVGFSRTIYSVIPQWSKLIGGVFFSFWVLAHLYPFAKGLMGRRGRTPTIVYVWSGLVAITISLLWVAINPPAGSTQIGGSFTFP

SEQ ID NO: 31357 - protein, 1068 aa, Arabidopsis thaliana
  misc_feature (1)..(1068): Ceres Seq. ID no. 13579793
MDPSISQKVEEQYVSNSLFTGGFNSVTRAHLMEKVIDTETSHPQMAGAKGSSCAVPGCDVKVMSDERGQDLLPCECDFKICRDCFMDAVKTGGMCPGCKEPYRNTDLADFADNNKQQRPMLPPPAGGSKMDRRLSLMKSTKSGLMRSQTGDFDHNRWLFETSGTYGFGNAFWTKDGNFGSDKDGNGHGMGPQDLMSRPWRPLTRKLQIPAAVISPYRLLILIRIVVLALFLMWRIKHKNPDAIWLWGMSVVCELWFALSWLLDQLPKLCPINRATDLNVLKEKFETPTPSNPTGKSDLPGLDMFVSTADPEKEPPLVTSNTILSILAADYPVEKLACYVSDDGGALLTFEAMAEAASFANMWVPFCRKHNIEPRNPDSYFSLKRDPYKNKVKADFVKDRRRVKREYDEFKVRINSLPDSIRRRSDAYHAREEIKAMKLQRQNRDEEIVEPVKIPKATWMADGTHWPGTWINSGPDHSRSDHAGIIQVMLKPPSDEPLHGVSEGFLDLTDVDIRLPLLVYVSREKRPGYDHNKKAGAMNALVRASAIMSNGPFILNLDCDHYIYNSQALREGMCFMMDRGGDRLCYVQFPQRFEGIDPSDRYANHNTVFFDVNMRALDGLMGPVYVGTGCLFRRIALYGFDPPRAKEHHPGFCSCCFSRKKKKSRVPEENRSLRMGGDSDDDEEMNLSLVPKKFGNSTFLIDSIPVAEFQGRPLADHPAVQNGRPPGALTIPRELLDASTVAEAIAVISCWYEDKTEWGSRIGWIYGSVTEDVVTGYRMHNRGWKSVYCVTKRDAFRGTAPINLTDRLHQVLRWATGSVEIFFSRNNAFFASPRMKILQRIAYLNVGIYPFTSFFLIVYCFLPALSLFSGQFIVQTLNVTFLVYLLIISITLCLLALLEIKWSGISLEEWWRNEQFWLIGGTSAHLAAVIQGLLKVVAGIEISFTLTSKSGGEDVDDEFADLYIVKWTSLMIPPITIMMVNLIAIAVGFSRTIYSVIPQWSKLIGGVFFSFWVLAHLYPFAKGLMGRRGRTPTIVYVWSGLVAITISLLWVAINPPAGSTQIGGSFTFP

SEQ ID NO: 31358 - DNA, 1038 bp, Arabidopsis thaliana
  misc_feature (1)..(1038): Ceres Seq. ID no. 13579802
atattacaccaaaatttgaaatcatcttctttgattgtttttggtgtgagcgaagatgggaagatcgaattctcaatgcccatctcattggattctcctctgcttcttcatctcttctcagttttggggattctcacttcccacttcgataattcaacaaaatctcgagggttttaaagatcctgaagacggttttcatgagattcattgttcaagagaacgtagcagagttgcttggaaaatcattcaagagtatctcatgccgtatgtggaaaaggagcggtatcagttaccgagtacttgtagagttcatcgagacaatgacatttatagagaacaagaagagcacaaattgcgttcagatattaatgagtggcgttgtggattctgcaaaaaggctttttatgaagagaagtatctcgataagcatttcgattcgcgccattacaatttacttaatgcgagtcatggtaaatgtctgtcggatctttgtggagcgttgcattgtgatcttgttgtagacacagctcggcttaagtccaagtgtaatcctgcagctgctgcaaaaaaccggcacttatgtgagagtttggctaatagttgttttccggtaaataaaggttcatcagccaaccgtcttcacgatttcttcttgcgtcagttctgcgatgcacatacatgttcaggaggatcaaagcccttatctcaaaaaccaaagaagaggagtatagtgtacattattttctccatcatcgttttggtagtgcttcttctctattacagctttgtctatttgttccgaagaggattaaagagaagatctcaagatttgaagcgtattagacacaatggtctgaagaagaaacccttctaaccatatcaagctttagctttaatggcggctgagagagagtacattttttttctttgcaagatgattacaattaggatcagattagtgcattttgcaacatcccttacaattatatcactacttacaccaatattgttacttagaattcaatagtgtttactgcc

SEQ ID NO: 31359 - protein, 272 aa, Arabidopsis thaliana
  misc_feature (1)..(272): Ceres Seq. ID no. 13579803
MGRSNSQCPSHWILLCFFISSQFWGFSLPTSIIQQNLEGFKDPEDGFHEIHCSRERSRVAWKIIQEYLMPYVEKERYQLPSTCRVHRDNDIYREQEEHKLRSDINEWRCGFCKKAFYEEKYLDKHFDSRHYNLLNASHGKCLSDLCGALHCDLVVDTARLKSKCNPAAAAKNRHLCESLANSCFPVNKGSSANRLHDFFLRQFCDAHTCSGGSKPLSQKPKKRSIVYIIFSIIVLVVLLLYYSFVYLFRRGLKRRSQDLKRIRHNGLKKKPF

SEQ ID NO: 31360 - protein, 204 aa, Arabidopsis thaliana
  misc_feature (1)..(204): Ceres Seq. ID no. 13579804
MPYVEKERYQLPSTCRVHRDNDIYREQEEHKLRSDINEWRCGFCKKAFYEEKYLDKHFDSRHYNLLNASHGKCLSDLCGALHCDLVVDTARLKSKCNPAAAAKNRHLCESLANSCFPVNKGSSANRLHDFFLRQFCDAHTCSGGSKPLSQKPKKRSIVYIIFSIIVLVVLLLYYSFVYLFRRGLKRRSQDLKRIRHNGLKKKPF

SEQ ID NO: 31361 - DNA, 1599 bp, Arabidopsis thaliana
  misc_feature (1)..(1599): Ceres Seq. ID no. 13579805
atgggttggtttaacaagatctttaaaggctctaaccaaaggctccgggttgggaataataagcacaatcacaatgtttattacgataattatccgactgcttcacatgatgatgagcctagtgcggcggatacagatgctgataatgatgaacctcatcatactcaggaaccatctacatctgaggataatacatcgaatgaccaggaaaatgaagacatagaccgtgcaattgcattgtcgcttttagaagagaatcaagaacagacaagtataagcgggaaatactcgatgccggtggatgaagatgagcaacttgctagagccctacaagaaagtatggtagttgggaattcaccccgtcacaaaagtggaagtacatatgataatgggaatgcatatggagctggagatttatatgggaatggacatatgtatggaggaggaaatgtatatgcaaatggagatatttattatccaagacctattacttttcaaatggatttcaggatttgtgctggctgtaatatggagattggccatggaagatttctgaattgccttaattcactatggcatccagaatgttttcgatgttatggctgcagtcagccgatttctgagtacgagttttcaacatcagggaactacccttttcacaaggcttgttacagggagagatatcatcctaaatgtgatgtctgcagccactttataccaacaaatcatgctggtcttattgaatatagggcacatcctttttgggttcagaagtattgtccttctcacgaacacgatgctaccccgagatgttgcagttgtgaaagaatggagccacggaatacgagatatgttgaacttaacgatggacggaaactttgccttgagtgtttggactcggcggtcatggacaccatgcaatgccaacctctgtacttgcaaatacaaaatttctatgaaggactcaacatgaaggtagagcaggaagttccactcctcttggttgagagacaagcacttaacgaagccagagaaggtgaaaagaatggtcactatcacatgccagaaacaagaggactctgcctttcagaagaacaaactgttagtactgtaagaaagcgatcaaagcatggcacaggaaaatgggccgggaatattacagaaccttacaagttaacacggcaatgtgaagttaccgccattctcatcttattcgggctccctaggttacttactggttcgattctagctcatgagatgatgcatgcgtggatgaggctcaaaggattccgaacactgagccaagatgttgaagaaggtatatgtcaagtgatggctcataaatggttagatgctgagttagctgctggttcaacaaatagcaatgctgcatcatcatcctcctcttctcaaggactgaaaaagggaccgagatctcagtacgagagaaagcttggtgagtttttcaagcaccaaatcgagtctgatgcttctccggtttatggagacgggttcagagctgggaggttagctgttcacaagtacggtttgcgaaaaacacttgagcatatacagatgaccggtagattcccggtttaa

SEQ ID NO: 31362 - protein, 532 aa, Arabidopsis thaliana
  misc_feature (1)..(532): Ceres Seq. ID no. 13579806
MGWFNKIFKGSNQRLRVGNNKHNHNVYYDNYPTASHDDEPSAADTDADNDEPHHTQEPSTSEDNTSNDQENEDIDRAIALSLLEENQEQTSISGKYSMPVDEDEQLARALQESMVVGNSPRHKSGSTYDNGNAYGAGDLYGNGHMYGGGNVYANGDIYYPRPITFQMDFRICAGCNMEIGHGRFLNCLNSLWHPECFRCYGCSQPISEYEFSTSGNYPFHKACYRERYHPKCDVCSHFIPTNHAGLIEYRAHPFWVQKYCPSHEHDATPRCCSCERMEPRNTRYVELNDGRKLCLECLDSAVMDTMQCQPLYLQIQNFYEGLNMKVEQEVPLLLVERQALNEAREGEKNGHYHMPETRGLCLSEEQTVSTVRKRSKHGTGKWAGNITEPYKLTRQCEVTAILILFGLPRLLTGSILAHEMMHAWMRLKGFRTLSQDVEEGICQVMAHKWLDAELAAGSTNSNAASSSSSSQGLKKGPRSQYERKLGEFFKHQIESDASPVYGDGFRAGRLAVHKYGLRKTLEHIQMTGRFPV

SEQ ID NO: 31363 - protein, 435 aa, Arabidopsis thaliana
  misc_feature (1)..(435): Ceres Seq. ID no. 13579807
MPVDEDEQLARALQESMVVGNSPRHKSGSTYDNGNAYGAGDLYGNGHMYGGGNVYANGDIYYPRPITFQMDFRICAGCNMEIGHGRFLNCLNSLWHPECFRCYGCSQPISEYEFSTSGNYPFHKACYRERYHPKCDVCSHFIPTNHAGLIEYRAHPFWVQKYCPSHEHDATPRCCSCERMEPRNTRYVELNDGRKLCLECLDSAVMDTMQCQPLYLQIQNFYEGLNMKVEQEVPLLLVERQALNEAREGEKNGHYHMPETRGLCLSEEQTVSTVRKRSKHGTGKWAGNITEPYKLTRQCEVTAILILFGLPRLLTGSILAHEMMHAWMRLKGFRTLSQDVEEGICQVMAHKWLDAELAAGSTNSNAASSSSSSQGLKKGPRSQYERKLGEFFKHQIESDASPVYGDGFRAGRLAVHKYGLRKTLEHIQMTGRFPV

SEQ ID NO: 31364 - protein, 419 aa, Arabidopsis thaliana
  misc_feature (1)..(419): Ceres Seq. ID no. 13579808
MVVGNSPRHKSGSTYDNGNAYGAGDLYGNGHMYGGGNVYANGDIYYPRPITFQMDFRICAGCNMEIGHGRFLNCLNSLWHPECFRCYGCSQPISEYEFSTSGNYPFHKACYRERYHPKCDVCSHFIPTNHAGLIEYRAHPFWVQKYCPSHEHDATPRCCSCERMEPRNTRYVELNDGRKLCLECLDSAVMDTMQCQPLYLQIQNFYEGLNMKVEQEVPLLLVERQALNEAREGEKNGHYHMPETRGLCLSEEQTVSTVRKRSKHGTGKWAGNITEPYKLTRQCEVTAILILFGLPRLLTGSILAHEMMHAWMRLKGFRTLSQDVEEGICQVMAHKWLDAELAAGSTNSNAASSSSSSQGLKKGPRSQYERKLGEFFKHQIESDASPVYGDGFRAGRLAVHKYGLRKTLEHIQMTGRFPV

SEQ ID NO: 31365 - DNA, 761 bp, Arabidopsis thaliana
  misc_feature (1)..(761): Ceres Seq. ID no. 13579813
aaagagagacgactctgaatccaaaaaaaamaaaaaactcattaagtaaagacaaaggaagagaagaaagacgatttctcgaagaagctatggcggatcagctaactgatgaacagatctctgagtttaaggaagcttttagcctcttcgacaaagatggagatggttgcatcaccacaaaggagctgggaacagtgatgcggtcactagggcagaacccaacagaagctgagctacaagacatgatcaacgaggttgacgctgatggaaacggaaccattgacttccctgagttcttaaacctaatggctaaaaagatgaaggacacagactcggaggaagagctgaaagaagctttcagggtgttcgacaaagaccagaacggtttcatatccgctgcagagcttcgccatgtgatgacgaatctaggtgagaaactgactgatgaagaggtcgaggagatgattcgtgaagcagatgttgatggagatggtcagataaactacgaggagtttgtcaagattatgatggctaagtgatttgataaaggtgatgatgatgatgatgatgacctttttatgcttctaggagtttaaccaaaaacatttgcatgattggtggagatatgcttttaaacagacataatttgtttttcgttcttttgattttctggtttgtgacttttgtgtgtaatggaaaatcaagtaagttggattgaaaccgatgggttgggtttttactttttacccacattttgttgc

SEQ ID NO: 31366 - protein, 178 aa, Arabidopsis thaliana
  misc_feature (1)..(178): Ceres Seq. ID no. 15222700
  misc_feature (10)..(10): Xaa is any aa, unknown or other
RETTLNPKKXKNSLSKDKGREERRFLEEAMADQLTDEQISEFKEAFSLFDKDGDGCITTKELGTVMRSLGQNPTEAELQDMINEVDADGNGTIDFPEFLNLMAKKMKDTDSEEELKEAFRVFDKDQNGFISAAELRHVMTNLGEKLTDEEVEEMIREADVDGDGQINYEEFVKIMMAK

SEQ ID NO: 31367 - protein, 149 aa, Arabidopsis thaliana
  misc_feature (1)..(149): Ceres Seq. ID no. 15222701
MADQLTDEQISEFKEAFSLFDKDGDGCITTKELGTVMRSLGQNPTEAELQDMINEVDADGNGTIDFPEFLNLMAKKMKDTDSEEELKEAFRVFDKDQNGFISAAELRHVMTNLGEKLTDEEVEEMIREADVDGDGQINYEEFVKIMMAK

SEQ ID NO: 31368 - protein, 113 aa, Arabidopsis thaliana
  misc_feature (1)..(113): Ceres Seq. ID no. 15222702
MRSLGQNPTEAELQDMINEVDADGNGTIDFPEFLNLMAKKMKDTDSEEELKEAFRVFDKDQNGFISAAELRHVMTNLGEKLTDEEVEEMIREADVDGDGQINYEEFVKIMMAK

SEQ ID NO: 31369 - DNA, 989 bp, Arabidopsis thaliana
  misc_feature (1)..(989): Ceres Seq. ID no. 13579814
atctccgctctctttctctctcgaacttcctctgaaaactaaggctcttgctcttgctttctcgccgtcgtctgagtcgttagcagtacggtgatcggaaaaatgagtaagaaatcgacagaatctgacgctggcaatactgagaagcaatggtccctggcagatttcgagatcgggagaccacttggaaaaggcaaatttggcagagtctatctcgcccgagaagccaagagcaagtacatagtggcgctgaaagtcatattcaaggaacagatagagaagtataaaattcatcatcagcttaggagagaaatggagatccaaacgagtttaaggcacccaaatatcttgcgtctttttggttggttccatgacaatgagaggattttcttgattctcgagtatgctcatggtggtgagctctatggtgtgctcaaacagaatggtcatcttactgaacaacaagccgccacttacattgcaagtctcagtcaggcactggcctattgtcatggcaaatgtgtgattcatagagacatcaaacctgaaaatttgttgctcgatcatgaggggagattgaaaattgctgactttggatggtcagttcagtcaagtaacaagaggaaaaccatgtgtggaaccttggattacttagcacctgagatggtagaaaatagagatcatgattatgcagttgataactggaccttaggcatactgtgttacgagtttctctacggtaaccctccattcgaagccgagagtcaaaaagatacattcaagagaattcttaagattgatctgagttttcctcttacaccgaatgtttcagaagaagccaaaaatcttatcagtcagcttcttgttaaggatccctccaaacgactctctattgagaagatcatgcaacatccatggattgtcaagaacgcagatccgaaaggtgtgtgtgcctcaattgatatttgatgtattctctcccaattctc

SEQ ID NO: 31370 - protein, 288 aa, Arabidopsis thaliana
  misc_feature (1)..(288): Ceres Seq. ID no. 13579815
MSKKSTESDAGNTEKQWSLADFEIGRPLGKGKFGRVYLAREAKSKYIVALKVIFKEQIEKYKIHHQLRREMEIQTSLRHPNILRLFGWFHDNERIFLILEYAHGGELYGVLKQNGHLTEQQAATYIASLSQALAYCHGKCVIHRDIKPENLLLDHEGRLKIADFGWSVQSSNKRKTMCGTLDYLAPEMVENRDHDYAVDNWTLGILCYEFLYGNPPFEAESQKDTFKRILKIDLSFPLTPNVSEEAKNLISQLLVKDPSKRLSIEKIMQHPWIVKNADPKGVCASIDI

SEQ ID NO: 31371 - protein, 218 aa, Arabidopsis thaliana
  misc_feature (1)..(218): Ceres Seq. ID no. 13579816
MEIQTSLRHPNILRLFGWFHDNERIFLILEYAHGGELYGVLKQNGHLTEQQAATYIASLSQALAYCHGKCVIHRDIKPENLLLDHEGRLKIADFGWSVQSSNKRKTMCGTLDYLAPEMVENRDHDYAVDNWTLGILCYEFLYGNPPFEAESQKDTFKRILKIDLSFPLTPNVSEEAKNLISQLLVKDPSKRLSIEKIMQHPWIVKNADPKGVCASIDI

SEQ ID NO: 31372 - DNA, 653 bp, Arabidopsis thaliana
  misc_feature (1)..(653): Ceres Seq. ID no. 13579848
agaaaagctttcagaggatcgagcgcacttcttcaatggcgaccaaagtttacatagtgtactactcaatgtatggtcatgtggagaaattagctcaagagattaggaaaggtgctgcttctgttgatggtgttgaagccatactctggcaggtacccgaaacgctccaagaagatgtgctctctaaaatgagtgcaccaccaaagagtgatgctcctattatcaccccaaacgagctcgctgaggctgatggatttatcttcggcttcccaacgaggtttggtatgatggctgctcagttcaaggcatttttagatgcgaccggcggcctttggaggactcagcaactcgccggtaaaccagccggaatcttctacagcacagggtcccaaggtggtggtcaagaaaccaccgcattaactgccattactcagctggttcatcacgggatgatctttgtcccgattggctacacatttggtgccggaatgtttgagatggaaaatgtgaaaggtggaagcccgtacggggcgggaacatttgccggagatgggtcgagacagccaacggaactggagttggggcaagcatttcaccaagggaagtacattgccgccataagtaagaagctcaagggacctgctgctgcttag

SEQ ID NO: 31373 - protein, 216 aa, Arabidopsis thaliana
  misc_feature (1)..(216): Ceres Seq. ID no. 13579849
KSFQRIERTSSMATKVYIVYYSMYGHVEKLAQEIRKGAASVDGVEAILWQVPETLQEDVLSKMSAPPKSDAPIITPNELAEADGFIFGFPTRFGMMAAQFKAFLDATGGLWRTQQLAGKPAGIFYSTGSQGGGQETTALTAITQLVHHGMIFVPIGYTFGAGMFEMENVKGGSPYGAGTFAGDGSRQPTELELGQAFHQGKYIAAISKKLKGPAAA

SEQ ID NO: 31374 - protein, 205 aa, Arabidopsis thaliana
  misc_feature (1)..(205): Ceres Seq. ID no. 13579850
MATKVYIVYYSMYGHVEKLAQEIRKGAASVDGVEAILWQVPETLQEDVLSKMSAPPKSDAPIITPNELAEADGFIFGFPTRFGMMAAQFKAFLDATGGLWRTQQLAGKPAGIFYSTGSQGGGQETTALTAITQLVHHGMIFVPIGYTFGAGMFEMENVKGGSPYGAGTFAGDGSRQPTELELGQAFHQGKYIAAISKKLKGPAAA

SEQ ID NO: 31375 - protein, 194 aa, Arabidopsis thaliana
  misc_feature (1)..(194): Ceres Seq. ID no. 13579851
MYGHVEKLAQEIRKGAASVDGVEAILWQVPETLQEDVLSKMSAPPKSDAPIITPNELAEADGFIFGFPTRFGMMAAQFKAFLDATGGLWRTQQLAGKPAGIFYSTGSQGGGQETTALTAITQLVHHGMIFVPIGYTFGAGMFEMENVKGGSPYGAGTFAGDGSRQPTELELGQAFHQGKYIAAISKKLKGPAAA

SEQ ID NO: 31376 - DNA, 3198 bp, Arabidopsis thaliana
  misc_feature (1)..(3198): Ceres Seq. ID no. 13579859
acaatcctcataatcactttcgaaattacatttacgctttcttgcaatcaaattttccgatcttaagttcagaagacgatgtcagaggtggaaatagagaacgctgctacgatcgaaggaaacaccgctgcggatgcgccggtgacggatgcggccgttgagaagaagcctgcagcgaaaggacgaaagacgaagaatgttaaggaagtgaaggagaagaagactgttgctgccgctccgaagaagagaactgtttcatctcatcctacttacgaagagatgattaaggatgcgattgttacgttgaaagagagaactggatctagccaatacgcgattcagaagttcatcgaggagaagcgtaaggagcttcctccaacattcagaaagctgttgcttctcaatctgaagagactcgttgcttctgggaagcttgtgaaggtcaaagcctcgtttaaactcccatcggcgtcggctaaagcatcatcccctaaggcggcagcggagaaatctgctcctgcgaagaagaaaccggcgactgtggcggttaccaaggcgaagagaaaggtcgctgcggcttccaaggctaagaaaacaatcgccgttaaacctaagactgctgctgctaagaaagtgaccgcgaaggctaaggctaagcccgttcctcgtgccactgctgctgcaactaagaggaaagctgttgatgcgaagcccaaggctaaggctagaccagccaaggcagccaaaacggccaaggttacatctccggctaagaaagctgttgctgccacgaagaaagttgctacggtggccacaaagaagaagactccggttaagaaggttgtgaagccaaagacggttaagtctccagcaaagagggcttcttctagggttaagaagtgaagttagggtttgtaggtagaagaatggttaacgatagtttagacttgtataattcaatcatctttatgcgactttgtttgcttttcttctttcagtgttcttgttattcacagttcctttggactacccaaaaaaaaaaaaaaaactatccagggttggatccaaccctggatagtttttttttttttttttttttttttttttaaaaagaaacttttttttttttttaccacatgattcaaaataaatttacacaattcttacatgtactttataataaattttttacaacataacctttatataaagggaacaaaccccagtttaccgtttaccaaaaatcaagtagaatccattcccatcatcaaccaaaaggccttatcagctttagatctatttcatttccatcttatgcttttctctctattgattacagaaaagcataaacaaccatagtcttgtcttcttcatctgatcattagttgtcgtgcctttacatttcagcgaatctgatggtattgtgtaatgcctcgttttggtggtagctttctcaagatgaagaggaccagagaggagggtaatatctctaccaacaggtaatatatgaagttaaggatggggtgatctaacacatcaaggtttgccccctcatcgaaagcagcaaagcacatcatgatacatctgatgaggaaacacgtaaagcatatggttgtcacgtaaccaacctcttgcagctttttgcgccgccctttagattctactggaaaccgttgcaacattaggaaaagccttccaccataaagtaaaaatccaagggcagcgaacaatgaaacacctgcaaagaacatcttagataggattaccataactcgaacaggcttccaccacaaaaccaaccatagagcaatctgaactacatatacaactgcattaattgtgaagaagcttggcctgagtccatcagtcgatactgcacgcgcctgataataaatttcagcccagaaaagaaccagaagagcataggtggtgaagaaagcaagacttggaatatcaagcaagatatgttgcagaatctctggttgcataaactgaacatttcgcctgaagacaaacaccacagcacgaactccattaacaacgaaattgagaaagtgaaagaccttttgcgtcgtccaaccatattcaggaactctcaattgtattctcacaagttgaatcacagcaacgagggaaacgattccgtagagaacagcgagaacatggaagatacgatcctgccaaatcggagattcgtttacgtctgaccaccaattcgaagcttctttgagattcaacatctccaccgccgacgaagacgacgacgacatcatctccgacgcaaatttcgtaacctcgacgccgccgattctcatctacacgagtcagattccttctcgattcagattttgaatatacataatgagaactctctggatttgaatcacctctttttatttctttctttttttgttattttccccacggttctcgagaaccgattcatctttccagctttcttcactttttcctttatataaagttagaaaaacaaaaaaaaacaaaatagttagaaaaaatctgagagaaacagaagaaacataaaaaaaatgaggccattgagcattaaaccaacatcgttagatgtagctagacatgccacatcagtagaatcatttgggaatcaccgaccgccgatatcgccgtggcactcaccggtgccgtacctattcggtggtcttgcggcgatgttaggcctcatagccttcgctttacttatcctagcctgctcttactggcgcttgtcaacctccggtgatgactccggcgaaagagtcgacgaggaaaaagagagtcggtctggagtgaaggcggctagcgcggcgtgcgaggagaaggttcttgtcataatggccggagatgacttgccgaggtttctggccacgccggcggcgaacaaatgcatgtgcggtcacgagggtagaatggtaattttcaaggaggatggtattggtgctggagaggagaaaatgggagacagagagaaagccaaagaaaatgaagaaacaacgagtcagtgagcttttttgttttcttttcttctctcagtcttgtctttttttttttgttggggaattttccttcgtgttttcacgggaaatgtaaaatttactgagagaaaattttgggttatgattaatgaatgtttgcttgtaatttcctatccccaatggtggaaaactcgtttttagtttttgt

SEQ ID NO: 31377 - protein, 274 aa, Arabidopsis thaliana
  misc_feature (1)..(274): Ceres Seq. ID no. 13579860
MSEVEIENAATIEGNTAADAPVTDAAVEKKPAAKGRKTKNVKEVKEKKTVAAAPKKRTVSSHPTYEEMIKDAIVTLKERTGSSQYAIQKFIEEKRKELPPTFRKLLLLNLKRLVASGKLVKVKASFKLPSASAKASSPKAAAEKSAPAKKKPATVAVTKAKRKVAAASKAKKTIAVKPKTAAAKKVTAKAKAKPVPRATAAATKRKAVDAKPKAKARPAKAAKTAKVTSPAKKAVAATKKVATVATKKKTPVKKVVKPKTVKSPAKRASSRVKK

SEQ ID NO: 31378 - protein, 207 aa, Arabidopsis thaliana
  misc_feature (1)..(207): Ceres Seq. ID no. 13579861
MIKDAIVTLKERTGSSQYAIQKFIEEKRKELPPTFRKLLLLNLKRLVASGKLVKVKASFKLPSASAKASSPKAAAEKSAPAKKKPATVAVTKAKRKVAAASKAKKTIAVKPKTAAAKKVTAKAKAKPVPRATAAATKRKAVDAKPKAKARPAKAAKTAKVTSPAKKAVAATKKVATVATKKKTPVKKVVKPKTVKSPAKRASSRVKK

SEQ ID NO: 31379 - protein, 156 aa, Arabidopsis thaliana
  misc_feature (1)..(156): Ceres Seq. ID no. 13579862
MRPLSIKPTSLDVARHATSVESFGNHRPPISPWHSPVPYLFGGLAAMLGLIAFALLILACSYWRLSTSGDDSGERVDEEKESRSGVKAASAACEEKVLVIMAGDDLPRFLATPAANKCMCGHEGRMVIFKEDGIGAGEEKMGDREKAKENEETTSQ

SEQ ID NO: 31380 - DNA, 2318 bp, Arabidopsis thaliana
  misc_feature (1)..(2318): Ceres Seq. ID no. 13579877
acggtcgtcttgtttggtctctgtttttcacgccggagatagagagagagaagtaaaaaagcgagaaaaagctagaaactttagaatacccaataatggatccgatcgaatctgtcgagtacaatggcttcgagacctctaacggtaacgtcgaccatggttggaagaaagtcgtgtacccgaaacgtcaccggaagcaaaaacaagcggatcaagcgacggcaaatggtggcaaaactgttgcttcaaatggaaccgtagctaacggcggagataacgttttccgttcgttggaagagcaagctgaggatcgtcgacgacggatcttagcggcgaagatgactgctattgattcagatgatgatggtgttgttagatctaaacatcgatctaatggttacggtgatgatgggtatgattttgatggtagtgatgatgagatcgcaacgctgaaggttgaggaagttaagaagccaaagcctaagaaggagaagaagcctaaagtttctttgcctgaagctgcatcaaagatcgatcctttaaatctcgaagcttttctcgttgaagcatcggaatcgtatgcgagtcagcctgagattcagctaatgagatttgctgattactttgggagagcactttctggagtctcatctgtgcaatttccatgggtgaagatgtttaaagagtctcctttgtctaagctgattgaagttccgttagctcatattccggaaccagtgtataagacatcagttgattggatcaaccatcgtccaattgaggcacttggagcctttgtgttgtgggcttttgattgtattctcacagatttagcagcacaacaaggtggtgctaaaggtgggaagaagggtggtcaacaaactacttccaaatctcaggtggcaatatttgttgcattagcgatggtattgcgtaggaagcctgatgctttgactaatgtattgccaactctgagggagaatcctaagtatcagggtcaggataagcttccggttacagtttggatgatggctcaggcctcccaaggtgatatagctgtaggcttgtattcatgggctcacaacttgttacctgttgtcggtaataagaactgtaaccctcagtcaagggatctcatcctgcagttggttgagaaaattttgacgaatccaaaggctcgtaccatacttgtaaatggagctgttaggaagggagagcgtttgattccacctccttcatttgagatcttgttgcggcttacattccctgcatcatctgcaagagtaaaggctacagagaggtttgaggcaatatatcccttgctgaaagaagtggctcttgctggtgcaccaggaagcaaggcgatgaaacaagtcacacaacagatattcacttttgctctgaaattagctggagaaggaaatcctgttttagccaaggaagctacagcaattgctatctggtctgtgacccaaaactttgattgctgcaagcactgggacaatctctacaaggagaatctggaagctagtgttgctgttcttaaaaagcttgttgaagaatggaaagagcattcggtcaaactatcatcatcaccgaatgatgctctcactctcaaccgaactatgaaaagcttcaggctaaagaacgaggaggtcatcactgagggaggagccaatgcttctctttacaaagaagctgacaagtcttgcaaaacgatctcggggagactctcccgtggaagtggctgcctcaaaggaacagccattactttagtgtttctagctgctgcaggagccgctgctgcagctgttctatcttccaacccggaggttacaaacgagctgaagaacctggtggactcattggagctgcatgaatacatcaacaaatacactgaggttatctccacagctttgaagaagtaagagaaaagaaacaatcaaaaacctgaggatgatatagagaggtaactcttaatatcatcggtgtagagaattacttaaaagttaaagccttttactctccaagatacaaaattttgaacatcttgaccagaacttaggggttatggaggtgaagagaataatgagagttttcgtttttataatcacagagtctgttcaaagttgttgaaggttttttttagactgtttaatttgtttctgagataatttatatttcttcttttttccctgatgacaataaagttatttctgtttattacatgtttgatttggatttctcttgaacataagtgtatgcacaagccattacattgtgttcatgtgaatgcagagtatatacatacagtctca

SEQ ID NO: 31381 - protein, 610 aa, Arabidopsis thaliana
  misc_feature (1)..(610): Ceres Seq. ID no. 13579878
MDPIESVEYNGFETSNGNVDHGWKKVVYPKRHRKQKQADQATANGGKTVASNGTVANGGDNVFRSLEEQAEDRRRRILAAKMTAIDSDDDGVVRSKHRSNGYGDDGYDFDGSDDEIATLKVEEVKKPKPKKEKKPKVSLPEAASKIDPLNLEAFLVEASESYASQPEIQLMRFADYFGRALSGVSSVQFPWVKMFKESPLSKLIEVPLAHIPEPVYKTSVDWINHRPIEALGAFVLWAFDCILTDLAAQQGGAKGGKKGGQQTTSKSQVAIFVALAMVLRRKPDALTNVLPTLRENPKYQGQDKLPVTVWMMAQASQGDIAVGLYSWAHNLLPVVGNKNCNPQSRDLILQLVEKILTNPKARTILVNGAVRKGERLIPPPSFEILLRLTFPASSARVKATERFEAIYPLLKEVALAGAPGSKAMKQVTQQIFTFALKLAGEGNPVLAKEATAIAIWSVTQNFDCCKHWDNLYKENLEASVAVLKKLVEEWKEHSVKLSSSPNDALTLNRTMKSFRLKNEEVITEGGANASLYKEADKSCKTISGRLSRGSGCLKGTAITLVFLAAAGAAAAAVLSSNPEVTNELKNLVDSLELHEYINKYTEVISTALKK

SEQ ID NO: 31382 - protein, 529 aa, Arabidopsis thaliana
  misc_feature (1)..(529): Ceres Seq. ID no. 13579879
MTAIDSDDDGVVRSKHRSNGYGDDGYDFDGSDDEIATLKVEEVKKPKPKKEKKPKVSLPEAASKIDPLNLEAFLVEASESYASQPEIQLMRFADYFGRALSGVSSVQFPWVKMFKESPLSKLIEVPLAHIPEPVYKTSVDWINHRPIEALGAFVLWAFDCILTDLAAQQGGAKGGKKGGQQTTSKSQVAIFVALAMVLRRKPDALTNVLPTLRENPKYQGQDKLPVTVWMMAQASQGDIAVGLYSWAHNLLPVVGNKNCNPQSRDLILQLVEKILTNPKARTILVNGAVRKGERLIPPPSFEILLRLTFPASSARVKATERFEAIYPLLKEVALAGAPGSKAMKQVTQQIFTFALKLAGEGNPVLAKEATAIAIWSVTQNFDCCKHWDNLYKENLEASVAVLKKLVEEWKEHSVKLSSSPNDALTLNRTMKSFRLKNEEVITEGGANASLYKEADKSCKTISGRLSRGSGCLKGTAITLVFLAAAGAAAAAVLSSNPEVTNELKNLVDSLELHEYINKYTEVISTALKK

SEQ ID NO: 31383 - protein, 440 aa, Arabidopsis thaliana
  misc_feature (1)..(440): Ceres Seq. ID no. 13579880
MRFADYFGRALSGVSSVQFPWVKMFKESPLSKLIEVPLAHIPEPVYKTSVDWINHRPIEALGAFVLWAFDCILTDLAAQQGGAKGGKKGGQQTTSKSQVAIFVALAMVLRRKPDALTNVLPTLRENPKYQGQDKLPVTVWMMAQASQGDIAVGLYSWAHNLLPVVGNKNCNPQSRDLILQLVEKILTNPKARTILVNGAVRKGERLIPPPSFEILLRLTFPASSARVKATERFEAIYPLLKEVALAGAPGSKAMKQVTQQIFTFALKLAGEGNPVLAKEATAIAIWSVTQNFDCCKHWDNLYKENLEASVAVLKKLVEEWKEHSVKLSSSPNDALTLNRTMKSFRLKNEEVITEGGANASLYKEADKSCKTISGRLSRGSGCLKGTAITLVFLAAAGAAAAAVLSSNPEVTNELKNLVDSLELHEYINKYTEVISTALKK

SEQ ID NO: 31384 - DNA, 1061 bp, Arabidopsis thaliana
  misc_feature (1)..(1061): Ceres Seq. ID no. 13580294
atgtcttcatcacctcttctttaacgcctctggctctgcatttctcagtctttttgcacaagaaacaaagctcaggaaaacctcaaaaccctaagctatgagaacaagcaaccatctcataggtttagtcaacttcctcactttcctcctctcaataccaatcctcggcggtggaatatggttaagcagccgagctaactccaccgactgtttaagattccttcaatggcctctcatcgtcatcggaatctcaatcatggtcgtatctttagctggattcgctggagcttgttaccgtaacaagttccttatgtggctatacctagtagtcatgcttctcatcatcgctgctcttatcggtttcatcatcttcgcttacgcggttacagataaaggatccggtcgaaccgtacttaaccggggttatcttgactattatcttgaagattactctggttggttgaaagatcgagtttctgatgatagctattggggtaaaattagttcttgtcttagagattctggtgcttgtagaaagatcgaagaaattttaatggtgtacctgaaactgctgatatgttcttccttagaagacttagccctgttgagtccggttgttgcaagccaccaacagattgcggtttttcatatgtgaatgagaccggatgggacacgagaggagggatgataggaccgaaccaggactgtatggtgtggagcaacgaccagagcatgctctgttatcagtgtagttcttgtaaagctggtgttcttgggagtttgaagaagagttggagaaaagtatcggtgatcaacattgtggtacttatcattctagttatcttttacgttatcgcttatgcagcttataggaatgtcaagaggaacgataacgatgaaccggctggtgaagctaggatgacaaaatcacatcctagtcatttccatctttgatcaaaatttggaacagttcaaaaaaatgtatcgaggctttgatttatgtttaaaggttttagtacttttgtgtatgtttttggtatgtaacacatttttttgtgtgc

SEQ ID NO: 31385 - protein, 185 aa, Arabidopsis thaliana
  misc_feature (1)..(185): Ceres Seq. ID no. 13580295
MRTSNHLIGLVNFLTFLLSIPILGGGIWLSSRANSTDCLRFLQWPLIVIGISIMVVSLAGFAGACYRNKFLMWLYLVVMLLIIAALIGFIIFAYAVTDKGSGRTVLNRGYLDYYLEDYSGWLKDRVSDDSYWGKISSCLRDSGACRKIEEILMVYLKLLICSSLEDLALLSPVVASHQQIAVFHM

SEQ ID NO: 31386 - protein, 132 aa, Arabidopsis thaliana
  misc_feature (1)..(132): Ceres Seq. ID no. 13580296
MVVSLAGFAGACYRNKFLMWLYLVVMLLIIAALIGFIIFAYAVTDKGSGRTVLNRGYLDYYLEDYSGWLKDRVSDDSYWGKISSCLRDSGACRKIEEILMVYLKLLICSSLEDLALLSPVVASHQQIAVFHM

SEQ ID NO: 31387 - protein, 125 aa, Arabidopsis thaliana
  misc_feature (1)..(125): Ceres Seq. ID no. 13580297
MFFLRRLSPVESGCCKPPTDCGFSYVNETGWDTRGGMIGPNQDCMVWSNDQSMLCYQCSSCKAGVLGSLKKSWRKVSVINIVVLIILVIFYVIAYAAYRNVKRNDNDEPAGEARMTKSHPSHFHL

SEQ ID NO: 31388 - DNA, 1128 bp, Arabidopsis thaliana
  misc_feature (1)..(1128): Ceres Seq. ID no. 13580354
atcggtacgacgttctttttggttctttcttgtttctccattcatccataagaaaagataatgtagttctgcttgttcgtccattttctgattttggtatcagtttttgtatttgtgtatagtaaatctgaaggagttttccaaagacaaaccaacatggaagaccgcgtcttgatcaagaacgatgtcactgaattgataggtaacacaccaatggtgtatctaaataaaattgtggatggttgtgtggctcgtattgctgccaagcttgagatgatggagccttgctctagcatcaaagatagaatcgcatatagtatgatcaaagatgctgaagacaaaggattgattactccgggaaagagtacattgattgaggcaacgggtggtaacaccgggattggtttagccagcatcggggcttcaagaggttataaagtgatccttttgatgccttcaacaatgagtttagaaaggagaatcattctaagagcattaggtgcagaggttcatctcactgacattagcataggcattaaaggacagttggagaaagctaaagagatattaagcaaaactcccggtggttacataccacaccagtttattaatcctgaaaatccagagattcattatagaaccacgggtccggagatttggagagattcagcagggaaagtagatatcttagtcgccggtgttggaactggtggaacggttactggaacagggaagtttcttaaagaaaagaacaaagatattaaggtttgtgtggtggaaccttccgaaagtgcggtactcagcggaggaaaaccaggtccacatttgatccaaggaataggctctggtgaaattccagccaatttggacttaagcattgttgatgaaatcattcaagtgactggtgaggaagctattgaaacaaccaagcttcttgctatcaaagaaggattattggttggaatatcctctggagcctcagctgcggctgcgttaaaggttgcaaagcggcctgaaaacgtagggaaactcattgtggttatttttcctagtggaggagaacgttatttatcgactgaattgttcgagtcagtcagatatgaagctgagaatttgccagttgaatga

SEQ ID NO: 31389 - protein, 323 aa, Arabidopsis thaliana
  misc_feature (1)..(323): Ceres Seq. ID no. 13580355
MEDRVLIKNDVTELIGNTPMVYLNKIVDGCVARIAAKLEMMEPCSSIKDRIAYSMIKDAEDKGLITPGKSTLIEATGGNTGIGLASIGASRGYKVILLMPSTMSLERRIILRALGAEVHLTDISIGIKGQLEKAKEILSKTPGGYIPHQFINPENPEIHYRTTGPEIWRDSAGKVDILVAGVGTGGTVTGTGKFLKEKNKDIKVCVVEPSESAVLSGGKPGPHLIQGIGSGEIPANLDLSIVDEIIQVTGEEAIETTKLLAIKEGLLVGISSGASAAAALKVAKRPENVGKLIVVIFPSGGERYLSTELFESVRYEAENLPVE

SEQ ID NO: 31390 - protein, 304 aa, Arabidopsis thaliana
  misc_feature (1)..(304): Ceres Seq. ID no. 13580356
MVYLNKIVDGCVARIAAKLEMMEPCSSIKDRIAYSMIKDAEDKGLITPGKSTLIEATGGNTGIGLASIGASRGYKVILLMPSTMSLERRIILRALGAEVHLTDISIGIKGQLEKAKEILSKTPGGYIPHQFINPENPEIHYRTTGPEIWRDSAGKVDILVAGVGTGGTVTGTGKFLKEKNKDIKVCVVEPSESAVLSGGKPGPHLIQGIGSGEIPANLDLSIVDEIIQVTGEEAIETTKLLAIKEGLLVGISSGASAAAALKVAKRPENVGKLIVVIFPSGGERYLSTELFESVRYEAENLPVE

SEQ ID NO: 31391 - protein, 284 aa, Arabidopsis thaliana
  misc_feature (1)..(284): Ceres Seq. ID no. 13580357
MMEPCSSIKDRIAYSMIKDAEDKGLITPGKSTLIEATGGNTGIGLASIGASRGYKVILLMPSTMSLERRIILRALGAEVHLTDISIGIKGQLEKAKEILSKTPGGYIPHQFINPENPEIHYRTTGPEIWRDSAGKVDILVAGVGTGGTVTGTGKFLKEKNKDIKVCVVEPSESAVLSGGKPGPHLIQGIGSGEIPANLDLSIVDEIIQVTGEEAIETTKLLAIKEGLLVGISSGASAAAALKVAKRPENVGKLIVVIFPSGGERYLSTELFESVRYEAENLPVE

SEQ ID NO: 31392 - DNA, 1159 bp, Arabidopsis thaliana
  misc_feature (1)..(1159): Ceres Seq. ID no. 13580377
atataaacacaaaagcctttagtatcattctcgaaaaccaccaaaaacctctttataacccaacaaacaaagtctctacttcttcttcaatcactgaaacacaacaccaaaaaagaaaaaagtatgtctcttcttccccatctcatcctctacctaacacttttgacggtggttgttactggagaaactctccgaccaagaatctacagcgagacatgccctgaagctgaatccatagtaagaagagaaatgaagaaagcatgatcaaagaagcaagaagcgtcgcttccgtcatgcgtttccaatttcacgactgtttcgtcaatggatgtgacgcatctctgttgcttgacgacacaccaaacatgcttggtgaaaaactatcactttccaacatcgattcactaagatctttcgaagtcgttgacgacattaaagaagctctagagaaagcttgtccagctactgtttcttgtgccgatatcgttatcatggccgctcgtgacgccgttgctcttacaggaggaccagattgggaagtgaagctagggaggaaagacagtttaacagcgagtcagcaagattccgacgatataatgccaagtccaagagccaacgcaactttcttgattgatctcttcgaaagattcaatctttctgtaaaagacatggttgctttatcagggtcacactcaataggtcaaggtcggtgtttttcaatcatgttcagactttataaccaatccggttctggtaaaccggatccagctcttgaaccgacttaccgtaagaagcttgacaacctttgtcctttgggtggagatgagaatgtgactggagatctagatgcaacacctcaggtttttgataatcagtatttcaaagacttggtttcagggagagggtttcttaactctgatcagactttgtacacgaatctagtgacgagagagtatgtgaagatgtttagtgaggatcaagatgagttcttcagggcttttgcagaaggcatggtgaagttgggtgatttgcaatctgggagagatggtgagattaggtttaattgtagagttgttaatagaaggcctattgatgtattgcttgtatcttgaattatcattagtaaagagaagaaatcttaattatgacttctaaattg

SEQ ID NO: 31393 - protein, 283 aa, Arabidopsis thaliana
  misc_feature (1)..(283): Ceres Seq. ID no. 13580378
MIKEARSVASVMRFQFHDCFVNGCDASLLLDDTPNMLGEKLSLSNIDSLRSFEVVDDIKEALEKACPATVSCADIVIMAARDAVALTGGPDWEVKLGRKDSLTASQQDSDDIMPSPRANATFLIDLFERFNLSVKDMVALSGSHSIGQGRCFSIMFRLYNQSGSGKPDPALEPTYRKKLDNLCPLGGDENVTGDLDATPQVFDNQYFKDLVSGRGFLNSDQTLYTNLVTREYVKMFSEDQDEFFRAFAEGMVKLGDLQSGRDGEIRFNCRVVNRRPIDVLLVS

SEQ ID NO: 31394 - protein, 272 aa, Arabidopsis thaliana
  misc_feature (1)..(272): Ceres Seq. ID no. 13580379
MRFQFHDCFVNGCDASLLLDDTPNMLGEKLSLSNIDSLRSFEVVDDIKEALEKACPATVSCADIVIMAARDAVALTGGPDWEVKLGRKDSLTASQQDSDDIMPSPRANATFLIDLFERFNLSVKDMVALSGSHSIGQGRCFSIMFRLYNQSGSGKPDPALEPTYRKKLDNLCPLGGDENVTGDLDATPQVFDNQYFKDLVSGRGFLNSDQTLYTNLVTREYVKMFSEDQDEFFRAFAEGMVKLGDLQSGRDGEIRFNCRVVNRRPIDVLLVS

SEQ ID NO: 31395 - protein, 248 aa, Arabidopsis thaliana
  misc_feature (1)..(248): Ceres Seq. ID no. 13580380
MLGEKLSLSNIDSLRSFEVVDDIKEALEKACPATVSCADIVIMAARDAVALTGGPDWEVKLGRKDSLTASQQDSDDIMPSPRANATFLIDLFERFNLSVKDMVALSGSHSIGQGRCFSIMFRLYNQSGSGKPDPALEPTYRKKLDNLCPLGGDENVTGDLDATPQVFDNQYFKDLVSGRGFLNSDQTLYTNLVTREYVKMFSEDQDEFFRAFAEGMVKLGDLQSGRDGEIRFNCRVVNRRPIDVLLVS

SEQ ID NO: 31396 - DNA, 1027 bp, Arabidopsis thaliana
  misc_feature (1)..(1027): Ceres Seq. ID no. 13580388
gattacacaacacacgttcgtttctttcttcttctaacacactctgagtcttgaaggtcaacaacgtcgagaataatggcatcatctctttgtgcttcttctgccatcgctgccatttcttctccaagtttcttgggctaagaaactgaggctgaagaagaagttgactgttccagctgtgtccaggccagatgcgtcggtgcgcgccgtcgcagctgatccagatagaccaatctggttcccgggaagcactcctccagagtggctagacggtagcctccctggtgacttcggatttgatcctcttggtctttcatcggacccggacagtctaaaatggaacgtacaagccgagatagtccactgccgatgggctatgctaggagccgccgggatattcatcccagagttcctaacgaagatcggaatcctcaacactccgtcatggtacacggcgggagagcaagagtatttcacggacaaaaccacactctttgtcgttgagctcatcttgatcggatgggcagaaggacgtagatgggccgatatcatcaagcccggtagcgtcaacactgacccagtcttcccaaacaacaaactgacgggcacagacgttggttacccaggtgggttatggttcgacccgttgggttggggatccggtagcccggctaaactcaaggagttgaggaccaaggagatcaagaacggaaggttggctatgttggcagtgatgggtgcttggttccaacacatctacacgggcactggtcctattgataacctttttgcacatcttgctgatcctggtcacgccacaatcttcgctgctttcacacccaagtgagacaacgaaaaagggttatggggaggtgaatgcgtttgtgtgtgatcatgtttgtacaaatatcattttgaacttaaaattattatgtactttatataaattgtggtcgaatgcaaattaaggttccccgtaacactctcttttcctaactcaatgatcataagatgcttttacattgtc

SEQ ID NO: 31397 - protein, 156 aa, Arabidopsis thaliana
  misc_feature (1)..(156): Ceres Seq. ID no. 13580389
MLGAAGIFIPEFLTKIGILNTPSWYTAGEQEYFTDKTTLFVVELILIGWAEGRRWADIIKPGSVNTDPVFPNNKLTGTDVGYPGGLWFDPLGWGSGSPAKLKELRTKEIKNGRLAMLAVMGAWFQHIYTGTGPIDNLFAHLADPGHATIFAAFTPK

SEQ ID NO: 31398 - DNA, 1905 bp, Arabidopsis thaliana
  misc_feature (1)..(1905): Ceres Seq. ID no. 13580417
aaaccaaaacacaattaagctaaaaaaaaaaccaaaggatgtctcagaaactcatgttcttgttcacccttgcctgcctctcctcgttaccatctccttttatctccgcccaaataccggccattggaaatgccacttcaccgtcaaatatatgtagattcgcgccggatccatcttattgtagatcggttcttccaaaccagcccggagatatatattcctacggacgtttgtctctacgaagatccctctccagcccgccggttcatttcgatgatcgacgctgaacttgaccggaaaggcaaagtggctgctaaatccacagtaggggctctcgaagactgcaaattcctagccagcctgactatggactacctccttagtagctcacagacggctgattccaccaaaacactgtcgttatctagggccgaggatgttcatacatttctgagtgctgccatcaccaatgagcagacttgtcttgaaggacttaaatcaacggcgtccgaaaatggtctttccggtgatcttttcaacgatacaaaactctatggggtgtctcttgcccttttctccaaaggttgggtgccaagaaggcaaagatcgagaccgatttggcaaccacaagccaggttcaaaaagttttttggtttccgtaacggtaaattaccgttaaagatgacggaaagggcacgtgccgtttacaacaccgtgactagaagaaagcttctccaatcggatgcagacgccgttcaggtgagcgacattgtgacggtgatccagaacgggacgggaaacttcacgaccataaacgccgccattgcagctgcaccaaataaaactgacggtagtaacggttacttcttgatctacgtaacggcgggattgtacgaggaatacgtggaagttcccaagaacaagagatatgtgatgatgatcggtgacggcatcaaccagaccgttatcaccggaaacaggagtgtcgttgatggatggacaactttcaattcagccacatttattctatcaggtcccaactttattggtgtaaacataacaatccgcaatacggcaggaccaaccaaaggccaagctgtggcattgaggagtggtggggacttgtctgttttctacagttgtagttttgaagcctatcaagacacgttatacacacattctctcagacagttttatcgtgaatgtgatgtctatggtactgttgattttatatttggtaacgctgcagtggtattacaaaactgtaatttgtatccacgtcaacctcgcaaaggtcaatcgaacgaggttacggctcaaggtcgtactgatccgaaccaaaacactgggacggcaattcatggttgtactataagaccggcagatgatttggctacgagcaactatacagtgaagacttatcttggtcgaccatggaaggaatattctagaaccgttgtcatgcaaacttacatagacgggtttctagaaccgagtggttggaatgcatggtctggtgattttgcattgagcacactttactacgcggaatataataataccggacctggttctgacacgacaaaccgagtcacttggcctggttatcacgtcatcaacgcaactgatgcttccaatttcacggtcaccaatttccttgttggtgaaggttggattggacaaaccggagtgcctttcgtgggtggactgatcgcataatcaaccaaccttatactatatatgatatgttaattagttaaattatttaatcattcatgtgttgtttttttaatcaaataattatttagtggtgcctgattcaatacgatttgtaataactttaacttactattgtacaaccgaatggttttcttcgaaatctaataataatgaacgggtaatcag

SEQ ID NO: 31399 - protein, 529 aa, Arabidopsis thaliana
  misc_feature (1)..(529): Ceres Seq. ID no. 13580418
MPLHRQIYVDSRRIHLIVDRFFQTSPEIYIPTDVCLYEDPSPARRFISMIDAELDRKGKVAAKSTVGALEDCKFLASLTMDYLLSSSQTADSTKTLSLSRAEDVHTFLSAAITNEQTCLEGLKSTASENGLSGDLFNDTKLYGVSLALFSKGWVPRRQRSRPIWQPQARFKKFFGFRNGKLPLKMTERARAVYNTVTRRKLLQSDADAVQVSDIVTVIQNGTGNFTTINAAIAAAPNKTDGSNGYFLIYVTAGLYEEYVEVPKNKRYVMMIGDGINQTVITGNRSVVDGWTTFNSATFILSGPNFIGVNITIRNTAGPTKGQAVALRSGGDLSVFYSCSFEAYQDTLYTHSLRQFYRECDVYGTVDFIFGNAAVVLQNCNLYPRQPRKGQSNEVTAQGRTDPNQNTGTAIHGCTIRPADDLATSNYTVKTYLGRPWKEYSRTVVMQTYIDGFLEPSGWNAWSGDFALSTLYYAEYNNTGPGSDTTNRVTWPGYHVINATDASNFTVTNFLVGEGWIGQTGVPFVGGLIA

SEQ ID NO: 31400 - protein, 481 aa, Arabidopsis thaliana
  misc_feature (1)..(481): Ceres Seq. ID no. 13580419
MIDAELDRKGKVAAKSTVGALEDCKFLASLTMDYLLSSSQTADSTKTLSLSRAEDVHTFLSAAITNEQTCLEGLKSTASENGLSGDLFNDTKLYGVSLALFSKGWVPRRQRSRPIWQPQARFKKFFGFRNGKLPLKMTERARAVYNTVTRRKLLQSDADAVQVSDIVTVIQNGTGNFTTINAAIAAAPNKTDGSNGYFLIYVTAGLYEEYVEVPKNKRYVMMIGDGINQTVITGNRSVVDGWTTFNSATFILSGPNFIGVNITIRNTAGPTKGQAVALRSGGDLSVFYSCSFEAYQDTLYTHSLRQFYRECDVYGTVDFIFGNAAVVLQNCNLYPRQPRKGQSNEVTAQGRTDPNQNTGTAIHGCTIRPADDLATSNYTVKTYLGRPWKEYSRTVVMQTYIDGFLEPSGWNAWSGDFALSTLYYAEYNNTGPGSDTTNRVTWPGYHVINATDASNFTVTNFLVGEGWIGQTGVPFVGGLIA

SEQ ID NO: 31401 - protein, 450 aa, Arabidopsis thaliana
  misc_feature (1)..(450): Ceres Seq. ID no. 13580420
MDYLLSSSQTADSTKTLSLSRAEDVHTFLSAAITNEQTCLEGLKSTASENGLSGDLFNDTKLYGVSLALFSKGWVPRRQRSRPIWQPQARFKKFFGFRNGKLPLKMTERARAVYNTVTRRKLLQSDADAVQVSDIVTVIQNGTGNFTTINAAIAAAPNKTDGSNGYFLIYVTAGLYEEYVEVPKNKRYVMMIGDGINQTVITGNRSVVDGWTTFNSATFILSGPNFIGVNITIRNTAGPTKGQAVALRSGGDLSVFYSCSFEAYQDTLYTHSLRQFYRECDVYGTVDFIFGNAAVVLQNCNLYPRQPRKGQSNEVTAQGRTDPNQNTGTAIHGCTIRPADDLATSNYTVKTYLGRPWKEYSRTVVMQTYIDGFLEPSGWNAWSGDFALSTLYYAEYNNTGPGSDTTNRVTWPGYHVINATDASNFTVTNFLVGEGWIGQTGVPFVGGLIA

SEQ ID NO: 31402 - DNA, 843 bp, Arabidopsis thaliana
  misc_feature (1)..(843): Ceres Seq. ID no. 13580431
aaaaacttgtgcgtgattcatcgtcacatcgccttgatcatggaaactcctatcgatgctccgaataaggacgaacatgaatgccctaggtggaagaaatcaactgtagtttttgtgttgggtggtcctggaagtggaaaaggtactcagtgtgctaatgttgtgaagcactttagctatacccattttagtgctggtgatcttctcagagcagaaattaagtccggttctgaatttggagccatgatccaaagtatgattgcagaggggagaatagtgccgtctgagatcacagtgaaacttttgtgtaaagctatggaggaaagtggtaatgataagttccttattgatggcttccctcgcaatgaagaaaatcgaaacgtattcgaaaatgttgctagaatcgagcctgcttttgttctattctttgattgtccagaagaagaactagaaagacgcattatgagcaggaaccagggaagagaagacgataatatagagaccataaagaagcgatttaaagtgtttgttgaatctaccctcccaattattagctactacgaatcgaaagggaaacttcgaaagatcaatgctgcaaaatccagcgaagaggttttcgaggctgtcagagttctatttgcatctgaaacttgacaagcatcaaggacttggattcaccgaacagaacaaaacagagactccaaagtcaatgatgtgccttgtcgtatacgtaactaagtttacagattcatgctttatttgtatatgtaattatctctacattttacatgttctcatcatacgatatagccaaactttcgtcgcaataaccatatttttagc

SEQ ID NO: 31403 - protein, 217 aa, Arabidopsis thaliana
  misc_feature (1)..(217): Ceres Seq. ID no. 13580432
KNLCVIHRHIALIMETPIDAPNKDEHECPRWKKSTVVFVLGGPGSGKGTQCANVVKHFSYTHFSAGDLLRAEIKSGSEFGAMIQSMIAEGRIVPSEITVKLLCKAMEESGNDKFLIDGFPRNEENRNVFENVARIEPAFVLFFDCPEEELERRIMSRNQGREDDNIETIKKRFKVFVESTLPIISYYESKGKLRKINAAKSSEEVFEAVRVLFASET

SEQ ID NO: 31404 - protein, 204 aa, Arabidopsis thaliana
  misc_feature (1)..(204): Ceres Seq. ID no. 13580433
METPIDAPNKDEHECPRWKKSTVVFVLGGPGSGKGTQCANVVKHFSYTHFSAGDLLRAEIKSGSEFGAMIQSMIAEGRIVPSEITVKLLCKAMEESGNDKFLIDGFPRNEENRNVFENVARIEPAFVLFFDCPEEELERRIMSRNQGREDDNIETIKKRFKVFVESTLPIISYYESKGKLRKINAAKSSEEVFEAVRVLFASET

SEQ ID NO: 31405 - protein, 136 aa, Arabidopsis thaliana
  misc_feature (1)..(136): Ceres Seq. ID no. 13580434
MIQSMIAEGRIVPSEITVKLLCKAMEESGNDKFLIDGFPRNEENRNVFENVARIEPAFVLFFDCPEEELERRIMSRNQGREDDNIETIKKRFKVFVESTLPIISYYESKGKLRKINAAKSSEEVFEAVRVLFASET

SEQ ID NO: 31406 - DNA, 1708 bp, Arabidopsis thaliana
  misc_feature (1)..(1708): Ceres Seq. ID no. 13580438
aaccgattcatatctttcttcttcttcctctacagcttcttcataaatctctctctcttctcctctcttctcaaagatcgaacctttcgatttcagtctcttcagagttctttcgttttcatcgaaacaatggcgaagaacgttgggatttaggctatgaatatctatttccctcccacctgtgttcaacaggaagctttggaagcacatgatggagcaagcaaagggaaatacactattggacttggccaagattgcttagctttttgcactgagcttgaagatgttatctctatgagtttcaatgcggtgacatcactttttgagaagtataagattgaccctaaccaaatcgggcgtcttgaagtaggaagtgagactgttattgacaaaagcaagtccatcaagaccttcttgatgcagctctttgagaaatgtggaaacactgatgtcgaaggtgttgactcgaccaatgcttgctatggtggaactgcagcttgttaaactgtgtcaattgggttgagagtaactcttgggatggacgttatggcctcgtcatttgtactgacagcgcggtttatgcagaaggacccgcaaggcccactggaggagctgcagcgattgctatgttgataggacctgatgctcctatcgttttcgaaagcaaattgagagcaagccacatggctcatgtctatgacttttacaagcccaatcttgctagcgagtacccggttgttgatggtaagctttcacagacttgctacctcatggctcttgactcctgctataaacatttatgcaacaagttcgagaagatcgagggcaaagagttctccataaatgatgctgattacattgttttccattctccatacaataaacttgtacagaaaagctttgccctctcttgtacaacgacttcttgagaaacgcaagctccattgacgaggctgccaaagaaaagttcaccccttattcatctttgacccttgacgagagttaccaaagccgtgatcttgaaaaggtgtcacaacaaatttcgaaaccgttttatgatgctaaagtgcaaccaacgactttaataccaaaggaagtcggtaacatgtacactgcttctctctacgctgcatttgcttccctcatccacaataaacacaatgatttggcgggaaagcgggtggttatgttctcttatggaagtggctccaccgcaacaatgttctcattacgcctcaacgacaataagcctcctttcagcatttcaaacattgcatctgtaatggatgttggcggtaaattgaaagctagacatgagtatgcacctgagaagtttgtggagacaatgaagctaatggaacataggtatggagcaaaggactttgtgacaaccaaggagggtattatagatcttttggcaccgggaacttattatctgaaagaggttgattccttgtaccggagattctatggcaagaaaggtgaagatggatctgtagccaatggacactgattcttgaaaaggaacaaatcataaaaagtcacctgaaaatgttatgttttacttgcaccattttaatcgttttataagtttgttattactttgatttagggacaaagaaggaatgtattctctgtttttatttactgtttgatttactctctcatgcaaatgataatttggaacttattggaatctctattttgc

SEQ ID NO: 31407 - protein, 135 aa, Arabidopsis thaliana
  misc_feature (1)..(135): Ceres Seq. ID no. 13580439
MYTASLYAAFASLIHNKHNDLAGKRVVMFSYGSGSTATMFSLRLNDNKPPFSISNIASVMDVGGKLKARHEYAPEKFVETMKLMEHRYGAKDFVTTKEGIIDLLAPGTYYLKEVDSLYRRFYGKKGEDGSVANGH

SEQ ID NO: 31408 - protein, 115 aa, Arabidopsis thaliana
  misc_feature (1)..(115): Ceres Seq. ID no. 13580440
MNIYFPPTCVQQEALEAHDGASKGKYTIGLGQDCLAFCTELEDVISMSFNAVTSLFEKYKIDPNQIGRLEVGSETVIDKSKSIKTFLMQLFEKCGNTDVEGVDSTNACYGGTAAC

SEQ ID NO: 31409 - protein, 108 aa, Arabidopsis thaliana
  misc_feature (1)..(108): Ceres Seq. ID no. 13580441
MFSYGSGSTATMFSLRLNDNKPPFSISNIASVMDVGGKLKARHEYAPEKFVETMKLMEHRYGAKDFVTTKEGIIDLLAPGTYYLKEVDSLYRRFYGKKGEDGSVANGH

SEQ ID NO: 31410 - DNA, 1350 bp, Arabidopsis thaliana
  misc_feature (1)..(1350): Ceres Seq. ID no. 13580471
gtttaaacatcctaatcgaaaacatgtgatgtgaacaatctcactctctttctctatctctctttcgagtttctttggagtattatataacaaatcagtccaagacacctcttttctcacaccaatctcgctctcaccacaaaacagagaatctcagatcgaagaagcaaagaaagagagaatgggtttcacttcccgaggaaacccttcttttctcttcttcttctttttcttcctctgtctctccacagtctctgcttacatcaacaacacaagtagcaacaatgaagaagtaagaagagagctagcttcttggagatgtaattggtttagagggaattgggtttatgatgtaaagtacccactttatgatccttacaaatgtccattcatagatccacagtttaactgtaagaagtatggtcgtcctgacaatgcttaccttaagtatcgatggcaaccatcttcttgctctctccccagattcaatgggttgtatttcttgaggaggatgagagggaagaagataatgttcgttggagattcactaagcacaaacatgtggcaatctcttgcttgtctaattcactcttgggttcctaacactcgttacactcttattcgccaaaagggtctagcttcacttacctttgaggaatacggagtgacgttgttgctatacagaacacagttcttggtagatttgaatgtggagaaagttgggagagtgcttaagcttgattccattaagcaagggaatatgtggagaggcatggacgttttgattttcaactcgtggcattggtggacacacacaacacattcagccgtgggattacatggaagatgggaataggttgtacaaagacatgaaccggctcgttgctttctacaaaggaatgaccacttgggctcgatgggttaatgcttacgtcgatccttctaagactaaagtcttcttcaacggcgtgtctcctactcattacgagggaaaggattggggagagccaatgaactcatgtaggagtcaaacgcagccattttacggaaggaagtatccaggagggacaccaatggcttgggtgattctaaacaaagtgatgaggagattgaagaaaccggtccattggctcgatataaccggtctgtctcagcttcgtaaagatgctcatccttctgctttcagtgggaaccatcctggtaatgactgtagccattggtgtctccctggtttgcctgatacttggaacttgctcttttactctactcttttctcttcttaattaattcctttctcatcaatgtataagttaacttaaaacaacaatcaattatttttagtcatctttc

SEQ ID NO: 31411 - protein, 224 aa, Arabidopsis thaliana
  misc_feature (1)..(224): Ceres Seq. ID no. 15222720
MGFTSRGNPSFLFFFFFFLCLSTVSAYINNTSSNNEEVRRELASWRCNWFRGNWVYDVKYPLYDPYKCPFIDPQFNCKKYGRPDNAYLKYRWQPSSCSLPRFNGLYFLRRMRGKKIMFVGDSLSTNMWQSLACLIHSWVPNTRYTLIRQKGLASLTFEEYGVTLLLYRTQFLVDLNVEKVGRVLKLDSIKQGNMWRGMDVLIFNSWHWWTHTTHSAVGLHGRWE

SEQ ID NO: 31412 - protein, 147 aa, Arabidopsis thaliana
  misc_feature (1)..(147): Ceres Seq. ID no. 15222721
MEDGNRLYKDMNRLVAFYKGMTTWARWVNAYVDPSKTKVFFNGVSPTHYEGKDWGEPMNSCRSQTQPFYGRKYPGGTPMAWVILNKVMRRLKKPVHWLDITGLSQLRKDAHPSAFSGNHPGNDCSHWCLPGLPDTWNLLFYSTLFSS

SEQ ID NO: 31413 - protein, 137 aa, Arabidopsis thaliana
  misc_feature (1)..(137): Ceres Seq. ID no. 15222722
MNRLVAFYKGMTTWARWVNAYVDPSKTKVFFNGVSPTHYEGKDWGEPMNSCRSQTQPFYGRKYPGGTPMAWVILNKVMRRLKKPVHWLDITGLSQLRKDAHPSAFSGNHPGNDCSHWCLPGLPDTWNLLFYSTLFSS

SEQ ID NO: 31414 - DNA, 1294 bp, Arabidopsis thaliana
  misc_feature (1)..(1294): Ceres Seq. ID no. 13580484
aaaaagaaaatatatatggtttcacaaacaccattaccataactacaacgagaagaggatcttttttaaggagaaaagcagagagagaagagacgagtgtgtgaagtttttttgtcttttgtttcttttattacacacaaatagatgaaacgaggaaagctacttcttttgctacttccataaaaaggttcttcctttcgcagagaatcaactttgatcatcttcttccttctctttctttcttcttctccctccagtaatgcttatatagtctcctcctatatctctacctatacatacacaaaccctttatcctcgaaagcttcctcctggttaggtttttatcaaacccttttagccaatcgggaaattaactaaagaagaagatatggtgaggggcaaaactcagatgaagagaatagagaatgcaacaagcagacaagtgactttctccaaaagaaggaatggtttgttgaagaaagcctttgagctctcagtgctttgtgatgctgaagtttctcttatcatcttctctcctaaaggcaaactttatgaattcgccagctccaatatgcaagataccatagatcgttatctgaggcatactaaggatcgagtcagcaccaaaccggtttctgaagaaaatatgcagcatttgaaatatgaagcagcaaacatgatgaagaaaattgaacaactcgaagcttctaaacgtaaactcttgggagaaggcataggaacatgctcaatcgaggagctgcaacagattgagcaacagcttgagaaaagtgtcaaatgtattcgagcaagaaagactcaagtgtttaaggaacaaattgagcagctcaagcaaaaggagaaagctctagctgcagaaaacgagaagctctctgaaaagtggggatctcatgaaagcgaagtttggtcaaataagaatcaagaaagtactggaagaggtgatgaagagagtagcccaagttctgaagtagagacgcaattgttcattgggttaccttgttcttcaagaaagtgatctccactcaacaaaaaaaacaaaaaaacaaactaagtaaaaacaggtttagcagtactgagagtgtataaggacaagtaacaaaactctaaagctgcttctctcttgttgtcttatttctctctcactctctctctctcagtcacttctttaatgattctgaactgcttgtgttatgtatctatgttcttacacttgcctctctagaatgtaattttgattatgttttgttttcatgtatcaatttagctttcttccccc

SEQ ID NO: 31415 - protein, 214 aa, Arabidopsis thaliana
  misc_feature (1)..(214): Ceres Seq. ID no. 13580485
MVRGKTQMKRIENATSRQVTFSKRRNGLLKKAFELSVLCDAEVSLIIFSPKGKLYEFASSNMQDTIDRYLRHTKDRVSTKPVSEENMQHLKYEAANMMKKIEQLEASKRKLLGEGIGTCSIEELQQIEQQLEKSVKCIRARKTQVFKEQIEQLKQKEKALAAENEKLSEKWGSHESEVWSNKNQESTGRGDEESSPSSEVETQLFIGLPCSSRK

SEQ ID NO: 31416 - protein, 207 aa, Arabidopsis thaliana
  misc_feature (1)..(207): Ceres Seq. ID no. 13580486
MKRIENATSRQVTFSKRRNGLLKKAFELSVLCDAEVSLIIFSPKGKLYEFASSNMQDTIDRYLRHTKDRVSTKPVSEENMQHLKYEAANMMKKIEQLEASKRKLLGEGIGTCSIEELQQIEQQLEKSVKCIRARKTQVFKEQIEQLKQKEKALAAENEKLSEKWGSHESEVWSNKNQESTGRGDEESSPSSEVETQLFIGLPCSSRK

SEQ ID NO: 31417 - protein, 153 aa, Arabidopsis thaliana
  misc_feature (1)..(153): Ceres Seq. ID no. 13580487
MQDTIDRYLRHTKDRVSTKPVSEENMQHLKYEAANMMKKIEQLEASKRKLLGEGIGTCSIEELQQIEQQLEKSVKCIRARKTQVFKEQIEQLKQKEKALAAENEKLSEKWGSHESEVWSNKNQESTGRGDEESSPSSEVETQLFIGLPCSSRK

SEQ ID NO: 31418 - DNA, 1953 bp, Arabidopsis thaliana
  misc_feature (1)..(1953): Ceres Seq. ID no. 13580493
gttttttagcttacgtttttcttcttcttctccttatgagttcaatatctgcaaatccacaaatctggattcacacctgagacgtttgttaatcggtacatctctatatttttgcaatcggagatggagatcgaatccgtcgcagctggttcttgttccaaggagaatcaaatgatctacaaggaatggttcgaattctccgattcagacggcgatggccgtattactggtaacgatgcgatcaagttcttcactatgtcgaatttgcctcgtccggaattgaagcagatctgggctattgcagattcaaagagacaagggtatcttggtttcaaagagtttattgttgccatgcagcttgtttcgttggctcaaactggacatgaaatatcgcatgaagttcttattagcgatgttgatttcaaaaatatcaatcctcctaccatggaaggtctgggtgtattaatggcgaaaaagaagcattcatcaaagtcgagtgatcctaatatgaatggtagccctgccgcagacacctcacttacagctcactggttctcttcaaaatcttcaaaaaagatttctctgtcctccgtaacatctatagtggatggcctgaagaggttgtacattcagaagctgaagccacttgaagtagcatatcggtttaacgattttgtatcccctttgttgactaacagtgatttcgatgcaaaacctatggtaatgcttctgggtcaatactccacaggaaaaacaacattcattaagcatttgcttaaatctacttatccaggagctcatattggaccagagccgactactgacagatttgttgttgtcatgtctggacctgatgaaagaagcattccggggaacacagtagcagttcaagcagatatgccattcagtggtcttacaacttttgggactgcctttttgtcaaagtttgaatgctctcagatgcctcaccctctgctggagcatgtaacatttgtcgacacccctggagttttatcaggggaaaaacaaagaacacagcgagcatatgatttcactggtgttacatcatggtttgcctctaagtgtgatcttatcctcctcctatttgacccacacaagctggatgtaagtgatgagttcaagcgtgtaatttcatctttacgcggtcatgatgacaagatccgcgttgttctgaataaggctgaccaagtggacactcagcagctaatgagggtatatggagctctcatgtggtcacttgggaaagttctcaatactcctgaggtctctcgtgtctacattggttccttcagtgataaacccataaacgaagctgcaactggtccaattgggagagagttgtttgaaaaggagcaagatgaccttcttgctgatttgaaagacattcctaagaaagcttgtgatcgtcgaataaatgagtttgtgaaacgggcaagagcagcaaagatacatgcgtacatcatcagccatttgaagaaggagatgccagcgataatggggaaagccaaagctcaacagaaactgatagataacttggaagacgagtttggaaaggtacaaagagagcatcacttacctaaaggagatttcccaaatgtggatcatttcagggaggtgctaagtggttacaacatcgacaagtttgagaagctaaagccgaaaatgttgcagactgttgatgatatgttggggtatgacatcccagagctcttgaaaaatttcaaaaacccttatgattaatatttctatccctcttatcttctgcggttgctgtataatccaaaactatacattcacttttggcctagcccttgtgacttgtgagcgttaatgcatatttgtattcttacaagccttgtagacaatagagacaaacataaagagtgctgacttgataatttgcttatatcacaaaccaaaagtattattgtt

SEQ ID NO: 31419 - protein, 545 aa, Arabidopsis thaliana
  misc_feature (1)..(545): Ceres Seq. ID no. 13580494
MEIESVAAGSCSKENQMIYKEWFEFSDSDGDGRITGNDAIKFFTMSNLPRPELKQIWAIADSKRQGYLGFKEFIVAMQLVSLAQTGHEISHEVLISDVDFKNINPPTMEGLGVLMAKKKHSSKSSDPNMNGSPAADTSLTAHWFSSKSSKKISLSSVTSIVDGLKRLYIQKLKPLEVAYRFNDFVSPLLTNSDFDAKPMVMLLGQYSTGKTTFIKHLLKSTYPGAHIGPEPTTDRFVVVMSGPDERSIPGNTVAVQADMPFSGLTTFGTAFLSKFECSQMPHPLLEHVTFVDTPGVLSGEKQRTQRAYDFTGVTSWFASKCDLILLLFDPHKLDVSDEFKRVISSLRGHDDKIRVVLNKADQVDTQQLMRVYGALMWSLGKVLNTPEVSRVYIGSFSDKPINEAATGPIGRELFEKEQDDLLADLKDIPKKACDRRINEFVKRARAAKIHAYIISHLKKEMPAIMGKAKAQQKLIDNLEDEFGKVQREHHLPKGDFPNVDHFREVLSGYNIDKFEKLKPKMLQTVDDMLGYDIPELLKNFKNPYD

SEQ ID NO: 31420 - protein, 529 aa, Arabidopsis thaliana
  misc_feature (1)..(529): Ceres Seq. ID no. 13580495
MIYKEWFEFSDSDGDGRITGNDAIKFFTMSNLPRPELKQIWAIADSKRQGYLGFKEFIVAMQLVSLAQTGHEISHEVLISDVDFKNINPPTMEGLGVLMAKKKHSSKSSDPNMNGSPAADTSLTAHWFSSKSSKKISLSSVTSIVDGLKRLYIQKLKPLEVAYRFNDFVSPLLTNSDFDAKPMVMLLGQYSTGKTTFIKHLLKSTYPGAHIGPEPTTDRFVVVMSGPDERSIPGNTVAVQADMPFSGLTTFGTAFLSKFECSQMPHPLLEHVTFVDTPGVLSGEKQRTQRAYDFTGVTSWFASKCDLILLLFDPHKLDVSDEFKRVISSLRGHDDKIRVVLNKADQVDTQQLMRVYGALMWSLGKVLNTPEVSRVYIGSFSDKPINEAATGPIGRELFEKEQDDLLADLKDIPKKACDRRINEFVKRARAAKIHAYIISHLKKEMPAIMGKAKAQQKLIDNLEDEFGKVQREHHLPKGDFPNVDHFREVLSGYNIDKFEKLKPKMLQTVDDMLGYDIPELLKNFKNPYD

SEQ ID NO: 31421 - protein, 501 aa, Arabidopsis thaliana
  misc_feature (1)..(501): Ceres Seq. ID no. 13580496
MSNLPRPELKQIWAIADSKRQGYLGFKEFIVAMQLVSLAQTGHEISHEVLISDVDFKNINPPTMEGLGVLMAKKKHSSKSSDPNMNGSPAADTSLTAHWFSSKSSKKISLSSVTSIVDGLKRLYIQKLKPLEVAYRFNDFVSPLLTNSDFDAKPMVMLLGQYSTGKTTFIKHLLKSTYPGAHIGPEPTTDRFVVVMSGPDERSIPGNTVAVQADMPFSGLTTFGTAFLSKFECSQMPHPLLEHVTFVDTPGVLSGEKQRTQRAYDFTGVTSWFASKCDLILLLFDPHKLDVSDEFKRVISSLRGHDDKIRVVLNKADQVDTQQLMRVYGALMWSLGKVLNTPEVSRVYIGSFSDKPINEAATGPIGRELFEKEQDDLLADLKDIPKKACDRRINEFVKRARAAKIHAYIISHLKKEMPAIMGKAKAQQKLIDNLEDEFGKVQREHHLPKGDFPNVDHFREVLSGYNIDKFEKLKPKMLQTVDDMLGYDIPELLKNFKNPYD

SEQ ID NO: 31422 - DNA, 2821 bp, Arabidopsis thaliana
  misc_feature (1)..(2821): Ceres Seq. ID no. 13580519
aaaattcttcaattctcttctcgtttttttttttttatcaattccaatgatctgtcacgttttagtaattttcactattctcgtttccgccgtcgtcgacgcaacggcgtcgtatgagcccactgatgtctttctcatcaattgcggcgatacctccaacaacatggactacagtggccggaactggacgacggagaatccgaaatttatgtcatcgaatgcagttgacgacgcgtcgttcacttcatctgcgtcataccaagaatcagggattcctcaagtgccgtacttgaaagctaggattttccgatatgatttcacttacagttttccagtctctcccggctggaaattcctccggttatacttttatccgacccgttacggatccgatttcgacgccgttaaatccttcttctccgtcaacgtcaaccgtttcactctcttgcataacttcagtgtaaaagcttccataccggagtcaagttctctaatcaaagagtttatcgttccggttaaccaaactcttgatctcacgttcacgccctctccgaattcattagctttcgttaacggaatcgagattatctccatgcctgaccggttttactcaaagggaggatttgacgacgttgtaagaaacgttggtagggacgttgacttcgagatagacaactccacggctttcgagaccgtttatcgggtaaacgtaggtggaaaagtggtgggcgacgtcggagattcgggaatgttccggcgttggctttccgatgaaggtttcttactcggtattaattcgggagccattccgaatataacaggtgtaaagatcaactacacggataaaactcccgcgtacgttgcgccggaagatgtatacacgacgtgtcgcctgatggggaacaaagacagtcctgagctaaacctgaatttcaacctgacgtggctctttgaagtcgatgccgggtttgcctatatagtgaggcttcatttctgtgagacgcaaccggaagtcaacaaaacgggtgaccgcgtcttctccatcttcttcggatatcaactggccatgcgtgaaatggacgtgtttcggctgagtggtggttttcggctaccgatgtatctagatttcaaggtacttgtcgacgccgacggaactagccagagacctagtcttcgagttgacttgacaccttacaaagaggactatccaacctattacgacgctattttgagtggtgtagagattctcaagctgagtaattctgatggtaatcttgcggggcttaatccaattcctcaactaagtccaccaccacaatctataacgccactaaaaggaaaaggcaagtcatcacatgttttgccaataataattgcagtggttggttctgcagttgcgctagcgttttttgttcttgttgttgtcctcgttgttatgaagagaaagaagaagagcaacgagtctagtgtagataccacgaacaagccttctacgaactcgtcatggggtcctcttctgcacgggacaggctctacaaatacaaaatctgcctcatctcttccatcagatctctgccgtcgattctccatctacgaaatcaaatccgccacaaatgatttcgaggaaaaactaatcataggagtaggcgggtttggttctgtctacaaaggacgaatagacggtggagccacacttgttgcggttaaacggctggaaattacatcgaaccaaggtgctaaagagttcgatacagagctcgagatgctttcaaagcttcgacatgtacacctcgtctctctaatcggatattgcgatgacgacaacgagatggtacttgtctatgagtatttgccacatggtacacttaaagatcatcttttcaggagagacaaggcctctgatcctccattgtcatggaaacgaaggctagagatttgcattggagcagctcgtggattacagtatcttcatactggagccaagtacacgatcatacatagagacatcaaaaccacaaacatacttctcgatgagaacttcgtcgctaaagtatctgactttggtttatcaagagttggtcctactagtgcttctcaaacgcatgtctccaccgtcgttaaaggaacgtttggttacttggatcccgagtactatcgccgtcaaatcttgaccgaaaaatccgacgtgtactcttttggagttgttctgttggaggttttgtgctgtagaccgatcagaatgcaaagtgttccaccggaacaagcagatttgatccgatgggtgaagtcaaatttcaataaaagaaccgttgatcagatcattgactcagatttaaccgctgatatcacttcgacctcgatggagaagttttgtgagatagccattagatgtgttcaagaccgtggtatggaacggccaccgatgaacgacgttgtttgggcgcttgagtttgctcttcagcttcacgagactgctaagaagaagaatgacaacgtggagtctctggatctaatgccaagtggtgaagttggtacgaccacggacggagaagatgacttgtttagtaggactacaggacacgttgggaaatcgaccacgaccgatgactctgttctagttgttggtgatgagaggagtggttcgagttggggagtattttcggagatcaatgaacctaaagcacggtagatttgatggcttggtaaacaagtatcacattctggttagggttgatatatatttgtgtatgtataattgttgaataaacacattattgtatttaaattacattttgatgattatttagcagcttaaatttag

SEQ ID NO: 31423 - protein, 895 aa, Arabidopsis thaliana
  misc_feature (1)..(895): Ceres Seq. ID no. 13580520
KFFNSLLVFFFLSIPMICHVLVIFTILVSAVVDATASYEPTDVFLINCGDTSNNMDYSGRNWTTENPKFMSSNAVDDASFTSSASYQESGIPQVPYLKARIFRYDFTYSFPVSPGWKFLRLYFYPTRYGSDFDAVKSFFSVNVNRFTLLHNFSVKASIPESSSLIKEFIVPVNQTLDLTFTPSPNSLAFVNGIEIISMPDRFYSKGGFDDVVRNVGRDVDFEIDNSTAFETVYRVNVGGKVVGDVGDSGMFRRWLSDEGFLLGINSGAIPNITGVKINYTDKTPAYVAPEDVYTTCRLMGNKDSPELNLNFNLTWLFEVDAGFAYIVRLHFCETQPEVNKTGDRVFSIFFGYQLAMREMDVFRLSGGFRLPMYLDFKVLVDADGTSQRPSLRVDLTPYKEDYPTYYDAILSGVEILKLSNSDGNLAGLNPIPQLSPPPQSITPLKGKGKSSHVLPIIIAVVGSAVALAFFVLVVVLVVMKRKKKSNESSVDTTNKPSTNSSWGPLLHGTGSTNTKSASSLPSDLCRRFSIYEIKSATNDFEEKLIIGVGGFGSVYKGRIDGGATLVAVKRLEITSNQGAKEFDTELEMLSKLRHVHLVSLIGYCDDDNEMVLVYEYLPHGTLKDHLFRRDKASDPPLSWKRRLEICIGAARGLQYLHTGAKYTIIHRDIKTTNILLDENFVAKVSDFGLSRVGPTSASQTHVSTVVKGTFGYLDPEYYRRQILTEKSDVYSFGVVLLEVLCCRPIRMQSVPPEQADLIRWVKSNFNKRTVDQIIDSDLTADITSTSMEKFCEIAIRCVQDRGMERPPMNDVVWALEFALQLHETAKKKNDNVESLDLMPSGEVGTTTDGEDDLFSRTTGHVGKSTTTDDSVLVVGDERSGSSWGVFSEINEPKAR

SEQ ID NO: 31424 - protein, 880 aa, Arabidopsis thaliana
  misc_feature (1)..(880): Ceres Seq. ID no. 13580521
MICHVLVIFTILVSAVVDATASYEPTDVFLINCGDTSNNMDYSGRNWTTENPKFMSSNAVDDASFTSSASYQESGIPQVPYLKARIFRYDFTYSFPVSPGWKFLRLYFYPTRYGSDFDAVKSFFSVNVNRFTLLHNFSVKASIPESSSLIKEFIVPVNQTLDLTFTPSPNSLAFVNGIEIISMPDRFYSKGGFDDVVRNVGRDVDFEIDNSTAFETVYRVNVGGKVVGDVGDSGMFRRWLSDEGFLLGINSGAIPNITGVKINYTDKTPAYVAPEDVYTTCRLMGNKDSPELNLNFNLTWLFEVDAGFAYIVRLHFCETQPEVNKTGDRVFSIFFGYQLAMREMDVFRLSGGFRLPMYLDFKVLVDADGTSQRPSLRVDLTPYKEDYPTYYDAILSGVEILKLSNSDGNLAGLNPIPQLSPPPQSITPLKGKGKSSHVLPIIIAVVGSAVALAFFVLVVVLVVMKRKKKSNESSVDTTNKPSTNSSWGPLLHGTGSTNTKSASSLPSDLCRRFSIYEIKSATNDFEEKLIIGVGGFGSVYKGRIDGGATLVAVKRLEITSNQGAKEFDTELEMLSKLRHVHLVSLIGYCDDDNEMVLVYEYLPHGTLKDHLFRRDKASDPPLSWKRRLEICIGAARGLQYLHTGAKYTIIHRDIKTTNILLDENFVAKVSDFGLSRVGPTSASQTHVSTVVKGTFGYLDPEYYRRQILTEKSDVYSFGVVLLEVLCCRPIRMQSVPPEQADLIRWVKSNFNKRTVDQIIDSDLTADITSTSMEKFCEIAIRCVQDRGMERPPMNDVVWALEFALQLHETAKKKNDNVESLDLMPSGEVGTTTDGEDDLFSRTTGHVGKSTTTDDSVLVVGDERSGSSWGVFSEINEPKAR

SEQ ID NO: 31425 - protein, 841 aa, Arabidopsis thaliana
  misc_feature (1)..(841): Ceres Seq. ID no. 13580522
MDYSGRNWTTENPKFMSSNAVDDASFTSSASYQESGIPQVPYLKARIFRYDFTYSFPVSPGWKFLRLYFYPTRYGSDFDAVKSFFSVNVNRFTLLHNFSVKASIPESSSLIKEFIVPVNQTLDLTFTPSPNSLAFVNGIEIISMPDRFYSKGGFDDVVRNVGRDVDFEIDNSTAFETVYRVNVGGKVVGDVGDSGMFRRWLSDEGFLLGINSGAIPNITGVKINYTDKTPAYVAPEDVYTTCRLMGNKDSPELNLNFNLTWLFEVDAGFAYIVRLHFCETQPEVNKTGDRVFSIFFGYQLAMREMDVFRLSGGFRLPMYLDFKVLVDADGTSQRPSLRVDLTPYKEDYPTYYDAILSGVEILKLSNSDGNLAGLNPIPQLSPPPQSITPLKGKGKSSHVLPIIIAVVGSAVALAFFVLVVVLVVMKRKKKSNESSVDTTNKPSTNSSWGPLLHGTGSTNTKSASSLPSDLCRRFSIYEIKSATNDFEEKLIIGVGGFGSVYKGRIDGGATLVAVKRLEITSNQGAKEFDTELEMLSKLRHVHLVSLIGYCDDDNEMVLVYEYLPHGTLKDHLFRRDKASDPPLSWKRRLEICIGAARGLQYLHTGAKYTIIHRDIKTTNILLDENFVAKVSDFGLSRVGPTSASQTHVSTVVKGTFGYLDPEYYRRQILTEKSDVYSFGVVLLEVLCCRPIRMQSVPPEQADLIRWVKSNFNKRTVDQIIDSDLTADITSTSMEKFCEIAIRCVQDRGMERPPMNDVVWALEFALQLHETAKKKNDNVESLDLMPSGEVGTTTDGEDDLFSRTTGHVGKSTTTDDSVLVVGDERSGSSWGVFSEINEPKAR

SEQ ID NO: 31426 - DNA, 1093 bp, Arabidopsis thaliana
  misc_feature (1)..(1093): Ceres Seq. ID no. 13580537
gtttctcaaaaatcaaaatcccttcctctctctctctcaccgagccggcgagcccgttctctcggtgtttttaaagatgcttatgatgatgatggggagtgagtaatatcagaaatcaagctttttcacaatctcagaaattgtagtagagtttggcgattttatcaacctccggaacaagcttcttcttcttcgttttactcttgtcatccgtaaatgggttgtttccattccacggctgccagagaatttcccgatcacgaaaaccctgtgaagcttgcttctgagactgcttttagtgttagtgaagttgaagcattgtatgaattgttcaagagcataagcagctcggttgttgacgatggcttgataaacaaggaagagtttcaacttgctttgttcaagaacagaaagaaagaaaatttgtttgccaataggatatttgatttatttgatgttaaacgaaaaggcgtaattgattttggagactttgtgagatcactcaatgttttccatcctaatgcttccctagaggagaaaacagactttacctttaggctttacgacatggactgcacaggcttcattgagcgccaagaggtgaagcagatgttgattgcacttctctgcgaatctgaaatgaaactggctgatgatacaatagagatgatacttgatcagacatttgaggacgcagatgtggatcgggatggaaagattgataagacagaatggagcaatttcgttatcaaaaacccatctttgcttaaaatcatgactcttccgtatctcagggatataacgacgacatttccgagtttcgtatttaactcggaggtggacgagattgcgacgtgaaagagacaagacaagctggtttatagagaccaagtcgtaggctggaccaagaataaaaagaagattgattccaacaatgttatatagcaggatcgagctctatttcctttggaatttttagtctattggatttcaatttcatgtattgcgattacttttggctctctttctttaacagttttgaatactcaagttgtagttctacgaaaagattaatataaaaccacaatttctg

SEQ ID NO: 31427 - protein, 213 aa, Arabidopsis thaliana
  misc_feature (1)..(213): Ceres Seq. ID no. 13580538
MGCFHSTAAREFPDHENPVKLASETAFSVSEVEALYELFKSISSSVVDDGLINKEEFQLALFKNRKKENLFANRIFDLFDVKRKGVIDFGDFVRSLNVFHPNASLEEKTDFTFRLYDMDCTGFIERQEVKQMLIALLCESEMKLADDTIEMILDQTFEDADVDRDGKIDKTEWSNFVIKNPSLLKIMTLPYLRDITTTFPSFVFNSEVDEIAT

SEQ ID NO: 31428 - DNA, 987 bp, Arabidopsis thaliana
  misc_feature (1)..(987): Ceres Seq. ID no. 13580550
atttaaccacacaattttatcatttcactcctaacgcactctcttctccgaatctagggtttttgtctctagcctcctcaagctttgcaaacaatcatggcgacccagatcagcaagaagagaaagttcgtagccgatggtgtgttttacgctgaactcaatgaggttctaaccagagagcttgctgaggatggttactctggtgttgaggttcgcgtcactcctatgcgtactgagatcatcattagagccactcgtactcaaaacgttctcggtgagaagggaaggaggattagggaattgacatctcttgtacaaaagagattcaaatttcctcaggacagtgttgagctttatgctgagaaggttgctaacagaggtctttgtgctattgctcaggctgagtctcttcgttacaagcttcttggtggtcttgctgttcgtagggcgtgctatggtgttttaaggtttgttatggagagtggagctaaaggatgcgaagtcattgtgagtggaaaactccgtgctgcacgtgctaagtcgatgaagttcaaggatggttacatggtttcctcaggtcagccaaccaaggaatacattgatgctgcagttaggcatgttcttcttagacagggtgtgcttggtctcaaggtgaagatcatgcttgactgggaccccaagggcaaacaaggaccgatgacaccattgcctgatgttgtgatcatccatacaccgaaagaagatgatgtatacattgcacctgctcaggttgttactcaagctgcttttgtaccggaagctccattaaccaccacagattatccagcaatgccagttgcttagagagccttttcgttttctggtttaaaacccaatggggatggttctttttttgggacagtactagttttctcatgttattctaagttaatacttaaagttctggaggttgaattacatcaaggatatgaatgtatgtttttcgtt

SEQ ID NO: 31429 - protein, 248 aa, Arabidopsis thaliana
  misc_feature (1)..(248): Ceres Seq. ID no. 13580551
MATQISKKRKFVADGVFYAELNEVLTRELAEDGYSGVEVRVTPMRTEIIIRATRTQNVLGEKGRRIRELTSLVQKRFKFPQDSVELYAEKVANRGLCAIAQAESLRYKLLGGLAVRRACYGVLRFVMESGAKGCEVIVSGKLRAARAKSMKFKDGYMVSSGQPTKEYIDAAVRHVLLRQGVLGLKVKIMLDWDPKGKQGPMTPLPDVVIIHTPKEDDVYIAPAQVVTQAAFVPEAPLTTTDYPAMPVA

SEQ ID NO: 31430 - protein, 205 aa, Arabidopsis thaliana
  misc_feature (1)..(205): Ceres Seq. ID no. 13580552
MRTEIIIRATRTQNVLGEKGRRIRELTSLVQKRFKFPQDSVELYAEKVANRGLCAIAQAESLRYKLLGGLAVRRACYGVLRFVMESGAKGCEVIVSGKLRAARAKSMKFKDGYMVSSGQPTKEYIDAAVRHVLLRQGVLGLKVKIMLDWDPKGKQGPMTPLPDVVIIHTPKEDDVYIAPAQVVTQAAFVPEAPLTTTDYPAMPVA

SEQ ID NO: 31431 - DNA, 1307 bp, Arabidopsis thaliana
  misc_feature (1)..(1307): Ceres Seq. ID no. 13580557
attttcgtagcgcgcagagagagagagagagggacgatcttttctataactgaaacactactcgaggccaagttgctttagccgtaatcgtcgtcgtccctcttcccgatattatctcttctctgttcttcgatttcgaaaccctaacctcctctctttaattcgcgttttctggatcgaagatggtggcggctggtaaatccgacctttccttgcccaaaactttcgcctgcagtgccttcgctgcttgcgtcggcgaggtatgcacaattccattggacactgctaaagttaggcttcagctccaaaagtctgctcttgctggtgatgttactctgcctaaatatcgaggattgttgggaactgttggtaccatagcaagggaagaagggttacgttcactatggaaaggtgttgtacctggattgcatcgtcaatgcctatttggaggtcttaggattggaatgtatgagccggtgaaaaacttgtatgttggaaaagactttgtaggtgatgttccattgagcaagaaaattcttgctggtttgacaacaggtgcactgggtatcatggtagcaaatcccactgatcttgtgaaagttaggcttcaggcggaaggaaaattagctgcaggtgcgccaagacggtactctggagcgctgaatgcgtattcaacaattgtgagacaggaaggagtccgagctctttggactggtcttggacctaacgtagcaagaaacgctattatcaatgctgctgaattagcgagttacgatcaagtgaaagagactatcttgaagattccagggttcactgacaacgttgtcacacatattctatctggactgggggcaggattctttgctgtttgcatcggttctcctgttgacgtggttaagtcaagaatgatgggagattctggtgcttacaagggcaccattgattgcttcgtcaaaactctgaagagcgacggtcctatggcattttacaagggtttcatccccaactttggacgccttggctcatggaacgtaatcatgtttttgaccctcgaacaggcaaagaagtatgtccgggaactcgatgcgtccaaaagaaactgagacacaaagttttaagcagagggaataagagcaacattgttttcttcttcattttcggtgattgagagaggccagaacttggtcgaatattgttttcggaatagagattcagttttcgagtaaaactgtgaaataaaatttctgtggattgctcatatattggctgtaccatccaacatttatcaaaaatcatacatttttccc

SEQ ID NO: 31432 - protein, 306 aa, Arabidopsis thaliana
  misc_feature (1)..(306): Ceres Seq. ID no. 15222731
MVAAGKSDLSLPKTFACSAFAACVGEVCTIPLDTAKVRLQLQKSALAGDVTLPKYRGLLGTVGTIAREEGLRSLWKGVVPGLHRQCLFGGLRIGMYEPVKNLYVGKDFVGDVPLSKKILAGLTTGALGIMVANPTDLVKVRLQAEGKLAAGAPRRYSGALNAYSTIVRQEGVRALWTGLGPNVARNAIINAAELASYDQVKETILKIPGFTDNVVTHILSGLGAGFFAVCIGSPVDVVKSRMMGDSGAYKGTIDCFVKTLKSDGPMAFYKGFIPNFGRLGSWNVIMFLTLEQAKKYVRELDASKRN

SEQ ID NO: 31433 - protein, 212 aa, Arabidopsis thaliana
  misc_feature (1)..(212): Ceres Seq. ID no. 15222732
MYEPVKNLYVGKDFVGDVPLSKKILAGLTTGALGIMVANPTDLVKVRLQAEGKLAAGAPRRYSGALNAYSTIVRQEGVRALWTGLGPNVARNAIINAAELASYDQVKETILKIPGFTDNVVTHILSGLGAGFFAVCIGSPVDVVKSRMMGDSGAYKGTIDCFVKTLKSDGPMAFYKGFIPNFGRLGSWNVIMFLTLEQAKKYVRELDASKRN

SEQ ID NO: 31434 - protein, 177 aa, Arabidopsis thaliana
  misc_feature (1)..(177): Ceres Seq. ID no. 15222733
MVANPTDLVKVRLQAEGKLAAGAPRRYSGALNAYSTIVRQEGVRALWTGLGPNVARNAIINAAELASYDQVKETILKIPGFTDNVVTHILSGLGAGFFAVCIGSPVDVVKSRMMGDSGAYKGTIDCFVKTLKSDGPMAFYKGFIPNFGRLGSWNVIMFLTLEQAKKYVRELDASKRN

SEQ ID NO: 31435 - DNA, 1053 bp, Arabidopsis thaliana
  misc_feature (1)..(1053): Ceres Seq. ID no. 13580576
aaaagaggaccaaaaggtcaaaaacgaataaactgtatctctcattcgccggagtttccagccgtttctttccgattctcggatttttcctgggaatcaaacgcatcgccgagaatcggaagagagggataaggttatggctcctcatggagatggattaagtgacatcgaagaacctgaggtcgatgctcaatcggagattcttcgaccgatctcctcagtcgtcttcgtcatcgctatgcaagcggaggctcttcctttggtcaacaagttcggactctctgaaactactgattcgccgcttggtaaaggattgccctgggttctgtatcacggcgtgcataaagatcttcgaatcaatgtagtttgccccggaagagatgcagctttagggatcgatagtgttggaactgttccagcttctctcataacttttgcttccatccaagcattaaaacctgacatcataatcaatgccggaacctgcggtggcttcaaggtcaaaggagccaacataggcgatgtattccttgtatctgatgttgtgtttcatgatagaagaataccaattccgatgtttgatctgtatggagttggtctccgtcaggcattctcgacacccaatctcctcaaggaactcaatttgaagattggcaggttatctactggtgactcgttggatatgtccacgcaagatgaaacattgatcattgccaatgatgctacgctaaaggacatggagggtgctgccgtggcgtatgtggctgatcttctgaaaataccagtcgtgttcctcaaagccgtgaccgatctagtggacggagataaacctacagcagaagagttcttgcagaacttgacagttgtgaccgctgcattagagggaactgctactaaagtgatcaacttcatcaatgggagaaacctttcggacctttaacttctgttctcttccttttttatggagagtgattttttaaaatgcgttcaacgtgcttgttgcagtttcactgatttccagtgatcatatttctcgttaataaatttcaagtt

SEQ ID NO: 31436 - protein, 267 aa, Arabidopsis thaliana
  misc_feature (1)..(267): Ceres Seq. ID no. 13580577
MAPHGDGLSDIEEPEVDAQSEILRPISSVVFVIAMQAEALPLVNKFGLSETTDSPLGKGLPWVLYHGVHKDLRINVVCPGRDAALGIDSVGTVPASLITFASIQALKPDIIINAGTCGGFKVKGANIGDVFLVSDVVFHDRRIPIPMFDLYGVGLRQAFSTPNLLKELNLKIGRLSTGDSLDMSTQDETLIIANDATLKDMEGAAVAYVADLLKIPVVFLKAVTDLVDGDKPTAEEFLQNLTVVTAALEGTATKVINFINGRNLSDL

SEQ ID NO: 31437 - protein, 233 aa, Arabidopsis thaliana
  misc_feature (1)..(233): Ceres Seq. ID no. 13580578
MQAEALPLVNKFGLSETTDSPLGKGLPWVLYHGVHKDLRINVVCPGRDAALGIDSVGTVPASLITFASIQALKPDIIINAGTCGGFKVKGANIGDVFLVSDVVFHDRRIPIPMFDLYGVGLRQAFSTPNLLKELNLKIGRLSTGDSLDMSTQDETLIIANDATLKDMEGAAVAYVADLLKIPVVFLKAVTDLVDGDKPTAEEFLQNLTVVTAALEGTATKVINFINGRNLSDL

SEQ ID NO: 31438 - DNA, 1000 bp, Arabidopsis thaliana
  misc_feature (1)..(1000): Ceres Seq. ID no. 13580579
atttaaaacccttatttaaattatatagaaaaaaaaaaggtcaagtagtcttctattatttactagtataacctctagaaacatcatcaccacattcctggctaatatccttcatctagaacaattattaacgaatcaaaataccaaaaaacaaagcacctcattgactattaaattagtactaatacattaattaagttattattcctatatataaatctcacccattctccaccttatcatcacaatccaaaactctctctctctctctctctctgtctcttgtcttatcatttatctctctaacggcgaggcaatgggttttccggtgggatattctgagctacttctcccaaaaatctttttctacttgttatctttcttaggtttgatacgtaaactcatctccacaatgttcaagatcattggtctaccagatttcttagaacctgaaccggtttcaacctcatggcccgacccaccacccacgttgaccaaacctgactcagcagcaatactagccggagagatgttaccggttgttcgattctcggatataaaccgaccggaatccgagtgttgcgcagtgtgtctctacgatttcgagaacgacgacgagatccgacggctgacgaattgtcgacatatatttcatcggggatgtttggaccgttggatgatgggttataatcagatgacgtgtccactttgtcgtacacagtttatacctgatcatcttcaactggagtttaatcaaaggctctggtctcaatcttctgctgtttcttctcaacttcttgatgaatcatcatcttaggacgtattaaatctttgtccaaacaaaaaaaaaagacatattaaatcctttttttttggtactttcattgggaattgggtttggtgtgagatcgatgtaaatattaaacaaaaaaaaaaaaggtagtggttacaggttaatgaaaaaagaaagaagaagaaaatttgtacttatccatccctc

SEQ ID NO: 31439 - protein, 166 aa, Arabidopsis thaliana
  misc_feature (1)..(166): Ceres Seq. ID no. 13580580
MGFPVGYSELLLPKIFFYLLSFLGLIRKLISTMFKIIGLPDFLEPEPVSTSWPDPPPTLTKPDSAAILAGEMLPVVRFSDINRPESECCAVCLYDFENDDEIRRLTNCRHIFHRGCLDRWMMGYNQMTCPLCRTQFIPDHLQLEFNQRLWSQSSAVSSQLLDESSS

SEQ ID NO: 31440 - protein, 134 aa, Arabidopsis thaliana
  misc_feature (1)..(134): Ceres Seq. ID no. 13580581
MFKIIGLPDFLEPEPVSTSWPDPPPTLTKPDSAAILAGEMLPVVRFSDINRPESECCAVCLYDFENDDEIRRLTNCRHIFHRGCLDRWMMGYNQMTCPLCRTQFIPDHLQLEFNQRLWSQSSAVSSQLLDESSS

SEQ ID NO: 31441 - protein, 95 aa, Arabidopsis thaliana
  misc_feature (1)..(95): Ceres Seq. ID no. 13580582
MLPVVRFSDINRPESECCAVCLYDFENDDEIRRLTNCRHIFHRGCLDRWMMGYNQMTCPLCRTQFIPDHLQLEFNQRLWSQSSAVSSQLLDESSS

SEQ ID NO: 31442 - DNA, 907 bp, Arabidopsis thaliana
  misc_feature (1)..(907): Ceres Seq. ID no. 13580583
gatgacataccaaaagcaataccaaatgcaaacacaccacatgcagcaacaacaactccatcacttcgtctttgtccacggctcatgtcatggagcatggtgctggttcaaactagctgcaaagctcaagctcgatggtcaccgtgtgacagctatcgaccttggtggctccggtgtcgacacgaggcagctccatgaggttcgtttggtgtcggcgtatctagagcctttgatgagtttcatggagtctctccctgaaaacgagaaagtggttcttgttggtcatagctatggtggcattggaacttctcttgctatggaaaggtttccgaccaaagtctctgtcggaatcttcctctctgcttacatgccgcaccatgactctcctccggcggttttgattcaagagtattttacgagactaccagagggtttcgctatggactgtgagtttacattcgaggaaggattagaacacccaccaagttcagttttgttcggtactagtttcttgaaggagaaggcatatagtaattgccagttagaggatctagaattagccatggcgttgatgaaaccaagctagttatacactaaggaaatgggaggtgaagatctgataacaaaggagaggtatggatctgggaagagagtgtttattgtctgtgaaggcgacaatgtggttccagaggagattcagaagtggatgattagtaactacgagcctcacgaagttaagcggattgaagaagctggtcacatggctatgctcactaagcctcatgaactttctcaactgctacaagaaatagcagcgaaatataactaaatgtaaaatgatgacacctgtgtatgatttgggctcagttacatctatgatatgaataagagagtttcaatatttgtg

SEQ ID NO: 31443 - protein, 194 aa, Arabidopsis thaliana
  misc_feature (1)..(194): Ceres Seq. ID no. 13580584
MTYQKQYQMQTHHMQQQQLHHFVFVHGSCHGAWCWFKLAAKLKLDGHRVTAIDLGGSGVDTRQLHEVRLVSAYLEPLMSFMESLPENEKVVLVGHSYGGIGTSLAMERFPTKVSVGIFLSAYMPHHDSPPAVLIQEYFTRLPEGFAMDCEFTFEEGLEHPPSSVLFGTSFLKEKAYSNCQLEDLELAMALMKPS

SEQ ID NO: 31444 - protein, 186 aa, Arabidopsis thaliana
  misc_feature (1)..(186): Ceres Seq. ID no. 13580585
MQTHHMQQQQLHHFVFVHGSCHGAWCWFKLAAKLKLDGHRVTAIDLGGSGVDTRQLHEVRLVSAYLEPLMSFMESLPENEKVVLVGHSYGGIGTSLAMERFPTKVSVGIFLSAYMPHHDSPPAVLIQEYFTRLPEGFAMDCEFTFEEGLEHPPSSVLFGTSFLKEKAYSNCQLEDLELAMALMKPS

SEQ ID NO: 31445 - protein, 181 aa, Arabidopsis thaliana
  misc_feature (1)..(181): Ceres Seq. ID no. 13580586
MQQQQLHHFVFVHGSCHGAWCWFKLAAKLKLDGHRVTAIDLGGSGVDTRQLHEVRLVSAYLEPLMSFMESLPENEKVVLVGHSYGGIGTSLAMERFPTKVSVGIFLSAYMPHHDSPPAVLIQEYFTRLPEGFAMDCEFTFEEGLEHPPSSVLFGTSFLKEKAYSNCQLEDLELAMALMKPS

SEQ ID NO: 31446 - DNA, 1610 bp, Arabidopsis thaliana
  misc_feature (1)..(1610): Ceres Seq. ID no. 13580607
agatatatccacaaggagagacacagattcttgtattgatactcacttcagtggagctaagacaagtagaaaaaaaatggcgccaccgcattttctactggtaacgtttccggcgcaaggtcacgtgaacccatctctccgttttgctcgtcggctcatcaaaagaaccggcgcacgtgtcactttcgtcacttgtgtctccgtcttccacaactccatgatcgcaaaccacaacaaagtcgaaaatctctctttccttactttctccgacggtttcgacgatggaggcatttccacctacgaagaccgtcagaaaaggtcggtgaatctcaaggttaacggcgataaggcactatcggatttcatcgaagctactaagaatggtgactctcccgtgacttgcttgatctacacgattcttctcaattgggctccaaaagtagcacgtagatttcaacttccctccgctcttctctggatccaaccggctttggttttcaacatctattacactcatttcatgggaaacaagtccgttttcgagttacctaatctgtcttctctggaaatcagagatcttccatctttcctcacaccttccaacacaaacaaaggcgcatacgatgcggtttcaagaaatgatggagtttctcataaaagaaaccaaaccgaaaattctcatcaacactttcgattcgctggaaccagaggccttaacggctttcccgaatatcgatatggtggcggttggtcctttacttcccacggagattttctcaggaagcaccaacaaatcagttaaagatcaaagtagtagttatacactttggctagactcgaaaacagagtcctctgttatttacgtttcctttggaacaatggttgagttgtccaagaaacagatagaggaactagcgagagcactcatagaagggaaacgaccgtttttgtgggttataactgataaatccaacagagaaacgaaaacagaaggagaagaagagacagagattgagaagatagctggattcagacacgagcttgaagaggttgggatgattgtgtcgtggtgttcgcagatagaggttttaagtcaccgagccgtaggttgttttgtgactcattgtgggtggagctcgacgctggagagtttggttcttggcgttccggttgtggcgtttccgatgtggtcggatcaaccgacgaacgcgaagctactggaagaaagttggaagactggtgtgagggtaagagagaacaaggatggtttggtggagagaggagagatcaggaggtgtttggaagccgtgatggaggagaagtcggtggagttgagggaaaacgcaaagaaatggaagcgtttagcgatggaagcgggtagagaaggaggatcttcggataagaacatggaggcttttgtggaggatatttgtggagaatctcttattcaaaacttgtgtgaagcagaggaggtaaaagtaaagtaaataaaggacaaaagagttggtgtctagaagtggcggagtgttatttgctaatactgtcactttgtaatatcaaattcaattaaaacataaaatttactccatctagataaatatgttttttcg

SEQ ID NO: 31447 - protein, 287 aa, Arabidopsis thaliana
  misc_feature (1)..(287): Ceres Seq. ID no. 13580608
MRFQEMMEFLIKETKPKILINTFDSLEPEALTAFPNIDMVAVGPLLPTEIFSGSTNKSVKDQSSSYTLWLDSKTESSVIYVSFGTMVELSKKQIEELARALIEGKRPFLWVITDKSNRETKTEGEEETEIEKIAGFRHELEEVGMIVSWCSQIEVLSHRAVGCFVTHCGWSSTLESLVLGVPVVAFPMWSDQPTNAKLLEESWKTGVRVRENKDGLVERGEIRRCLEAVMEEKSVELRENAKKWKRLAMEAGREGGSSDKNMEAFVEDICGESLIQNLCEAEEVKVK

SEQ ID NO: 31448 - protein, 282 aa, Arabidopsis thaliana
  misc_feature (1)..(282): Ceres Seq. ID no. 13580609
MMEFLIKETKPKILINTFDSLEPEALTAFPNIDMVAVGPLLPTEIFSGSTNKSVKDQSSSYTLWLDSKTESSVIYVSFGTMVELSKKQIEELARALIEGKRPFLWVITDKSNRETKTEGEEETEIEKIAGFRHELEEVGMIVSWCSQIEVLSHRAVGCFVTHCGWSSTLESLVLGVPVVAFPMWSDQPTNAKLLEESWKTGVRVRENKDGLVERGEIRRCLEAVMEEKSVELRENAKKWKRLAMEAGREGGSSDKNMEAFVEDICGESLIQNLCEAEEVKVK

SEQ ID NO: 31449 - protein, 281 aa, Arabidopsis thaliana
  misc_feature (1)..(281): Ceres Seq. ID no. 13580610
MEFLIKETKPKILINTFDSLEPEALTAFPNIDMVAVGPLLPTEIFSGSTNKSVKDQSSSYTLWLDSKTESSVIYVSFGTMVELSKKQIEELARALIEGKRPFLWVITDKSNRETKTEGEEETEIEKIAGFRHELEEVGMIVSWCSQIEVLSHRAVGCFVTHCGWSSTLESLVLGVPVVAFPMWSDQPTNAKLLEESWKTGVRVRENKDGLVERGEIRRCLEAVMEEKSVELRENAKKWKRLAMEAGREGGSSDKNMEAFVEDICGESLIQNLCEAEEVKVK

SEQ ID NO: 31450 - DNA, 1084 bp, Arabidopsis thaliana
  misc_feature (1)..(1084): Ceres Seq. ID no. 13580622
tcttcttcgatcttcttcctctcgtcaggtttcgtggttctaatcctcgttttattctttctccaaggaagatggctctaaaggagcagctagataaattcaacaaacagcaagtgaaatgccaatctactctttcgagcattgcttcttcaagagaaagaacgagttcttcgaggcagaatgtgcctttgcctgcggcaatcactcagaagaagcctgatgcagctcctgtcaagttttcaagcgataccgagcgacttcagaacattaacaacattagaaaagctcctgttggagctcaaatcaagcgtgtcattgatcttctctatgagagaaggctagccttgacgccagagcaaataaatgaatggtgtcatgtagatatgcatgctaataaggctgtttttgatagtttaaggaagaatccgaaagcgcattatgatggaagaaggttctcttataaggctacgcacgatgttaatgataagaaccagcttctttcgttggtgagaaaataccttgatgggattgcggtggttgatctcaaagacgcttacccgaatgtaatggaggatttgaaggctctgagtgcttcaggggacatctacttgctatcaaattcacaagaggacattgcatacccaaatgatttcaagtgtgagattaaggttgatgacgaatttaaagctctattccgtgacataaacatcccgaacgacatgctggacgtggagaaggagctgctgaaaatcggtttgaagccggcgacaaacactgcggagaggagagctgctgcacagacccatggcatatcgaataaaccgaaggataagaagaagaagaaacaagagatcagcaagagaaccaaactcaccaatgcccatcttcccgagcttttccagaaccttaacggcagcagttcccggaactgaacctcataaatggatgatcatgcggttctaaattcaaattgagcctgaattttcttgtaattgtaattgttactatcttgagtttacaaattacaatggttctcatgtattctcacgacatttgctagaaatatagaataaacacatttgtg

SEQ ID NO: 31451 - protein, 309 aa, Arabidopsis thaliana
  misc_feature (1)..(309): Ceres Seq. ID no. 13580623
FFDLLPLVRFRGSNPRFILSPRKMALKEQLDKFNKQQVKCQSTLSSIASSRERTSSSRQNVPLPAAITQKKPDAAPVKFSSDTERLQNINNIRKAPVGAQIKRVIDLLYERRLALTPEQINEWCHVDMHANKAVFDSLRKNPKAHYDGRRFSYKATHDVNDKNQLLSLVRKYLDGIAVVDLKDAYPNVMEDLKALSASGDIYLLSNSQEDIAYPNDFKCEIKVDDEFKALFRDINIPNDMLDVEKELLKIGLKPATNTAERRAAAQTHGISNKPKDKKKKKQEISKRTKLTNAHLPELFQNLNGSSSRN

SEQ ID NO: 31452 - protein, 286 aa, Arabidopsis thaliana
  misc_feature (1)..(286): Ceres Seq. ID no. 13580624
MALKEQLDKFNKQQVKCQSTLSSIASSRERTSSSRQNVPLPAAITQKKPDAAPVKFSSDTERLQNINNIRKAPVGAQIKRVIDLLYERRLALTPEQINEWCHVDMHANKAVFDSLRKNPKAHYDGRRFSYKATHDVNDKNQLLSLVRKYLDGIAVVDLKDAYPNVMEDLKALSASGDIYLLSNSQEDIAYPNDFKCEIKVDDEFKALFRDINIPNDMLDVEKELLKIGLKPATNTAERRAAAQTHGISNKPKDKKKKKQEISKRTKLTNAHLPELFQNLNGSSSRN

SEQ ID NO: 31453 - protein, 182 aa, Arabidopsis thaliana
  misc_feature (1)..(182): Ceres Seq. ID no. 13580625
MHANKAVFDSLRKNPKAHYDGRRFSYKATHDVNDKNQLLSLVRKYLDGIAVVDLKDAYPNVMEDLKALSASGDIYLLSNSQEDIAYPNDFKCEIKVDDEFKALFRDINIPNDMLDVEKELLKIGLKPATNTAERRAAAQTHGISNKPKDKKKKKQEISKRTKLTNAHLPELFQNLNGSSSRN

SEQ ID NO: 31454 - DNA, 1391 bp, Arabidopsis thaliana
  misc_feature (1)..(1391): Ceres Seq. ID no. 13580630
atggaagaattagaaaaaacccagaaatttcagaagaagaagaagcaacaacaagagaaacaagaccagtcttcaccaatcaacttcgagatgtcttcaagatcatcacttcattcattaccacaaacaacgattgaatcacctcctgattcaccaaccctctcttcaatccccgatagccatggatcttctcctcacacgattattccaactccttctgtggccaagacggagactccttttagggttactaacggagaggaggagaagaaagtcagcgagagtaggagacaattgagaccgagcttttcttcttcttcttctactccgcgtgaatcgaaatgggcaagtttgattaggaaagctctacttggatttagggttattgcgtttgtttcgtgtcttgtttcgttctctgtaatggtttctgatagagataaaggatgggctcatgattctttctacaactacaaagaattcaggttctgtttggctgcgaatgtgattggttttgtctactctggttttatgatatgtgatcttgtatacctgttatctactagcatccgaagatcacgacataacctgcgacatttcttggaatttggtcttgatcaaatgctagcttatcttcttgcatcagcttcaacttcagcttcgatccgcgtagatgattggcaatcaaactggggagcagacaagttcccagacttagctagagcatctgtcgcactgtcttacgtctcctttgtcgcattcgccttctgctcattggcttccggttatgctctatgtgcactccggtccatctaaactaaacaagcgcaagctcgagacaaaaagtctcattttgtctactctcagaagttgtatccttgaccctaaacgggtccagtttctgatttttagaagaaacttttattttatatagtggagaatattccatcttgttaaaagatggtgcgaatgctcgtttatacatcactttatctatttcactttttattatatagttctaagaaaagctatatgatgctatcttctccccaaaaaaaaaaaaaaaaaaatcaagaattcgcacgagaccattacctagaacatcctaatcaaaaaaattgggttattagtacgaattttataatgagtgtgccataatttacctaaaaaagaaaaaaaaagaaaaaaagagtgttgtatgtacgtgtgtttgacttggataattagtgacattttaagcaaatgtgtatttggaaaagtgatgtcaatgaaatatgaatatgggtcgaataaagaagcgaagatccgtagactgttgcttctctgcatctgttgttgtattcccgatcatattgttgtatgtttataatttattaaaagcaaattgtcttccc

SEQ ID NO: 31455 - protein, 270 aa, Arabidopsis thaliana
  misc_feature (1)..(270): Ceres Seq. ID no. 13580631
MEELEKTQKFQKKKKQQQEKQDQSSPINFEMSSRSSLHSLPQTTIESPPDSPTLSSIPDSHGSSPHTIIPTPSVAKTETPFRVTNGEEEKKVSESRRQLRPSFSSSSSTPRESKWASLIRKALLGFRVIAFVSCLVSFSVMVSDRDKGWAHDSFYNYKEFRFCLAANVIGFVYSGFMICDLVYLLSTSIRRSRHNLRHFLEFGLDQMLAYLLASASTSASIRVDDWQSNWGADKFPDLARASVALSYVSFVAFAFCSLASGYALCALRSI

SEQ ID NO: 31456 - protein, 240 aa, Arabidopsis thaliana
  misc_feature (1)..(240): Ceres Seq. ID no. 13580632
MSSRSSLHSLPQTTIESPPDSPTLSSIPDSHGSSPHTIIPTPSVAKTETPFRVTNGEEEKKVSESRRQLRPSFSSSSSTPRESKWASLIRKALLGFRVIAFVSCLVSFSVMVSDRDKGWAHDSFYNYKEFRFCLAANVIGFVYSGFMICDLVYLLSTSIRRSRHNLRHFLEFGLDQMLAYLLASASTSASIRVDDWQSNWGADKFPDLARASVALSYVSFVAFAFCSLASGYALCALRSI

SEQ ID NO: 31457 - DNA, 1758 bp, Arabidopsis thaliana
  misc_feature (1)..(1758): Ceres Seq. ID no. 13580639
aaagcttaacaacctccactagagactttcttgagcaaaaaagattggttataaaggaccaaccattgtcatgttattgagtgtcatttttgtgagggagagaattaagagagcaaaatgagcataaataggaatctgttgaatatcataataatcctttgtatatgtctcaatttgggttgtaacgatggagctcaagaaagagagactgattctcatactatccaagtcagctctctcctcccttcatcatcatcatcttgtgttctttctcccagagcgtctactacaaagtcttcactgcacgtgacgcatagacacggcacgtgttcgcgtctaaacaatggcaaggccacgagtccagaccatgtcgagatcctaagactcgaccaggctcgcgtaaactcaatccactcaaaactatcgaagaaactcgcaacagatcacgtcagtgaaagcaagtcaacggatctaccggctaaagacggaagcacactcggttcaggtaactacatcgtgacggtcggcctcgggacaccaaagaacgatctatcactaatcttcgacactggaagcgatttaacgtggactcagtgtcagccatgtgttcgaacttgctatgaccagaaggaaccaatctttaacccttctaagtctacttcttactacaacgtatcctgctcatcggctgcgtgtggttctctctcttctgctacaggaaacgccggaagctgttcggcttcgaattgcatctacggtattcaatacggcgatcaatcgttctccgtcggatttctcgccaaggagaagtttacactaacgaactccgacgtatttgacggcgtttatttcggttgcggcgagaacaaccaaggacttttcaccggtgtcgccggacttctcggtcttggtcgtgacaagctttcgtttccgtcgcagacggcaacggcttacaataagatcttctcttactgcctcccttcctccgctagctacaccggacatctcacattcggatccgccggaatctccagatccgttaaattcacaccaatttcaaccatcactgatggaacttccttctacggccttaatatcgtcgcaatcaccgtcggcggtcagaaattgccgattccttcaactgtattctctactccgggagctttaatcgattccggcaccgttatcactcgtctcccgccgaaagcctacgcggcgttaagaagctcgttcaaggcgaagatgtcaaagtatccgaccacgtcgggcgtctcgatcttggacacgtgtttcgatctcagcgggtttaagacggtgactatcccgaaagtggcgttctctttcagcggtggcgccgtcgtggagcttggttcgaaagggatattttacgtgtttaagatatctcaggtttgtctggcgtttgcagggaatagcgatgacagtaacgctgccatctttggaaacgttcagcagcaaacgctagaagttgtgtatgatggtgcgggtgggcgggtcgggtttgctccaaacgggtgtagttaagttagttaatgaaaaacagaacggggtaaattttaaatttatggatttggcacaaattagctttatccttaatcaagtgtgtaatttgggtaaagatcggaattcgtgatggtctttgaagtaattgtatagtaataagtttgtgtgcatgatacaacaattacaagaacaaactgtttattgtaaaattttattccaatacaactatacaagatg

SEQ ID NO: 31458 - protein, 474 aa, Arabidopsis thaliana
  misc_feature (1)..(474): Ceres Seq. ID no. 13580640
MSINRNLLNIIIILCICLNLGCNDGAQERETDSHTIQVSSLLPSSSSSCVLSPRASTTKSSLHVTHRHGTCSRLNNGKATSPDHVEILRLDQARVNSIHSKLSKKLATDHVSESKSTDLPAKDGSTLGSGNYIVTVGLGTPKNDLSLIFDTGSDLTWTQCQPCVRTCYDQKEPIFNPSKSTSYYNVSCSSAACGSLSSATGNAGSCSASNCIYGIQYGDQSFSVGFLAKEKFTLTNSDVFDGVYFGCGENNQGLFTGVAGLLGLGRDKLSFPSQTATAYNKIFSYCLPSSASYTGHLTFGSAGISRSVKFTPISTITDGTSFYGLNIVAITVGGQKLPIPSTVFSTPGALIDSGTVITRLPPKAYAALRSSFKAKMSKYPTTSGVSILDTCFDLSGFKTVTIPKVAFSFSGGAVVELGSKGIFYVFKISQVCLAFAGNSDDSNAAIFGNVQQQTLEVVYDGAGGRVGFAPNGCS

SEQ ID NO: 31459 - DNA, 647 bp, Arabidopsis thaliana
  misc_feature (1)..(647): Ceres Seq. ID no. 13580661
aacatcctaatcgaaaaccggcgccaccattaaaatctctcgatctctatctgcgaaatttcacggtaggtatttgaaatggcgacagttccaggacaattgatctgggagatcgtgaagaacaacaactgtttcttggtgaagcagttcggtagaggaaactctaaggttcaattcagcaaggagactaacaacctcaccaacgttcactcttacaagcactctggtcttgcaaacaaaaagactgtgaccatccaggccgctgacaaggaccaagctgttgtgctcgccaccaccaagaccaagaagcagaacaagcctaagctctctgtcaacaagtctatcctcaagaaggaattccccaggatgtcaaaggctgttgctaaccaggtggtggacaactactacaggccggacttgaagaaagctgcacttgctagactcagcgccatcagcaaaggtctcagggttgccaagtccggtgccaagcaaagaaacagacaagcttaagcttcttctttcacaatctgttttttttgaagtaaaagattttgttgaacaggttttatttaagttgttgctttgaagttgaaccataatgctattctcctttttcattatccttattataaaggagttagaagttt

SEQ ID NO: 31460 - protein, 143 aa, Arabidopsis thaliana [sequence omitted]

SEQ ID NO: 31461 - DNA, 2300 bp, Arabidopsis thaliana
  misc_feature (1)..(2300): Ceres Seq. ID no. 13580663
atgacctacatatatagagacacaaagatcacaacaaaatcaaccattcctttccttatcttcttcctcttttgcttttctaatctctcaatggctaccttaaaacacaaacctgtaaatttggtattttacgtttataatttgattattatattctcctcccatagttccacggcggagctccgcaggctactgcagccatcaaaaaccgatggtacagtgagctttctcgttatcggagactggggaagaagaggctcctataatcagtcccaagtagctcttcagatgggagaaatcggagagaaattagatatcgattttgtgatttctactggagataatttttacgacaatggtttaaccagcttgcacgatcctctatttcaagattcttttaccaacatttataccgctccgagcttgcagaaaccttggtatagtgttttaggaaatcatgattatagaggtgacgtcagggcacaacttagccctatgctcagagctctggacaacagatgggtttgcatgagatctttcattgtaaatgctgagatcgtcgatttgttcttcgtcgacacaactccgttcgtcgataaatactttattcaaccaaataagcatgtttatgactggagcggtgtattacctaggcaaacatatctgaataatctcttaaaggaactcgacgtggcgttgagagagtcagtcgcaaagtggaaaatagtgattggtcaccatacgatcaaaagcgcaggccaccacgggaacaccattgagttggagaaacaccttttacctattctccaagcaaatgaagtggatctctacgtaaacggacatgatcattgcttagagcacataagcagcgtggacagtaacatacaatttatgacaagtggaggtggatccaaggcctggaaaggaggtgacgtgaactacgttgaaccagaagagatgaggttttactacgacggacaaggtttcatgtcggttcacgtttcagaagctgaactgcgtgtagtcttttatgatgtttttggacacgttctgcatcattggaagaagacttacaaggaggcgctttatttcgcttcttgattccaatttaatcggacgtaattgtttatgatcgatgtactatgaaattatcaatatcgtacttcgtccaaaaaaaaaaaaaaaaaagcttctcgtgccgttttttttttttttttttggactaaaaacttaattaacataaaaaaccaaaccaatggtttcagtaaataaagcagggaaacattaagagaaagcaaaaagacaaaagctacaaactctcatgactgcgcatggaatcagtgaaaaaacataacaactcgagttttcttttctccttttttttattcagaacagtacgaactcaaccacacacaaactctcgccggtgtaagcttaggcctttgacatgtgaacgataaggtcaacgacacgagaactgtaaccccattcgttgtcgtaccatgacaccaacttcacaaacttgtcgctcaatgcaatcccagccttggcatcgaaaatgcttgacctgttgtcaccaacaaagtcggtagacacaacatcatcctcagtgtatcccaaaattcccttcattttgccttcagattcctccttgatggccttcttgatttcgtcgtatgttgcagctgtcgctcgtctacatttacactcggagcttagaccttccaatctaccggcggcgaaaatgggtttcaagaggtacgttgagatcgggagagtagcacttgtgaactacggagaagatcatggaaagctcgtcgttatcgtcgacgttgttgaccagaacagagctttggtggatgcccctgatatggagaggatccagatgaacttcaagaggttgtctcttaccgatattgtcattgacatcaaccgtgtgccaaagaagaaggctttgatcgaggcaatggaaaaggctgatgtgaagaacaagtgggagaaaagctcatggggtaggaagcttatcgtgcagaaacgtagggctaaccttaacgactttgataggttcaagatcatgttggccaagatcaagaaagctggtgttgtcaggcaagagcttgcaaaactcaagaaggagatcactgcctgatcaaatattatctacaattctgttgtctttcttttttgattttggattcggaaattagtgtttttggaactatcaatatcagtatgtgctcaattatcagacattattcaagtttgaaaccttgtttgcaaaactcaaagttttttgttcc

SEQ ID NO: 31462 - protein, 366 aa, Arabidopsis thaliana
  misc_feature (1)..(366): Ceres Seq. ID no. 13580664
MTYIYRDTKITTKSTIPFLIFFLFCFSNLSMATLKHKPVNLVFYVYNLIIIFSSHSSTAELRRLLQPSKTDGTVSFLVIGDWGRRGSYNQSQVALQMGEIGEKLDIDFVISTGDNFYDNGLTSLHDPLFQDSFTNIYTAPSLQKPWYSVLGNHDYRGDVRAQLSPMLRALDNRWVCMRSFIVNAEIVDLFFVDTTPFVDKYFIQPNKHVYDWSGVLPRQTYLNNLLKELDVALRESVAKWKIVIGHHTIKSAGHHGNTIELEKHLLPILQANEVDLYVNGHDHCLEHISSVDSNIQFMTSGGGSKAWKGGDVNYVEPEEMRFYYDGQGFMSVHVSEAELRVVFYDVFGHVLHHWKKTYKEALYFAS

SEQ ID NO: 31463 - protein, 336 aa, Arabidopsis thaliana
  misc_feature (1)..(336): Ceres Seq. ID no. 13580665
MATLKHKPVNLVFYVYNLIIIFSSHSSTAELRRLLQPSKTDGTVSFLVIGDWGRRGSYNQSQVALQMGEIGEKLDIDFVISTGDNFYDNGLTSLHDPLFQDSFTNIYTAPSLQKPWYSVLGNHDYRGDVRAQLSPMLRALDNRWVCMRSFIVNAEIVDLFFVDTTPFVDKYFIQPNKHVYDWSGVLPRQTYLNNLLKELDVALRESVAKWKIVIGHHTIKSAGHHGNTIELEKHLLPILQANEVDLYVNGHDHCLEHISSVDSNIQFMTSGGGSKAWKGGDVNYVEPEEMRFYYDGQGFMSVHVSEAELRVVFYDVFGHVLHHWKKTYKEALYFAS

SEQ ID NO: 31464 - protein, 270 aa, Arabidopsis thaliana
  misc_feature (1)..(270): Ceres Seq. ID no. 13580666
MGEIGEKLDIDFVISTGDNFYDNGLTSLHDPLFQDSFTNIYTAPSLQKPWYSVLGNHDYRGDVRAQLSPMLRALDNRWVCMRSFIVNAEIVDLFFVDTTPFVDKYFIQPNKHVYDWSGVLPRQTYLNNLLKELDVALRESVAKWKIVIGHHTIKSAGHHGNTIELEKHLLPILQANEVDLYVNGHDHCLEHISSVDSNIQFMTSGGGSKAWKGGDVNYVEPEEMRFYYDGQGFMSVHVSEAELRVVFYDVFGHVLHHWKKTYKEALYFAS

SEQ ID NO: 31465 - DNA, 1208 bp, Arabidopsis thaliana
  misc_feature (1)..(1208): Ceres Seq. ID no. 13580667
atggcagattccacgattaagctaacagtcaaattcggaggcaaatcaataccactttcggtatcaccagattgtacagtcaaagatcttaagtctcagttacaaccaatcaccaacgttcttcctcgtggccagaagctcatcttcaaaggtaaggttttggttgaaacgtcgactttgaaacaatctgatgtgggaagtggagctaaactcatgttaatggcttctcaaggtctgcatcaaggggaaggtccaatacttaaggaagctagtataaggccaatctctagaactgttgtatctgataaagtagatcagagaaagcctagtgtacttgtagacaagaaccgcactgatcgatggaaagccacaggagttattgctttagctcaagccaatttgaaggaaatacctgaagaagtgtgggactgtggatctggagtcagagtacttgacattagtgaaaacttcattaaagaagtacctgccaaaatcagctcctttggttctatgcagaaattgttccttcaaggaaatggtctgtccgatgaatccattcaatgggaagggatagcatctctgaagcgcctgatgcttctgtccattagccataacaatctaactgttctgccatcagcaatgggttcactgacgtctcttagacagcttgatgtcaccaacaacaagttgacaagtctaccgaatgagttaggacttctgacgcagcttgagattttgaaagccaacaacaacagaataactagtcttcctgagagtatcggaaactgttcattcctcatggaggttgatctttcagctaatattatatcagaacttcccgagacattcaccaaactgcgtaatctaaagacgctggagctgaataacacgggattgaagacgctgccatcggctttatttaagatgtgtttgcagctctcaactttaggtctccacaacacagagataaccgttgaatttctccgccagttcgagggatatgatgattttgatgaaagaagacgtaccaagcatcaaaagcagcttgattttcgtgttgtgggatctggccaattcgacgaaggcgctgataaatcttggtgatcaagccaagtcgagtctcgaatcgtcagtactcttaatatatttgtggcactttcagtgaaaaaatctttctccttcatgcctatatattgtttgcttactcc

SEQ ID NO: 31466 - protein, 367 aa, Arabidopsis thaliana
  misc_feature (1)..(367): Ceres Seq. ID no. 13580668
MADSTIKLTVKFGGKSIPLSVSPDCTVKDLKSQLQPITNVLPRGQKLIFKGKVLVETSTLKQSDVGSGAKLMLMASQGLHQGEGPILKEASIRPISRTVVSDKVDQRKPSVLVDKNRTDRWKATGVIALAQANLKEIPEEVWDCGSGVRVLDISENFIKEVPAKISSFGSMQKLFLQGNGLSDESIQWEGIASLKRLMLLSISHNNLTVLPSAMGSLTSLRQLDVTNNKLTSLPNELGLLTQLEILKANNNRITSLPESIGNCSFLMEVDLSANIISELPETFTKLRNLKTLELNNTGLKTLPSALFKMCLQLSTLGLHNTEITVEFLRQFEGYDDFDERRRTKHQKQLDFRVVGSGQFDEGADKSW

SEQ ID NO: 31467 - protein, 296 aa, Arabidopsis thaliana
  misc_feature (1)..(296): Ceres Seq. ID no. 13580669
MLMASQGLHQGEGPILKEASIRPISRTVVSDKVDQRKPSVLVDKNRTDRWKATGVIALAQANLKEIPEEVWDCGSGVRVLDISENFIKEVPAKISSFGSMQKLFLQGNGLSDESIQWEGIASLKRLMLLSISHNNLTVLPSAMGSLTSLRQLDVTNNKLTSLPNELGLLTQLEILKANNNRITSLPESIGNCSFLMEVDLSANIISELPETFTKLRNLKTLELNNTGLKTLPSALFKMCLQLSTLGLHNTEITVEFLRQFEGYDDFDERRRTKHQKQLDFRVVGSGQFDEGADKSW

SEQ ID NO: 31468 - protein, 294 aa, Arabidopsis thaliana
  misc_feature (1)..(294): Ceres Seq. ID no. 13580670
MASQGLHQGEGPILKEASIRPISRTVVSDKVDQRKPSVLVDKNRTDRWKATGVIALAQANLKEIPEEVWDCGSGVRVLDISENFIKEVPAKISSFGSMQKLFLQGNGLSDESIQWEGIASLKRLMLLSISHNNLTVLPSAMGSLTSLRQLDVTNNKLTSLPNELGLLTQLEILKANNNRITSLPESIGNCSFLMEVDLSANIISELPETFTKLRNLKTLELNNTGLKTLPSALFKMCLQLSTLGLHNTEITVEFLRQFEGYDDFDERRRTKHQKQLDFRVVGSGQFDEGADKSW

SEQ ID NO: 31469 - DNA, 874 bp, Arabidopsis thaliana
  misc_feature (1)..(874): Ceres Seq. ID no. 13580690
aaaaaaagctgaattgagttgggtgaagcaaattctcaggatgggaagaggaaagatagaaataaagaggatagagaactcaacaaatcgacaagtgacgttttgcaaaagaagaaatggacttctgaagaaagcctatgagctttcggtcctttgcgatgcagaagttgcgctcattgttttctccactcgtggccgtctctatgaatacgccaataacaacataagatcaaccattgagaggtacaagaaagcttgttctgatagcaccaacactagcactgtccaagaaatcaatgccgcgtactatcaacaagaatctgctaagctgagacaacagatccaaacgattcaaaactccaacaggaatctgatgggagactctttgagttccttaagtgtcaaggaactaaaacaagttgagaatcgccttgagaaagctatctctaggatcaggtccaagaaggagattgagcttgacaatgagaacatctatctaagaactaaggtagcagaagtggagaggtatcaacaacaccatcatcaaatggttagtggttcagagattaatgcaattgaagctttagcctcacgcaattactttgctcatagcattatgactgctggttctggatctggtaatggaggttcttactctgatcccgacaagaaaattcttcatctcggataatctcgtctgcgaaaaaccgagctgcaataactctctgcatgcatctggggattctttgctcagatttatctctacataaaatatgttttggtgcaaaataattcaaagtacaatgaaggtattggtccttcaagactcattgcaatttgtgttgtgtaatgattaagacatactctagttttt

SEQ ID NO: 31470 - protein, 229 aa, Arabidopsis thaliana
  misc_feature (1)..(229): Ceres Seq. ID no. 13580691
KKAELSWVKQILRMGRGKIEIKRIENSTNRQVTFCKRRNGLLKKAYELSVLCDAEVALIVFSTRGRLYEYANNNIRSTIERYKKACSDSTNTSTVQEINAAYYQQESAKLRQQIQTIQNSNRNLMGDSLSSLSVKELKQVENRLEKAISRIRSKKEIELDNENIYLRTKVAEVERYQQHHHQMVSGSEINAIEALASRNYFAHSIMTAGSGSGNGGSYSDPDKKILHLG

SEQ ID NO: 31471 - protein, 216 aa, Arabidopsis thaliana
  misc_feature (1)..(216): Ceres Seq. ID no. 13580692
MGRGKIEIKRIENSTNRQVTFCKRRNGLLKKAYELSVLCDAEVALIVFSTRGRLYEYANNNIRSTIERYKKACSDSTNTSTVQEINAAYYQQESAKLRQQIQTIQNSNRNLMGDSLSSLSVKELKQVENRLEKAISRIRSKKEIELDNENIYLRTKVAEVERYQQHHHQMVSGSEINAIEALASRNYFAHSIMTAGSGSGNGGSYSDPDKKILHLG

SEQ ID NO: 31472 - DNA, 1833 bp, Arabidopsis thaliana
  misc_feature (1)..(1833): Ceres Seq. ID no. 13580705
acaatcatttgattatttcctcctctccgtatctgtgtctctcttctcttgatcttttagtgttcttgctttgtcgcttcaacgcttaagtttggatttgtgtgagtctgcataatcatggcgaggaagatgcttgttgatggtgagattgataaggtggcggctgatgaagccaacgcgacgcactatgattttgatttgtttgtcatcggtgccgggagtggcggtgttcgtgctgctaggttttcggctaatcatggcgctaaggttggtatttgtgagcttccatttcaccctattagctctgaggagattggaggcgttggtggaacctgtgttatccgtggttgtgttcctaaaaagattctcgtctatggagctacttacggtggtgaacttgaggatgctaaaaattatgggtgggaaataaatgagaaagtcgacttcacatggaagaagcttttgcaaaagaagactgatgagatactaagactgaataatatctacaagcggttattggcaaatgctgcggtgaaattgtatgaaggtgaaggaagagtagttggtcccaacgaagtggaggtgagacaaatagatggcacaaaaataagttataccgcaaagcacatattgattgccactggcagtcgggcgcaaaagcctaatattcctggacatgagctggctattacatctgatgaagctttgagcttggaagaatttcccaagcgtgctatagtgcttggaggagggtatattgctgtggagtttgcatcaatatggcgtggaatgggtgctactgtagatttattcttcaggaaggaacttccgctaaggggttttgatgacgaaatgagggcactagttgctagaaatcttgaaggaaggggcgttaatctgcatccacaaacaagtttgactcagttgacaaaaacagaccaggggatcaaagtcatatcgtcccatggggaggaattcgtggcagatgtcgtcctatttgctactggcagaagtcctaataccaaaagattgaatttagaagctgttggtgttgaacttgatcaggctggagctgtgaaggttgacgagtattcacgaactaatatacctagcatatgggctgtaggagatgccacaaaccgaattaaccttacacctgttgcgttaatggaggccacctgttttgcgaacactgcttttggtggaaagcctactaaagcagaatacagcaatgtcgcctgtgctgtattttgcataccaccactagctgtagtgggtctcagcgaagaagaagcagtagaacaagcaaccggtgatattctggtcttcacctcaggctttaatccaatgaagaacaccatttctggacgccaggaaaagacattgatgaagctaatagttgatgagaagagtgataaggttattggagcatccatgtgcggtcctgatgcagctgagatcatgcaggggattgcaattgcgctcaagtgtggagcaaccaaagcacaatttgatagcacggttgggatacatccatcttctgcagaggaatttgtgacaatgcgcagtgtgaccagacgcattgcccacaaacccaaacctaagacaaatctatgaaccgcaaaatataaagagctatatagcatgaaaactcggtacacttaatttgatcaaagagtcagacaacgatgagtttaatcatactcgtgtcccaataaaggatttgtaatttttgtttgtttgtatgatgcttctcttcttacttacttgagaaaacatcaaggtttcttctcttattgcttagtggaactttattacaaagaattattctct

SEQ ID NO: 31473 - protein, 499 aa, Arabidopsis thaliana
  misc_feature (1)..(499): Ceres Seq. ID no. 13580706
MARKMLVDGEIDKVAADEANATHYDFDLFVIGAGSGGVRAARFSANHGAKVGICELPFHPISSEEIGGVGGTCVIRGCVPKKILVYGATYGGELEDAKNYGWEINEKVDFTWKKLLQKKTDEILRLNNIYKRLLANAAVKLYEGEGRVVGPNEVEVRQIDGTKISYTAKHILIATGSRAQKPNIPGHELAITSDEALSLEEFPKRAIVLGGGYIAVEFASIWRGMGATVDLFFRKELPLRGFDDEMRALVARNLEGRGVNLHPQTSLTQLTKTDQGIKVISSHGEEFVADVVLFATGRSPNTKRLNLEAVGVELDQAGAVKVDEYSRTNIPSIWAVGDATNRINLTPVALMEATCFANTAFGGKPTKAEYSNVACAVFCIPPLAVVGLSEEEAVEQATGDILVFTSGFNPMKNTISGRQEKTLMKLIVDEKSDKVIGASMCGPDAAEIMQGIAIALKCGATKAQFDSTVGIHPSSAEEFVTMRSVTRRIAHKPKPKTNL

SEQ ID NO: 31474 - protein, 495 aa, Arabidopsis thaliana
  misc_feature (1)..(495): Ceres Seq. ID no. 13580707
MLVDGEIDKVAADEANATHYDFDLFVIGAGSGGVRAARFSANHGAKVGICELPFHPISSEEIGGVGGTCVIRGCVPKKILVYGATYGGELEDAKNYGWEINEKVDFTWKKLLQKKTDEILRLNNIYKRLLANAAVKLYEGEGRVVGPNEVEVRQIDGTKISYTAKHILIATGSRAQKPNIPGHELAITSDEALSLEEFPKRAIVLGGGYIAVEFASIWRGMGATVDLFFRKELPLRGFDDEMRALVARNLEGRGVNLHPQTSLTQLTKTDQGIKVISSHGEEFVADVVLFATGRSPNTKRLNLEAVGVELDQAGAVKVDEYSRTNIPSIWAVGDATNRINLTPVALMEATCFANTAFGGKPTKAEYSNVACAVFCIPPLAVVGLSEEEAVEQATGDILVFTSGFNPMKNTISGRQEKTLMKLIVDEKSDKVIGASMCGPDAAEIMQGIAIALKCGATKAQFDSTVGIHPSSAEEFVTMRSVTRRIAHKPKPKTNL

SEQ ID NO: 31475 - protein, 275 aa, Arabidopsis thaliana
  misc_feature (1)..(275): Ceres Seq. ID no. 13580708
MGATVDLFFRKELPLRGFDDEMRALVARNLEGRGVNLHPQTSLTQLTKTDQGIKVISSHGEEFVADVVLFATGRSPNTKRLNLEAVGVELDQAGAVKVDEYSRTNIPSIWAVGDATNRINLTPVALMEATCFANTAFGGKPTKAEYSNVACAVFCIPPLAVVGLSEEEAVEQATGDILVFTSGFNPMKNTISGRQEKTLMKLIVDEKSDKVIGASMCGPDAAEIMQGIAIALKCGATKAQFDSTVGIHPSSAEEFVTMRSVTRRIAHKPKPKTNL

SEQ ID NO: 31476 - DNA, 3362 bp, Arabidopsis thaliana
  misc_feature (1)..(3362): Ceres Seq. ID no. 13580709
ataggaaacttacatcagatcggagaattaccgcatcagactctatggaaactctcaaagaagtatggtccggtgatgcatttgatgcttggaagagtcccaacagtcgtagtttcttcttcggatacagcaagacaagttttgagagttcatgacctccattgttgtactcgtccaagcttgtcagggccaagagagctttcgtacaactatctggacattgctttctctccttatgatgattattggaaagaagttaggaagctctgtgttcaagaacttttcagtactaaacaagttcactcgattcaacctattaaggacgaggaggtcaagaaaatgatcgattcaattgcggaatcagcctctcagaagaatccggttaacttgaacaataagtgtcttgaattaacagtaagtgtagtatgcaggacagcttttggggttagttttgagggaactgtgctcaacagtgacagattcaacaaaatagtccgcgaggcgctcgagatgttgggaagcttttctgccgcggattttattccgtatgtcggatggatcatcgatgtgttgacgggtttgcaaggaaggagagaaagaagcaagagagatctcaatgcattctttgaacaaatgtttgatttgcataaagagggaaagaaagaagggaatgaagattttgtggacttgctcttaaggttggagaaagaagaggcagttcttggaaatgataaacttacaagaaaccatatcaaagcaatcttgctggtaactaaaacaagatttagctaacaatcctttatgtaatgtagtagtaccaaagagtctgatatgttttgaatgagacaggatgttctacttgcgggaatcgatacttctgcaataacaatgacatgggcaatgacagaacttgcaagaaatccacgagtgatgaagaaagttcaatctgaaataagaactcaaatggggaacagatcaatgataagtttcgaagacatggatcagctagagtatctgaaaatggtgatcaaagaaacatggaggctacatcctacaacacctcttttgcttccaagagaagcaatgtctgaatttgatatcaacggctacactattcctgtcaagacacggcttcatgtgaatgtttgggctattggtcgtgatcctgatacttggaaagaccctgaagtgtttctcccggagaggtttatggataataacattgatgcaaaaggacaacattttgagctgttaccgtttgggggcggtcggagaatctgtcctgcaatatacatggggacaacaatggttgagtttggtctagctaatctcttgtatcattttgactggaagttaccagaaggcgtggaggttaaagatatcgacgtggaagaagctcctggactcactgtaaacaagaaaaacgagctcctacttgtgccagagatgagaagatcgtgtggttgagattagagctgactcatcatatcgacggttatgttgttgttcttgtttgacttttcaaacctaaaaagtatatcttatgaatataaaattaagtttaacgttacgtactacgtagcagagaatatatattgtaagataataataattgaagagagcagcaatgtactagtataatataaagactacacttatggagccactttaattgcaattaaatcagaaatgacaaacatttggcttctgtcacttatcttcgtcatttgtattcttgtagccgtgttcaaccacaagaatcggaggaattatcaacggacaccaccgtctcctcctggctgtcctatcatcggaaacttgcatcaactcggagaattaccacatcaatctctatggaaactctccaaaaagtatggccctgtgatgcttttaaagcttggaagagtaccaacagtcatagtttcttcctctgaaacagcaaaacaagctttgaaaatccatgacctccattgttgtagtcgtccaggctttgcaggggcaagagagctctcttacaactatctagacattgctttttctccttatgatgattattggaaagaagtaaggaagctcgctgttcaagaacttttcagtagtaaacaagttcactctatacaaccgataaaggacgaggaggtcaagaaactgatcgattcaatctccgaatcagctgctcagaagactccgatcaacttgaacaagacattgctggctttaactgttagtgtggtctgcaggacagcgtttagtgtgaattttgagggaactgtgctcaacagtgaacgattcaataacatagtccgtgaggcgctcgagatgttgggaagcttttctgcctcagatttcattccgtatgtcggaaggatcatcgacttgttgacgggtttgcaaggacggcgagagagaagcatgagagatctcgatgctttctatgaacaaatgtttgatctgcataaacagaaaaaggaagaaggtagtgaagactttgtggacttgctgttgaggttggagaaagaagaagctgttcttggaaatgacaagctcactagaaaccatatcaaagcgatattgatggatgttcttctagcaggaatggatacttctgcaataaccatgacatgggcaatggcagaactcgcaaagaatccacgagtgatgaaaaaagttcaatccgaaatcagaagtcaaatcaagaacaaagaaagaatcagctttgatgacactgataagcttgagtacctcaaaatggttatcaaagaaacatggaggttacatcctacaacacctcttctaatcccaagggaagcaatgtctgaatttgagatcaacggctacacgattccagttaagacacggcttcacgtgaatgtatgggctattggtcgtgatcccgatacctggaaagaccctgaagtgtttctcccggagaggtttacggataataatattgatgcaaaaggacagcattttgagctgttaccgtttggaggcggccggagaatgtgtcctgcagtttatatggggacaacaatggtcgagtttggtttggctaatcttttgtatcattttgattggaagttaccagaaggcatgaaggttgacgatattgacatggaagaagctcccggactcactgtcaacaagaaaaacgagcttatacttgtgccaacgaagtttctagatccttaaaataatgtcatcacatggaatatataaaaacatcgcatcttcctttgatgtttaatcagacaggacaaaaaaaaagagtttcttctttttaaataaaatgttttaacgcattacgttttgtaatattgtgctctcaagaatttggttctaagatgggatgatcttgtact

SEQ ID NO: 31477 - protein, 500 aa, Arabidopsis thaliana; identical to SEQ ID NO: 29834
  misc_feature (1)..(500): Ceres Seq. ID no. 13580710

SEQ ID NO: 31478 - protein, 435 aa, Arabidopsis thaliana; identical to SEQ ID NO: 29835
  misc_feature (1)..(435): Ceres Seq. ID no. 13580711

SEQ ID NO: 31479 - protein, 290 aa, Arabidopsis thaliana; identical to SEQ ID NO: 29836
  misc_feature (1)..(290): Ceres Seq. ID no. 13580712

SEQ ID NO: 31480 - DNA, 1959 bp, Arabidopsis thaliana
  misc_feature (1)..(1959): Ceres Seq. ID no. 13580725
aatgtccattacaaacaacaacagcatcataaatctcatcacgacgaactttcttctctttctccgtcgattcaatcctccacttcccgattccttcctccgccgccggagaaaccttcacaacctccgtctcaaacctaaccatctcctcaatcccaaactccttagcgaaatctttcaaatacgccaaaacttcgccatgactcggaaacctcctccgatctctagacacaccggaacgaaccacgaacgggaaatctctgtatccggtacactctcgtgtaccgttgattcgtagagatctatagacgcttgaatgaacaacggatcgggtcgggtcaacacttaacggatccgattcgacttcatcggtgtaaatccaggttcctcccacttgtttttgtttctcgaaaacgaccactgagtgaccttctcgtcgaagctctcgtgccgctactagtccggcgggtccagcaccgataaccgccacgtggtgtgatctgaagcaggtattgaagcaattggagccatggtgtgaacttaaagataaagtggttcttgtgacaggtgcttcctctggtatagggagagagatctgtcttgatctatgcaaagctggttgtaagattgtagcagcagctcgtcgtgttgatcgtctcaactctctctgttctgaaatcaacagctttggtgctatcggagtccaagccgtagcacttgagctagacgtttcatcagaagcagacactattcgaaaagcggttaaagaagcttgggaaacctttggaaagatcgatgttttgatcaataatgccggaatcagaggcaatgtcaagtcgagtttggatttgtcagaagaagaatgggacaaagtctttagaaccaacttaaccggatcttggttaatatccaaatacgtctgccttttgatgcgtgacgctgagcgcgggggctcggtgattaacgtctcgtcgatctctgggcttcatcgcggtttgttgcgcggtggactagcgtatgcttgttccaaaggtggtgttgacaccatgacgaggatgatggctattgagttagctgtttataagatcagagtgaactcgatcgcaccggggattttcaggtcagagatcacacaaggtcttttccagaaagagtggctcaagaaggttacggaaaaggttgtaccattaaagatgcaacagactgtggatccggggcttacatctcttgttcgctatctcattcacgattcttctcaatatgtcaccgggaatacatacattgtcgattccggaactacactgcccggtgtgcccattttttcttctctttctccgtagattcaattctccatttcccgcttccttcttccgccgccggagcaaccttcacaaccgccgtatcaaaccgaatcatctcctcgatcgcaaactccttagcgaaatcttgtaaatacgccaaaacttcaccatgactcggaaacctcctcggatctctagattccgatacaccggaacgaaccacgaacgggaagtccctgtatcccatacactcacgggggagattagttcggagagagccataaacgctcgaatgaacaacggatcgggtcgggtcaacgcttaatggatcgggttcgatatgatcggtgtatatccaggttcctccgacttgtttttgtctttcgaagacgaccaccgagtgaccttcccgtcgaagctctcgcgccgctactaatccggcggctccggcgccgataactgccgcgtggtgtgatctgattggtgataaggaaggcgccattggtttttttaacgagattcgttaacgatggtgaatatactacggcctttttataaatatgtggcccaaaaactcatgatccacacacaccacgacacaatgttaaaaaaacaaaaacaaattcctgagaaattatctaaacgctgcgttttatcg

SEQ ID NO: 31481 - protein, 136 aa, Arabidopsis thaliana
  misc_feature (1)..(136): Ceres Seq. ID no. 13580726
MRDAERGGSVINVSSISGLHRGLLRGGLAYACSKGGVDTMTRMMAIELAVYKIRVNSIAPGIFRSEITQGLFQKEWLKKVTEKVVPLKMQQTVDPGLTSLVRYLIHDSSQYVTGNTYIVDSGTTLPGVPIFSSLSP

SEQ ID NO: 31482 - protein, 98 aa, Arabidopsis thaliana
  misc_feature (1)..(98): Ceres Seq. ID no. 13580727
MSITNNNSIINLITTNFLLFLRRFNPPLPDSFLRRRRNLHNLRLKPNHLLNPKLLSEIFQIRQNFAMTRKPPPISRHTGTNHEREISVSGTLSCTVDS

SEQ ID NO: 31483 - protein, 97 aa, Arabidopsis thaliana
  misc_feature (1)..(97): Ceres Seq. ID no. 13580728
MTRMMAIELAVYKIRVNSIAPGIFRSEITQGLFQKEWLKKVTEKVVPLKMQQTVDPGLTSLVRYLIHDSSQYVTGNTYIVDSGTTLPGVPIFSSLSP

SEQ ID NO: 31484 - DNA, 3155 bp, Arabidopsis thaliana
  misc_feature (1)..(3155): Ceres Seq. ID no. 13580733
atcaaaaaatagaaatttcttacttttttcaaaattcatttctccccaaaaaaaatatcttgtgaaaactgcaactgtgatccatggcggaggatatggctgccgacgaagttacggctcctcctcgtaaggttcttatcatctccgctggtgctagccactccgtcgctcttctctctggtgacattgtttgttcttggggtcgaggagaggatggacagttaggtcatggcgatgcagaggatcgaccttctccgactcagcttagcgctttagatggccaccaaattgtttccgttacctgtggtgctgatcacactgttgcttattcacaatcaggcatggaagtctacagttggggatggggtgattttgggagattaggccatggtaactcaagcgacttgtttactccgctaccaatcaaagcattgcacggtattcggatcaagcagattgcttgtggggatagtcattgtttggctgtcactatggaaggagaggtccagagttggggccgcaaccagaatggtcaacttggtctgggggacaccgaagattctctagtgcctcagaagattcaagcctttgagggaatacgaatcaaaatggttgctgctggtgcagaacacactgctgcagttacagaagatggtgacctctatggatggggctggggaagatacggaaatttgggattaggtgaccggactgaccgcttagttcctgaaagagttacctctactggtggtgagaaaatgtcaatggttgcttgtggatggcggcacacaatatcagtttcctactctggagcattgtatacttatggatggagcaaatatggacagctaggacatggagacttggaggatcaccttattcctcacaaactggaagcactgagcaacagttttatctcccagatttcgggaggttggagacatacaatggcattgacttcagatggaaaactatatggatggggttggaataagtttggacaagtaggagtcggcaataatttagatcagtgttctcctgtgcaagtgcgatttcccgatgatcagaaagtagttcaagtctcatgtggatggagacataccttggctgtcactgaaagaaataacgtgtttgcttggggtagaggtacaaatggacagctcggcattggagagtcggttgacaggaactttcccaagattatagaggcactcagcgtcgatggagcaagtggacaacatatagaatcttctaatatcgatccatcttcagggaaaagctgggtgtcgcctgcagagagatatgcagttgttcctgatgaaacgggcctaacggatggttcaagcaaaggtaatggaggtgatatcagtgttccacaaactgatgtcaagcgtgtacgaatttgagcctgagtcaattccgtttttttttccnananatctcttgttgctccttgtattagcccatcatttttttatttctcctgcgaattctccgccatagattttcttttgaatttctcctgctaactcttgagctccccaaaggcggctacatcggttttgtcacctctactcgctcacttttctccgtccaattttgcagcttttgaagatcaagaggtgaacattcggagtgatgaatcggccaaaggttcagcgtcgtgttggaaagtatgaggttggaaagacgcttggacaaggcacttttgcgaaagttcggtgtgctgttaatactgagacaggagaacgcgtggctctcaaaatacttgataaggagaaggttcttaagcataagatggctgaacagataaggagagaaatttgtactatgaagctgataaaccatccaaatgtagtgcggctgtatgaggttttggcgagcaagactaagatatatattgttctagagttcggcactggtggagagctttttgacaaaattgtacatgatgggcgcttgaaagaagagaatgcacggaaatattttcagcagcttattaatgcagttgattactgccatagcaggggaagtgtaccaccgggacttaaagccggaaaaacttgcttctagatgctcaaggaaatctgaaagtctctgattttggattgagtgcgttgtcccgacaagtcaggggtgatggtcttcttcacactgcatgcggaactccaaactatgctgctcctgaggttcttaatgatcaaggttatgacggggcaaccgcagacttgtggtcctgtggagtgatactctttgtactacttgctggctacttgcctttcgaggattctaatctcatgacgctgtataaaaagataatagctggtgaatatcattgtcctccttggctctctcctggtgctaagaacttgattgtccgaatcttggatccaaaccctatgactcgtatcacaattccagaggttctgggagatgcgtggttcaagaaaaattacaagccagctgttttcgaggagaaggaagaagccaacttggatgatgtggacgctgttttcaaagattcagaagagcatcatgtcacagaaaagaaagaggagcaaccaacttcaatgaatgcctttgagttgatatcaatgtcgagagctctggatctcgggaatttgtttgaagaagaagagggattcaagcgagaaacgagatttgctgctaaaggtgctgctaatgatttagtccaaaagattgaagaagcttctaagccgcttggtttcgatattcaaaagaaaaactataagatgagacttgaaaacgtgactgctggaaggaaaggaaacctaagagttgcaactgagatatttcaagtatcaccgtctcttcatatgatcgaagtccggaaaacgaaaggggatacactagaattccataagttctacaagaagctctcaacctcacttaacgatgtggtttggaaatctggcgagagctctggtctaagcaaataagaaaaaagactgatgattcaagtccttgctttgactatcttttatttagctttttgctgatactttctttcaagactcaattcttttaaatattagagacaaaaagccatgagattgatgactctgtagatatcgaagcatgtgcagtaagtttatgctgttcatataattgcaaacttcgattgtgttgtgtct

SEQ ID NO: 31485 - protein, 440 aa, Arabidopsis thaliana
  misc_feature (1)..(440): Ceres Seq. ID no. 13580734
MAEDMAADEVTAPPRKVLIISAGASHSVALLSGDIVCSWGRGEDGQLGHGDAEDRPSPTQLSALDGHQIVSVTCGADHTVAYSQSGMEVYSWGWGDFGRLGHGNSSDLFTPLPIKALHGIRIKQIACGDSHCLAVTMEGEVQSWGRNQNGQLGLGDTEDSLVPQKIQAFEGIRIKMVAAGAEHTAAVTEDGDLYGWGWGRYGNLGLGDRTDRLVPERVTSTGGEKMSMVACGWRHTISVSYSGALYTYGWSKYGQLGHGDLEDHLIPHKLEALSNSFISQISGGWRHTMALTSDGKLYGWGWNKFGQVGVGNNLDQCSPVQVRFPDDQKVVQVSCGWRHTLAVTERNNVFAWGRGTNGQLGIGESVDRNFPKIIEALSVDGASGQHIESSNIDPSSGKSWVSPAERYAVVPDETGLTDGSSKGNGGDISVPQTDVKRVRI

SEQ ID NO: 31486 - protein, 436 aa, Arabidopsis thaliana
  misc_feature (1)..(436): Ceres Seq. ID no. 13580735
MAADEVTAPPRKVLIISAGASHSVALLSGDIVCSWGRGEDGQLGHGDAEDRPSPTQLSALDGHQIVSVTCGADHTVAYSQSGMEVYSWGWGDFGRLGHGNSSDLFTPLPIKALHGIRIKQIACGDSHCLAVTMEGEVQSWGRNQNGQLGLGDTEDSLVPQKIQAFEGIRIKMVAAGAEHTAAVTEDGDLYGWGWGRYGNLGLGDRTDRLVPERVTSTGGEKMSMVACGWRHTISVSYSGALYTYGWSKYGQLGHGDLEDHLIPHKLEALSNSFISQISGGWRHTMALTSDGKLYGWGWNKFGQVGVGNNLDQCSPVQVRFPDDQKVVQVSCGWRHTLAVTERNNVFAWGRGTNGQLGIGESVDRNFPKIIEALSVDGASGQHIESSNIDPSSGKSWVSPAERYAVVPDETGLTDGSSKGNGGDISVPQTDVKRVRI

SEQ ID NO: 31487 - protein, 354 aa, Arabidopsis thaliana
  misc_feature (1)..(354): Ceres Seq. ID no. 13580736
MEVYSWGWGDFGRLGHGNSSDLFTPLPIKALHGIRIKQIACGDSHCLAVTMEGEVQSWGRNQNGQLGLGDTEDSLVPQKIQAFEGIRIKMVAAGAEHTAAVTEDGDLYGWGWGRYGNLGLGDRTDRLVPERVTSTGGEKMSMVACGWRHTISVSYSGALYTYGWSKYGQLGHGDLEDHLIPHKLEALSNSFISQISGGWRHTMALTSDGKLYGWGWNKFGQVGVGNNLDQCSPVQVRFPDDQKVVQVSCGWRHTLAVTERNNVFAWGRGTNGQLGIGESVDRNFPKIIEALSVDGASGQHIESSNIDPSSGKSWVSPAERYAVVPDETGLTDGSSKGNGGDISVPQTDVKRVRI

SEQ ID NO: 31488 - DNA, 1383 bp, Arabidopsis thaliana
  misc_feature (1)..(1383): Ceres Seq. ID no. 13580745
gatcttcgtcttcctttcctccttcattcctcttttcttcgtctcccaccatttctgcagaagaagacaaataaaaaagctctcatttatcttcgtggagatctaaaagaaggaggaagacatttcttccctctggatctccaaaagtaagaacatttacaagaaacgagaggtttgggtggggaaggaaagaaggaggaagaggcaatgtcagctaggtattggtgtcacatgtgttcacaaatggtgaatccagttattggtgccgagatcaaatgccccttttgccaaagcgggtttgtcgaggaaatgagccgtgagattaatggcggcagcagtagcagtctaagggaggttcaagaccctgagattgattttggtacagaccgtgcattgtctctatggggtccaatcttgcttggaatgatgagtaatcctcgtagacgtagaaggtttaggaggacagagtttggtgtggataatgatgaggtcaatgtatctgatgatgttgatggaaatgacagcgtcgatattgatcgacatcatcatcgtcgtcatcgccacaggcaacaaggtagagagattgatttagacagagagtttgagtctatccttaggaggagacggagaagctcagctactatattgcagttgcttcagggtattcgtgcagggattgcttctgagtatgagagctcggatcgagacctgttaaatcaatcagctgttgttcagggttcaacgagtttgaatcaaaaccggaacaatacttctctttctgcaattggagattactttgttggatccagtttagaccatttgcttgaacatctagctgataatgattcaatcaggcacgggagtcttccagcacgtaaagaagttgtggataatctcccaacggttaagataagtgaatcattgcagtgctcgatttgtttggatgattttgacaaaggaagtgaagctaaagagatgccgtgtaagcacaagtttcacatccggtgtatagtaccgtggctcgagcttcacagttcatgtcccgtgtgccgatatgaactccctcctgatgatgagaccaaggttaatcctgtaagaccgagaacaagaactctagagatcaacgtaagtaatgagaatgtggaagatgatgcaaggaacagtaatgtgagcgagagaaggttctcttttccatggccgttcagcggattattctcttcatcctcttcgtcatccgcatcggcctcggggtcatctcatctcggtgagaactcgtaaactgctattcctcagcttatagtacataaaatcttgttcactcagattgttgaatactgcataacaaataaacactttcgaggaatggaatcttttctttatttg

SEQ ID NO: 31489 - protein, 356 aa, Arabidopsis thaliana
  misc_feature (1)..(356): Ceres Seq. ID no. 13580746
MSARYWCHMCSQMVNPVIGAEIKCPFCQSGFVEEMSREINGGSSSSLREVQDPEIDFGTDRALSLWGPILLGMMSNPRRRRRFRRTEFGVDNDEVNVSDDVDGNDSVDIDRHHHRRHRHRQQGREIDLDREFESILRRRRRSSATILQLLQGIRAGIASEYESSDRDLLNQSAVVQGSTSLNQNRNNTSLSAIGDYFVGSSLDHLLEHLADNDSIRHGSLPARKEVVDNLPTVKISESLQCSICLDDFDKGSEAKEMPCKHKFHIRCIVPWLELHSSCPVCRYELPPDDETKVNPVRPRTRTLEINVSNENVEDDARNSNVSERRFSFPWPFSGLFSSSSSSSASASGSSHLGENS

SEQ ID NO: 31490 - protein, 348 aa, Arabidopsis thaliana
  misc_feature (1)..(348): Ceres Seq. ID no. 13580747
MCSQMVNPVIGAEIKCPFCQSGFVEEMSREINGGSSSSLREVQDPEIDFGTDRALSLWGPILLGMMSNPRRRRRFRRTEFGVDNDEVNVSDDVDGNDSVDIDRHHHRRHRHRQQGREIDLDREFESILRRRRRSSATILQLLQGIRAGIASEYESSDRDLLNQSAVVQGSTSLNQNRNNTSLSAIGDYFVGSSLDHLLEHLADNDSIRHGSLPARKEVVDNLPTVKISESLQCSICLDDFDKGSEAKEMPCKHKFHIRCIVPWLELHSSCPVCRYELPPDDETKVNPVRPRTRTLEINVSNENVEDDARNSNVSERRFSFPWPFSGLFSSSSSSSASASGSSHLGENS

SEQ ID NO: 31491 - protein, 344 aa, Arabidopsis thaliana
  misc_feature (1)..(344): Ceres Seq. ID no. 13580748
MVNPVIGAEIKCPFCQSGFVEEMSREINGGSSSSLREVQDPEIDFGTDRALSLWGPILLGMMSNPRRRRRFRRTEFGVDNDEVNVSDDVDGNDSVDIDRHHHRRHRHRQQGREIDLDREFESILRRRRRSSATILQLLQGIRAGIASEYESSDRDLLNQSAVVQGSTSLNQNRNNTSLSAIGDYFVGSSLDHLLEHLADNDSIRHGSLPARKEVVDNLPTVKISESLQCSICLDDFDKGSEAKEMPCKHKFHIRCIVPWLELHSSCPVCRYELPPDDETKVNPVRPRTRTLEINVSNENVEDDARNSNVSERRFSFPWPFSGLFSSSSSSSASASGSSHLGENS

SEQ ID NO: 31492 - DNA, 1438 bp, Arabidopsis thaliana
  misc_feature (1)..(1438): Ceres Seq. ID no. 13580769
cttcttcttcgtcgtcgtcctcaacaagctcttctttctgactcataacccaaatttctgagaatcagagccttattcaagagaacaccaagagtttggtggaagttgttgaaattcgaagccgatcgcggactcgtttgctcttgattacgtcgcaatccgtacgattttccgatcaaacttaagagtgaaggagatagatttgtagaaaaaggaagagaataagagtgagcttgtggccaaaaaagggatgcctttgaacttaggcaacgatggcgatgggtcttcccggattattttgactgagcctcgcggatctactgctgaggtgcttctatttggaggacaagtcatttcttggaaaaatgaaaggagggaagaactgctttatatgagcagcaaggctcaatataagccacccaaggcgatcagaggaggaatacctgtttgctttccacagtttggaaactttggtggacttgagcgacatggatttgcccggaacaaattctggtcacatgatgaagatccttcgcctctacctcctgctaacaaacaatcatctgttgatctgatattgaagtccacagaagatgacttgaagacctggccgcatagttttgaactccgtattcgcatttctattagccctgggaagcttactttgatccctcgtgtgaggaacattgactcaaaggcattctcctttatgtttgcactgcgaaactacttatatgtatctgacataagtgaagttcgagttgagggtttggagacactggattatctagacaacttgattggtaaagaaagattcactgagcaagcagacgcgattacctttgacggggaggtcgatagagtgtacttgaacacaccaacaaagattgcggtcatagatcatgagcgaaagaggaccatcgagttgcgaaaggaaggcatgcccaatgcagttgtgtggaacccctgggacaaaaaggcaaagaccatagctgatatgggagatgaagattacaaaacaatgctttgtgtagattctggagtaatcgaacctctggtattgttaaagcctcgtgaagagtggaaaggcagacaagaactatccatcgtctcatcaagttactgcagcggacagcttgatccacgcaaggttctttacggagatatctgatccttttgggggtttatcttacttagtaaaaaaacagtaataagccatgatctcattatcactaccacccagaaacaactctctaagagtcttgtcttgaacttggagattttatccttttgacttgtgttttgagtgagttctgattgttgttgttacacagagaggtcacggtaatattttgtaacgttgactctgtgtttgaccgtcaaacagtgtatcggtttctttgttcggaaatttagtagaatatatcatcaatttagt

SEQ ID NO: 31493 - protein, 306 aa, Arabidopsis thaliana
  misc_feature (1)..(306): Ceres Seq. ID no. 13580770
MPLNLGNDGDGSSRIILTEPRGSTAEVLLFGGQVISWKNERREELLYMSSKAQYKPPKAIRGGIPVCFPQFGNFGGLERHGFARNKFWSHDEDPSPLPPANKQSSVDLILKSTEDDLKTWPHSFELRIRISISPGKLTLIPRVRNIDSKAFSFMFALRNYLYVSDISEVRVEGLETLDYLDNLIGKERFTEQADAITFDGEVDRVYLNTPTKIAVIDHERKRTIELRKEGMPNAVVWNPWDKKAKTIADMGDEDYKTMLCVDSGVIEPLVLLKPREEWKGRQELSIVSSSYCSGQLDPRKVLYGDI

SEQ ID NO: 31494 - protein, 259 aa, Arabidopsis thaliana
  misc_feature (1)..(259): Ceres Seq. ID no. 13580771
MSSKAQYKPPKAIRGGIPVCFPQFGNFGGLERHGFARNKFWSHDEDPSPLPPANKQSSVDLILKSTEDDLKTWPHSFELRIRISISPGKLTLIPRVRNIDSKAFSFMFALRNYLYVSDISEVRVEGLETLDYLDNLIGKERFTEQADAITFDGEVDRVYLNTPTKIAVIDHERKRTIELRKEGMPNAVVWNPWDKKAKTIADMGDEDYKTMLCVDSGVIEPLVLLKPREEWKGRQELSIVSSSYCSGQLDPRKVLYGDI

SEQ ID NO: 31495 - protein, 153 aa, Arabidopsis thaliana
  misc_feature (1)..(153): Ceres Seq. ID no. 13580772
MFALRNYLYVSDISEVRVEGLETLDYLDNLIGKERFTEQADAITFDGEVDRVYLNTPTKIAVIDHERKRTIELRKEGMPNAVVWNPWDKKAKTIADMGDEDYKTMLCVDSGVIEPLVLLKPREEWKGRQELSIVSSSYCSGQLDPRKVLYGDI

SEQ ID NO: 31496 - DNA, 890 bp, Arabidopsis thaliana
  misc_feature (1)..(890): Ceres Seq. ID no. 13580791
aacaaaattttgccttggcttgcgaaaaaaggagatcaagtgatcatatggaggaagaacaagtaagagcaattaagataatagtatttggagtcatctcatggggtgtggccttcattctcacccggagaatcttctcaagctactcattcagcttcagcaaccgtcttctctccacggctcacgcgactatcgctgtcactttagcaacactctctgttcaagatttgtcttgccctgtttgtccccttgcttctaagccatctcataaacagatggacgtgatggcgttttcgttgtcgtacatgatctacgatctaatatgttgtcatttcgatcaagtgtttagcattgataacgcggttcatcatttcgttagcattcttggttttatagctggacttgcataccaaaagtctggatctgagatcgtggctacactgtgggtagcagagatatcaagtccttttttccaccttagggagattctcaaagagattggatacaaagacaccaaactcaatctagctgccgatgtgtgttttgccactatattcacattggcgagaattgtgtgtggacctttcctcgtttacgtcagtctatcagctgataatcccatcttcatcaaggcaatgggatcaggattacaactcgtgagcatcttttggttctataaaattttcgggatgatgagatataaactttttaagaagccaaagtcaaacaaaaagtctacttagcttagttagagatatacaaaagctgattcaatccaaatatttttttcttatttttatttatggtcatttatctattttattaataaaataataataaaaaaataaaaaaaaaatggagagagacccactcgtgaaacaaccgacttt

SEQ ID NO: 31497 - protein, 246 aa, Arabidopsis thaliana
  misc_feature (1)..(246): Ceres Seq. ID no. 13580792
QNFALACEKRRSSDHMEEEQVRAIKIIVFGVISWGVAFILTRRIFSSYSFSFSNRLLSTAHATIAVTLATLSVQDLSCPVCPLASKPSHKQMDVMAFSLSYMIYDLICCHFDQVFSIDNAVHHFVSILGFIAGLAYQKSGSEIVATLWVAEISSPFFHLREILKEIGYKDTKLNLAADVCFATIFTLARIVCGPFLVYVSLSADNPIFIKAMGSGLQLVSIFWFYKIFGMMRYKLFKKPKSNKKST

SEQ ID NO: 31498 - protein, 231 aa, Arabidopsis thaliana
  misc_feature (1)..(231): Ceres Seq. ID no. 13580793
MEEEQVRAIKIIVFGVISWGVAFILTRRIFSSYSFSFSNRLLSTAHATIAVTLATLSVQDLSCPVCPLASKPSHKQMDVMAFSLSYMIYDLICCHFDQVFSIDNAVHHFVSILGFIAGLAYQKSGSEIVATLWVAEISSPFFHLREILKEIGYKDTKLNLAADVCFATIFTLARIVCGPFLVYVSLSADNPIFIKAMGSGLQLVSIFWFYKIFGMMRYKLFKKPKSNKKST

SEQ ID NO: 31499 - protein, 155 aa, Arabidopsis thaliana
  misc_feature (1)..(155): Ceres Seq. ID no. 13580794
MDVMAFSLSYMIYDLICCHFDQVFSIDNAVHHFVSILGFIAGLAYQKSGSEIVATLWVAEISSPFFHLREILKEIGYKDTKLNLAADVCFATIFTLARIVCGPFLVYVSLSADNPIFIKAMGSGLQLVSIFWFYKIFGMMRYKLFKKPKSNKKST

SEQ ID NO: 31500 - DNA, 858 bp, Arabidopsis thaliana
  misc_feature (1)..(858): Ceres Seq. ID no. 13580795
tttagggtttattcttcattgcttgagcttccttctcttcttcttcttcaagccgcggctaaagatccctacttctctcgacacttatagagtttcagtcatggccgcctccgcagaaatcgacgctgagattcaacagcagcttaccaatgaggttaagctcttcaaccgttggagctttgatgacgtttcggttacggatattagtcttgtggactacattggtgttcagccatcgaagcacgcaacttttgttccccatactgctggacgatactctgtgaagaggttcagaaaggcgcagtgcccaattgttgagaggctcactaactctctcatgatgcacggaagaaacaatggtaagaagttgatggctgtcaggatcgtcaagcatgccatggagattatccacctcttgtctgacttgaacccgattcaagttatcattgatgccattgttaacagtggtccacgtgaagatgctaccaggattggatctgctggtgtggttaggaggcaggctgttgatatctctcctctaagacgtgtgaaccaagcgatcttcttgcttacaactggtgcacgtgaagctgcctttagaaacatcaagacaatcgctgagtgccttgctgatgaactcatcaatgctgcaaagggatcttccaacagctatgccatcaagaagaaagatgagattgagagagttgctaaggccaatcgttaagggatctccctttcctctaagtttgcattatatcaaagagtttttgtgttgtttccattagctttggatatgtttcagatgatctctctatctttaatgaaattttgacgcttataatcgacttgggatcttga

SEQ ID NO: 31501 - protein, 240 aa, Arabidopsis thaliana
  misc_feature (1)..(240): Ceres Seq. ID no. 13580796
LGFILHCLSFLLFFFFKPRLKIPTSLDTYRVSVMAASAEIDAEIQQQLTNEVKLFNRWSFDDVSVTDISLVDYIGVQPSKHATFVPHTAGRYSVKRFRKAQCPIVERLTNSLMMHGRNNGKKLMAVRIVKHAMEIIHLLSDLNPIQVIIDAIVNSGPREDATRIGSAGVVRRQAVDISPLRRVNQAIFLLTTGAREAAFRNIKTIAECLADELINAAKGSSNSYAIKKKDEIERVAKANR

SEQ ID NO: 31502 - protein, 207 aa, Arabidopsis thaliana [sequence omitted]

SEQ ID NO: 31503 - protein, 128 aa, Arabidopsis thaliana
  misc_feature (1)..(128): Ceres Seq. ID no. 13580798
MMHGRNNGKKLMAVRIVKHAMEIIHLLSDLNPIQVIIDAIVNSGPREDATRIGSAGVVRRQAVDISPLRRVNQAIFLLTTGAREAAFRNIKTIAECLADELINAAKGSSNSYAIKKKDEIERVAKANR

SEQ ID NO: 31504 - DNA, 1424 bp, Arabidopsis thaliana
  misc_feature (1)..(1424): Ceres Seq. ID no. 13580799
aattgataatttgttacactagttgtgaattgagtttcttggttctttcattaattttgatttggttttgtagcctacgaattcgaatcatcagcatcatcttcaacaccagcttaacgaaaatggaagtataataagtggccacggactagtactctctcaccaacttccacctctccaagcaaaccctaaccctaaccaccaccatgtcgctacctctgctggtcttccgtcaaggatgggtggatcgatggcggagagagcaaggcaggccaacattcctccactagcgggacccctaaagtgtcctcgatgcgactccagcaacactaagttctgttactacaacaactataacctcactcagcctcgtcacttctgcaaaggttgccgtcgctactggacacaagggggcgccctgagaaacgtccctgtaggtggaggctgccggaggaataacaagaagggcaaaaatggaaatttaaaatcttcttcttcttcgtccaaacagtcttcctcggtcaacgctcaaagtcctagctcaggacagctaaggacaaatcatcagttccctttttcaccaactctttacaatctcactcaactcggaggtattggtttgaacttagccgctactaatggcaacaaccaagctcaccagatcggttccagtttgatgatgagcgatctagggtttctccatggacgaaatacttcaactccgatgacgggaaacattcatgaaaacaacaacaataataacaatgaaaacaacctaatggcatccgttggatctttgagcccctttgctctcttcgatccaacgacggggctatacgctttccagaacgacggtaatatcgggaacaacgttgggatatctggttcttctacttccatggttgattctagggtttatcagacgcctccggtgaagatggaagaacaacctaatttggctaacttgtctagaccggtctccggtttgacgtctcctgggaatcaaacaaatcagtacttttggcctggttcggatttctcgggtccttctaatgatctcttgtgagatttttgtgtgttttgtcggatcattaacgtatgttacgacttacgacgtggagattgattaaaaggactaccaacggtcaggattaactgcatgcatagtctgtgctcaagacgatgatcgtggagaagtacaaggacaaactaaaaggtatcttaattagagattgtggttttacaacttaaattcgatacttatttatataatcaggtgtgtcatataatttgtttgtattgcgtgatttcatggttgatctgatttctcaagttgctatatatgcctcaatacatgtgtgtaacagtccaatttgtatactctttagactgaattttatcgaatatataatatttttcagttt

SEQ ID NO: 31505 - protein, 275 aa, Arabidopsis thaliana
  misc_feature (1)..(275): Ceres Seq. ID no. 13580800
MGGSMAERARQANIPPLAGPLKCPRCDSSNTKFCYYNNYNLTQPRHFCKGCRRYWTQGGALRNVPVGGGCRRNNKKGKNGNLKSSSSSSKQSSSVNAQSPSSGQLRTNHQFPFSPTLYNLTQLGGIGLNLAATNGNNQAHQIGSSLMMSDLGFLHGRNTSTPMTGNIHENNNNNNNENNLMASVGSLSPFALFDPTTGLYAFQNDGNIGNNVGISGSSTSMVDSRVYQTPPVKMEEQPNLANLSRPVSGLTSPGNQTNQYFWPGSDFSGPSNDLL

SEQ ID NO: 31506 - protein, 271 aa, Arabidopsis thaliana
  misc_feature (1)..(271): Ceres Seq. ID no. 13580801
MAERARQANIPPLAGPLKCPRCDSSNTKFCYYNNYNLTQPRHFCKGCRRYWTQGGALRNVPVGGGCRRNNKKGKNGNLKSSSSSSKQSSSVNAQSPSSGQLRTNHQFPFSPTLYNLTQLGGIGLNLAATNGNNQAHQIGSSLMMSDLGFLHGRNTSTPMTGNIHENNNNNNNENNLMASVGSLSPFALFDPTTGLYAFQNDGNIGNNVGISGSSTSMVDSRVYQTPPVKMEEQPNLANLSRPVSGLTSPGNQTNQYFWPGSDFSGPSNDLL

SEQ ID NO: 31507 - DNA, 1113 bp, Arabidopsis thaliana
  misc_feature (1)..(1113): Ceres Seq. ID no. 13580802
acgttctcattcatgactctatatatttcgcatttcttctcctcaacgctctcataaaaagtagtactcgtgtcttactcgtgccagccactcgcatttctccagattttattatccttcctcgaaacaagagcttagctaagatgacgaagaactacccaaccgtgagcgaagattacaagaaggctgttgagaagtgcaggaggaagctcagaggtttgatcgctgagaagaactgtgcacccatcatggtccgactcgcatggcactctgctggaactttcgattgtcaatcaaggactggaggtccattcggaacaatgaggtttgacgctgagcaagctcatggagccaacagtggtatccacattgctcttaggttgttggaccccatcagggagcaattccctaccatctcttttgctgatttccatcagcttgctggtgttgtggccgttgaagttactggtggccctgacattcctttccaccctggaagagaggacaagccccaaccacctccagagggtcgtcttcctgatgctaccaagggttgtgaccatttgagagatgtctttgctaagcagatgggcttatctgacaaagacattgtcgctttatctggtgcccacactctgggacgatgccacaaggataggtctggcttcgaaggtgcatggacatcaaaccctctaatcttcgacaactcttacttcaaggaactcttgagcggagagaaggaaggccttcttcagcttgtctctgacaaagcactattggacgaccctgttttccgtcctttggtcgagaaatacgctgctgatgaagatgcctttttcgctgattacgctgaggcccacatgaagctttctgagcttgggtttgctgatgcttaagctgtgacgtatgctctgtgtgtgtgtgtgtgtctccccgagagtcatggctgtttttggttgggggctggaggggtcgcattgcatttgaactttgtcatatgattgcttaatgtactctcggatttacgtatctgtttttttcggtgggttgcgatttgaacacatccgttgcgcttttgctgcttagacacattaataaaattaatttctctcg

SEQ ID NO: 31508 - protein, 297 aa, Arabidopsis thaliana
  misc_feature (1)..(297): Ceres Seq. ID no. 13580803
VLIHDSIYFAFLLLNALIKSSTRVLLVPATRISPDFIILPRNKSLAKMTKNYPTVSEDYKKAVEKCRRKLRGLIAEKNCAPIMVRLAWHSAGTFDCQSRTGGPFGTMRFDAEQAHGANSGIHIALRLLDPIREQFPTISFADFHQLAGVVAVEVTGGPDIPFHPGREDKPQPPPEGRLPDATKGCDHLRDVFAKQMGLSDKDIVALSGAHTLGRCHKDRSGFEGAWTSNPLIFDNSYFKELLSGEKEGLLQLVSDKALLDDPVFRPLVEKYAADEDAFFADYAEAHMKLSELGFADA

SEQ ID NO: 31509 - protein, 250 aa, Arabidopsis thaliana; identical to SEQ ID NO: 29946
  misc_feature (1)..(250): Ceres Seq. ID no. 13580804

SEQ ID NO: 31510 - protein, 215 aa, Arabidopsis thaliana; identical to SEQ ID NO: 29947
  misc_feature (1)..(215): Ceres Seq. ID no. 13580805

SEQ ID NO: 31511 - DNA, 1756 bp, Arabidopsis thaliana
  misc_feature (1)..(1756): Ceres Seq. ID no. 13580810
atggcgagaacgagaattataacgaaccgatttgaatctcgctttttgattcgtttccttgaatctccgactctattcgcctcttgtttcacgagttccagatctcttcaaaccctagcctacgaagaagtccgaacctccggtgatcgggagtctgaatctacagctctcatccttcatggcctcctcggttccggtcgcaactggagatcgttttctcgctcccttgcatcatctctctccgtctcctctgcttctgattggaagatgatattggttgatctgaggaaccatgggagatctgcggaagtggaagggcttaatccgcctcatgatcttgtgaattcagctaaggatttagctgatttggttaaagcaagtggctggaattggcctgatgtggtcattggtcactctttgggaggtaaagtggcgttgcagttcatggagagttgtgctcgtggtgattttggtgaatctgcttctcctcctaaacagctatgggtactagactctgtccctggggaagtcaaggcagaaaaaagtgatggtgaagtagagaaagttctgaagactttgcagagtttaccttcatcaatcccttctcgcaagtggcttgttgatcgtatggtcgaacttgggttttcaagatcattatccgagtggattggcagcaatctcaagagatctggagactcagagacatggacctttaaccttgacggagctgtccaaatgttcaactcttacagagagacttcttactggtctttgctagagaacccgccaaaagagacagagataaattttgtgattgcagaaaagagtgaccgatgggacaacgatacaaccaagcggcttgaaacaatagctaaccagagacagaatgtagccgaagggaaggttgcgactcatcttcttcgtaactctggccattgggtacacacagacaatccaaagggactcctagagattactattaaagcaaattctgatccgtctctttcgctagctaaaggtaaaaggcggaacaacaaaagaaaccctagcttccctttgtacctctctctgttccaaaccatgtcgaagagaaagaccaaagagccaaaggttgagaatgtgactcttggaccagctgttcgtgaaggagagcaagtctttggagttgttcacgtctttgcttcattcaacgacactttcattcacgtgactgatttgtctggacgggaaacacttgttcgcatcactggtggaatgaaggtgaaagccgacagagatgagtcctcaccttatgctgctatgcttgcggcacaagatgttgctcagcgatgcaaggaacttggaatcactgccatacatgtgaaactccgtgccactggtggtaacaagaccaagacccctggacctggtgctcagtctgctctaagagcccttgcccgttctggcatgaaaattggtcgcattgaggatgtgactccaatcccaaccgacagtacccgcagaaagggtggaagaagaggaaggaggctctgagttatttggcctctcgttggatctccttatgtagctttctcaatgtttcattttgttttttcttagtttgaaaagagttttggaattactatgctttgttatagtctcaactctgaacagctttggatctttttctgtatgaccataagatattcaaaaattggtagtcattttatctcacaaaaaaaccttgaatttgtgctgtatgattttgtaaagtctt

SEQ ID NO: 31512 - protein, 510 aa, Arabidopsis thaliana
  misc_feature (1)..(510): Ceres Seq. ID no. 13580811
MARTRIITNRFESRFLIRFLESPTLFASCFTSSRSLQTLAYEEVRTSGDRESESTALILHGLLGSGRNWRSFSRSLASSLSVSSASDWKMILVDLRNHGRSAEVEGLNPPHDLVNSAKDLADLVKASGWNWPDVVIGHSLGGKVALQFMESCARGDFGESASPPKQLWVLDSVPGEVKAEKSDGEVEKVLKTLQSLPSSIPSRKWLVDRMVELGFSRSLSEWIGSNLKRSGDSETWTFNLDGAVQMFNSYRETSYWSLLENPPKETEINFVIAEKSDRWDNDTTKRLETIANQRQNVAEGKVATHLLRNSGHWVHTDNPKGLLEITIKANSDPSLSLAKGKRRNNKRNPSFPLYLSLFQTMSKRKTKEPKVENVTLGPAVREGEQVFGVVHVFASFNDTFIHVTDLSGRETLVRITGGMKVKADRDESSPYAAMLAAQDVAQRCKELGITAIHVKLRATGGNKTKTPGPGAQSALRALARSGMKIGRIEDVTPIPTDSTRRKGGRRGRRL

SEQ ID NO: 31513 - protein, 421 aa, Arabidopsis thaliana
  misc_feature (1)..(421): Ceres Seq. ID no. 13580812
MILVDLRNHGRSAEVEGLNPPHDLVNSAKDLADLVKASGWNWPDVVIGHSLGGKVALQFMESCARGDFGESASPPKQLWVLDSVPGEVKAEKSDGEVEKVLKTLQSLPSSIPSRKWLVDRMVELGFSRSLSEWIGSNLKRSGDSETWTFNLDGAVQMFNSYRETSYWSLLENPPKETEINFVIAEKSDRWDNDTTKRLETIANQRQNVAEGKVATHLLRNSGHWVHTDNPKGLLEITIKANSDPSLSLAKGKRRNNKRNPSFPLYLSLFQTMSKRKTKEPKVENVTLGPAVREGEQVFGVVHVFASFNDTFIHVTDLSGRETLVRITGGMKVKADRDESSPYAAMLAAQDVAQRCKELGITAIHVKLRATGGNKTKTPGPGAQSALRALARSGMKIGRIEDVTPIPTDSTRRKGGRRGRRL

SEQ ID NO: 31514 - protein, 362 aa, Arabidopsis thaliana
  misc_feature (1)..(362): Ceres Seq. ID no. 13580813
MESCARGDFGESASPPKQLWVLDSVPGEVKAEKSDGEVEKVLKTLQSLPSSIPSRKWLVDRMVELGFSRSLSEWIGSNLKRSGDSETWTFNLDGAVQMFNSYRETSYWSLLENPPKETEINFVIAEKSDRWDNDTTKRLETIANQRQNVAEGKVATHLLRNSGHWVHTDNPKGLLEITIKANSDPSLSLAKGKRRNNKRNPSFPLYLSLFQTMSKRKTKEPKVENVTLGPAVREGEQVFGVVHVFASFNDTFIHVTDLSGRETLVRITGGMKVKADRDESSPYAAMLAAQDVAQRCKELGITAIHVKLRATGGNKTKTPGPGAQSALRALARSGMKIGRIEDVTPIPTDSTRRKGGRRGRRL

SEQ ID NO: 31515 - DNA, 750 bp, Arabidopsis thaliana
  misc_feature (1)..(750): Ceres Seq. ID no. 13580820
accttctactttcatgcatttgcactcataagctctctctatataaacccaaccttcattaccattcttcattatccaatccaatccattacttactaagtaaaaagagaaaaaaaaaaaattaagatatggagggactcttgaagttgtcaactttggtgattgtgtgcatgttagtgaccgctccaatggcgtccgaggcagcaatctcgtgcggcgcagtcaccggcagcttaggtcaatgctataactacttgacccgaggcggtttcattcctagagggtgttgctctggcgttcagaggctcaacagcttggctcgtaccacccgtgaccgccaacaagcttgtcgttgtatccagggagcagcgagagccttgggttctcgacttaacgctggtcgtgctgctcgtctccctggtgcttgccgtgttaggatctcttaccccatcagtgccagaaccaactgtaacaccgtcaggtgatcaaaagaagatagacgttgaagggttttcatataatcgatgagagagtattaaaaataattaagatgtcacactatatacacactagtgtatccttttactgttattattgttgtgtttctagattttgtgttttcatgtctttctttgtatatgacggtccatttaattggtcgtctgtgttatgtactcctctaatgatatattgaatttacgattatgtattatcttcaaactcttgccattaactttggtcacgttctgc

SEQ ID NO: 31516 - protein, 118 aa, Arabidopsis thaliana
  misc_feature (1)..(118): Ceres Seq. ID no. 13580821
MEGLLKLSTLVIVCMLVTAPMASEAAISCGAVTGSLGQCYNYLTRGGFIPRGCCSGVQRLNSLARTTRDRQQACRCIQGAARALGSRLNAGRAARLPGACRVRISYPISARTNCNTVR

SEQ ID NO: 31517 - protein, 104 aa, Arabidopsis thaliana
  misc_feature (1)..(104): Ceres Seq. ID no. 13580822
MLVTAPMASEAAISCGAVTGSLGQCYNYLTRGGFIPRGCCSGVQRLNSLARTTRDRQQACRCIQGAARALGSRLNAGRAARLPGACRVRISYPISARTNCNTVR

SEQ ID NO: 31518 - protein, 98 aa, Arabidopsis thaliana
  misc_feature (1)..(98): Ceres Seq. ID no. 13580823
MASEAAISCGAVTGSLGQCYNYLTRGGFIPRGCCSGVQRLNSLARTTRDRQQACRCIQGAARALGSRLNAGRAARLPGACRVRISYPISARTNCNTVR

SEQ ID NO: 31519 - DNA, 1175 bp, Arabidopsis thaliana
  misc_feature (1)..(1175): Ceres Seq. ID no. 13580824
aaaaggtaaaaactttgggaagcagctaaaatactgtgttctttgtttcttccatcgaaatcgaaaaaagctaagatctttgcgttttgaaacgatggcggaagaacataagcatgatgaatctgtgatcgctcctgagccagctgttgaggttgtggagagagaatcgttgatggataagatatcggagaagatccatcacggtggtgattcttcttcgtcttcttcatcttctgatgatgaagacgagaagaagaagactaagaagccctcttctccttcgtcttctatgaaatcgaaagtttaccgcttgttcggacgagagcagcctgttcataaggttctcggcggtggaaagccggctgatatattcatgtggaagaacaagaagatgtctggtggtgtacttggtggtgctacagctgcttgggttgtgtttgaattgatggagtaccatcttctcactctgctttgccacgtgatgattgttgttctcgctgtgctgtttttgtggtctaatgccactatgttcattaacaagtcccctccaaagattcctgaagttcatatccctgaagaacctattcttcagcttgcgtctgggctcagaatcgagatcaaccgtggattctcttctctccgtgaaattgcatcaggaagggatctcaagaaattcctcattgctattgccgggttatgggttctctcaatcttgggcggttgcttcaacttcttgacattggcatacatagctcttgtgttgctcttcacggttcctcttgcctacgacaagtatgaagacaaagtcgacccattaggtgagaaagcaatgatcgagctcaagaagcagtatgcagtgttggatgagaaggtgttgagcaagatcccacttgggccgttgaagaacaagaagaaagattaggggtttacacaaggttgtccgtggctagcaaaacgggtgttgtgaaatggtatcgaagtaatgtgttttgggcgtttttttaggtggctctttcggttatgtgaatgaacttggaattttcctgactggtttgttctgttgtttatgtcattgttgatcagcgtcgagggataaaagtagtgatatttcttctctctctaagcctctatataactaagaatttcaagatatttgaattttgcaatctcgtggt

SEQ ID NO: 31520 - protein, 306 aa, Arabidopsis thaliana
  misc_feature (1)..(306): Ceres Seq. ID no. 13580825
KGKNFGKQLKYCVLCFFHRNRKKLRSLRFETMAEEHKHDESVIAPEPAVEVVERESLMDKISEKIHHGGDSSSSSSSSDDEDEKKKTKKPSSPSSSMKSKVYRLFGREQPVHKVLGGGKPADIFMWKNKKMSGGVLGGATAAWVVFELMEYHLLTLLCHVMIVVLAVLFLWSNATMFINKSPPKIPEVHIPEEPILQLASGLRIEINRGFSSLREIASGRDLKKFLIAIAGLWVLSILGGCFNFLTLAYIALVLLFTVPLAYDKYEDKVDPLGEKAMIELKKQYAVLDEKVLSKIPLGPLKNKKKD

SEQ ID NO: 31521 - protein, 275 aa, Arabidopsis thaliana
  misc_feature (1)..(275): Ceres Seq. ID no. 13580826
MAEEHKHDESVIAPEPAVEVVERESLMDKISEKIHHGGDSSSSSSSSDDEDEKKKTKKPSSPSSSMKSKVYRLFGREQPVHKVLGGGKPADIFMWKNKKMSGGVLGGATAAWVVFELMEYHLLTLLCHVMIVVLAVLFLWSNATMFINKSPPKIPEVHIPEEPILQLASGLRIEINRGFSSLREIASGRDLKKFLIAIAGLWVLSILGGCFNFLTLAYIALVLLFTVPLAYDKYEDKVDPLGEKAMIELKKQYAVLDEKVLSKIPLGPLKNKKKD

SEQ ID NO: 31522 - protein, 249 aa, Arabidopsis thaliana
  misc_feature (1)..(249): Ceres Seq. ID no. 13580827
MDKISEKIHHGGDSSSSSSSSDDEDEKKKTKKPSSPSSSMKSKVYRLFGREQPVHKVLGGGKPADIFMWKNKKMSGGVLGGATAAWVVFELMEYHLLTLLCHVMIVVLAVLFLWSNATMFINKSPPKIPEVHIPEEPILQLASGLRIEINRGFSSLREIASGRDLKKFLIAIAGLWVLSILGGCFNFLTLAYIALVLLFTVPLAYDKYEDKVDPLGEKAMIELKKQYAVLDEKVLSKIPLGPLKNKKKD

SEQ ID NO: 31523 - DNA, 783 bp, Arabidopsis thaliana
  misc_feature (1)..(783): Ceres Seq. ID no. 13587945
attttattcaataacccttacaacaccgaatataactttgaaaaaaaaaacaaatggcttcaaagaactcagcctctcttgctcttttctttgcgctcaacatcctctttttcaccttaaccgttgcaacaaattgcaactgcaagccaagtcctaaaccaaagccagtcccaagtcctaagcccaagccggtccaatgtcctcctccaccccgtccttcagtcccaagtcctaatcctaggccggtcacacctccacgcacccctggttcatccggaaacagctgtcctattgatgctctcaagctcggtgtatgtgcaaatgtcttaagcagtctactcaacatccagttgggacagccatcctctcaacaatgttgctcgctcatccaaggtttggttgacgtcgacgctgcgatttgtctatgcactgctctgagggctaacgttcttggtatcaaccttaacgttccgatatctctcagcgttcttctcaacgtttgtaacagaaagcttccatctggtttccaatgtgcttgagcaatatccattatgcatacgatgcgatgccagtgcacaatatcgtcttcgaaatttattatagtttgaataaatgcatgtaaggtatagtttatgtatcaatcttaatttgttaaagagaaaaaataaatgtgtgagatttttatagtttttcattttgtttgtaaacgttgtcccccgccttccaagctttgtatgcttctgtagcaatctatttctatttctatttcaacgaaattttaat

SEQ ID NO: 31524 - protein, 161 aa, Arabidopsis thaliana
  misc_feature (1)..(161): Ceres Seq. ID no. 15220838
MASKNSASLALFFALNILFFTLTVATNCNCKPSPKPKPVPSPKPKPVQCPPPPRPSVPSPNPRPVTPPRTPGSSGNSCPIDALKLGVCANVLSSLLNIQLGQPSSQQCCSLIQGLVDVDAAICLCTALRANVLGINLNVPISLSVLLNVCNRKLPSGFQCA

SEQ ID NO: 31525 - DNA, 1359 bp, Arabidopsis thaliana
  misc_feature (1)..(1359): Ceres Seq. ID no. 13587957
atgaagaagattgagctcgtgttcataccttcgccgggaatcggccatctccggccaaccgtgaagctagcaaagcaactcatcggaagcgaagaacattttttcaatcaccagtctcaagatcgcctccgctacgaacccatctccgtcgaaaaacaaccaccaaccgcaaatcttgagccgtctcaagtctacatcgagaaacaaaaaccacaagtgagagacaccgtctccagaatcatcaatccaacaagaaaactcgccggattcgtggtggacatgttctgttcttcaatgatcgatatagctaacgaatttggagttccttgttatatgatctacacatcaaacgctacgtttttgggaatcacacttcacgttcaagaaatgtacgacgacaaaaagtatgacgtcagcgatttggatgagtcagtcaacgaattggagtttccttgtttgactcgtccttatccagtgaagtgccttcctcatatccttagttcaaaagattggttacctttttttgcagctcaaggtaggtctttccggaagatgaaaggtattttggtaaatacagttgctgagcttgagcctcacgctttgaagatgtttaacaatgttgatcttcctcaagcttatcctgttggaccagtgttgcatcttgataacggcgatgacgacgatgaaaagagattggaggttttgcggtggcttgatgatcaaccgcctaaatctgttttgtttctctgttttggaagtatgggaggtttcactgaggaacaaactagagaggtagctgtggcgttaaaccgaagtggtcaccggtttctttggtctctccgtcgtgcatcgccgaatataatgatggaacgtcccggagattataagaatcttgaggaggttttaccggacgggttcttggaacggactttggatagagggaaagtgattggatgggctccacaagtggcggtgttagagaagccggcgataggagggtttgttactcattgtgggtggaactctatgttagagagcttgtggtttggtgttccgatggtgacgtggccgctttacgcggagcagaaggttaacgcgtttgagatggtggaggagctgggattggcggtggagatacgtaagtgcattagtggagatttgttgttgatcggagagatggagatagtgacggcggaggatatagagagagctataaggtgtgtgatggagcaggatagtgatgtaaggagtcgagtgaaggagatggcggagaagtgtcacgtggcgttgatggacggtggatcttccaagacggctttgcaaaagtttattcaagacgtgatagagaatgttgcttaa

SEQ ID NO: 31526 - protein, 452 aa, Arabidopsis thaliana
  misc_feature (1)..(452): Ceres Seq. ID no. 13587958
MKKIELVFIPSPGIGHLRPTVKLAKQLIGSEEHFFNHQSQDRLRYEPISVEKQPPTANLEPSQVYIEKQKPQVRDTVSRIINPTRKLAGFVVDMFCSSMIDIANEFGVPCYMIYTSNATFLGITLHVQEMYDDKKYDVSDLDESVNELEFPCLTRPYPVKCLPHILSSKDWLPFFAAQGRSFRKMKGILVNTVAELEPHALKMFNNVDLPQAYPVGPVLHLDNGDDDDEKRLEVLRWLDDQPPKSVLFLCFGSMGGFTEEQTREVAVALNRSGHRFLWSLRRASPNIMMERPGDYKNLEEVLPDGFLERTLDRGKVIGWAPQVAVLEKPAIGGFVTHCGWNSMLESLWFGVPMVTWPLYAEQKVNAFEMVEELGLAVEIRKCISGDLLLIGEMEIVTAEDIERAIRCVMEQDSDVRSRVKEMAEKCHVALMDGGSSKTALQKFIQDVIENVA

SEQ ID NO: 31527 - protein, 359 aa, Arabidopsis thaliana
  misc_feature (1)..(359): Ceres Seq. ID no. 13587959
MFCSSMIDIANEFGVPCYMIYTSNATFLGITLHVQEMYDDKKYDVSDLDESVNELEFPCLTRPYPVKCLPHILSSKDWLPFFAAQGRSFRKMKGILVNTVAELEPHALKMFNNVDLPQAYPVGPVLHLDNGDDDDEKRLEVLRWLDDQPPKSVLFLCFGSMGGFTEEQTREVAVALNRSGHRFLWSLRRASPNIMMERPGDYKNLEEVLPDGFLERTLDRGKVIGWAPQVAVLEKPAIGGFVTHCGWNSMLESLWFGVPMVTWPLYAEQKVNAFEMVEELGLAVEIRKCISGDLLLIGEMEIVTAEDIERAIRCVMEQDSDVRSRVKEMAEKCHVALMDGGSSKTALQKFIQDVIENVA

SEQ ID NO: 31528 - protein, 354 aa, Arabidopsis thaliana
  misc_feature (1)..(354): Ceres Seq. ID no. 13587960
MIDIANEFGVPCYMIYTSNATFLGITLHVQEMYDDKKYDVSDLDESVNELEFPCLTRPYPVKCLPHILSSKDWLPFFAAQGRSFRKMKGILVNTVAELEPHALKMFNNVDLPQAYPVGPVLHLDNGDDDDEKRLEVLRWLDDQPPKSVLFLCFGSMGGFTEEQTREVAVALNRSGHRFLWSLRRASPNIMMERPGDYKNLEEVLPDGFLERTLDRGKVIGWAPQVAVLEKPAIGGFVTHCGWNSMLESLWFGVPMVTWPLYAEQKVNAFEMVEELGLAVEIRKCISGDLLLIGEMEIVTAEDIERAIRCVMEQDSDVRSRVKEMAEKCHVALMDGGSSKTALQKFIQDVIENVA

SEQ ID NO: 31529 - DNA, 3868 bp, Arabidopsis thaliana
  misc_feature (1)..(3868): Ceres Seq. ID no. 13587972
gcgattgtatttctccctaagagtcactttgcctttgtctttgatttttctctgtatcgtcggtctctcttttgcgtttctcgatcccaccgtctaatccttctccggccaatgactatgatgactccgcctcccgttgatcagccagaagatgaggagatgcttgtgccgaattcagatttggtcgacggtcctgctcagcccatggaagttacccaacccgagactgctgcgagtactgtggagaaccagccagctgaggatcctcctactctgaaattcacgtggactatccctaatttctctaggcaaaacaccaggaagcattactccgatgtatttgtcgttggaggttacaaatggcgcatattaattttcccgaaagggaacaatgttgatcatttgtccatgtacttggatgtttctgatgctgcgagtttgccgtacggttggagcagatatgctcagttcagtctggctgtagtcaatcaaatccacaccagatataccgttagaaaagagacgcaacatcaattcaatgctagagaaagcgattggggatttacatcattcatgccacttagcgaactttatgatcctagtagaggatatttagtgaatgatactgttttggttgaagctgaagtcgctgtacgtaaggttcttgattactggtcatatgactctaaaaaagagactggttttgttggactcaagaaccaaggtgcaacatgctacatgaattctctcctacagacactataccacataccttacttcagaaaggctgtataccacatgccaacaactgagaatgatgcacccacagcaagtataccgttggctctccaaagtttgttttacaagctccaatacaatgacactagtgttgcaacaaaagagctgacaaagtcgtttggttgggatacatatgattccttcatgcagcatgatgtgcaagaactcaatcgggttctctgcgaaaagcttgaggacaaaatgaagggaactgttgtggagggaacaatacaacaactttttgagggccaccatatgaattacattgagtgcataaatgtagattttaaatctacacggaaagaatcattttacgaccttcagctggatgttaaaggctgcaaggatgtttatgcttcttttgacaagtatgttgaagttgaacgtcttgaaggagacaacaaatatcatgcagaaggacatggtttacaggatgcaaaaaaaggtgttcttttcattgactttccaccggttcttcaactccagctcaagaggtttgaatatgactttatgagggacaccatggtgaagataaatgatcggtatgagtttccgcttgaactggatcttgatagagaagatggaaagtatctgtcgcctgatgctgacaggagtgtccgcaacctttatactcttcacagtgttttagttcatagtggaggagtacatggtgggcactattatgcttttataaggcctacgctctcagatcagtggtataaatttgatgatgaacgagtaaccaaggaagatttgaaaagggctttggaggagcaatatggtggtgaagaagagctaccacagactaatcctggtttcaataataaccctcctttcaaattcacaaagtactcgaatgcttacatgcttgtatatatccgagaaagtgacaaagataaaataatctgcaacgttgatgagaaagacatagcagaacatttaagggtgaggctaaagaaagagcaagaagaaaaggaagataaaagaagatacaaggcacaagctcacttatataccataattaaggttgcaagagatgaagaccttaaggaacaaattgggaaggatatatattttgatcttgtggatcatgacaaagttcgcagtttccgtatccagaaacagacaccatttcaacagtttaaggaggaggtagcaaaagaatttggtgtacctgttcagttacagaggttctggatttgggcaaagagacaaaaccatacctatcgtcccaatcgcccccttacgcctcaagaggaattacaaccggttggacaaataagggaagcatctaataaggcaaacactgcagaactcaagctttttttggaagtagagcacctggatttacgtcctattcctcctcctgaaaaatcaaaagaagatattcttcttttcttcaagctttatgaccccgagaaggcagtattaagctatgctggcaggctgatggtgaaaagttccagtaagcctatggatataactggaaaactgaatgaaatggttggctttgctcctgatgaagaaatagaactttttgaggaaatcaagtttgaaccttgtgttatgtgcgaacacttggataagaaaacttcattcagattgtgtcaaattgaagatggagatatcatttgctttcagaaacctcttgttaacaaggagattgaatgcctctacccagctgtgccttcgtttcttgaatatgtccagaatagacagctggtccggtttcgtgctctggaaaaacctaaagaagatgagtttgttctggagttgtcgaagcagcacacttatgacgatgttgtggagaaagtggctgagaagcttggtcttgacgatccatccaaacttaggcttacatctcacaattgctattcccagcaacccaagcctcagcctatcaagtaccgtggagtagaccatttgtcagatatgttagttcattacaatcagacgtctgacattttgtattatgaagttctggacatccctcttccagaattacaaggtcttaaaaccttaaaagttgctttccatcatgccacgaaggaagaagtggtaatccacaatatcagactacctaaacaaagcacggtcggagatgttattaatgaacttaaaacaaaggtggagctttcgcatccagatgcagaactgagattgctcgaggtgttttaccacaagatctacaagattttcccatcaactgaaagaattgagaatataaatgaccagtactggactttacgagctgaggagattccggaagaagagaagaatattggtccaaatgatcgcttaattcttgtgtaccattttgccaaggagactggacaaaaccagcaagtgcaaaactttggcgagcccttcttcttggtaatccatgaaggtgaaactcttgaagaaatcaagaaccgtatccaaaagaagcttcatgtatctgatgaagattttgccaagtggaagtttgcgttcatgtcaatggggcgtccagagtacttgcaggacacagatgttgtttataatcgcttccagagaagagatgtctatggtgcttttgagcagtacctcgggttggagcatgctgacactactcctaagagggcttatgctgcaaaccagaaccgccatgcttacgagaagccggtaaaaatatacaattagccccaaaacatgaacacaaatgtcaggagacattgtggcagcaacgttggaccaaggcattgattggaccaatgcatcgaataagaagggaaagggcgagtgtgagggtgtgatgatgaccgtaggatgttgtagagaatctggtctgatagggttttgggttgcgcattgatagtggtgtgttttctatttttttcttttcaatctatccttattttatttcgtgcttcaatactttgtgttaatatctggaatgtgtgaagaccattgcacatgcaatttttattttccaaaaaaagaatatggaagcccttcgcttggattcgggagcgcggtttggctttcagagtttatagaataccgaaacatttgtaattttagagattgtggtttaagaagatttttg

SEQ ID NO: 31530 - protein, 1153 aa, Arabidopsis thaliana
  misc_feature (1)..(1153): Ceres Seq. ID no. 13587973
AIVFLPKSHFAFVFDFSLYRRSLFCVSRSHRLILLRPMTMMTPPPVDQPEDEEMLVPNSDLVDGPAQPMEVTQPETAASTVENQPAEDPPTLKFTWTIPNFSRQNTRKHYSDVFVVGGYKWRILIFPKGNNVDHLSMYLDVSDAASLPYGWSRYAQFSLAVVNQIHTRYTVRKETQHQFNARESDWGFTSFMPLSELYDPSRGYLVNDTVLVEAEVAVRKVLDYWSYDSKKETGFVGLKNQGATCYMNSLLQTLYHIPYFRKAVYHMPTTENDAPTASIPLALQSLFYKLQYNDTSVATKELTKSFGWDTYDSFMQHDVQELNRVLCEKLEDKMKGTVVEGTIQQLFEGHHMNYIECINVDFKSTRKESFYDLQLDVKGCKDVYASFDKYVEVERLEGDNKYHAEGHGLQDAKKGVLFIDFPPVLQLQLKRFEYDFMRDTMVKINDRYEFPLELDLDREDGKYLSPDADRSVRNLYTLHSVLVHSGGVHGGHYYAFIRPTLSDQWYKFDDERVTKEDLKRALEEQYGGEEELPQTNPGFNNNPPFKFTKYSNAYMLVYIRESDKDKIICNVDEKDIAEHLRVRLKKEQEEKEDKRRYKAQAHLYTIIKVARDEDLKEQIGKDIYFDLVDHDKVRSFRIQKQTPFQQFKEEVAKEFGVPVQLQRFWIWAKRQNHTYRPNRPLTPQEELQPVGQIREASNKANTAELKLFLEVEHLDLRPIPPPEKSKEDILLFFKLYDPEKAVLSYAGRLMVKSSSKPMDITGKLNEMVGFAPDEEIELFEEIKFEPCVMCEHLDKKTSFRLCQIEDGDIICFQKPLVNKEIECLYPAVPSFLEYVQNRQLVRFRALEKPKEDEFVLELSKQHTYDDVVEKVAEKLGLDDPSKLRLTSHNCYSQQPKPQPIKYRGVDHLSDMLVHYNQTSDILYYEVLDIPLPELQGLKTLKVAFHHATKEEVVIHNIRLPKQSTVGDVINELKTKVELSHPDAELRLLEVFYHKIYKIFPSTERIENINDQYWTLRAEEIPEEEKNIGPNDRLILVYHFAKETGQNQQVQNFGEPFFLVIHEGETLEEIKNRIQKKLHVSDEDFAKWKFAFMSMGRPEYLQDTDVVYNRFQRRDVYGAFEQYLGLEHADTTPKRAYAANQNRHAYEKPVKIYN

SEQ ID NO: 31531 - protein, 1116 aa, Arabidopsis thaliana
  misc_feature (1)..(1116): Ceres Seq. ID no. 13587974
MTMMTPPPVDQPEDEEMLVPNSDLVDGPAQPMEVTQPETAASTVENQPAEDPPTLKFTWTIPNFSRQNTRKHYSDVFVVGGYKWRILIFPKGNNVDHLSMYLDVSDAASLPYGWSRYAQFSLAVVNQIHTRYTVRKETQHQFNARESDWGFTSFMPLSELYDPSRGYLVNDTVLVEAEVAVRKVLDYWSYDSKKETGFVGLKNQGATCYMNSLLQTLYHIPYFRKAVYHMPTTENDAPTASIPLALQSLFYKLQYNDTSVATKELTKSFGWDTYDSFMQHDVQELNRVLCEKLEDKMKGTVVEGTIQQLFEGHHMNYIECINVDFKSTRKESFYDLQLDVKGCKDVYASFDKYVEVERLEGDNKYHAEGHGLQDAKKGVLFIDFPPVLQLQLKRFEYDFMRDTMVKINDRYEFPLELDLDREDGKYLSPDADRSVRNLYTLHSVLVHSGGVHGGHYYAFIRPTLSDQWYKFDDERVTKEDLKRALEEQYGGEEELPQTNPGFNNNPPFKFTKYSNAYMLVYIRESDKDKIICNVDEKDIAEHLRVRLKKEQEEKEDKRRYKAQAHLYTIIKVARDEDLKEQIGKDIYFDLVDHDKVRSFRIQKQTPFQQFKEEVAKEFGVPVQLQRFWIWAKRQNHTYRPNRPLTPQEELQPVGQIREASNKANTAELKLFLEVEHLDLRPIPPPEKSKEDILLFFKLYDPEKAVLSYAGRLMVKSSSKPMDITGKLNEMVGFAPDEEIELFEEIKFEPCVMCEHLDKKTSFRLCQIEDGDIICFQKPLVNKEIECLYPAVPSFLEYVQNRQLVRFRALEKPKEDEFVLELSKQHTYDDVVEKVAEKLGLDDPSKLRLTSHNCYSQQPKPQPIKYRGVDHLSDMLVHYNQTSDILYYEVLDIPLPELQGLKTLKVAFHHATKEEVVIHNIRLPKQSTVGDVINELKTKVELSHPDAELRLLEVFYHKIYKIFPSTERIENINDQYWTLRAEEIPEEEKNIGPNDRLILVYHFAKETGQNQQVQNFGEPFFLVIHEGETLEEIKNRIQKKLHVSDEDFAKWKFAFMSMGRPEYLQDTDVVYNRFQRRDVYGAFEQYLGLEHADTTPKRAYAANQNRHAYEKPVKIYN

SEQ ID NO: 31532 - protein, 1114 aa, Arabidopsis thaliana
  misc_feature (1)..(1114): Ceres Seq. ID no. 13587975
MMTPPPVDQPEDEEMLVPNSDLVDGPAQPMEVTQPETAASTVENQPAEDPPTLKFTWTIPNFSRQNTRKHYSDVFVVGGYKWRILIFPKGNNVDHLSMYLDVSDAASLPYGWSRYAQFSLAVVNQIHTRYTVRKETQHQFNARESDWGFTSFMPLSELYDPSRGYLVNDTVLVEAEVAVRKVLDYWSYDSKKETGFVGLKNQGATCYMNSLLQTLYHIPYFRKAVYHMPTTENDAPTASIPLALQSLFYKLQYNDTSVATKELTKSFGWDTYDSFMQHDVQELNRVLCEKLEDKMKGTVVEGTIQQLFEGHHMNYIECINVDFKSTRKESFYDLQLDVKGCKDVYASFDKYVEVERLEGDNKYHAEGHGLQDAKKGVLFIDFPPVLQLQLKRFEYDFMRDTMVKINDRYEFPLELDLDREDGKYLSPDADRSVRNLYTLHSVLVHSGGVHGGHYYAFIRPTLSDQWYKFDDERVTKEDLKRALEEQYGGEEELPQTNPGFNNNPPFKFTKYSNAYMLVYIRESDKDKIICNVDEKDIAEHLRVRLKKEQEEKEDKRRYKAQAHLYTIIKVARDEDLKEQIGKDIYFDLVDHDKVRSFRIQKQTPFQQFKEEVAKEFGVPVQLQRFWIWAKRQNHTYRPNRPLTPQEELQPVGQIREASNKANTAELKLFLEVEHLDLRPIPPPEKSKEDILLFFKLYDPEKAVLSYAGRLMVKSSSKPMDITGKLNEMVGFAPDEEIELFEEIKFEPCVMCEHLDKKTSFRLCQIEDGDIICFQKPLVNKEIECLYPAVPSFLEYVQNRQLVRFRALEKPKEDEFVLELSKQHTYDDVVEKVAEKLGLDDPSKLRLTSHNCYSQQPKPQPIKYRGVDHLSDMLVHYNQTSDILYYEVLDIPLPELQGLKTLKVAFHHATKEEVVIHNIRLPKQSTVGDVINELKTKVELSHPDAELRLLEVFYHKIYKIFPSTERIENINDQYWTLRAEEIPEEEKNIGPNDRLILVYHFAKETGQNQQVQNFGEPFFLVIHEGETLEEIKNRIQKKLHVSDEDFAKWKFAFMSMGRPEYLQDTDVVYNRFQRRDVYGAFEQYLGLEHADTTPKRAYAANQNRHAYEKPVKIYN

SEQ ID NO: 31533 - DNA, 1849 bp, Arabidopsis thaliana
  misc_feature (1)..(1849): Ceres Seq. ID no. 13587980
acagacaaacaaaaaaaggtttggttccaaaagctaaaaagcttccatctacattagagtctctctatttagcatttacacacaatcacacacacacacacacacacaccaaaatgatagcttacatagaaccatacttcttggataacgacgccgaggctgcctctgccgccaccgccgccggaaaatctacggatggtgtttctgagtcacttaacatccaaggagaaatcttatgtggtggagctgcggcggatatcgccgggagagattttggcggcatgaactgtgtgaagcctcttgctgtggtgagaccagtgggaccggaagatatcgccggagcggtgaaagcggctctgaggtcagataaactaacggtggcggcgcgtggaaacggccattctatcaacggtcaagccatggcggaaggaggactcgttgtcgatatgagtaccacggcggagaatcatttcgaggttggttatttatccggcggtgatgccacggcgtttgttgatgtctccggaggggcattatgggaagatgtattgaaacggtgcgtttcggagtacggtttggctccgaggtcttggactgattatcttgggttaacggtgggaggtacgttgtcaaatgccggcgttagtggtcaagcgttccgttacggaccacagacgtcaaatgtaacggagttggacgtcgttacgggaaatggtgacgtcgttacttgctcggagattgagaattcagagctattcttctctgttttaggtggtcttggtcagtttggtatcatcaccagagctagggttttgctacagccagctcctgatatggtgagatggataagagtagtatacaccgagttcgatgagttcactcaagacgccgagtggctagtaagtcagaagaacgagtcatcgttcgattacgtggaaggattcgtgtttgtcaacggtgctgacccggttaacggatggccaacagttcccctccacccggaccacgagtttgacccgacccgactaccacaatcttgcgggtcggttctttattgcctcgaactcggtcttcactacagagactccgattccaactcaaccattgacaagagggtggagagattgatcggacggctaagatttaatgaaggattaagattcgaggtagatctgccgtacgttgactttttactacgagtcaaacggtcagaagaaatcgcgaaggagaacggtacgtgggaaacgcctcacccttggctcaacctcttcgtgtcgaagcgagacatcggagatttcaatcggacggtgttcaaagaacttgtcaagaacggagtcaatggtccaatgcttgtgtacccactcttgcgaagcaggtgggatgatcggacgtccgtggttataccggaagaaggagagatattctacattgtggcattgcttcggttcgtgccgccgtgtgcgaaagtctcttcggtagagaaaatggtagctcaaaaccaagagatcgttcattggtgtgtcaaaaacggaattgattacaaattgtatcttcctcattacaagtctcaagaggaatggattcgccattttggaaaccgatggtcgagatttgttgataggaaagctatgtttgatcccatggctatactttcaccgggtcaaaagattttcaataggtctctttgacccctcatatttttactttttttacttttcttatttttacttttgtattcttgagttttgtggtctttatgtaattttttctgtatttttcttttttcccaagaaaaaaatcagctggttttttataaaaggtggcctacgagtcatgtccaattatgaat

SEQ ID NO: 31534 - protein, 561 aa, Arabidopsis thaliana
  misc_feature (1)..(561): Ceres Seq. ID no. 13587981
RQTKKGLVPKAKKLPSTLESLYLAFTHNHTHTHTHTKMIAYIEPYFLDNDAEAASAATAAGKSTDGVSESLNIQGEILCGGAAADIAGRDFGGMNCVKPLAVVRPVGPEDIAGAVKAALRSDKLTVAARGNGHSINGQAMAEGGLVVDMSTTAENHFEVGYLSGGDATAFVDVSGGALWEDVLKRCVSEYGLAPRSWTDYLGLTVGGTLSNAGVSGQAFRYGPQTSNVTELDVVTGNGDVVTCSEIENSELFFSVLGGLGQFGIITRARVLLQPAPDMVRWIRVVYTEFDEFTQDAEWLVSQKNESSFDYVEGFVFVNGADPVNGWPTVPLHPDHEFDPTRLPQSCGSVLYCLELGLHYRDSDSNSTIDKRVERLIGRLRFNEGLRFEVDLPYVDFLLRVKRSEEIAKENGTWETPHPWLNLFVSKRDIGDFNRTVFKELVKNGVNGPMLVYPLLRSRWDDRTSVVIPEEGEIFYIVALLRFVPPCAKVSSVEKMVAQNQEIVHWCVKNGIDYKLYLPHYKSQEEWIRHFGNRWSRFVDRKAMFDPMAILSPGQKIFNRSL

SEQ ID NO: 31535 - protein, 524 aa, Arabidopsis thaliana
  misc_feature (1)..(524): Ceres Seq. ID no. 13587982
MIAYIEPYFLDNDAEAASAATAAGKSTDGVSESLNIQGEILCGGAAADIAGRDFGGMNCVKPLAVVRPVGPEDIAGAVKAALRSDKLTVAARGNGHSINGQAMAEGGLVVDMSTTAENHFEVGYLSGGDATAFVDVSGGALWEDVLKRCVSEYGLAPRSWTDYLGLTVGGTLSNAGVSGQAFRYGPQTSNVTELDVVTGNGDVVTCSEIENSELFFSVLGGLGQFGIITRARVLLQPAPDMVRWIRVVYTEFDEFTQDAEWLVSQKNESSFDYVEGFVFVNGADPVNGWPTVPLHPDHEFDPTRLPQSCGSVLYCLELGLHYRDSDSNSTIDKRVERLIGRLRFNEGLRFEVDLPYVDFLLRVKRSEEIAKENGTWETPHPWLNLFVSKRDIGDFNRTVFKELVKNGVNGPMLVYPLLRSRWDDRTSVVIPEEGEIFYIVALLRFVPPCAKVSSVEKMVAQNQEIVHWCVKNGIDYKLYLPHYKSQEEWIRHFGNRWSRFVDRKAMFDPMAILSPGQKIFNRSL

SEQ ID NO: 31536 - protein, 468 aa, Arabidopsis thaliana
  misc_feature (1)..(468): Ceres Seq. ID no. 13587983
MNCVKPLAVVRPVGPEDIAGAVKAALRSDKLTVAARGNGHSINGQAMAEGGLVVDMSTTAENHFEVGYLSGGDATAFVDVSGGALWEDVLKRCVSEYGLAPRSWTDYLGLTVGGTLSNAGVSGQAFRYGPQTSNVTELDVVTGNGDVVTCSEIENSELFFSVLGGLGQFGIITRARVLLQPAPDMVRWIRVVYTEFDEFTQDAEWLVSQKNESSFDYVEGFVFVNGADPVNGWPTVPLHPDHEFDPTRLPQSCGSVLYCLELGLHYRDSDSNSTIDKRVERLIGRLRFNEGLRFEVDLPYVDFLLRVKRSEEIAKENGTWETPHPWLNLFVSKRDIGDFNRTVFKELVKNGVNGPMLVYPLLRSRWDDRTSVVIPEEGEIFYIVALLRFVPPCAKVSSVEKMVAQNQEIVHWCVKNGIDYKLYLPHYKSQEEWIRHFGNRWSRFVDRKAMFDPMAILSPGQKIFNRSL

SEQ ID NO: 31537 - DNA, 875 bp, Arabidopsis thaliana
  misc_feature (1)..(875): Ceres Seq. ID no. 13587997
atcctcatctacatttcaataaacacaaagagttgaaaacattaaatcgatatatcagaactaaaccggatctgaaaaatggcgaacgaccaagtgattcttcttgattactggccaagcatgttcgggatgaggacgaagatggctttggctgagaaaggagtcaagtatgagtacaaggaaacagatccatgggttaagactcctttactcatagagatgaacccgattcacaagaagattccggttctcatccacaacggtaaaccgatttgtgaatctcttattcagcttgagtacattgatgaggtttggtccgatgcatccccaatccttccctctgatccttaccagaagtctcgagctagattttgggctgaattcatcgacaaaaagttttacgacccatcatggaaggtatgggcaacaatgggcgaagaacatgcagcagtgaagaaggaattgttggaacatttcaagacacttgagacagagctcggagacaaaccttattacggtggtgaagtatttggatacctagacattgcattaatgggatactacagctggttcaaggccatggagaaatttggtgaattcagtatcgaaacagagtttcctatattgactacgtggaccaagaggtgtttggaaagagagagtgtggtcaaggcattggctgattctgataggatcattgagtatgtttatgtcctgaggaagaaatttggagcagcgtaaaaaaatggtttgggtttcaagaaggctgttattttctgtcttttataatgtttcatgtgaggtttgtaattgttatttctgtcgttttgttgaaagtatgataaaccgtaataacgaaatgtttactgtaccct

SEQ ID NO: 31538 - protein, 220 aa, Arabidopsis thaliana
  misc_feature (1)..(220): Ceres Seq. ID no. 13587998
MANDQVILLDYWPSMFGMRTKMALAEKGVKYEYKETDPWVKTPLLIEMNPIHKKIPVLIHNGKPICESLIQLEYIDEVWSDASPILPSDPYQKSRARFWAEFIDKKFYDPSWKVWATMGEEHAAVKKELLEHFKTLETELGDKPYYGGEVFGYLDIALMGYYSWFKAMEKFGEFSIETEFPILTTWTKRCLERESVVKALADSDRIIEYVYVLRKKFGAA

SEQ ID NO: 31539 - protein, 206 aa, Arabidopsis thaliana
  misc_feature (1)..(206): Ceres Seq. ID no. 13587999
MFGMRTKMALAEKGVKYEYKETDPWVKTPLLIEMNPIHKKIPVLIHNGKPICESLIQLEYIDEVWSDASPILPSDPYQKSRARFWAEFIDKKFYDPSWKVWATMGEEHAAVKKELLEHFKTLETELGDKPYYGGEVFGYLDIALMGYYSWFKAMEKFGEFSIETEFPILTTWTKRCLERESVVKALADSDRIIEYVYVLRKKFGAA

SEQ ID NO: 31540 - protein, 203 aa, Arabidopsis thaliana
  misc_feature (1)..(203): Ceres Seq. ID no. 13588000
MRTKMALAEKGVKYEYKETDPWVKTPLLIEMNPIHKKIPVLIHNGKPICESLIQLEYIDEVWSDASPILPSDPYQKSRARFWAEFIDKKFYDPSWKVWATMGEEHAAVKKELLEHFKTLETELGDKPYYGGEVFGYLDIALMGYYSWFKAMEKFGEFSIETEFPILTTWTKRCLERESVVKALADSDRIIEYVYVLRKKFGAA

SEQ ID NO: 31541 - DNA, 1456 bp, Arabidopsis thaliana
  misc_feature (1)..(1456): Ceres Seq. ID no. 13588005
atcttcaagtgtgatatattgtgagaagattgcagaagcgtgtccaacttggttccctctctctctgaaattactcaatcatggggatttgcttgagtgctcaggtcaaagctgagagctcaggagcgagtacgaagtatgacgccaaagatataggaagtcttgggagcaaggcttcgtctgtgtctgtaagaccaagccctcgaactgagggtgagatcttacagtctccaaatctcaagagttttagctttgctgagcttaaatcagcaaccaggaattttagaccagacagtgtgcttggtgaaggtggattcggttgtgttttcaaaggatggattgatgagaagtctctcactgcctcaagaccaggcacgggtttggttattgccgtcaaaaagcttaaccaagatggttggcaaggtcaccaggagtggctggctgaagtgaattaccttggtcagttttctcaccgtcaccttgtgaagctgattggttattgcctagaggatgagcaccgtcttcttgtttacgagttcatgcctcggggtagcttggagaatcatcttttcaggagaggtttgtacttccaaccgttatcttggaaacttcggttgaaagttgctcttggtgctgcaaagggacttgcttttcttcacagttccgagacaagagtgatataccgagatttcaagacttctaatatccttcttgactcggagtacaacgcaaagctttctgattttgggttggctaaggatgggccaataggtgataaaagtcatgtctctacacgagtcatgggtacacacggatatgcagctcctgaataccttgcaaccggtcatctaacaacaaagagtgatgtctatagcttcggggttgtccttctggagctgttgtctggtcgtcgagcagtggacaagaaccgcccatctggagagaggaaccttgtggagtgggctaaaccatacctcgtaaacaaaagaaagatattccgagtcattgataatcgtcttcaggaccagtactctatggaagaagcatgtaaagtggctactctgtctctgagatgtctcaccacagagattaagctgagaccaaacatgagcgaggttgtttcgcacctcgaacacattcagtctttaaatgctgctataggaggaaatatggataaaacagatagaagaatgcgtaggagaagtgacagtgttgtcagcaaaaaagtgaatgcaggttttgctcgacagactgctgttggcagtacagttgttgcttatcctcgcccatcagcctcgccactgtatgtttgaatagggttaaacacgtcctgggtctgtgttcagtgttcttggtaaaacatttgcaggacatgaagttcctatatcatgtcctgagaatggaatctggatgtacagtttttgtctctcttaatgtaagaattctgtttaaatcc

SEQ ID NO: 31542 - protein, 410 aa, Arabidopsis thaliana
  misc_feature (1)..(410): Ceres Seq. ID no. 13588006
MGICLSAQVKAESSGASTKYDAKDIGSLGSKASSVSVRPSPRTEGEILQSPNLKSFSFAELKSATRNFRPDSVLGEGGFGCVFKGWIDEKSLTASRPGTGLVIAVKKLNQDGWQGHQEWLAEVNYLGQFSHRHLVKLIGYCLEDEHRLLVYEFMPRGSLENHLFRRGLYFQPLSWKLRLKVALGAAKGLAFLHSSETRVIYRDFKTSNILLDSEYNAKLSDFGLAKDGPIGDKSHVSTRVMGTHGYAAPEYLATGHLTTKSDVYSFGVVLLELLSGRRAVDKNRPSGERNLVEWAKPYLVNKRKIFRVIDNRLQDQYSMEEACKVATLSLRCLTTEIKLRPNMSEVVSHLEHIQSLNAAIGGNMDKTDRRMRRRSDSVVSKKVNAGFARQTAVGSTVVAYPRPSASPLYV

SEQ ID NO: 31543 - protein, 257 aa, Arabidopsis thaliana
  misc_feature (1)..(257): Ceres Seq. ID no. 13588007
MPRGSLENHLFRRGLYFQPLSWKLRLKVALGAAKGLAFLHSSETRVIYRDFKTSNILLDSEYNAKLSDFGLAKDGPIGDKSHVSTRVMGTHGYAAPEYLATGHLTTKSDVYSFGVVLLELLSGRRAVDKNRPSGERNLVEWAKPYLVNKRKIFRVIDNRLQDQYSMEEACKVATLSLRCLTTEIKLRPNMSEVVSHLEHIQSLNAAIGGNMDKTDRRMRRRSDSVVSKKVNAGFARQTAVGSTVVAYPRPSASPLYV

SEQ ID NO: 31544 - DNA, 1812 bp, Arabidopsis thaliana
  misc_feature (1)..(1812): Ceres Seq. ID no. 13588016
atgaagcttctactgttgctgcttgccttctgctgtctatctctatcaaggtgtgaagaacaatccgtcccttatgattactcggcaacaatagagacattttttttttttttttttttaatgttcattaagacatggtcatttgaaattctgattacattttttgtcttggtgcagtgtctagagaacccttataaaccacagtacaatggagggatcatcgtgaatcctgacttgcaaaatggttcacaaggctggtcacagtttggaaacgccaaagtcgatttcagagaatttggaggcaataagtttgttgttgccacacaaaggaatcaatcttctgacagcatctcgcagaaggtgtacttggaaaaaggaattctctacactttctctgcttggttacaagtgagcataggaaaatctcccgtgagcgctgttttcaagaagaatggtgaatataagcatgccggttcggttgttgctgaatccaaatgttggtccatgctgaaaggtggtctcactgttgatgaatctggtcctgctgaactcttcttcgagagcgagaacacaatggttgagatttgggttgatagcgtctctttgcaacctttcacacaagaagagtggaactctcaccacgaacagagcattggcaaagtaagaaaaggtaccgtgagaatcagagtcatgaataacaaaggcgagacgatacctaatgcaaccatatccatagaacagaagaaactcggatacccattcgggtgcgcggtagaaaacaacatacttgggaatcaagcataccaaaactggttcactcaaagatttaccgtgacaactttcgggaacgagatgaaatggtacagcacagaaagaataagagggcaagaggattactcgacagctgacgcgatgttaagtttcttcaagagccacgggattgctgtacgtgggcacaatgttttatgggatgatcctaagtaccaacctggatgggtgaattctctgtctggtaacgacctctacaacgctgtgaaacgaagggtttactcggttgtctcgcgatacaaaggacagcttttgggttgggatgttgtgaatgagaatcttcatttctccttctttgagagcaagttcggtcctaaagcctcttataacacctacacaatggcccatgccgtcgatccaaggacaccaatgttcatgaatgaatataatacgttagagcaacctaaggatttaacttctagtccagcaaggtatttgggaaagcttagggagcttcaatctattcgggttgccggaaagattccgttagcgataggtcttgagtctcatttcagcactcctaacattccgtatatgagatcagctcttgatacttttggtgccactggtttgcctatttggctcactgagattgacgttgatgcgcctcccaatgtccgggccaactatttcgagcaagttctaagggaaggccatgcacatccgaaagtgaatggaatggtgatgtggacaggttattctccatcaggttgctaccgaatgtgcctcaccgatggaaactttaagaacctacccactggagacgtcgtggacaagcttttacgtgaatggggagggcttcgcagccaaaccacaggtgtcactgatgctaatgggttatttgaagctccactctttcatggtgactatgatctccgtatatcccatcctctcaccaattcaaaggcttcttacaactttacgttgacttccgatgacgactcctcacagaaacaaccatctctatatgtctttcgtgtttga

SEQ ID NO: 31545 - protein, 603 aa, Arabidopsis thaliana
  misc_feature (1)..(603): Ceres Seq. ID no. 13588017
MKLLLLLLAFCCLSLSRCEEQSVPYDYSATIETFFFFFFLMFIKTWSFEILITFFVLVQCLENPYKPQYNGGIIVNPDLQNGSQGWSQFGNAKVDFREFGGNKFVVATQRNQSSDSISQKVYLEKGILYTFSAWLQVSIGKSPVSAVFKKNGEYKHAGSVVAESKCWSMLKGGLTVDESGPAELFFESENTMVEIWVDSVSLQPFTQEEWNSHHEQSIGKVRKGTVRIRVMNNKGETIPNATISIEQKKLGYPFGCAVENNILGNQAYQNWFTQRFTVTTFGNEMKWYSTERIRGQEDYSTADAMLSFFKSHGIAVRGHNVLWDDPKYQPGWVNSLSGNDLYNAVKRRVYSVVSRYKGQLLGWDVVNENLHFSFFESKFGPKASYNTYTMAHAVDPRTPMFMNEYNTLEQPKDLTSSPARYLGKLRELQSIRVAGKIPLAIGLESHFSTPNIPYMRSALDTFGATGLPIWLTEIDVDAPPNVRANYFEQVLREGHAHPKVNGMVMWTGYSPSGCYRMCLTDGNFKNLPTGDVVDKLLREWGGLRSQTTGVTDANGLFEAPLFHGDYDLRISHPLTNSKASYNFTLTSDDDSSQKQPSLYVFRV

SEQ ID NO: 31546 - protein, 563 aa, Arabidopsis thaliana
  misc_feature (1)..(563): Ceres Seq. ID no. 13588018
MFIKTWSFEILITFFVLVQCLENPYKPQYNGGIIVNPDLQNGSQGWSQFGNAKVDFREFGGNKFVVATQRNQSSDSISQKVYLEKGILYTFSAWLQVSIGKSPVSAVFKKNGEYKHAGSVVAESKCWSMLKGGLTVDESGPAELFFESENTMVEIWVDSVSLQPFTQEEWNSHHEQSIGKVRKGTVRIRVMNNKGETIPNATISIEQKKLGYPFGCAVENNILGNQAYQNWFTQRFTVTTFGNEMKWYSTERIRGQEDYSTADAMLSFFKSHGIAVRGHNVLWDDPKYQPGWVNSLSGNDLYNAVKRRVYSVVSRYKGQLLGWDVVNENLHFSFFESKFGPKASYNTYTMAHAVDPRTPMFMNEYNTLEQPKDLTSSPARYLGKLRELQSIRVAGKIPLAIGLESHFSTPNIPYMRSALDTFGATGLPIWLTEIDVDAPPNVRANYFEQVLREGHAHPKVNGMVMWTGYSPSGCYRMCLTDGNFKNLPTGDVVDKLLREWGGLRSQTTGVTDANGLFEAPLFHGDYDLRISHPLTNSKASYNFTLTSDDDSSQKQPSLYVFRV

SEQ ID NO: 31547 - protein, 435 aa, Arabidopsis thaliana
  misc_feature (1)..(435): Ceres Seq. ID no. 13588019
MLKGGLTVDESGPAELFFESENTMVEIWVDSVSLQPFTQEEWNSHHEQSIGKVRKGTVRIRVMNNKGETIPNATISIEQKKLGYPFGCAVENNILGNQAYQNWFTQRFTVTTFGNEMKWYSTERIRGQEDYSTADAMLSFFKSHGIAVRGHNVLWDDPKYQPGWVNSLSGNDLYNAVKRRVYSVVSRYKGQLLGWDVVNENLHFSFFESKFGPKASYNTYTMAHAVDPRTPMFMNEYNTLEQPKDLTSSPARYLGKLRELQSIRVAGKIPLAIGLESHFSTPNIPYMRSALDTFGATGLPIWLTEIDVDAPPNVRANYFEQVLREGHAHPKVNGMVMWTGYSPSGCYRMCLTDGNFKNLPTGDVVDKLLREWGGLRSQTTGVTDANGLFEAPLFHGDYDLRISHPLTNSKASYNFTLTSDDDSSQKQPSLYVFRV

SEQ ID NO: 31548 - DNA, 1481 bp, Arabidopsis thaliana
  misc_feature (1)..(1481): Ceres Seq. ID no. 13588020
atcttctcgactctgctgcgttgctttatcaactgaggaattttgaatttcatatctccaaagtaatctcttttccaaggaagttcagtaaaaatcttaaaacccccgatcagagtaatccggggacctatctccgccgttgatttcagtctgagggtttctccgatttcagttcgatctgtgtccgggattctctctgtgttgctttctcattgcgtttacgattcttcttcccctttcaagggttttttttttctccgctataagcttcaatccttagtccactgggattcttgaacacctcccggagaatttaggagggaattagctcttctccagatcttgcttagctcttgtacagaatggcggatttgttacccatttacctcattattttggcatttctatgcactgtcggagccattgctttggctttattccatatctacaagcacctattgaactatacggaacccatttatcagagatatattgtgcgcattgtcttcatggtcccggtttatgccttgatgtcattcttggctctcgttttgcccaagagctctatatattttaactctatccgtgaagtgcgttttattagacgatgcaagcaaggttgtctgcaatttgttattctaaagccaatcctagttgctgtcacacttgtgctttatgcaaaagggaaatacaaggatggaaattttagccctgatcaatcctatctctatcttaccatcatctatacaatatcatacactgtagctctgtacgcgctggtcctcttttatgtggcatgcaaagatctgcttcagccattcaatccagtcccaaaatttgtgattataaagtctgttgtctttctaacctattggcagggtgttctagttttcctttttgctaaatctggatttataagggatgaagaagaagcagccctcttccaaaattttataatatgtgtggaaatgcttattgctgcagctgctcatttctatgcatttccgtacaaggaatatgcagaggccaatgttggaggagctcgcagtttctcaggaagtctggcacatgctcttatgctaaacgatttctaccatgatactgttcaccagtttgcaccaacatatcacgattatgtgctctataatcataatgatgggggtgaggaagggacaaggaagtaccgagcacgaacatttgtgccaactggtcaggaaatggatgctgttagaaagaacaaacacatgtttggaaacaagatagatggtgtttcggtctccagtcaatcttcagaaacaagcacacccaaaacctctggtgtaacttatgatcctgcacgccctgagagcatgaaatcttccttgctggtagatgcctcggactctgtttccacaatgtatgacatgtcgctcattgacattgatatatcgagctaccctagcaaggtaccttctgcaaatataagtggaggacctaaatag

SEQ ID NO: 31549 - protein, 372 aa, Arabidopsis thaliana
  misc_feature (1)..(372): Ceres Seq. ID no. 13588021
MADLLPIYLIILAFLCTVGAIALALFHIYKHLLNYTEPIYQRYIVRIVFMVPVYALMSFLALVLPKSSIYFNSIREVRFIRRCKQGCLQFVILKPILVAVTLVLYAKGKYKDGNFSPDQSYLYLTIIYTISYTVALYALVLFYVACKDLLQPFNPVPKFVIIKSVVFLTYWQGVLVFLFAKSGFIRDEEEAALFQNFIICVEMLIAAAAHFYAFPYKEYAEANVGGARSFSGSLAHALMLNDFYHDTVHQFAPTYHDYVLYNHNDGGEEGTRKYRARTFVPTGQEMDAVRKNKHMFGNKIDGVSVSSQSSETSTPKTSGVTYDPARPESMKSSLLVDASDSVSTMYDMSLIDIDISSYPSKVPSANISGGPK

SEQ ID NO: 31550 - protein, 323 aa, Arabidopsis thaliana
  misc_feature (1)..(323): Ceres Seq. ID no. 13588022
MVPVYALMSFLALVLPKSSIYFNSIREVRFIRRCKQGCLQFVILKPILVAVTLVLYAKGKYKDGNFSPDQSYLYLTIIYTISYTVALYALVLFYVACKDLLQPFNPVPKFVIIKSVVFLTYWQGVLVFLFAKSGFIRDEEEAALFQNFIICVEMLIAAAAHFYAFPYKEYAEANVGGARSFSGSLAHALMLNDFYHDTVHQFAPTYHDYVLYNHNDGGEEGTRKYRARTFVPTGQEMDAVRKNKHMFGNKIDGVSVSSQSSETSTPKTSGVTYDPARPESMKSSLLVDASDSVSTMYDMSLIDIDISSYPSKVPSANISGGPK

SEQ ID NO: 31551 - protein, 316 aa, Arabidopsis thaliana
  misc_feature (1)..(316): Ceres Seq. ID no. 13588023
MSFLALVLPKSSIYFNSIREVRFIRRCKQGCLQFVILKPILVAVTLVLYAKGKYKDGNFSPDQSYLYLTIIYTISYTVALYALVLFYVACKDLLQPFNPVPKFVIIKSVVFLTYWQGVLVFLFAKSGFIRDEEEAALFQNFIICVEMLIAAAAHFYAFPYKEYAEANVGGARSFSGSLAHALMLNDFYHDTVHQFAPTYHDYVLYNHNDGGEEGTRKYRARTFVPTGQEMDAVRKNKHMFGNKIDGVSVSSQSSETSTPKTSGVTYDPARPESMKSSLLVDASDSVSTMYDMSLIDIDISSYPSKVPSANISGGPK

SEQ ID NO: 31552 - DNA, 1138 bp, Arabidopsis thaliana
  misc_feature (1)..(1138): Ceres Seq. ID no. 13588057
gaccaaagtttctccaatggctactctctttctctactctaacacattttccttcttctttattacactcgtgtcgttagctcttctaattctccggcaaccctctagggcggcgagttgtacagctcggccggtgatttttaactttggagattctaattcagatacaggaggacttgttgctggacttggttaccccattggcttcccaaatggacgcttatttttccggcgatctaccggtcgtttgtccgacggacgtcttctcatcgatttcctatgtcagagtttgaatacaagtcttttgaggccatacttagattcattgggtagaacaaggtttcaaaatggtgcaaattttgcaattgctggatcctcaactcttcccaaaaacgtccctttctcgcttaacattcaggtcaagcagttcagccatttcaaatcccgatcactcgagctcgcttctagttcaaattcattaaagggcatgttcataagcaacaatggattcaaaaacgcgttgtacatgatcgatattggacagaacgacattgcgcgttcattcgctagaggcaactcgtattctcagacggttaagttgattccacaaattattacggaaataaaaagcagcataaagagattgtatgatgaaggaggaaggagattctggattcacaacactggtccattgggttgtctacctcaaaaactttctatggttaagagcaaagatctcgaccagcacggttgcttagtcagttacaactcggcagcaactctgtttaaccaaggattggatcatatgtgtgaggagctgaggaccgaactacgagatgccaccataatctatattgacatatacgctatcaaatacagtcttattgcaaactccaaccaatacggttttaagagtccgttgatggcgtgttgtggatacggagggactccatacaactacaatgtgaagataacatgtgggcacaaaggctctaatgtatgtgaggaagggtcgcgtttcataagctgggatgggattcattacaccgagacagctaatgccattgtagccatgaaagttctttcaatgcattactctaagccaccaactccgttccatttcttctgccgtcgctaa

SEQ ID NO: 31553 - protein, 378 aa, Arabidopsis thaliana
  misc_feature (1)..(378): Ceres Seq. ID no. 13588058
TKVSPMATLFLYSNTFSFFFITLVSLALLILRQPSRAASCTARPVIFNFGDSNSDTGGLVAGLGYPIGFPNGRLFFRRSTGRLSDGRLLIDFLCQSLNTSLLRPYLDSLGRTRFQNGANFAIAGSSTLPKNVPFSLNIQVKQFSHFKSRSLELASSSNSLKGMFISNNGFKNALYMIDIGQNDIARSFARGNSYSQTVKLIPQIITEIKSSIKRLYDEGGRRFWIHNTGPLGCLPQKLSMVKSKDLDQHGCLVSYNSAATLFNQGLDHMCEELRTELRDATIIYIDIYAIKYSLIANSNQYGFKSPLMACCGYGGTPYNYNVKITCGHKGSNVCEEGSRFISWDGIHYTETANAIVAMKVLSMHYSKPPTPFHFFCRR

SEQ ID NO: 31554 - protein, 373 aa, Arabidopsis thaliana
  misc_feature (1)..(373): Ceres Seq. ID no. 13588059
MATLFLYSNTFSFFFITLVSLALLILRQPSRAASCTARPVIFNFGDSNSDTGGLVAGLGYPIGFPNGRLFFRRSTGRLSDGRLLIDFLCQSLNTSLLRPYLDSLGRTRFQNGANFAIAGSSTLPKNVPFSLNIQVKQFSHFKSRSLELASSSNSLKGMFISNNGFKNALYMIDIGQNDIARSFARGNSYSQTVKLIPQIITEIKSSIKRLYDEGGRRFWIHNTGPLGCLPQKLSMVKSKDLDQHGCLVSYNSAATLFNQGLDHMCEELRTELRDATIIYIDIYAIKYSLIANSNQYGFKSPLMACCGYGGTPYNYNVKITCGHKGSNVCEEGSRFISWDGIHYTETANAIVAMKVLSMHYSKPPTPFHFFCRR

SEQ ID NO: 31555 - protein, 216 aa, Arabidopsis thaliana
  misc_feature (1)..(216): Ceres Seq. ID no. 13588060
MFISNNGFKNALYMIDIGQNDIARSFARGNSYSQTVKLIPQIITEIKSSIKRLYDEGGRRFWIHNTGPLGCLPQKLSMVKSKDLDQHGCLVSYNSAATLFNQGLDHMCEELRTELRDATIIYIDIYAIKYSLIANSNQYGFKSPLMACCGYGGTPYNYNVKITCGHKGSNVCEEGSRFISWDGIHYTETANAIVAMKVLSMHYSKPPTPFHFFCRR

SEQ ID NO: 31556 - DNA, 1109 bp, Arabidopsis thaliana
  misc_feature (1)..(1109): Ceres Seq. ID no. 13588070
actttcattttattcgtcgtcagtttcatcttgttgcttcggagcgagcgagaattatcgtcggagaatttatcgtctctctctctgaaaattctgatcggtgaagaatcgtcggatcgaaagtttcataagctttccatcaactagcagtatctgccaatatcacagacagataattcgtaatgggagacgtatatttcaaccatttcgctcagcaactgcagatgtctgaccaagagaagggtgaaatgtcaagacattcacaccctcattcaatcaatgaagaatctgagtcgtcaactctggaaagggtagcagcagagtcattaacaaacaaagtccttgatagaggactaatggagtatggatgtccacattacagaagaaggtgttgcattagagctccttgctgtaatgagatctttggttgccatcactgtcattatgaggcgaagaacaacataaatgtagatcagaagcagaggcatgatattcctcgccaccaagttgaacaggttatttgtttactttgtggtactgaacaagaggtgggccaaatttgtatccactgtggagtgtgcatggggaagtacttctgtaaagtctgcaagctctacgatgatgatacgtctaaaaaacagtaccactgcgatgggtgtggaatttgcagaatcggaggacgtgaaaatttctttcactgttacaagtgtggctgttgttattcaatcctcctcaagaacggtcacccttgtgtcgaaggagcaatgcatcacgactgccccatttgctttgagtttctgtttgaatcacggaacgatgtgacggttttaccatgtggacacacaattcatcagaagtgcttggaggaaatgagagatcattaccaatatgcgtgcccactttgctcaaaatctgtatgcgacatgtcaaaagtgtgggagaagtttgacatggagattgcggctacaccaatgccagaaccataccagaacagaatggttcagattctctgcaacgactgtgggaagaaagcagaggtacagtaccatgtggtggctcagaaatgcccaaactgcaaatcatacaacactcgccaaaccagaggctga

SEQ ID NO: 31557 - protein, 308 aa, Arabidopsis thaliana
  misc_feature (1)..(308): Ceres Seq. ID no. 13588071
MGDVYFNHFAQQLQMSDQEKGEMSRHSHPHSINEESESSTLERVAAESLTNKVLDRGLMEYGCPHYRRRCCIRAPCCNEIFGCHHCHYEAKNNINVDQKQRHDIPRHQVEQVICLLCGTEQEVGQICIHCGVCMGKYFCKVCKLYDDDTSKKQYHCDGCGICRIGGRENFFHCYKCGCCYSILLKNGHPCVEGAMHHDCPICFEFLFESRNDVTVLPCGHTIHQKCLEEMRDHYQYACPLCSKSVCDMSKVWEKFDMEIAATPMPEPYQNRMVQILCNDCGKKAEVQYHVVAQKCPNCKSYNTRQTRG

SEQ ID NO: 31558 - protein, 294 aa, Arabidopsis thaliana
  misc_feature (1)..(294): Ceres Seq. ID no. 13588072
MSDQEKGEMSRHSHPHSINEESESSTLERVAAESLTNKVLDRGLMEYGCPHYRRRCCIRAPCCNEIFGCHHCHYEAKNNINVDQKQRHDIPRHQVEQVICLLCGTEQEVGQICIHCGVCMGKYFCKVCKLYDDDTSKKQYHCDGCGICRIGGRENFFHCYKCGCCYSILLKNGHPCVEGAMHHDCPICFEFLFESRNDVTVLPCGHTIHQKCLEEMRDHYQYACPLCSKSVCDMSKVWEKFDMEIAATPMPEPYQNRMVQILCNDCGKKAEVQYHVVAQKCPNCKSYNTRQTRG

SEQ ID NO: 31559 - protein, 286 aa, Arabidopsis thaliana
  misc_feature (1)..(286): Ceres Seq. ID no. 13588073
MSRHSHPHSINEESESSTLERVAAESLTNKVLDRGLMEYGCPHYRRRCCIRAPCCNEIFGCHHCHYEAKNNINVDQKQRHDIPRHQVEQVICLLCGTEQEVGQICIHCGVCMGKYFCKVCKLYDDDTSKKQYHCDGCGICRIGGRENFFHCYKCGCCYSILLKNGHPCVEGAMHHDCPICFEFLFESRNDVTVLPCGHTIHQKCLEEMRDHYQYACPLCSKSVCDMSKVWEKFDMEIAATPMPEPYQNRMVQILCNDCGKKAEVQYHVVAQKCPNCKSYNTRQTRG

SEQ ID NO: 31560 - DNA, 642 bp, Arabidopsis thaliana
  misc_feature (1)..(642): Ceres Seq. ID no. 13588078
gaattcctttcgcttaccagtctcttgtcttctcaggttgttagagatacatagatagaaatatgagctggaccggaggagattggctatgtggtgcgtgtcagcacgcaaacttcaagaaaagagaatcatgtcaaaaatgcggataccccaaatttggaggggttgatgtgtcaacgtacttgtacaacaggaccgaagttatggctggtgattggtattgtggtgcattgaattgtgggagccacaattacgcgagccgaacaagttgttaccgatgtggaatgatcaaagtcgagtatacggaacagtactatggagctcaaatggttgcttacgggaatgatggcgcagcttgtcctcccggatggaaaactggcgattgggtttgtcctagggtgggatgtggggttcataactacgcaagcagggcagaatgcttcaaatgcaagacaacaagagattatggtggcgtctaaatggacgagaaagagctaatgaagaatctcttgttttaattatacctttcaacaagtgtttctactttctaacatgcatgacgctttcttacgttgacttgaaatcaattgaaagtttagactcgtgcaaattaacgtaagtacaaatagttgcaaacaaaat

SEQ ID NO: 31561 - protein, 138 aa, Arabidopsis thaliana
  misc_feature (1)..(138): Ceres Seq. ID no. 13588079
MSWTGGDWLCGACQHANFKKRESCQKCGYPKFGGVDVSTYLYNRTEVMAGDWYCGALNCGSHNYASRTSCYRCGMIKVEYTEQYYGAQMVAYGNDGAACPPGWKTGDWVCPRVGCGVHNYASRAECFKCKTTRDYGGV

SEQ ID NO: 31562 - protein, 91 aa, Arabidopsis thaliana
  misc_feature (1)..(91): Ceres Seq. ID no. 13588080
MAGDWYCGALNCGSHNYASRTSCYRCGMIKVEYTEQYYGAQMVAYGNDGAACPPGWKTGDWVCPRVGCGVHNYASRAECFKCKTTRDYGGV

SEQ ID NO: 31563 - DNA, 1653 bp, Arabidopsis thaliana
  misc_feature (1)..(1653): Ceres Seq. ID no. 13588110
cagcttgcaagttctctctgaaccatagaactccaagcttgaactgtactctactcgtcgtttatatcttactcttttgtttcctcttaccagaaaaaataaataaacagcaattttttcatttttcgactcaaatcatgcaaaccatttcgcctgcgttctcgtgcgatctcaaatccgtaattcaaccgaatctaacggctaagaaagcgcgttactctcacgtaaatggaaagcgcgtgtctgttcgttgcagttacaggtctgagtcgtttagcttccctaacggtgttggctcaagccgagccgattggcaaagctcatgcgccatcttagccagtaaagtagtttcggctgagaattcaagctccgtcgccgtcgttaacggacacagtaacggctccgttgatttaagccttgttccgtcaaagtcgcagcacaacggaaagcctggattgattcagccgttaacgataacagatctatctcccgcgccgtctcatggatctactcttcgtgtcgcgtatcaaggagttccgggagcgtactccgaagcggccgccggaaaagcttacccaaactccgaagctattccttgtgatcaattcgacgttgcgtttcaggcggtggagctttggatcgccgatcgtgctgttctcccagttgagaactctctcggtggttcgattcatagaaattacgatcttctcctccgtcaccgtctccacatcgtcggagaagttcagatcccggttcaccactgtctcttagctcttcccggagttcgtacggattgcatcacgcgagtgatttcgcatcctcaagctctggctcagacggaaggatcgctcaacaaactcactccaaaagcagcgattgaagcgtttcacgacacagccgcggcggcggaatacatcgctgctaacaacctccacgacacggcggcggtagcgagcgcaagagcagctgagctctacggacttcagattctcgccgacgggatccaagacgacgcaggaaacgtcacgcgcttccttatgttggcgcgtgatccgatcattccccgtaccgatcgtccgtttaaaacgagtatcgttttcgcagctcaagaacataaaggaactagcgttttattcaaagtgctttccgcgtttgcgtttcgaaacattagtttgacgaaaatcgaatcgcggccgcatcagaattgtcccgttagagtcgtaggcgacgaaaacgttggaacatcgaagcactttgagtacacattctacgtcgacttcgaagcgtcgatggcggaggcgcgtgcacaaaacgcgttagcggaggtgcaagagtacacgtcattcctcagggtgctgggaagttacccaatggatatgacgccatggtccacgttacctagcgaagacgtatgacacaattaaaaaatttatctgaattttaaataacattatggtaaaattatcataagtaaaatacatggaaactaaagtagaatttgtagaactcgttttgcatgtgaagtgggaggataatattattttatttctcttaaaccaaatattttgtgtgtatgtatttgctactattggaacaagaccggtttgtagtttggttctgatgattacaattgaagatatttcttaagctaag

SEQ ID NO: 31564 - protein, 470 aa, Arabidopsis thaliana
  misc_feature (1)..(470): Ceres Seq. ID no. 15220851
ACKFSLNHRTPSLNCTLLVVYILLFCFLLPEKINKQQFFHFSTQIMQTISPAFSCDLKSVIQPNLTAKKARYSHVNGKRVSVRCSYRSESFSFPNGVGSSRADWQSSCAILASKVVSAENSSSVAVVNGHSNGSVDLSLVPSKSQHNGKPGLIQPLTITDLSPAPSHGSTLRVAYQGVPGAYSEAAAGKAYPNSEAIPCDQFDVAFQAVELWIADRAVLPVENSLGGSIHRNYDLLLRHRLHIVGEVQIPVHHCLLALPGVRTDCITRVISHPQALAQTEGSLNKLTPKAAIEAFHDTAAAAEYIAANNLHDTAAVASARAAELYGLQILADGIQDDAGNVTRFLMLARDPIIPRTDRPFKTSIVFAAQEHKGTSVLFKVLSAFAFRNISLTKIESRPHQNCPVRVVGDENVGTSKHFEYTFYVDFEASMAEARAQNALAEVQEYTSFLRVLGSYPMDMTPWSTLPSEDV

SEQ ID NO: 31565 - protein, 425 aa, Arabidopsis thaliana
  misc_feature (1)..(425): Ceres Seq. ID no. 15220852
MQTISPAFSCDLKSVIQPNLTAKKARYSHVNGKRVSVRCSYRSESFSFPNGVGSSRADWQSSCAILASKVVSAENSSSVAVVNGHSNGSVDLSLVPSKSQHNGKPGLIQPLTITDLSPAPSHGSTLRVAYQGVPGAYSEAAAGKAYPNSEAIPCDQFDVAFQAVELWIADRAVLPVENSLGGSIHRNYDLLLRHRLHIVGEVQIPVHHCLLALPGVRTDCITRVISHPQALAQTEGSLNKLTPKAAIEAFHDTAAAAEYIAANNLHDTAAVASARAAELYGLQILADGIQDDAGNVTRFLMLARDPIIPRTDRPFKTSIVFAAQEHKGTSVLFKVLSAFAFRNISLTKIESRPHQNCPVRVVGDENVGTSKHFEYTFYVDFEASMAEARAQNALAEVQEYTSFLRVLGSYPMDMTPWSTLPSEDV
